United States Patent Application Publication US 2005/0181375 A1 - sequence listing, part 4

SEQ ID NO: 2896 - DNA, 185035 bp, Homo Sapiens
tttggaaaagcagaaccttttttcgtggttcaagaaatcaaagtcttcccgggaggtctttctgtaaatccagagctgcagatgtttgaccgtgttcagagaggggcccttgtgctgggtgaagtggatggggcacagcaggcaatgggtgaaaagcaggacaacctggggccctgggaggaccagggagggcccatgtctttgactgttcatcagccggctgacttcctgtccgcctgtcgtctgctctgcccatccatccgtagtccttccgcctgtctctgctggttgccgctgtgctactcagctgtgtctgtctgtccgcctgactgtctgctctccttcaggatgccttccgtgccttccatcaagatctcaattttgtgcgcaagttcctacagcccctgttgattggagagctggctccggaagaacccagccaggatggacccctgaatgtgagccagagccctaggagaggctcagcccctgagggagggggatggctggagggctgggagacattgccacatggccaggagccgctccctcggcattcgcccaaggggatgcagagccaggggtgagcctgccctcccctcccagggggcaggcagttgaaagtgaagctgtagggatgccctgagaagtccagggctccagatctggtttagccaggcactcgtttggatcccgaggcaagctccctccctgttgtcgcccagtgtccccatcaaaaggaggattttgatgaactgatttctctcctggctgtagcgtcttacccaccccataccttttgggagggagaggaggcttcaccaccagccagtgctccagctcacaccccgggctgggtactcttgtcacttcattcctctttgcccacaccccttgggcctggcgatgggaggagcggctggggctccaggagaatgggggtggggaggaatttcttccttggctgatcggcccctctgctatggcaggcgcagctggtcgaggacttccgagccctgcaccaggcagccgaggacatgaagctgtttgatgccagtcccaccttctttgctttcctactgggccacatcctggccatggaggtgctggcctggctccttatctacctcctgggtcctggctgggtgcccagtgccctggccgccttcatcctggccatctctcaggtgaccccagttctgtgttgcagccaccttaactgcccaacagacgtgggcccccatgcatctgggcattgtgaacatatttgctaaatgaatgaatggacctatgaaaggatgaatggatgaataaacagatgaatgagtgaacagtctgaaggcccatcaggcatgtctgtgggtcaagctgcattccagatgagccaagaagttccttcttgaacagattccgatcaagcacagggccactgagccagaggctgctgccctgcagcttcatgacacttacgagcccctccacctccctgggactcagttctcatctgtaaaaagaggacactggcccacaagggtcttgaaatggagcattagcacgggggtaccctgcaagctgaaaggattcactggggccccaggccctggcgggctccgtccttcccaacagcttctgaccctgcctctctccccaggctcagtcctggtgtctgcagcatgacctgggccatgcctccatcttcaagaagtcctggtggaaccacgtggcccagaagttcgtgatggggcagctaaaggtgagggtggggtgggtggtcagccaggtgctgggtggcgctgggtctgcccaagtgtgtgggcacagtcgggggcacagcctgccctgagagccccctcctcctccacagggcttctccgcccactggtggaacttccgccacttccagcaccacgccaagcccaacatcttccacaaagacccagacgtgacggtggcgcccgtcttcctcctgggggagtcatccgtcgaggtgggtggggagggacgtggacaacctctggctgggcctgcagctgagggggagctaatgcactgggtccccactctgcccctgacctagcccctgatctggcctccactctggctgggccaagctctgcccccgtgtctttccttcccacctcccaacctgctggggacgaccagcccgcttgctagaatctagagttgcctttgacccttggccccagccagccccgtgaccttgcccgggagaaggaggtggcctggagagctgctgtctccagccgccgcctgtctccacagtatggcaagaagaaacgcagatacctaccctacaaccagcagcacctgtacttcttcctgagtgagtgtccatctgtccttctggggtgggggagtgcctgggcctgcactgtcctccctgctgtcctggaccactcccagccacttcctggggcggggcacgtctgtcaggtctccctggtcatggcatcctcccagcctctgcagtctgtacacactctcccagcagcatgcctttgccccagctgtctcccgtgcctgggacaccttgcagccacgggccatcacagccctgctgggagcttccccaagccccacgtagaatttcttcttgccctcactagagtggtccggagccctagagtctttgggcagttgttggggcggacagagtgaggactcaagtctggccctgacttgcggtgaagggtggtgggaggtggtggggtaagggcagcctggggaggcttggacacagaattgggggtgatatggggtcattcagctggatgtgaccagcaccaacgtcccaggggcattcctggagtaacagagcccctcactctggcgcccactcaccttggcagcccagccccactcctgaacactctcatgccccttcttgcagtcggcccgccgctgctcaccctggtgaactttgaagtggaaaatctggcgtacatgctggtgtgcatgcagtgggcggtgagtggggttgcccaggaccccgggcatacggctgccgtggcaggaggtggtgcctcgggggacagtacctgcccatgaaggcaaacagggtgcacatgtgcgtgcaacagtgtggctcacatgtatgcgtgcaacagtgtggctcacatgtgtgcgcgcagcaggagagcgagtgtgcccgtgactgtacgtgtggtgggggggggttgaggaacagggggggtgtgggtctctctcggtgagggtgtcttcccaggaggagttgctgggccgactctgccaggcatctgtgtccctggcagggtcttccccaacacaccctgcatgacaccttcgtcactaaaatcagcctcgtgagctggcagggcaaggaccctgttcctttactcagctgagaaaaccagagagggtggtggcctgtcctgggctctgaggcaaatcaggcagaagggttggatgcctgaggtcctcctcccacccaccaggcctccagacctccgggcacctggagacctctcggtatcgcctctgccctcctctgcaggatttgctctgggccgccagcttctatgcccgcttcttcttatcctacctccccttctacggcgtccctggggtgctgctcttctttgttgctgtcaggtatggcagggagtggcgaggtcacacacaggcgacaggtgacccccactgcagccccccaccagagcttcccttttcccgtctgcagaatggggccagtggtactgcctccctggcttgctggtggaatcacataaacacaagcgtggcaggagcccagggtcggtgggtttagggagcgtggcctggcttgtaagtggcccggtgggtgtcggagctgctctggactcagcctcacagtggacactgctccattcagattctttaaacactggcaagggggcgatggccacaatcctattgtacagataaggaagtcaaggccacttggggacagctgctctccagcctccactcagggtgcctaagtggtgagctggacctagggcagtgcccgagcctccccacagggtcctggaaagccactggttcgtgtggatcacacagatgaaccacatccccaaggagatcggccacgagaagcaccgggactgggtcagctctcaggtgggcagcaggggtggggcccatcctgggtggggtggggggtcccagctaggagccagatggcaaagcagggatgaggccctgacggggctgccaggtgggggatggtgccgtggggtcagggatctgcaacggcctcctcacatgtgccccgccggcttccggcagctggcagccacctgcaacgtggagccctcacttttcaccaactggttcagcgggcacctcaacttccagatcgagcaccagtgagtgtgggtgctgggggccagtgggaggtggggagggggtcctgggaggggatcctgggaggggacccgtgggtggggcctctctctggaatctcccacttcaggtgccagcatacgctccccacccccagcctcttccccaggatgccgagacacaactacagccgggtggccccgctggtcaagtcgctgtgtgccaagcacggcctcagctacgaagtgaagcccttcctcaccgcgctggtggacatcgtcaggtgaggctgcagcccggcccctctgttctggtggcttccccagggcctatgcctacccttgtccaggtcagcctcatgctgagcccccagggtccctgagcctttctgtccacgtcccatgcccttcctcccttccccagccttcacgcacacagtgagaatttctggagcacctactgcagactcacaaacagcagtgcctgcggtgagcaggtctatgcaaacctacccccaaaggctgagggaaaaaagctaacagatccagtttctcagaaggaaacacttaacagggactcataaacagaagccatgtctcagggccgggtgcggtggctcacgcctgtaattccagcacttggggaggctgaggtgggcggatcacttgaggtcaggagttcgagaccagcctggccaacatggtgaaaccccgtctctactaaaaaaaaaaaaaaaaaaaacaaaacaaaaattagctgggtgtggtggcaggtgcccataatcccagctacttgggaggctgagggaggagaatcacttgaactcgcaggggcggaggttgcagtgagctgagattgtgcctttgcagtccagcctgggcaacagagcaagactctctcaaaaacaaacaaaaaaaccatgtctcaggcagccaagagttgggacatcccctcacacgccctctagaaagaaccctctatatagcaagcttttagggtgaaccccatgcaggtggttcttatgaacctggtgaccactggaggttagataagcgtctacaagaggaggttatctatgccatgagcttggcattcagggtcaagcatcggtcatcagacagttttgcttgaagatggcattgcccttgtagcaatgcaggctctagagagcttcctgccctcttggagctgatgttccttccagcaaaggaaacagcaagcaattaaaataacaaataagtacattacagaagatgggcaaaagaacaatgaaaagcccctcagggtggggacaggggaggggaggggggcggccaggcaggggcggcagtttctaaataggtggtagggtgggcagtattgacaggctgacgtgtgagcagggacagggaggaggggagaggtctcgccacagggacatctggcaaagagcgttcaggcagagggcacttgaccctgaatgccaagctcatggcatagatagccgaggcaggcatgcaggcactcagagaagggacacgcccggcttgcatcttggaaagctgcccctactgggaatgactggcgggcaggagtcgaagtggaaaaggagagcagaggacactgcagccatccaggcgaggggtgatggggctcagcccttgtggtcaccttggaggtggggaacagaggccagattccaggtcttatacctctgcgcctttgtacacgctgttccccttacttggttgcccttccttcctgtgctggtgttcagatgcccacttctccttcatgatctctcccagcctgatgctctgagcccctgccatttggcacagccctttagagcgcctggcacagggcttcctagcagattgttgacatttctggctccactgcccaatatcaggcccaagatcgggtgggcaggttccacgtcctctctgtccttgggttgcagcgcccagcaggaggcagcaatggagaactgggtgcaggagggacaggcccacccaggctcatgcctggacttggccttggctgccctccagctcccctacccgacacccgtcaacccggtctagattccattccagagaatgagcattcagctgttctcccaacccaccctccagcccgcatcgctgcctgcccccagggaagggaacccacagggaatggggatctccgctcacacttaccatgggggatacaggggtgttaggatcttgcaactgagctcctaacacccacccccactgccacccccacctcccaggtccctgaagaagtctggtgacatctggctggacgcctacctccatcagtgaaggcaacacccaggcgggcagagaagggctcagggcaccagcaaccaagccagcccccggcgggatcgatacccccacccctccactggccagcctgggggtgccctgcctgccctcctggtactgttgtcttcccctcggccccctcacatgtgtattcagcagccctatggccttggctctgggcctgatgggacaggggtagagggaaggtgagcatagcacattttcctagagcgagaattgggggaaagctgttatttttatattaaaatacattcagatgtattatggagtggagtggtgaatttgcatgagttttgaagctggggtctgcccagactccccaacagcattcaggccctcggccatcaatgtgtgtgttggggccggcggcggggttgagggggagcgctaaggagctccctttagctctagatgccctgggcctgggagcccagggatgcctggactcggacctgcccgagggcctattcacttcctattcatgctgggcttcaagtcacttgacgcttctgcatggtgggatgagcgggcccagcagatgaggacccagggctgggggccatgtctgcggacgcttctggacatggactgggaaagacggttgtgcctcttgacctgcactggcctcccacagccctccatgatggggggcctgaaagggccccgcgcagcgggccacctgctgatcttagcgccacatctggcatcacaccagtggtggtggtgcagcctgtgcctggtggcccaaggaggcaacgtcgatctccctcaagcccacctgggaccaggtgcttgtctgtagttactgcagtgaataggctggacccccgaggcatggccattcctgtccctgagtccctggagtcaggtcttaggctctttgtctggcagtgggctggactgtgcctgtgggtttcggacagttctggggagggctttgagttgcctcttggggcacccagaattgggaagaagatctggctggaccaatcagtccccagcatccacacagcctgacagctccaagctgagctgagggtttcatctgaagtgtcggcagtttgaaaaagaaagctgagtgaggatttctatgaggcctttctggagtgggagctggggtcgccctaccagctgcaggggttgccccctactttttgggcttccattggcctggactgggttctctttgggaggtggaaaaggcgcaaattctgccaatttttgttcagcccctccaaggcccatcctccgtgggacggagctggaggggaagccccactgccccatcaacccgccccctactccacacacatacaaggtggcgctgagtgttgctgcccatgaacttctcttccgagacagccagaaagctcctcagtgctaaagctgatcaccgtagtctcacacctgcttcctctctgtgaggaggggccgtctgcacattcccatggactcttgcggctcttcccaggggctccccttctagaaagttctctctgacccgcagggctcctccccttccctgcccagcctgtgactagggtctctgtgacagcacctggaatactgacatcatttgctgctggaggctggtggcagcccagagcctggcccgggagaccctggggtgtgttttctgagaggatgacagacagggtgtttgggtcctgcttccctcaccctgatttctggggcaggagagcactgggggaggtcctgttcggctcacataatctcccagacccaggagcagacagcccaaagctccctgtggcctcccggcccagggcagtgccagcagaggcctcctggtagggccagggaagcagagggtggcagccccttcagcttggttgtgagtgagatgcctgccctcctccgggtgccacccagccccaccagatccactcaagtcagacagacttgggggtggggtggggtgggggcaagtcctgtttctgccaggacgcaggctgtgtgaccttgggggagttccttgaccccgagcagcagtacctagggtgatggaagaaaggctcttagcaaagggcacagcagcaggctcagtttattcacaaattttgtgcacacaacccaattccccaggatgaccatttgctctgtcacctagggcaagttcttttttgccttccctgagcctcagttttcagccgagggtaagattggatgctccttgaaaggtacttcctgcctcagacacacgcttctcatggccagggcgtgccttgcattcagggtctctgcacaggctggtccctctgcagggactcccccttcctgtcaccgcctgtttaaatcctgttggctcctagtgccacgcgggcgccctgagccagcgcaggctccgaatggcattccctccgtccacaccctggtagagatcgctgtgcgctggctccgaggcgctcgccagggagatgctaacaccgaggatccacgacagctgagcctgcagcgccacccaggggcgcccggagcatctgcgccagtgtggggcgggccgtgctccctactgtccctggtaacttgctttgcggacccctgggaggccccgccttcagcagccactcctagatttctccagaccacctgggacccatcactggcaggggaatctttgctcttgtcccactgtcccccatgctagatcccctgggaacaggtcaccctcagtcctgagctgagctcccccttctccatctgtaggtctcctagtctcagaacaaaggcttagggcacaggggccaggtttgtaaaaggaaagaggctttggtggaacctctgaacctctgagaaaccgtgttccttttttattgtctgtacaagaggcgtgggcccggaggaaaaacagctcccgagggaaaccataaccgcagtgttggtttgttcctttgatcatcaacatttgctacgggtctcccagcccaggcagatgttggaaatgatgatgcccaagagccagcccctgcctggtgtgttgggagtagctggaggggagcagggggtcaacaaactcttttgtgacgggacaggccatgggtttctcaaggttcctccccccaccacactatgtcctcaggcaatgagccaccacaactactgggagcttggcctattccaagctcttggctgctgtcactctttctcttggacacttgctcttgaatgggacgatttagaagaaagacctgaatgcctttaaaatccaaagcaaagtgtttgtgatggtggaggacgatggggacgtgatcctgaaatctcagcacgctggggggctgcttgttccgtgtatgcactggccacatgaagccagtctgctgagaaaaggaaaaccagtcccgagggcagtggcgtttcagcctggggcaagccatccccacggcgccccatttccctctcagatgttggaacagggactctttgagaggcagcttctttggccagaggggcacacctctcgggggagggtgcagcctggctcgctgaggagtcccgatgggcccaaggcactgtgtcacataagcaatggccagccactcctgatggcagcccaagcccagccccagtggctgccagctctgccctggtccagcttggtaaaggcttcctctcccctccgagtaggcacgagggcttcggagtgtccagccagacaccccgaggatccgcctgtggtgccacagcaccctcccccgccccacacacacacagcttagacttggggcgctgcagatgtccccgctacccacaaagctgatacccttttatctgcgtagctacactgcccttatctcctcctcagagactaactgccctccactgcccccactcctccagccagccgctgggcctcctgggagctgtctgacatttgacgtgatgggggcaaggtctgggaaccagccctttctgtgcaggagaggtggccaggagcctgcgggttaggagcagggtcctgctgctgtgtggcctgcgcagtcctgtcctctctctgggctcagcctcttcgcccatgatggtggtgttggggtttgattgctcagggccttgaatattggggcaccatgactttggcaggggatagggattagaaactcacaattctgggtgtgttggcaagggggtcagctgagtacagggacaggagggggcggttaagcagagagcagatatgaatgtcttcagcttcttgacccagggaagtattcaagggcaaggcggggctgggtggggctggggaagtcagagaagctccaagtgcccggtgaggctaggccaagatttatctggtgccctcatagccccagcgtccatctggcctccagtatccccaattccaagccccctggttgttatgggtgatggacccatggatttccaactggtagggttgggaggcctgggctggtcgccatcctggaggcgggtcacaggcacagggcagagggtgggagccgtgcctgccagggtcttgtaaccttgaaggccactgccagcgggtccaccaggagggcaaggcctagggtaagcgggtgttgagataatggcatccttggggcccctctagcctgcccctgtggactatggcccacagggccagggagggcaaaggactccccagagccacttggtgaatctggggtgagtcggccacctcgctcagggcttctgtaatgccaggccctactcaggacaccctgtggccactggggagccatacgtaccccagccagtctgctggctgtccctacctggctggatttcggccaggcaaagcgggggtcaggggaagcaggcgggggctgaggtctactcaggagccctccccagccctgctgggagcagctacaaagccaaggggaggccccaaggtgttaactagccagtgcctcttggcccttccttggcactttcccaggatcagccctgccaggaaagccagcccagagacgatgacggagcagcatgggggtccatgggagacggactgtacaagtgcccctggcatgttgctttagactcttcccagcctctggggtcagacagacctaggatccaatctctgtgcctatgaactggtgaccctgggctaggatgatatcagcccccccgacagcctgtgggttctgaatgagccattgcatatatgggcacgggagccacaaaaagaatcatcagcctccagagccttcttcagcccccttttaatttaatttaattaattaatttatttatttatttgagatggagtctcactctgtcgctaggctggagtgagcgatcttggctcactgcaacctctgcctcccaggttcaagcgattctcccgtctcagcctcctgagtagctgggactgcaggcacgcaccaccatgcccagctaattttttttttttttttttttgagacggagtctcgctgtcgcccaggctggagtacagtggtgtgatctcagctctctgcaggctctgccccgccggggttcacgccattctcttgcctcagcctcccacgtagctgggactacaggcacccgccacctcgcccagctaattttttgtatttttagtagagacggggtttcaccgtgttagccaggatggtcttgatctcctgacctcgtgatctgcccgcctcggcctcccaaagtgctgggattacaggcgtgagccaccgcacccggcctaatttttgtatttttagtagagacggggtttcaccatgttggccaggatggtctcaatctcttgactttgtgatctgcccgcctcagcctcccaaagtgctgggattacaggcgtgagccactgctcccggccttctccagccccttccaaggaggccaggaattctgtttggcctggcgctctgtggaagctggctggcccagggatgggagggcagattgcacttggggagacagctggggggggaggatgttaggaagagtctctgcaagcccctccatgccaccctccttgggtaggggtcagctgctgagaggtggctctcagccctgttttagaattgggctggggtcggctgctgagaggaggaagatgggccaatgtttttgggtcatttccaccaagttccgggccccagaatgaatttcagaggcagcagggagaggcgggtgggatggccacaggggagggaggggatacagagagatgcaagcatggggacccctcctggtgcccaggcccagctagaagggcctcatctatcacccaataccatggcctggcattggcgtgcaggaaacacaggaagtgagaataaaattccttattttatttcaaaaaatgtaggggtggggaagtaacatgataaacattacgatcagctccctatgggttcattctgcctctgcgggggtcgggggcatacagtagctggggggcatgccattgccatggcaacccagatgcttagatgcaggtccctcctggctgcttagagctggggggactaggcgccctccccgaaagcccccattctgagttgttggtgcctgcccttcccctgaatctaagaactgattagtgggttagactgcaacagcagctcaggatcctcccaggacttccctccctcccctctcacttgcccgtcccctcagctaccagcacctccagcccccacctcctcctcttctcagctccaccctggtcctcatgaggtaccccctccccagcccctcagggcagcctcctcctgagactccctcccgctctgcctccctggccctccctgacagtcagggccaccgaggcaaggccatgtggtgaaaggcagattgtcacaaggcccagccctgccgccccctcctatcagaatgcatcctggagcaacaggttaaacacagtaagggcaggttcagacaggagagtgcctgaggcagcgccgtccacacagcagccccgagatggggagggctgggacgagacctcccagctccagtgccctcctgcagcctgcagggcccacgtcccctggggccaaatggccagggattggctggcactgcccagctgataacagagcctttggagaagggtcagattgctccagaatcttggacctcaggacaccctgaggaaaagctggagggtgggctgagcctccaggccagccggcccctccctgaacgtggccactgcctctgctgagtcacaagagacgagggactccccctttggtcccaaggtcacaggctcaagttggggaggcggtggaatggggcccgtgaaagcccagggtcagagcactctagtgatggggtggaggactcttccagggcccaaggtttgggctggctgtgcccgcgggcctggggccctggacatcttaagagaggcctcgggtacttaaccgagctgcaggagggagacccgagctttgtaacaaagcaggcctctctatgaaagggtggaccaatggcagccgtcagggagagtgaagccaggccgggagggtcaggggccctgcccgactaggacctgcccctatgaaccccaagagcatctgaagaaccaaagcgggggtgatgcctagtgaccaggctgcaaggggagactcacaggccagacccatggaccgctggtctcctcccatctttaggggcagagagtggaggtaggacagagccacccccggtggccacctctctgctccttggaagaaggggctaggaggcactgggagggccatggctgatggctgacggctgagggagggcaggtcccatgagggcagggtgctatgggggagatgtgaagagaaaaaggagaggagaaagggagaaagatccaacatggggtccgtgagcagtgcatacaccagcctctcggacacccctcagaacaaaagcccatcattcctctggccatcaccccacctgcaccccttccccacggtgtcccgggggctgtggcttcatttgtgaaggtaggcgtccagccacagcttcccagacttcttcagggacctgcaaagttggggatggaccagggtcagggaccaggacgggagtggccccagggagtgcaagggctgaggaggccatcattaaggtggcatgtatgtccccttggccctaaccagggcttaccactgccactgggcctgtggggctgtcagctcagagcccaccaggaaccccacacagaaagggatggtcttctcgcagcccagggagaaaagcccaacagctcctaacacaggctcgggagtaaggcaggtgccctggtgggtgactgtgccaggagggcccagcccctcttgtgatcccactgtctgcaccacgggtgatcccagggcccagcgcctgtggacctccacccctcacctgatgatgtccagcagggccctcagtagcggcttctcctggtattcaatgccatgcttggcacatagagacttcaccagcggggcgatcttgtgtaagttgtgccggggcatggtggggaagaggctgaggagtgtgtagggtgggcagagcgtgaggactcagagggccatgctgctcccgcttcctcccaccacctgggcagaggctggctggggccctcagagaccctgtccacagccaggaccagtctcaaagtgtggctcctcgtgtgtgcccagtggggtgccacgtgtgtggaggggagggtgcagccctccgtgagcaggagggcgtttgtgctctatggagctgggaagatattgggtggccagagacaaagtgtcatgtttttcaaaaaagaaatgaaatagctggggaatgctaggaaaagaggcagtgaggtgaggcacggtggctcacgcctgtaatcccagcattttgggaggccgaggcaggcagatcacttgaggccagaagtttgagatcagcctgggcgacacggcaagacctcttctctacaaaaaataaaaataaaaaattaggccaggtgcagtggctcacacctgtaatcccagcactttgggaggccaacgcaggtggatcacttgaggctaggagtttgagaccagcctggccaacatggtgaaaccccgtctccactaaaaaatacaaaaattagctgggcgtggtggcacacgcctgtaatcccagctacgtgggaggctgaggcctgagaattgcttgaacctggtaggtggaggatgcagtgagccgagattgcgccactgccctccagtctgggcaacagagtgagattctgtctcaaaataaataaataaataaaagtaaaaaaaaaaagaaaaaattagttgggcatggtggcacgcacctgcagtcccagctactcaggaggctgaggtgggaggatgactttagctcaggcgttcgaggctgcagtgagccaagaaagcaccactgcactccagcccaggaaacagggtgagactctgtctctacattttttattttttaataaaaaaaaaaaaaaacagtgacaagaggtgaagcaaggacaaggggcagcagggcagtccctcggccgatgttccaggcaagctacgtagccctgccctgctagcctcacagggtcatgaggtgcgtgtgcaggctccataactacaaagtcccaggcccacatggagggaggtggtaaccactatgaccaagtggcacagcatgaggggcacaggatgaccctcagggagatggaataggggagcccctctcctgacctcagcggggctggctgggagccttgctctatattgggcagagaccttgtcagagagacaaagaggtggcccccacattctgcattctgcccagtgggatagcggccacttccctcccgctgtgggtctccccgcctccccgcagccccgcgctcactggtgctcaatctggaagttaaggtgtccactgaaccagtcgttgaagaaggactgctccacgttgcaggtggctgtcagctgtcagtggaggggatgagtgtcagggaacaaaggaaggcccaagggcccggcctcattcccagggggcccagccttacccagggtctccaggccacccgtccacatcataccgtcctgcctgatggcctcagcccacccagatgccccacctgtccctctgggggattcctgctgccctttcttgctcagccctgaagctcccagcaaaaggacacaggcagccccgggaggcccagcacagccctgtgttagcaggtgcagatcatctggggccaggacatggacattgggaccaggctctggtgaccggccctgacttccctacctggctactgaaccagtcacggtaggcctcctggtcaatctccatgacgatgtgattcatctgtgtgacccacacaaaccagtggctctccaggaacctgcaagagaacacagctcagcgcaggggcctccgggggcccagccacagtgggaacagatccactctcccaaccagcccaggacagcccctgccaaggggccaggatgggaggtccccaggcaaagtggagccgtccgagcctcttctcatgccaaagccatcatcagtgccagtggagggcccagggatgaatcagcaaagcccaggcacctgatgaagttgaggaaaaggagggctcccaggatgccgtagaaagggatgtaggtgatgaagaaccggatgtagtagctgacggcccaggccaggtcctgcggggaaagatgaagttaggtgcaacctgccctctcctctgccctggcaccaagtgcgtgccccagatgtgcacacacctcacactcaggcctctagaagctggaccgcagcccactgaaatgcaatgggcaactacacgccacctgcttgctcggggtttgcatggctgcctttgtttctagggaaatgctgagtgttttagcatcaggaagtgactgtgccctgtttttcgggagagaaacggaccctcctgctgaggggcagccatggggtaggggtgggggtcagcagccctctcgtggggcaagggcgattctgaaggtgcgcccccaacccggggccaggtccccaaccgtcccccagtcctgtccctcctcctcagcacctgggtctcctcctggcatctccttccagcaggacagagggcttggaggggtagggaaggtcagaggtaccatcgtccctatctcagagctctcacagcagaggctggcctccccacgccccactgtcatcctgtgtccctccactctgctctcctccctgcctctggctggactggtgtcagggactgggcttggacgtcttctctcatgtactgggagggtgacttcacggctccaccctgtccactgtctctctgccacccaagtcttgtctcaactggaccacagcatcagcttcccacagtctcctgcttgtcctcgtggccatggcaaccagagtggccttcgctccaagcaggtcccaactctcccctgctaaagcccccaccccacccagtcacccacggagcctcatggggttaagaacctgtctttactcagccccctgacctagcttactccctccccggggcctctgcatggcctgttcccactgccagggcgctcatcctgccatgagtttaggtatggtgacatgccacaggctcagcacaggtgtccgaggtggaaggtgaggccaagggactgccctgtctcacttcaaacgactgaagaacaaggtcacatttgtgtcttaaaatagatccccacccactggagagggggagactaggaagttattccagcggctcagacatgaaatgacagaggcctaaaccagaacccacggcactgacaaggaggtgacagattccagaactgtcagaggcaacggtggctgcatttgtgcctgcttggctgtggggaatctaggctggtcctaggtgatcaggggtcgggtgccagcagctgaacaggaaaggaggaagggagcgctcaggagaggctggagatggccttggggccaacattggccgagggcaggacctcacgttccaataaggtggccttcaaggtgaggagggaggcagatgtagccagttctgctcccactttccatcacattccttctattctgtgtgtgtggtgcaatagtgtgcagtgtatctacacatatatggaaacaaaatgaggatggggttacggattatttttttttggagatgggatcttgctttattgcccaggctggagtgcaatggtgtgatcatgactctgtcccaggctcaagccatacttctacctcagcctcccgagtagctaatttctgttttttttttttttttttttttttttttgagagggagtctcgctctgtcgcccaggctagagtgcagtggtgtgatcttggctcactgcaagctccacctcctgggttcataccattctcctgcctcagcctcccaagtagctgggtctacaggtgcccgccaccacgcccggataattttttgtatttttagtggagatggggtttcaccgtgttcgccaggatggtctcgatctcctgaccttgtgatccgcctgcctcaggctcccaaagtgctggtattacaggcatgagccactgtgtctggccttacctggataattttttttaagtttttatagagatgggggggtctcacttacttgcccaggctggtctcgaatgcctgtgctcaagtgatcctccagccttggcctcccaaagtactaggattacaggtgtgaaccattgccctggcccaacttttatttttaagagacagggtctcactctgttgcccaggcttgagtgcagtggtgtgatcacagctcactgcagcctcaaactcctgggctcaagccatcctcctacctcagcctccaaagtaggtagattacaggcgcgcatcaccacgcccagctttttgtagagacagggtttcgcccatgttgctcaggctggtctcaaaactcctggcttcaggtgatccctcccacctcagcctcccaaagtgctgagatcacaggcgtgagccaccatgcctggcctggacttcttttgagtgtagagagcaacacatacacagagatcgctggtttcaggggcagagagcccaagagatcagaagcagccaaagaggcggagcgagggggttgggaagaagccagcagaggtggggacctggaagccaacaggaagaactgcaagagggagtggccagtggtgtcagatacagcaaaattccaggagggtgaagcgtgggagcatctcaggatccaggacgtggccccgggaacagggaaccttgccagagcatgtaaatctccccgggaagcctccttcaaagatcttagggtttgtcacctctttcctctaagccagggtcccccaacctccacactattggcacctgggacaggctgcttgttgtcatgggcggttctccagggcatggcagggtgctaagcaccatcctggctagacgcccaccagatgccagtagcaccctcctctcctgaagttgtgacaattaaaagtgtctccggatactgccaaagggcagaacagctcccctgagaaccagtgccccaggtcataggtgcgctcctggctctgaaagccccatgggctcatcacattgtccccactctgccatccccttttaggaacatagggtgatttcttttcctgtttaatactttgttccttagggaacaagcacagtcaaaaacaaacaaaaaaaaagaagttgctcactgcaagctccgcctcccgggttcaagcaattctcctgcctcagcctcctgagtagctgggactacaggtgcacaccaccatgccaggctaattttttgtatttttagtagagacggggtttcaccatgctggccaggctggtctcgaactcctgacctcatgatctgcccgcctcggcctctcaaagtgctgggataacaagcatgagtgactgcgcccggcaataggccacttatgagttagaacgggattggatgctagaggcaaggagagggtgtaacatgtataaggagggaaaaaacataatggtgctagtctctaacttgagccactgggtggatgatggagccattcattaacatggagaccatcaggattaggttgtgggagaagaggagaggacttacattgaatatgttggatttgcaatggctgggacacctccaaatggagttagattggatatatgggtccaagacttggagataaaatttgacttggctgctcttaaattcacagtcagggtgaaaaggacaacttcagttagcaagcgataaaacagtaatcaacaggccgggcgcggtggctcacgcctgtaatcccagcactttgggaggctgaggtgggcagatcacctcaggttgggagtttgagaccagcctgaccaacatggtgaaaccctgtctctgctaaaaatacaaaattagctgggcatggtggcgcatgcctgtaatcccagctacttcggaggctgaggcaggagaattactcgaacccaggaggcagaggtttcggtgagccgagatcacgccattgtactccagcctgggcaacaagagcgaaactccacctcaaaaacaaacaaacaaacaaaaaacagtaatcaataaacaagtccacatttggttaagagaggaaaaacttccccatggctattggttggagcatgagggacaaatagactgctgagaaagactggattttaagcaagcatttcagaaagtgacaatttagtctttgataattttcagataaacaatttatctgccgggtgcagtggctcacgcctgtaatcccagcactttgggaggccaaggcgggtggatcacgagtcaagagttcgagaccagcctggccaacatggtgaaaccccatcactactaaaaatacaaaaattagccaggcatggtggccggcgcctgtactcccagctactcaggaggttgaggcaggagaatcgcttgaacccaggaggcggaggttgcagtgagccgagatcgcaccactgcactccagcctgggcgacagagcgaaacaccatctcaaaaaaaaaagatgacgtaattacaatgggccctaatgcaatatgaccaatgtccctattttaaaaaaaaggaaaaattttcaagaatccacttttggtgaagaaaaaaagaaaattaaaaaataggccaggcgtggtggctcatgcctgtaatctcagcactttgtgaggctgaggcgggcagatcacttgaggccaggagttcgagaccagcctcgccaacatggaaaaaccccatctctactaaaaatacaaaaattagctgggcatggtggccggtgcctgtaatcccaggtacttgggaggctgagtcacaagaattgcttgcacccaggaggtagaggttgcagtgagtcgagatcacaccactgcactccagcctatgtgactctgtctcaataaataaacaaataaacaaaataatttttttaaagagggatatttggacacagatacagatacaaatatgcagagagatgatgtaccgagagggaggacgaaagccatcaaccagccgatgagaggcccagaacagagccttccagagccctaaggaatccaccctgctaacacctcagttttggacttccggtctccagaaccgggagaaaacacatcgctgctgcttatgccactcagttcgtggtgctttgtcatacggtcttcgcaaacgaccacacctgtcatctcagccaacgcccagctgctccaacttcaaaccagggtgtggggcaacccagttcatgggactcagggcccacagggagcggggaagggagatggccacacttgcctctcatcctgctgcctttgagaactttctcgggggctctgcaaaagcaggggctgccccagtggactccctatgtctgagggagagtagagatctttaggactaggtcctggtggccccagagggagtcctttcctgagaggcagctaccccagggaggagatgcctggggccccacaggctccactggggcacacgaggaggcagcgtaggacccccgggtccccctgtcccagtcaccctcctccccatgccaagccagctgtgtccccaactcaccacccagttcttatggacgatcatggtcatgatgatctggtactggaaatacatggggatgagcagcggcggcccaactgcaggagagagacaggcgcttagaggcatccattccacgctgcctgtgccggaaggtcaggggaacccaggcccagcactgagtgcaggggccagccctgcagacgtgggcagaagcagccagggaccccggggcctgcagagaaggctgggagcccttgaggacgtgtgtcacccctgggactctctgagcctctgtgtccccatcaggcctgtaacacaggctgaggggtctgcacagcaaggctgctgtggcccccgcttctaacaagtttagtgtcactttctggatctgaaaaagatgtcaggtaggagggagagacacgccactctggggggaggggagggtcccagagtgatttcggggcgccgagcactcactcaggaagaagtattcgtgctggtgattgtagggcaggtatttcagcttcttcttgccgtactgaggagagaggagagatcatgagcacccagtagcctcagctcccagcctcccatgttccccaacccatcctgcagccaccatcccttctatctgctcagggcacaccactgtccctttcctgtcaatctgcaccctgggcccaccaagcctggggcccctccagccctctgggctccccatgctacagccagcagcggccaacgcttcctcagccctagccgagcactggcccgatggcatcgatcctctacaaggccggcacttctgaggctgaggctcagcgttaagccatggcccagggccacaggaagtggccctgactgggatcagaacccaaaaagctgactctgagcccatgtgacaggcactaaacaaatgtttgttgaatgaatgtgcaacagagcaactctcggcggagcataagcacccaggggagttcctaggtcaccatggagagctcccggagcccgcagtggcagggagaacctaggtaagggccccagaattgctgccagtcatcaggctgggagcatctgcctccctggagcctccctgtaatttacaagagtgaatcactcctccccagctggagcctaaccttgaggacagaggaggccacagcacagactcctcaggccacatctggctacctgaggtccccatgacggcaccggtttcttccccatcagagcctgcaccttgggcagcctgatgcccagaggctctaatggaggagggctgggctgggtcctgggcatcgtcattgtccaatgccaggcataggaaccacggccccaggggatccctggagcccttaattccatggtccagcccctagggaccagcccaccctgcacttccaggactgagaccaaaagatgccgctcactgagtgacacctgctcctctcccttgcagtgtggggaggctgggcttgcagccagcagatgcgcttgagccgactctgcctctcaccagtgctgagactatgtgagtcgcttagccttgctgagccttgtctggcatttgaatcagtggttggtaagaggagccaatgagaacatgggcataatgccaagtgctgaccccaggacactgcccgtcaccctccctatacccctggatccgaaggccagagatgcctcctcctatagtgtccagtcatacttattgcagtcaggaggtcaaagtgagttacagagggaagggaccttggatgatgcctaggccagtgcccctctcatccaggtgagtaaaatgattgtccaaatcacagggagagcatggattcctgagggaagaggctgtgggtgggaaccaggtccaccctgtccccaaggcttgcatcttggcgccaatggccatggtcacggcacaaccagctgaagaacccccagaaacagtccctttgttctgtgtggcctcctgagccttggcaaggatctcactcattcccagaaaggacggccacttgcaggaagactattattaaggccagggctgaggccggccatggagaggtccgagccagggaggcctcacaggagcctttcatgagtctccagtggacggaggtgctggaggagccagcactgcagacgttgctctcgaggtggccagtctcggggcctgcagtggcccacagaacaggcccctgagtcctgctctaagcttctcccagaggccagggagcaggctcatagccccagccttggcatgcagtgtctccagctctgctcaagagctcctccccaccgcatctctgtcccacagagcatcccatccctctcgggctgggccggctgtactcggaagtgagcacagagggcaacccaggcaggtcagcaggggccagggcatcctatggagggactgagggctggccacgctgttgtgggggcctgggaggcacctggggagtctgtttggagctgcatgtgcacagtaggcaccctgttctcatgggtgatggtggcctgtgggtggacaacacaggttacaggggctgcctctgctggtaagcactgctggctttagtgtgcgtcccttcaatgccccagaatgaccctcgggagccagggggtcctgcttgccaggcagcagcaggcctcagagtgggcctctgtgggacggtgagcaaaatgctcatcacagtcacgcacgtgtatgtacatgcgtatggtgacataccactacacatctgtgcccatctcgatggcctcagctgcagcggctctgctgggggatggccaatactcccctcccaaaccagaaagtacaactgtgggtttgggatacgaagccctgccctgtggctaactctctgctctcatctttcccacgctcagttctttgccagagctttgccgtttaagtcatgggaccagggaagggagggagaggtattttagaatgtagcaagctaggggggtgagtgcctggctgtttaattgatcagaaagctggggctacccaacaaacatatttcacaagggcccccaggactccgaagctgtggtttgcagccagatggtttgggttcggacagtggtgttgccttttccttgctgttaccttgaacaagtcacttcatgtctcttggccttagctgttccatccatgaaatgggtcgatgacagctcccgcctcacgggttaagcaaggattaagtgacgttgtgcacgcacactgcccatcacagtgcccggtccacagactcactcaacaagagtcaggcttcttcccaactgggggctcagagccccaagtgtggggagtggaggaccccacacatctcctcctccagaggagtccccgtcacacacacagagaaagcccaagaggcaaggaagacacatgactttcacctggctgggctgcggccaagggtgtgggtggcacacatggacctccccctgatcagcaacagtgccttcccaggctgcggttgacaggcagagacgcaggccaggggcaagggagggagtgcagccagccctggcggcggggctgactctcctgtcctcggcctctccatgcacctcaaggccaggcttggatgagggcctgggggatgccgggccatgtggaggggacctttcagctttggaacaaaatgtctgaggaatgacaagggccctccttgtccatcgagggttgggggaggggagctgtcgcaaagcccagtctctgcctctgggaacctgcaaactcacacacagagagaaacaggcggcacgacctccccagcaggagcagaatggcaaggtcccagtccaaggtccccgagagggcggcatgtgtgtcccaaggcgggatgggtggcttaagcctgttcatgaaggtctgcctcaagcaggaagcccaggaggttagcttcagacagtcagagcagcagaggtggtttcccggatgggaggaggaggaggatctcaggcaccgcacggcttctgaggcccctttacactgctaccgggataatggtctcaccagccccctcagaaaacggggatatggcaaaagaagaacaaaacaaggctgctgccaatatcaccgctattaaactcagctctgaaatttcccgtcaatgcaataaaacccaaagcagaaaacagagtggagctattagaaagaaagagactacttcaacatccagattagaaagaaagaaggaaaggaaggaaggaaggaaggaaggaaggaaggaaggaaggaaggaagggagggagggagggaagggagggagggagagaaagaaagagagagagaaagaaagaaagagaagaaagaaagagtgactacactttttttctgtttgttttgttttgttttgttgttgttgttgttgttgttgttttgagacggagtctcactctgtcgcccaggctggagtgcagtggtgctatctcagctcactgcaacctccgcctcccaggttcaagcgattctcttgcctcagcctccagagtagccgagactacaggcgtgtgccaccatgcccagctaattttttgtatttttagtagagacggtggtttcattgtgttagccaagatggtctcgatctcctgacctcgtgatccgccagcctcggcctcccaaagtgctgggattacagatgtgagccaccacgctgggccgagagactacgttttcattattttctaggatatgatcatctacccaggaaactcaaaagaatcaaccgaaacacaactagaattacgaagagacgtaagtggacactagcgggacaaaagataactatcccattcattggaaggccatgcaaacaaaaatttagaaaaaaaagaaaattaagataactaccccaatatccactgctttcccgagtactggagaacctccaatcataatgacaaaatataaaacatataaggattgcgttttaaaagaaacatccatgagacatataaagaagtacagaccttggccgggcacagtggctcatgcctgtaatcccagcactttgggaagctgaggtaggcggatcacttgaggtcaggagttcgagaccagcctggccaacatggtgaaaccccatctctactaaaaatacaagaattagccgggcatggtggcgggtgcctgtagtcccagctactcgggaggctgaggcagaacgatggcttgatcccaggaggttgaggctgcagtgaaccgagattgcgccactacgctctagccaaggtgacagagcatgaccttgtctcaaaaacaaaaacaaaaacaaaaagagagagaaagagaaggggaaaggcaccccactacgagcttccaatgagttaagtgccaaggatgaatgagtgtgagtgtggcccccaagtcatccagacggtggcctgggagaggacagacagcccagcccaggccaagcccgggctcaggagcactcactgcctcatatgaagaagcaatgccacctcatgggggtgccgggaaaactggccgactctggagaaaagtgaaggccgaacatcatcctacccatatcccatttggcagaagttaaagattgaaacacaaaaccttaaagaactgaaaataatatgtatgaagaactttctaagcacacaagaaatgaatctctgggtaaagtgaatatactttgctacatatgacaaaaagaatcctcctggacagcatcaataagaccaaaatgcagaaaacgaggaaaagggctttactgcggagcccgcgctattcacagttccacgtgctgggagccgcttggcagggctgctttgcttatctgtccccagagatagaagccctggccggcatccttgctctggagactgggatggtggcttgaggccctgggacctggccgccccacctggccctgctgtggtgtgtgggactggcatgtgacaagtcccatcagacccactgtcacttcagtcaagagaccagggttccttccagggcggccgggtcctgcgagagccagagcacaggtcaaaacaccaggaacccaggaagcaccaatcctttccccatgagtgtgagagcggggatttccacagaacaccgcggcactggctggggacttccaaacgccgctggtaactgaacaaccagatcctcacagcctcccacccctatctcctgccccaaagccagcgttccagaagtgtcgggggtgagaagatgtcgggaaaggagaggcttctctggccaccacgcacaagaaagacgccttcttgccagtgcagctggtgggactagactttctttgttggagacacagagaacatctgtcaggacagccaacggctctacattacaaagcctcgccgagaaaatgaagcctttgtccccacttatcagagggcctcaagttcatcagttctgttttctagacacctctaattaaagctggcaaactgtttcctagaagaataacaatagcctgtactttggcagaaaatggaatccctggcagcttagagaggcttccaaagtacagaactgtggctgatttcctgcgaattggccatgttacagaaaaatccacgttcctgctcagatagtctcacgggtggaaatgaaataagaagagggtgtacaaaccagaactggggagccaggctgtctcctcgccttgttccaagccttaggcgccaaggctgtcgggaatactacttcactcacggtgccactccttagtgagggaaaattggcctcacttggcagatgctgattgaaccctactctatgcatggctttgtggctcctaagatctgcataaaagcaacaaggatcttctaaactttcattttaatcattaatgtatttccaaaaagcagcgcatatatttatttttttcttctaaattaggtcccgacatagaggctctacataaaaaaaaagaatgtattaaataagaacatttttttgtggaacgcattggtggggcttttattcaaaagaaattatgggccaggcgcggtggcttacacccgtaatcccagcactttgggagggcgaggtgggcggatcacgaagtcaggagttcaagaccagcctggccaacatggtgaaaccccgtctctactaaaaatgagaaaattagccaggcgtggtggtgtgcacctgtaatcccatctactcgggaggctgaggcaggagaatcacttgaacctgggaggtggaggttgcagtgagccaagatcgtgccactgcactctagactgggcaagagagtaagactctgtctcaaaaaaaaaagaaaagaaaagaaaagaaagaaattatgaactactgacactcaatttgtctaccatataaaataatgtaggtcctgttatggttcagaagtacaacagaataccatatggctagagggagacgagacctgtctacatgaactgggggggaagggcatccacattcgcagaggtggcaagttgcaggatacaaggtagaatttttttgttttttatttttttatttttgagacagagtctccctcttctgtccccgctggagtgcagtggtgcaatcatagctcattgcagccttgaggctcccaggctcaagtgattcccccacctcagcctcccctgcacctgggaccacagacgcacaccactacacctggctaatcttttgtatttttcgcagagatggggtctcactatgtagcccaggctggtcttgaactcctgggctcaagcacttctcccacttcagcctcccaaagcgctgggattacaggtgtgagccaccacagctggcctaaaatttttgtttgtaaagaaacagatatatgcatgtttatacacatataaaaatatctagaagactgtatagcatcttgttaacagtggttaccctcaagggcataaaatttggggcaaaggggaggtttgagagactcactttttttttcttttttgagacatagctttgctctgttacccaggctggagtgcagtggtgtgatcatagctcactgtagcctcaacctcctgggctcagctcaagggatccacccacctcagcctccccaataactgagactaggcacgtgctaccatgcctggctaactaaaaaaatatgtatttttttagagacagggtcttgctatattgcccaggctgagactcgtgttttaattctggatatttctgtactgtttagaagtttataccaagtgtgttctatatttgtagtaataaaatgaactaatatgaaaataaaatggtatagtaaatggaaggcaatggcctagcagtccaaaggtctggggcctcaccctagactggccactaaattacgtgactctctcggctgggcacgttggctcatgcctgtaataccagcactttgggaagccgaggcaggcagatcatgaggtcaggagtttgagaccagcctggccatggtgaaaccctgtctctactaaaaatacaaaaattagttggcatggtggcacatgcctgtaatcccagctacgtgggaggcggaggcaggagaattgcttgaacccaggaggcggaggttgcagtgagccaagattgtgccactgcactccagctctgggcaacagagcaagactccgtctcagaaaaaaaactaaataaattatgtgaccctgaacgtgttccatcctctcgctgaccttcaatttcttatccactggtgaagcagattggaccaagccacgttgaggctcctcccagtgtacaggatgatgattctccaaataaggttttctcaacatgagctagtcggttggcgaccaagcttgagcccctgaaatcttgccttcctgctgaactggaacaagatttccctctaccctgggaaaaaacaagccagaaaatgcccttcctggcctaagggtaggagggagacatctaccattctaatgaggagctgtgtctgtatttacaggtgaggccattccacatacattccagccagaacaattcagggtacctaggagaggtatctgtgtagcaggagatgtggacctgcctggctgaatgtcagctctctaggcttccttccctgctccctgctcaggccaaacacttcctaggtcaacaccaaccccttagtcgtacctcgatggctgccattcgcccaggccaaacacttcctaggtcaacaccatctccttagttgtacctcgatggtctgccattcgcccaggacaaacacttcctaggtcaacaccatcctcttagtcgtacctcgatgggctgccattcgcccagaacaaacacgtgcagcatgttcacatcgggatccttgtggaagatgttaggcttggcgtggtgctggaagtggcgatgattccaccagttggcagaggcaccctgtggggagagaggggtggggatgagccatgcaagccaccagggaaccgagctcgcttgtaacaggcccttcttaggagcagttcccggaaccttcaaccctcggggatagcacttcaggcccccacaaggccagaatccagccctgccatgactgagctcagagcatgcgccagccccagatggagtgaagtcactttatctctctaggcttcagtttccctgatcataagacgatggtggcagatgaggcgtgctgctgagggaccacacggtgagcgctccagcaggtgtggcagccagtctctgcctctccgtcaccaggtgtggaaccagagctgtgcaaggtaaagccgaggtttcagggacagtgagaagtggtccctactatgtggcccagaaatctccctcctgagcgtatatccaagagaaatgaaaacatgtccacacaccaactcatagagcagtgttcacagcagcattcttcaaaagaaccagaagagcaaaagcaacacaaatgttcatcaacagatgagtgggtgaatgaaatgcagattatccacacagtggaatatcatttggctgtgccgtaaaacagaacgaatcactgacccttgctacaacacggatgagcctggagaacatgctaagggaaggaaggagccacaaaagaccacatatcacatgattccaccgacatgaaacgcccagaatagggaaatctatagagacagaaagctgagcagttgtgtagggctaggattggggtaggggagggagtgagggggttgggatgtgatggctaagaaacgtggggtttcttttgagcatcatgaagatgctctaaaatcgactatgatgatggttgcataaatctgtgaatataccaaaagtcattgatttgtctactttaaatgggaaaactggctgggcgtggtggctcacacctgtaattccagcactttgggagacagaagcgggtggatcacttgaggtcaggagtttgagaccagcctgggcaacatggtgaaaccccgcctctactaaaaatacaaaaattagccgggcgtggttgtgggcgcctgtaatcccagctactcgggaggctgaggcaggaaaatcacttgaacccgggaggcagagatcacaccactgcactccagcctgggagacagagcaagactctgtttaaaaaaaaaaaaaagtgagaactgtatctcaataaacgatttggagagcgcagttgtgctgctatgctgagggtgggtcctgagattcgtgtcacaccaggaaggctggagggagggctcaacaaacaactgctaacatgaacaagaagaactttcctgtttctaacactcaaataggatcccatgagacaagacacataacatggatatttcttttgaggccacaggtgtccgtctcctcagctcagagttatggccctcgacagttgcccagcgacagatgaaagaaaacacactttcctgaccctttggcatcacgactatcctggtgaactgttgccggatcaatgctttggctaagggtttgcaaaaaatgcctatttgctaaacaaacattttacttgggagatgcttttggcacacacagtctatggacactaatagccatgggtgggaacagcaacggacagctgtggcctttgcagtaacctcagggccctggaaactggcaggcctcaaaacccatgagagagagagagagagagaaaaaaaaaaaaaaagtcagagagtgaaagctcagaggcttcactttgggaggctgaagcgtgtggatcacttgaggtcaggcgttcaaggccagcctggccaacacggagaaaccccgtctctactaaaactacaaaaattatctgggcgtggtggcgggcacctgtaatcccaactactcaggagtctgaggcaggagaatcctgtgaacccaggaggccaagatcataccaacttcactttagcctgagcaacagagcaagagtctgtctcaaaaaaaaaaaaaaaaaagaaaagaaagaaagaaagcttagaggctcgaggaatcaaatgacacatttgcgtttgttgtcaaaaggaacaaaattcctgggaagaatcaaatggaaaaatctctggcacaaagaaactgaggagcaaggcatgaaacaagtaagcgtgatgtttggaggataccaacccagagatgtttattgaacaaacagatggaggaaagcaagacgggctgacaacaaggaggcagtgaggtgggcagtcccggttctccctggactcgggatgagatgtaatgaaagcattttttgttcatgctacttcctctgctgtgattctcttccattttttttttttttttttttgagacagagttttgctcttgtcgcccaggctggagtgcagtggtgcaatctcagctcactgcaacctccgcctcccaggttctcctacctcagccttccgagtagctgagattataggcgcccgccaccatgcccggctaatttttatattttcagtagagatggggtttcaccatgttggccaggctggtctcaaactcctgaacccaggtgatccgcccacctccgcctcccaaagtgctgggattacaggcataacccaccgcaccgggcctctcttccattcttctttgccaggtgaagccctgcttgtccttcaagagcccctccttccgggcaccgggaagcccgccttgcccaggaacaatggccagctccgtgttcccagaatgtggtgcagatgttgcctaccctaagccagctgccgtgctctgcctgggaggtgaaccaagagacaaagcccttgtcctcacggagctgcgagggagggtctggcctcatcacaccaaacccaaactgagctggggccaggaaagctaagtgtccacgcagctggagaagttggccaggcagagtgaggggtgctttcctgacagaggcaagagcctacgggaggccctgggagaggaagggggagtgtagagtgctccagaagccagaggaaagctcctcggtataactgtgaccagcagtgctgggtggcgccatatcagagcctgaggcaaaaaaaaaaaaaaaaaaaaaaaaaaaaaagtgcacttctggctttaatggaaacaaactcatcgataacattttcaaagcctactttttgcctcatttcattttctttcttttttcttttttcttttttttttttgagacggagtcttcctctgtcgcccaggctggagggcagtgatgcagtctcggctcactgcaacctctacctcccgggttcaagtgattctcctgtctcagcctcccgagcagctgggactgcaggcgtgtgccaccacgcccggctaattttttgtatttttagtggagatggggtttcaccgtgttagccaggatggtctcgatcttctgaccttgtgatctgccctcctcaacctcccaaagtgctgggattacaggcgtgagccaccgcgcctggcctcatttcattttcaatggaaagaattgctgagtttgatggtttctgtcaaccaagcgattagcttaaataatttttatgtttattttttatttttgagatggagcctcactctgtcacccaggctggagggctgtggcacgatctcggctcactgcaacctccacctccctggttcaagtgattctcctgtcttagcctcccgagcaccctcgcctggctaatttttgtttttttagtagagacagggtttcaccatgttggccaggctggtcttgaactcctgaccttaagtgatctacctgcgtcaccctcccaaagtgctgggattacaggcatgagccaccacacccggccaagccacctcgcccggtcttaactaatttctaattacattcaactgaagcaaaagtataataagttctgttttggtataaataaagcatttacacttagaatgttatgacttttaatacatcaacttcttcattgttaaatatttttttaactactttaatcctctggaaaaaaaatcaaccattaaaaaatgacacacgaacatgtttagagggttgcatgtttttccatttccctcagttcatcctgatctttatttaaaattttgatattttgttcattgtggatttttttgcattaattttgatttttttaaaaacatattgcaggccgggcgtggtggctcatgcctgtaatctcagcactttgggaggccaaggcaggtggatcaccttaggtcaggagttcaagaccagcctggacaacatggagaaaccccatctctactaaaaatacaaaaaaattagctgggcatagtggcgcacacctgtaatcccagctactcgggaggctgaggcaggagaatcgcttgaacccgggagacggaggtttcagtgagttgagatcacgccattgcactccagcctgggcgacaagagtgaaactccatctcaaaaaacaaaacaaaaccacattgcattaaaacatcatttatcttgataactgaatttgtctggtgtccccttagaatttgtctggtgtccccttagattttataccctaagcgagtgccttacttgtttcaccctaatcccagccctggtggcctgagatgaggctgcagaaagtctggtgatgtccatttccagatgcagcgcccagatggcactgggcctttcagcttgcatttatttatttagagacagtgtctcactctgtcacccatgctggaatgtagtggcaccatcacagctcaccgcagccttcaaatcccaggctcaagccatcctccggcctcagcctccccagtagctgggactacaagcatgcaccaccatccccggctaattcttttatttttagtagagacagggtcttgctatgtggcccaggctggtctcaaactcttggcttcaagcaatcctcctgccttgacctcccaaagcgctgaggttataggcgtgagccactgtgcctggctgaagtttgcatttcatcctaagtacagtgctgaactacgaaagagttttaacctcagaatcgtctttgtaaaagatcacactttggaagaaatgtccactgggcatgacacgggctgaaggcaaacaggtcaggatgtgaagaactcccattaaatcccattagcagtgcagccaacaggaagaagggggtcccagcctctcacagcacctggtaacctactcacaggtctttccagcctgtgctaagacatctgagttggcgaggcccttgaggacctccctgtagccagtcccctttttcccagtgatgggaagagacacagacctacaagatttgtccccatggctgtgcacctgccgagtgctagagccaatttcaggcaagcttgacctccgtgctctggggcacccctgagtgagccacatgtccatgtccttggcctgtctctgtgacacagcaccaaggacacagccagtgggggctggtgggccatgagtggagcccacatccccaagcccaaggaccctgtttgctgtcatccacgttctacatggagaccagtcctctgtcctggccccgtctcccgcctgacgcaacagccgtgctctggggcccctcaaagactgagggcaattggacaggaacaatcccccctgcccggcccctgcccagaatctggaagcaggacacagcccatctttgttaagtgtgtgggggctaacatgggtcaggagttaaatgttactttgccatactgaggagggtttgatccaacagagaagagtataaaatgaaacaaagcactccactatgtgcaccctctccctttgcccctgagattctggacagagaccaggttctcaggccgcttcaggctcagggccaggcaagctgctcgctgcgaaactggtgaccagctcaggggtggttggccaccagtgagatctgcagccggcaagccaagggccccgttgcggtctgggtggaagaggggataagctacaccccacatgtagctcgtcccttgccagggtgtggagggatggattctttaggacccagcttttctcaggaagcaggtactgttgggtcaggctgggatggggatagtctatttcagagagcaagttggcaaagactcattttcaaaactgaggagataacgcctgtcagatcagaacaaggcagttggcaattccagcttgtctttctacaaacatgctgagactctgtggtctgcttccttatctagggggaggtgagagtggaacttccttaactcctgcacttctaatgacttttgtcctttgggccagctgatcattccgtagtttggtgtcccctatctgaggccttataggatgacttttactttttgtaccccgcttatttccaaagagtatttgaagtggcttgagataaaagactcatatataacggaaggctaaaataaagataaaagcataaatgccagatgaggaaggagagaatgggggcaccaaaaacacagactaaagatagttgctgtttcaaatgctgctttgtacctcttggcttctgaggggaagagaggagcacaatgtgtttctttttcttttttttttttgagagatgggggggggtctcactatgttgcccaggctggtctcgaactcctgggctcaagcaattctcctgcctcagcctcccaggtggctgggattacaggtgcatgccaccacacccagcacaacgtattaaagagctcacatccccagtgaaaggaagcataccaactcatcaaaaaagatgctacaggccggatgcggtggctcacacctgtaatcccagcactttgggaggccaaggcaggtagatcacaaggtcagaagtttgataccggcctgaccaacatagcaaaaccccatctctactaaaaatacaaaaattagtcaggcatggtggcgagtgcctgtaatcccagctactcgggaggctgaggcaggagaattgcttgaacccggaggtggaggttgcagtgacccaagatcacaccattgcttccagcttgggtgacaagagcaggactctgtctcaaaaaaaaaaaaaaatactgctactttactgtccccaaacaaaaacagatttgttagatgagtccttagctaaggaacatcaaaaaatacaatccgctgagccaaaagacaagaaaggtgtgtgcctgtcttcataatgagtagtacaccatggctttgtggttcggacctgatccagagacagggctcaggaagtcagcagaatggagagtcaccatggccctcagcataggcacacctgccttgtcaccctgtagcctcagagcactgagcagagaggaatcctggtccctctgtctcaactgctgtccaacaggacagatgcccagggctgctgacacttacctttaagtggccaatgacgaatttgtggacaaggtggttccacttgggttttctgtagacagacaggtggccataatcatgttgcagccatccagcttgggcctggggagagagggtcacacgtgctgtcacagcctcagcaaacaggcaccaggcctctgtcagctaggggaagtgagggtgtcacgcctcacctgagaggtagcaaggacaaaggccgtgatgagggtaggaatccagccattgccaaagtaaaagacagtgaaccatgcaatgctctccagggcgatgatgtgggccaggaggaggaggaagaacacgtggttggtcttgaacaggttcatgtcctcagccgtcttcctcagggcccggaagtcctcagtgatctttgactgttgaccaagagcacagggaaaggagtcagccaccagccactctggagggaacatatgtctcgagctgccatttcaacagccaatgcacaacccagagaagctgtggcaagagggggccaagccacaagcctcgaccctccaggagtccctacaatagctgctgttaccacatgccccacacagccctggggcctgtatatttgtcacagctaggtaagagtgacagagaaaggctttgactcaaaagcttgcattttatacaccctgtgttcatagctctattcacatcaggaaaaaggtagaaacaacacaaagatctcgtgatggatgaatggatcagcaacacgtggtctatccatgcaatggaatattactcagccttgaaaagggaggaaattctgacacatgctacaatgtgagtgaactttgaagacatcatgctaagggaaacaggccagtcaccaaaggacaaatattgtatgattccatatacaggaggtccttggagaggccaaattcagagacagaaagtagaatggtgcctgccaggggctgagaggtgggagaatgaggagtgagtgcttaatggatgtggaatttcaatttggggaagatgagaactggatggtggtgatggttacataacaatgtaaatgtgcttatttgatgccactgaactgtacacgtcaaatgaccaaaatggttgaccacacttttttaaaaaagaaaactttaatcccagcactttgggtggccgaggcaggcagatcacctgaggtcaggagttcgagaccagcctggccaacatagtgaaactccatctctactaaaaatacaaaaattagccaggcatgatgatgggcacctgtaatcccagctacatgggaggctgaggcaggagaactgcttgaacctggaggcggaggttgcagtgagccgagatggtgtcactgcactccagcctgggtaacaagagcaaaactccatctcaaaaaaaaaaagaaagaaagaaaagaaaagaaaaataaaacttgcattttccaccaccaaacagagcaccacttgctctgcgcacactgttgggtcttgaggggttgagttgggggcgacacaaactagcgcaggagggcgagctgaggcaggcaggagggggctgtgagtcccgggcacatggagccagggaggcaaagcggagtcaaggagggccctgggaacacaatggcattgcgaggaagaaggaacttgggacaagaggcaggggcagggccggacggggaggagagtggatacaaggagaggagcggtacccacagggcatgaccaaggtgctatgaagggtggttctggtggtgcctggtgggagcttggatgctaaatggtgcaggatctgcagcagaaagggagagcagtggagagagccaaggagcaaggccatggacaagggagctacagggcaggacgagcagagctggggaagccgcaggccaggaggtgctggaggtgagagtgggagatggacccacttgcgaaggaggcaggaggggacaagcatgggctggcatgggtacagggcaggtgatctcatgtgccatggagggcaaggtgagaggaggggcattggcctttgaaggacctgcagggtggcccgcagctcatcaggaaagccagaggcaatgggggtggtgggggactggccaagagtccaggccgggagagaccctggtcctgccctggctctgctaaacagaggggtctggcccaggctggcaacaagaggaggaagagcttgctgaggccagggtgggacttccatgaccaccctggtcacagcctgtgggtaccactcctctccttgtaacaactctcctccccgtcctgccctgcccctgcctcctgtcccaactttcttctataaacggctccgccatttacatggagacttcattgttgaacaaaacaacagcccatgagacctcaggggttgctattttcacacatggctgtcctggaagcccagcacccaggggggcgtctgacctgcagacaatgaacagatgaccagggaatggtcattctttctcaaagaggtgccccggaccacacaccccaaagccactcttgtcatcaaatgacatttttcggtgtttctgtcctgtctttcccctagattgtcatctggcaccttcctggaaagggatggaggagaaggaaaatgaaactggccaggagagaggagacgccactagttgttgtcaaaccccggctcccagggaggctctgaggccctccctgaacacaggtgaaccacagtggctcctccaggacaaaagcacccctgcctcagccccagttactggtcatggggcaaggggagcctctctcagactcccagccacccccagcctcgtctccacccccacccaggttgcaagccagacttacgttcttgccgtggtcctggctgggctcctccggggccagttcaccaatcagcaggggtttcaagaacttgcccacgaattccaggtcagggtggaaggcgcggaaggcatcctggagagcagagggcagtgatgaggctaagacctgaactctgtctgctcttgggccccaaggaggacagtgctcaccagcaacagctccatgtgtgcacccagacaccaaacggggtctcctgtgatctggccccaaatgccgtctccagcatttttccaggacagagccctcagtgcccaacgccaatggcaacagccacctgggcttctgtgctggtgcaggcatgctacactccccaggggtttgtgaatagatgcataggctgcctttgggcaggtcgggaaatggtgaccctccaggaaggcgcaccaggcagacacggggctcagggaggacttgagcctcgactgctcgtgagctgagtgccttgcatggtgcacaaaccacaccacccaccatctcttactagttcctcacctacatgtccagggtggtcaatgaaaaggacaagaccgaatactaccttggcactggaaatgtgctgtgatgaagtaaataaaaaaataaacacagaattatgtaaaaagcgttcctgaaaaaaagcctaggaggatctaggctattattgcacatgttaaggtagctggattatgccttgctttattttcattactttccaaactctaacactgctataatgatacacattttaatctttttttcccaattataaagtaaaaacgtgctgagttttggccaagttagaaaaggcacagcagaataaagaggaaaataaatatcacccagaaagtggtcattattgctaatattttagcatttttccttccagcttttttctatacatattatgcatattacatgaattatctcataaaaaatctagtatttctattagagatgagccagcaccaggctcccctgaggggatgcaatagaatgtcccagtggtgaacactgtgtaatctgcatcaaatcaagcttccagacattggtaggattggcaaaccagtcaaactccaccatgagaaacaatcagaaaaatcaatatagctggggaaaaacatacaagtttgtggaaaaaacaaaagtacggaagcatggtctagattaaaagagactaaaatgatataaaaactgcaactcttgactggtcgcaggggctcatgcctgtaatcccagcactttgggaggcagaggcaggaggatcacttgaggccaggagttcaagaccagcctgagtaacatagcaagacccctgtctctactaagaataaacaaaattagccaggcatggtggcctgcaccaataactccagttactcgggaggctgaggcaggaagatacaataagcaatgatggtgccactgcactccagcctgggcaagagagtgagaccctgtctcaaaaaacaaacaggccgggcacagtggctcatgcctgtaatcccagcactttgggaagccgaggcagggcgatcacctgaagttaggagtttgagatcggcctgggcaacatggtgaaatcccacctctactgaaaatacaaaaattagccaggtgtagcggcgcacgcctgtaatcccagctgctcaggaggctgaggcatgagaatcctttgaaaccaggaggtggaggttgcagtgagccaagattgcaccactgcactccagcctgggcgacagagtgagactttgactcaaaaaacaaacaaacaaacaaacaaaacaacatcctgcaattctttaatgtgacaggctctcacttgaaggaaaaaagaagttataccaggtttttcgggagttgaatgagaaaaaatgaatatggaccagatatttgatcatatcaaggaattactattaattttcttaaatgtgacaaaggtactgtgatgatgttagagcatctcttccttttttctccggaaatgttgaagaccttagggatgtgatcacacaatgacgcagcttattttcaaaaggcaactgcacacatataaagaggaaaaacgcaaatgtggcaaaatgttaagactagtgaatcttggttgaggatacacaggtgtttgcttgttccttcaacatttaaggatgttgggaaaatttcaaaattaaaaagaagagggggccgggtgcggtaatcccagcactttgggaggccgaggcggcggattgcctgaggccagaagtttgagatcagactggccaacatggtgaaaccccgtctctactaaaaatacaaaaaaaaaaaaaaaaattagccaggtgtggtggcacacgcccgtaatcccagctacttgggaggttgaggcagggaattgctttagccagggaggtggaaggttgcagtgagctgagatcgtgccactgcattccagcctggcgacagagcgagactccatctcaaaaaaaaaaaaaaagggtcgggggaaggtggagaaagtgctaaccactcctggaaatcttttcagccccacacgtaaggatctcccaagggtaactgccagtctcccatcatctccttactgcattgctggcatcaagtcctttgcttggtctttgttctatttgtgtctagaacagactgacaaagcaacacttcgtgcaggagaaaactgggcccacggtttcttaaaaaatgcctgtgacccactagccgagccgaaaagggatggtagcagaggatcaggtcaagagtattttcagggaaaagagacgtgctattccagggccctggggaggcagggagaagtccctggggaggcagggaggaggccctgggggcaggcagggaggagggctggggtgggggggcaggcagggaggaggcccagggtgcgggcagggaggagcccagggttgcagtggtgaccagctttgctggctctgggtggggtgatcagtccccaccagagcctcagccgcctatgcaaaatgagcaaggccctgggagaggcccggaggagctgccaaagtcagggcccagggctgggcctgaaaaagccccttcattggtcctcctcacatcacaccacggcctttgagaaatgaacaggaagtccctggtaaggcagtttcctgagaagcagctgcagtggctgataactaatggattcctcttgtctcattgaaaggcaagactcaatggcttgcaaatagactcatctccactcctgctgcctccccaacacccgaaccctgcagtcgaggttccaactccaagggagcagacagatgacgagccctgccttgaccttggttgctgctcagccatttccagagggctctcgggcagcctcacctccctgagcccaggggtaatgggcatgcgccaggcagggagccaggagtgttgctcatgttactcccttaggcctcaagccccaacttctgaggtgaagatgcaggagctcaggaagcaaagtcctgggctccaggtggcagagccaggatcaaatccaggtccatctgcctctaaggactcttttctcacgtgccacacgcttcctgccgttttagaaaaccgagcagtctgttggatcagctccttgcccatggtcagtgtggcagctttccgagcaggcctggtgcggaccgcccttgaacataccacgctcctttccacaccagggctgcctccattcgggactcagcctcaacatcacctccaagaggcttttcccaacatcacatccaaaagagctctcccagccctgggccttccctgggtcattgccctgttagatcttcatagcagtcatcaaggttcgtcatcagactgcgtgacgtacccacttgtttatggcctgcgtcccccgctggagcataaaccccagttgggaaggcctgcacctgtcttgttcgctgcaataaacacagtgcctgtaacggggcctaataagatggctcacgagggaataaatggacccaggaccccacagctgcacacactctgatctcatactttcccactgtgcagtcatgaccagacacttgtcctcttccgcgtttcacacaacttggcttctgcctctggaacaccaaaagccttctccggcatccccacgctggtggttgctacagctgccacctgctgaggtgacgcaggcgagccacggggccatgggagtggcttgcatacatcagccaggcatctttaccaaacttcgtgaggcaggtccttttttagagataagaaatcaggcgtaggttggcagagccacctgcccactatcacactcgggaatgagctgagtagagtttgagtcacatgtggctaccttgagcattgcccgctgttcatacaaaggcttccctcaacatgagtgtcctcctccctgagagttgattatattttgtgtctctcccttcacattgccataaatgtgtctcaaacgctggcagaaggtttccagcacctgccgggttacagaaatatctggcaggtataaggcagaccaggattcaaggcaagggagggccaacccaaactttgtctttggaccaagaattggaaccaggctctatcctagtgtaacgggagagaagccagagactttccaggaagaggacccgggacatggggaagagaaaggattggtaaacaggtggagaaagcagagatgcacccgcctcggcagggcaggtgtgtgaggtggggaggtcagaacaccctgattctgaagcgcttgtcacacttcgctctttgccagttcctgcttctgccatcacccaggtctgatgccagtcaacttctccacagggacattttccctgcccctgccccactctgggtacaactcacagttgctcgccatccactgagcacctggtgccaggatttgtttatggccgtgcccatgtcctctggggagcaaggctaatctctgatcgaatgctgcacaactgggcactttgcctaggatgtgggaagtgcagcacgggcaagcacagggcacacagtgcagtaggtggcagccctgcggaccagaactttatggaacaagtgatctaagagtgtggagatgcacaggagggatcctcgcattctccagtggaaatgaagagcaagacagggatgctgacttcctttctgcagcagagagaggcaggcagggcaggaagcccctatgccatgtcccctccaaggaaagaagcaatggaggctggtggggcagtgctctgtggccaaagagccccgcagtgagagcctcccccataacacagggtccatgcactaccctgagggcagaaaggcagggctgcacaggagacaggcccctacaaaggcaacctgggcatgaagaaattgatgccattctccactttcatctcagaactgcttcctggggatgctgaggctacagccacagaaattggacagctcccacccagatctcagctggggagatggagctgccctccaggcctgggaattcataaagctggggctggaacccaggtctcctgcctctaaatactacaaccctcctgccccgtgcaaaggaggccagagttccactttcgatctgttgcgttttcacaagaataacataggagcaggttgaaaggtggaacaaacctctggtctcttctcaccttcccttgattctaagaggtcaccaatgcagaccgggcaggaacagttgctgagacaagggctaggggtagggggctgatgtctagaggcagagggtccagatccaagccccagcttgagagagagcagggggagcacatcccacagcttcaggtctctgtctgtgaataattcatctctgtgtctgggcccagctcagagccatggagacactcaattaatgtttgatgaattgtcgctgaagatgaacagttctgcagtggtgggactgctgtgaaaagagcagacacgctcttagggcgcgggtgagggttccttttgcccacagcaaggaaaaggcgagagaagcaccgcagtaccaaagggaagagatcagaggtagcaacaggaagggaaggaagctgggaggggaggacttgaggtcagattctgagtttaagtctgagcactgccacttaagccaggtttgatacctcagagcagtgagagatgcctacggggctgatccgagtatgaaatgaagtgatacatatgaatgtgttttgtaagttgcaaaaatcaagcaacttgcattattataggcaaggtcagggtttagcttctgtggaaggaccacgtaacagttgccccatccttctagggagatggatcttgactacctggatcttttgctcttcaaaaaaaagaaaatgccctattgaggcccctgattgtcccgagaatggcttccctgacttcgaggattgtcccaagaatggctaccttgacttccgacctgtttccagccttgtgttaggaatgactgcactgtgatgggctcagaacattgcctgggaatgttgcagggaatccaaactgtcttctgatcagtccctccccagactgtgcctggtccataaattgtcactccccatgctctgggggacaaaccatcaccccaaggggcaaagccacttgctcaacagcctaggcaagggtctctggatttcagtagcctgttcctgcttctctctttaggtcccctttccacatgccccacccaccccacgctgctcaaggcctttttccaacctggtcctggacagtttaaaaaaacaaaacaaaacaaagagaacccagctgctcactccatcatcaccatcattcaaatctgtatccccagttcgtgtatttcatgccccaaaagtcttattttagaagacaggaagctctggggacagggattgcttttacgtgttgctacaccaaataaagctagcatagatttaaattttttcttcaaattcctctttgcatactttccattctagctgtttcataatacttgttcttattcccgtttgcctgataacaccccattgcattcatctagtggttacagttgctgggtgctttgccacaaatcagtctcattgaaacaggtacaggtgtaccttatagatgaggagatggggctcagtcaagtgacaacacttagtggatgagcccagtaatgacatctttcttcaattctagatctgtttgcagccccggttggctcccaccctagcttatgaaagtaacaaagcaaccaacatccaagataccagatttatagtccatgaaagttatacagaaagcgctggagcaggaccagaaatgacgagactattacatttttatgagacagagaaaaggtcagggaagagtaggtcattctagtcctctgttaggagagatgtgagcactgatttttggagggaactcagtgttaaggtcaggtaagcactgagaacatccagaacaaggaagaaataaatcaatctgatatggtaattaaaccagaaaggtcaaggcaattgccagactaagcgttcacataagaaaatatgtttaacaatgtggaataatcagaccaaattcatcgtatttgacttttccttctggaaactttttggtgagggcctggacaggacaggaaccttctacaatttacctatgaaatcagaaacagaccagcccaagtccagcaacatatagtggaaagatcccagccaggatccagaaggtcctttacttaggagttacattaacccaacctcctcactgggccgcgtaaaggtccaggtgagatagcactgaaggtatgtgaaacatacccacctaagttctaaatagcatcacaaacccactgggcttaagcaatgtccacaagcaagtaaaacaggatgggactgaaagctgtagggaatttcagtatcgctgaccttcccaatcttagataagccctggccctgctggcccacaccacctgtccattgtccagcttgggttatggtggcctggtctggccttcccctaggcctgtctccatgagatgcaagaggtggggaagttaagggtcgggcctacacagcttagagagcaaaagcccaccaacagttgggcatcctagacctccaggtggaatgatctacgtcaagttcatccctcctttctgcctctctcctattcactttccccaatttctgtatcccatcagaccttttttctctgcatccaattcactaccaccaccaaaagccgccctttcttccctccttgcctctgttcttttccttctggcccattcgaatccatgggataccagctgcatccttaaataaatgccaggatttcagactggggtccccggtgcgggtagctggtgcggggtaatcactgagccacgcatttggtgggggtaaggtgggcagcaatggctccagagaggcccacaacctttaggagtgcaagatgagggaagggtgttcttggcaggatttaaaaagagagagccattgagttgaacgcccgagagtaacctcgagtgcagacggacctgttgccaagccagtctagtgctgctaaatccaccggctcaaggcctcactcgacctgggctttgcaaaccccaggccgttctccttccaccaatcccggacgccggtccccaagaaggccggctcgagcttggggtgagtctagataatccctggagcgtgggaacccgagctgctgggcggtttttcccaggtggccattgaggaacttcttagacaagagtcccagcaggagcgatctccggccggggacgagctttccttctcgccacccagtctggatggagagtgcgggacaagcgcggagtcccacacctggctgcctgcgctcccgctcctttcagcggcgcgcaggggcggccatcttccccgctgggggcgccaaagccgtctggcccgagcgcccctcttggggagtccctgcctccagacaaaccccgaggaaggggaggacgcgtgggtcccggcgcgcgcggtagatgcttgccctgttctccaccgctgggactttcaccgcagcgccgcctccccgggtcccagatccggtctccaccccagtcggcccagaggaggaggaggattggggagggggtacgagtgcaatagatgcactttccttccctacaggacgtcccaagctccattcagcgccggaggtctgtttggcccacggggagccagggatcctgactccgcctgcagcagagaagggtggctggggcgcccccagacccttaccgttgcatcttctccagcgtagtgcccgatgacccgctggccccccgggtgctggatggaccatttggtgatgttgtaaaccttgcggtcaatgaccagccacctgtcggtgcgcaggttatgcttctgaatctcctcccagctgaaggtgggcaccgacacctcgcgctcggcggccccctcgccctggttccctcccttccccatgctgcctgccgactgtgacgccccgtgcactgcggcctccccgcgccggctgctcgctgcacagacggctgcctcccagccggtgtgtgcagcccgggccctcttcgctttcggcttttgtcttctcctactcctcccaccgcgccccctcccccagccttctcgcctgcgctcgggagtgtccctgccttcctggcggaggatccctggcttcccagtgcccccaagcggtccccttcctccgcccctccctcagccctcccgctatggacttttgcctccagtaaaaactccccgggagctcagggcctcgacacctcctctgcccgcccctccggctccccccgcctcgggttccacatcctcccgcgttccccgccgcccgagtttccacagcgatcagcagagcgcctgcaccaatccggtcgcgtcgccccgcctgccattggcccaggaggatctttcgaaggccagcgggctggagcggcgggtccccggctcccccgccctcccgcgtggagtcgagccctgctgcgaggcaggctacgtgtccgacctcctccctcccccactctccggccccgggcgccggaggagatcctagaggagatcccggtgggggcaacgaatgggctccgcgcgctccggggcgcgtgcgcgcacgcccggcgctctgggggtttgcacctgatgccgacacaaagccggcgcggccaccagggtgccagcaagcggccgggcgggtggaccggcgggctgcggggcactcaactccagggccggcttggctaggtgacgcccttccttggcgcgcggcagtcgagactccagtatcccacattgtccgcgccatccacattctggcgcctttctgcaacctccctagagacacaagccggccttggattagagggctttgaaccctctagtcagacaatcttagaaaagaattgcggaacctctgctctgctttcttggtctgggcgccatggctgcggtgagggggaagggaggggaaggcagaggaagggggcgatgaggaactggcgcggtccttgccctggtctcagtaagctcagtctctttgggaatcgtggaagcagacacatcattgggcagtgatgttgtgcagactccagcaaataaagactgccgtatcgaagggataggaggagggttaggtcttttaggcgtggggcaagagacaggcccctcagaccccagctggatggggcggcttagtgccgggcgtcctgggggaaatgggcctgactgcatccggagggctaacgggacacgtgggaagtaaggatgaacagagagggtggggtgcacgaggcttgggaatcactagaggagttatagggccctcagatttcaatgggatttacaggtgcctgtgtgctagcacaccctaatcattagattctcatcacaggctgagaggtaaacaggacgcatattattacatctcacttgaaaatggagagcctgagattgagagagatggtcaaacgggccctgcccaatctaaatttcacagcaatgcaggggtggtggggggatcactctgcccaactggtggggttgtacttgggggggcagatgggctccctttcctcacattcacacagtccccaacctctcccatcacatttcatgctggtgtcagccctgagcatccttcattcactccacagactgcagacataaagacagtaaggcctctctgtctttgagtgtgagcagacatcccaaacaaaagccttctgtacaaaataagaggatgaagcaagacctccagagagtatggtggccttgaggactgtcaaacgttgacggaaatggaaccaagaaaattattttctcagaaatggattaacataccatatagataactttaatgaacatttgtaaagggtgtggagctcggagcagggagtgatagctgaaaggcagaaccagggagtatctcacagaggctttgaaggttcaggccctaaaagggagcacgtatgggtggcctgtgtagggtggctgagaagcgtggaccggccagggcctggggtccccagcggctcccagcacagtaccagccagggtaggtcctgaaaaaacataaaaacatgtgttgaagacacaaatgaatgaatgaagttcaaagaatggctccaatgaggccggcggtagatggggctcaaattgagaaaagccccagcagcctcagtaaggggtaggaagggaggactttaccatggaggaggcttggacatccgtaaagcaggtgtactgtgatcagatccatggtgtagaaagataactccagaggctggggctggactgggatgtacgggagaaactggggaacagtgatgagttcaaagatgagggcagtgctcgaggagaggggaggggaggcctgaattaagagagaactttagggggctgaccccacactggacactgccatgtgcctccctgccctctaatttttttttgagatgcagtctcactctgttgcccaggctagagtgcagtggtgcgatctctactcactgcaagctccacctcccaggttcacgccattctcctgcctcagcctcccgagtagctgggactacaggcgcctgccaccacacccggctaatttttttgtatttttagtagagacggggtttcaccgtgttagccaggatggtctcgatctcctgacctcgtgatccacctgcctcggcctcccaaagggctttttctttcttttttttttttttttgagacagggtctcactctgtcgcccaggctggagtgcagtggtgcgatctcagctcactgcaacctccacctcatgggttcaaatggttctactgcctcagcctcctgagtagctgggattacaagcacccgccaccatgcccggctaatttttatatttttagtagagacagggtttcaccatgttggccaggctggtctcaaactcctgacctcaggtgatctgcccacctcagcctcccagagtgctgggattacaggcgtgagccaccctgcccagcctagaatatcctttggaggtagaatcaagaccgcattagttggaggtacaggggcaggggtgatggtagagatgaaggaataagagaaataagtctgattctagcatttgagttgagcaaatgaatagataatgggaccatttaccaagatgagggaacagagttagtacaggggtgaaaaattaaaaattctattttaacgttatgtttgaaacacctaggctgggagcagtggcttatgcctataatcccagcactttaggaggccgtggtgggtggcaccatgcccagataatttttgtatttttagtagagatggggtttcaccatgttggccatgatggtctcgatcttctgacctcgtgatctgcccacctcagcctcccaaagtgctgggattacaggcgtgagccactgcacccggccaacacctgattctctcttactgcagaagggtctcctccatgtgacaaaaaaatatggctgtatttgctaagctacgctagcagaaataattctcccccattccctgctcccaaggattaattccagtttaatgggctctgcatcagatgctaaccattgggccactgttatcagacggctgagttactctattaggtgtaggtcataagccaagcagcagacctgggctttggggaacagggtctgttcctttttgtgggaagtcacaaaccaaaagcaattacagaccgctacagtattcctttcccatacctaccatgtgatgttagacctctgtctctgaccttcagtttcctcatgataaaaaggagacagtgatttttctttctttctttctttctttctttctttctttctttctttctttctttctttctttctttctctctctctctctctctctctctctctctctctctctctctctttttttttcccccaagatggagtctcactctatcccccaggctggagtgcagtggtgcaatcttggctcactgcaacctctgcctcccgggttcaagcgattctcctgcctcagcctcccgagtagctgggattacatggcatgtgccaccacacccagctaattttgtatttttagtagagacagggtttctccatgttggtgaggttggtctcgaactcccgacctcaggtgatctgcccacctcggcctcccaaagtgctgggattacaggcataagccaccgcacccagcggagatagtgatttctaacctatctcatctattttaataacgaggctcaaaggacacaaggtatgtgaaagtgccatacatgtattttcttaactagcaatattggtgaggtcaaactttaaccaagctcactagataatgatttattaatatgtggtgaaagtcataactatttttaaaaaatgaataattttcaacaacaaaaatggcatcaacttagtaagtgcatcaaatttagatgccttaaatgacaggctggggaccctatctaagaaactgggttaggccaggcgtggtggctcacacctgtaatcccaacactttgggaggccaaggtgggaggatcacttgagcccaggagtttgagaccagcctgggcaacacagtgagaccctgtctgtacaaaaatataaaaaattagttggatgtggtggtgcatgcctatagtcccagctactcgggaggctgaggtgggaggaatgcttgaaccgcagaggtggagacttcagtgatccatgatcgtgccactgcactccagctggagtgcaagacagagcaagaccctgtctcaaaactcaaataaaataagctgggttattatctctaggtggacattgataaaaggtatggtatgttaggtaaaactttaaagcacagattgctagtgctggaaagcatctggacaatctcttcactttacagataagggatccgaaacccatagaggtggacataatgtccaagattacacagcagtaggtggactagcaggtccaggttgcaggtgtctcaactacaatccttattctttccattctaccacattgcctcccttccttggtacattctactgaaacttgatggatccttctccaactctgaagtgcacagagaatagaatttgagatcttcacatcccagagtctagtgcttcgttgctgcatctttagtgctcatagtattggtggagaggtacttggtcaaggagctgtaggacaccattcctttcctgttctggtgataagaagtgcagtaaaactaaggaatgcatactaagtgctcgaggaatacctgtgaaataattcagcagtaaattggtaatttggcaacaaatgacaagagactaaaaatgttattacctgatccactaattacacatgtagaatttatcctaagaaaatgttcagaaatagaaaccaatatctatatacaaaaatatccatcgcaacatttatacaagcgaaacttctacacaaatgtccaacaatagggaaaaagttaagtatattgggagtatatatatgtgtgtttatagatatatgatgacttactatagtgaagtaaatattctcattataaaattttaagcttagcttttttgttttattttaaagagagatcatttgtactggaaagttacattaaaggcccagcaaaatgcttacaacaacgcctagaggactccagacccattccccgggcaatctgaagatctgggacctacctacccaggcctcccttctcccacttaatagaggcaggtctgagggcctgggaggaagaaggcaccgcagagaagcaaggacaacagccttctcctctttgaaccagggtggccttataccaaaacatttattgaactcactgctaaggaactcatgtagagaggaactaaaagttataaataagttctggggtaaattctagccccaaatatactaaatttcatgtgtggcttcagctctttggatctgtcaccttgtctataaaacagtgggtttaatatatctgtccctaaggcatctatattctatacaatgataagaagactgggccgggcgcggtggctcacgcctgtaatcccagcactttgggagtctgaggcgggtggatcaccaagtcaggagatggagaccatcctggctaacatggtgaaactttgtctctactgaaaatacaaaaaattagccaggcgtggtggcagacgcctgtagtcccagctactcaggaggctgaggcaggagaatggcgtgagccctggaggcggaggttgcagtgagccaagacagcaccactgcactccagcctgggtgacagagcgagactctgtctcaaaaaaaaaaaaaagactgcattaaggaaatcccgtgaattcctccatgagcctgcctctgccccatcccaatctcccacactcttagaatgcagcaaaatgagagtcctgtttctagctctcgctctgcctctaatagaggtatgattgggattctccctttagtttaagcactatatgtcataaattatttttaatattacttaacattaatctgcagaattattacagatgacttttcttaaaacaaagactgattctgtcaactttattagtgcctactgtgttgtagtcactgcacccccataagttatccaatttcacagaaatccagatttttcaaaaatggttttggtctttaatggcctgaagggctgctactgaggggaggctgcagcagaggctgagcacaaccggtattgcttctcctatatgtgttgactttgtaaaggatccaggctattggccaactattatgtttaggatcttttgttaaaatggatcaaaatttgaactcacaattcaggttattccaacagccactggcagttaggttattcaattatggcttcattacaatcggcattaaggtctttttttttcttttctttagagagaaaatggtgggacagttaggaaggggtctcactatgttgtctaggctggtctccaactcctgagctcaagtaatcctcccacctcagcctcccaaagcactgggattataggcacgagtcactgtgcctggcctggcattagggtcttaagctcatttcgttctgttccttgaggattaatttggccagaacagttagtattcacaagtggcaacctaaaattaagtatgtgattcatatccaggatgaggcaagttcccttaggatcaacagggcctgcaaggcaaaggtttcctttagttgacctggatatgggtttattgcagtctgtgtgaccacctgtgtaggtgggtaaggagatgagagggcaacacgacatttgcctagtggcctataggcttactcacctgtattttttcaggttgaaatcatcagttgattcagcaaattttttatttatttatttatttagagacagagtctggctctgtcacccaggctggagtgcagtggtgcaatctcggctcactgcaacctttgcctcctgggttcaagcgattctcctgcctcacccccacaaagtagctgggattacaggcaccccccaccacacccggctaatttttgtattttagtagagacagggtttcaccgtgttggccaagtgggtctggagctcctgacctcaggtgatccgccctcctcaccctcccaaagtgcagggattacaggcatgagctgccacgcccggccaattcagcaaatttatgtgggattccacctagaactccaaaccaaggtgctctgaatatgtattggtagtataaacagaatccacagccctatcctggattataagctcgttagggaggtagcaaaatacatgacactgacctaagaacacatgaaaagcaaagaaacatgaatgcaaagtcatgtcatataagctgtttaaatcctgagtaagatgaatttaatttgcatctatcctactgacctataatccgtgactcacttgtctctctcctccagtagacatgactaggcatgacccatatagtactgaactttgtattcccagcaccttaccaaagtaggtgctgggaatacaaagaggagacaccccacaaatgttaaataaaacacttaatgaatggttctaggtaggtggggttgatcaaggaattatcttacaagtggtatgggttttttggttttttctgaggtgcagtctcaccatgttgcccaggtgattctcctgactcagcctcccaagtagctgggattacaggcactaatttttgtattttagtagagacagagtttcaccatgttggccaggtgggtctcgagctcctggcctcaggtggtccacctgcctctgcctcccaaagtgctgggattacaggtgtgagccaccgcgcccaacctagtctttttatagaacagttatctctgtagccaaacttacatcatattatttaattttccttgattcgggggaggggggagggatagcattaggagatatacctaatgctaaatgacgagttaatgggtgcagcacaccaacatggcacatgtatacatatgtaacaaacctccatgttgtgcatatgtaccttaaaacttaaagtataataaaataaaagatttacataaaacatttttccttgattctgtattaaaggaaagatgacattattttcaatgtctgcaaaatatttcactgatgggcatttagagtgtttccatttcccgctatcatagatactgctttaatgaatattttttgtttataaatagttttctttttttgtgtgtggatatagaatcttgctttgttgcccaggctggagtgcagtggcacaatctcggctcactgcaacctctgcctcccggattcaagcaattctcctgcctcagcctcccgagtagctgggactacaggcgcacgccgccacgcccagccgatttcttttgttcaggctggtcttgaactcctgagctcaggcaatccgcctgcctcgacctcccaaagtgctaggattataggcgtgaggcaccccgcctgacctataaatatttttctaagaacatttccttaggctatattcctaaacatggaattattgggaacatttttatttttctattttttttcatctcttcagtattcaaaacattcctaaattctggccgggtgcggtggctcacgcctgtaatcccagcactttgggaggccgaggcgggcagatcacgaggtcaggagatcaaagccatcctggctaacatggtgaaaccccaactctactaaaaatacaaaaacaaaattagctgggcgtggtggcgggcacctgtagtcccagctacttgggaggctaaggcaggagaatgccatgaacctgggaggtggagcttgcagcaagctgagatcaggccactgcactccagcctgggcgacagagcgagactccatctcaaaaaaaaaaaaaatcttaaatttctatataagttgtcaaactattttttccagtttaatcaacttacacttctaccagcagtatgagagcttttatcccactgcacagtcacataggaaaaatggtttatgtaaaggacctctcttctgttatttaatacccatgaatttcttatatagttgtaatcagcgaacccatactactttgggttctgcttatttcacggggaaggattctatatctatcaatatagttcacattctagccatttaaaatcattctttaattcttcattgtgttaacagatcccaataagcttggcgattttcttattgtcaggactcgggtttatttccagtttttgctattaaattggctatttctgcatctttgcacagtctcccctactttaccaagagtgaaactgcttgatcaaagaatagaaaatgttttgtagctcgcattagacactgccaagttgttgggcaaggtttttaaaaaaggaatattggctgtacagaggtgcagctgtgtggaccatcattcctgagcagggtccaatagcctggcatcttacctggaagtcaggacatctaaacttccctatgggaacttggtaagccccttccccatttcgaacctcaattttcttatctataaaatgaagaatttggatggaatgaattaatccttttctaccagaaatctagccatatttcacctagtctattctgtatcaccctctcctgactcctacgtgctcagaatctagctcagtgcttgggacagttatgtttcctttccctttgaagtgcccaaataccagtgtaatgagaaatatggcagagcctgagagttcagagcacaggccagggtcaaatctcagccctccacttacaagctgtgtgacaaaataacctcccccgggctcagtttcttcactgtaaattaggttaattgttccaacctcatagggttgttaggagaattaaatgagttaaggtttgcaaaacgctaagaacagtgcctggcacacagtaagtgctttataaagtgtttgttgaataaataaaattttggacctaaactctgggtctcttcaggactgcaacagctttgtaactggcaaccccacttttaggtgcgttcccactcctctaaaacccagagatctaaatgccaaatctctctgcttaaaaagtctcccagggctcctaggcgcctccaggctagaacagaaatgcctcagcttgaagacccaggcttttcaggtgaaacacctaagggtcaggagacgctaggatcatcactcaaggatcccagtgaatttttccaaaatacaataaaaataaaaacaaaaagaggcaaacagggttataaaaattgtggggcattttaaatgtttcattgaacaaattaaagcattaacagccctcccccaaccaccaccaagcccaagagaccgtaaatatgctgttcacaagataactgcaactttcaagggctctcaggctgctacttcgggcagcacaattggcggcacgacgtggcaagcaggcagtagtttccaaccctggagggtcagcgtctggagaccccggccaaggcatccacagcctaaagatgatgtccgcgaccgcccgggcagcctcgtgcacggaaaaacctcaaccccggccccgcccacccttcctgcggccaccccgcagccctggcccctcagtccatccactcctgcagcgcggccccgcacccagggcctgcactagaaccgctgttcctaccgcggcgccccctgggagccaacgccgcgatgcccgcctgacgtcaggaagtcgaatccggcggcgacgcctttagggagcccgcgagggggcgcgtgttggcagcccagctgtgagttgcccaagacccaccgggggacgggatctcgctccccgcgccacgaggctcggccaatgggaacgcgcgctgcgaggcccgccggtctgccctgcggtgctgaaaacccggcgcgcaggcggctggctctgggcgcgcgccagcaaatccactcctggagcccgcggaccccgagcacgcgcctgacagcccctgctggcccggcgcgcggcgtcgccaggccagctatggcccccgacccggtggccgccgagaccgcggctcagggacctaccccgcgctacttcacctgggacgaggtggcccagcgctcagggtgcgaggagcggtggctagtgatcgaccgtaaggtgtacaacatcagcgagttcacccgccggcatccagggggctcccgggtcatcagccactacgccgggcaggatgccacggtgagcgcagccaggcgggggcacaggagagggcgggaccggaggctgagtgcaggggagacagagttacgcactccgagccaaacaccgactaattcggaggaaagcccggaggcgcctgatcatacctgttgcccggtgattgggtgtcctgcggatgcgggatgaaaaggcgggagagaggcctggagaagtggagtctggggagtggggatggaggccaacaacacgcacacacaaacaaagggtcccgcctccctgccgtgcattccatctgcagccccgagcctcaggtctctgggcggggacagaaccccgagctgggtaggctaggagggaggagagcaaggatgcaggccgcctggggagggagggggtcagtggccaggggagggagtcacatcctgtctcgatggctaggagaggcagcgcagccgcgtctggacctaggtgccggtctccactcgccagcaggagcggagagggagcaggaaaggagcccattctcgaggatggggctgaaacgggaagcttggggagaccgctgccttggggacccctgcgtcgtgtgaagactggaggacgcggaagggacagcgctggccggggagggcaagcggccgctggcgtacataagggattgggaatggcatacacttagcgaggacccccagagctgttctcgaatcgccggggaggccactgagccgcaggccagcgaggtcttcagctattccgcggagcggaccgctgtttacgctctggggcggtaggcccttcgcggggtcctgtcccttcttcccttggtctcactgcggggtcggcgcgcgccccagccccaggcctgctgcttccctttctagaccacagccctcagagctaaggccccggcgcctctctgctgggttggagtcctggggactcagtcctagggactcgaaagtcggggcgttcccttcaccgcgtttcccccttggcggccagaatggcgtcccctccccttgcatccccctctgatcccgtgccctgcagcgtgatgccctccactgtccctatccactaccctggcgtcccagagtgtgccgcgggtcaccaggttcccataacgtcgcagcagagcttagacgctgcggggcgaagacccgccccaccctctgacgcgaccagcctagtgggcgaggccagagcttgcgcgggtcaaccagagtgaccactcgggagccctgactgcggccaagggcgcaggcgtgtcccggcgcatgcgcagacgaaacaggcaccaacgctggagcttcccgcagtgtgatttggggccgggaatgccgcggcggggacggcgattggtccgtatgtgtggtgccaccggccgccggctccgccccggcccccgccccacacgccgcatcacttacagggcccggggctgccggacctgccaacgtgaatcttatcgccatggaccttaccttgcacaacccaaagtagctgccttggggcagggggtggccagagtgcttagggaaatgtggagccctacccagaacaacggtggagggaaagggaagaaacgcagaagtgccccagttcggacgtagggaagtcttcctcttcgtggtttttggagaaccctagctaagagaggaaagggacttattgaaagacccgcaagaagggacggaagtctcatagccctgagaggtgaagccagctggagttgatgggtcgaatggggacctagagaacttttctgtatctagaggtttgtaaaatgcaccaatcagtgctctgtaaaaacgcaccaattggcgctctgtagctagctagaggtttgtaaaatgagccaatcagcaggacgtgggcagggacaactaagacaataaaagctggccaccccagccagctgctgcaacccgctccagttcccttacaggctgtggaagcattgttcttttgctcgtcacactaaaccttgctgctgctcattctttgggtctgcaaagagtgttattcctttaagagctataacagcgggaaggtccacggctccattcttgaagtcagtgagaccatacccgccggaaggaaccaacgcccgacacagccccacccatctctcctgtttctcacctatactgaaattcttgggcaaaagctgtctgtggacacacccaggggaaaggccagcccaggcaggtgtttcttagtggttcccctcagccaatgcttcccattccttgatgcatccttctaactagagcagatactcggtgatcttaaactgtggacacctgggagcaccctcaaaaggcagctgggcctagggagatggcctgtgcttctgtgtcaggagttggttccttcaggtgggctcgtggtctcgctgacgtcaagaatgaagccatgaaccttcgcggtgagtgttacagctcttacaggtggcgtggacccaaagagtgagcagcagcaagatttattgtgaagagcaaagaacaaagcttccacagcgtggaagggtacccgagcaggttgccgctgctggacgttggggggtgtgagggggagcagccttttttttttttttttttttttgagacggagtctccctgtcgcccaggctggagtgcagtggcgcgatctcggctcactgcaggctccgccctcccccggggttcacgccattctcctgcctcagcctcccgagtagctgggactacaggcgcccgctacctcgcccggctaattttttgtatttttagtagagacggggtttcactgtgttagccaggatggtctcgatctcctgacctcgtgatccacccgccttggcctcccaaagtgctgggattacaggcgtgagccaccgcgcccggccgggagcagcttttattcccttatttgtccctgcccatgtcctgctgatttgtccattttatagagcactgattggtccattttacagggtgctgattggtccattttacctctagctagctaaagagcacggattggtgcattttacaaacctctagctacagaaaagttctccaagtctgcactcgacccaggaagtccatctggcttcacctctcacttcaacttgggtacagccttctggcgggcaggaggatggcctttggtgcgaacactgccggagtccagggggctggctccctcacctttcatcttctcccggcacttgcaggatccctttgtggccttccacatcaacaagggccttgtgaagaagtatatgaactctctcctgattggagaactgtctccagagcagcccagctttgagcccaccaagaatgtaagaccctgtgtttgctatgtcgcaactattggttgttgagggggacagagagggggtggaaggagagtctagatgggatcacagtcatagtaatcacagtcagtagtagctctggggagtcttgaggtccctgcttctcttgcatagtcatgaggtcacaggcccaagggagcatggctttgcaacctatggctcccccaaggctgccactaccatggctgccatcattgttatcatcattgttatcatatgagcacttactatgcaccaagcataaactcataactcttacacatttacagatgagataacaggctcagggaggttaagcaacacagccaaggatcacacagttagtaaatggcagagcaaggacttagtcccctgaactcttaggcactatcccatggcacctcctcctgtcatcctcattgtcgtggtatctttgcctaggactgtggacttcccacagctacctcagtgggaggtccttgagcctgagagggcccttgtctccagtagcattggggtgcagatgagaagaataacagctcctcttcctcttctgcagaaagagctgacagatgagttccgggagctgcgggccacagtggagcggatggggctcatgaaggccaaccatgtcttcttcctgctgtacctgctgcacatcttgctgctggatggtgcagcctggctcaccctttgggtctttgggacgtcctttttgcccttcctcctctgtgcggtgctgctcagtgcagttcaggtgagagcctttggcttgtcaagtgcacagcaatgctcagcatccctggggaaagctccttgggtgtttgaggaaggccaagagtgcctgccctccaagcagggcagatctgaaggtatgcaggagtgagtgcaggaacatgcattctgctgtcttgacctgtctgctctttagccacatggacatcttcatttctctcactgcctttttagctgcttctccaagggttctcttcttcctatgcggtttgttctctgccacagcccacctgtgccaggagccaagtttctggtttcttagcaaagcttggctccctccccaccactgacattgcccaatatgttaataatgattgagcgctaattcttgactgtcaggacccatttggcaagccttctgctcatgtttcagtcctttctgtattctagatgtcagtccatcataagtcatgagcttcaggccaggtgtggtgactcatgtctgtaatcctagcactttgggaggccaaggtggccggatcacttgatctcagttcaagaccagcctggccaacgtggtgaaacctctactaaaaatacaaaaaggccaggcacagtggctcacgcctgtaataccagtaccttgggaggccaagatgggcagatcatttgaggtgaggagttcaagaccacctggccaacatggtgaaaccccgtctctattaaaatacaacagttagctgggagtggtggtgggtgcctgtaatcccagctacatgggaggctgaggcaggagaattgcttgaacctgggaagcgaaggttgcagtgagccgagttggcaccattgcactccagcctgggcaacagagcgacactctcaaaacaggccaggtatggtggctcacgcctgttatcccagcagtttgggaggccaaggtgggcagatcacctgaggtcaggagttcgagaccagcctggctaacatggtgaaacctcgactcttactaaaaatacaaaaaaatcagccaggcttggtggcgggcacctgtaatcccagctacttgggaggctgaggcaggagaattacttgaacccaggaggcggaggttgcagtgatctgaaaccgcaccattgcactccagcctgggcaacaagaacaaaactgtctcaaaaaaaaaaagtcatgagcttcggagctggcgaaacagaagaacagagaagggatggtgatttgccccaactcacgtgtgagtcagtggcagaggcagaactaggacccatgtttcctgactcctgaggtgcatcacaggccttggcagatgaaggaagtgggagaggctgaaggaggcatcgaggtcagtgaaggcgacactggggctggtgggctgctctcagtgttgactcttctcacctaggcccaggctggctggctgcagcatgactttgggcacctgtcggtcttcagcacctcaaagtggaaccatctgctacatcattttgtgattggccacctgaaggtcagtgggatggggaggagctctctaaaactccaggcaatgaagggctgccttgggggaagcttttcatactcgtgtccctgcttttctgtagggggcccccgccagttggtggaaccacatgcacttccagcaccatgccaagcccaactgcttccgcaaagacccagacatcaacatgcatcccttcttctttgccttggggaagatcctctctgtggaggtgcgtggaggtatcagtggaaaggtcttggggaataggaggcagccaacataggggagttggggaagatgcccacgatgttgtcagtgtgggcaagacactggggctgggctggctggggcttttgccattttggaagttctggaaggcaacaggcaatagatgggggctgcccaggagggagtcaccatcctccctagagagttcagtcagcaaaccgttactgcataaaaggcacctcattttgcaaaggatccagcggatgaccagaaggatccaaatgatgagatagcctatccttgaaggtgctgatggcacctcctggaggtgcttttttgacactcttgccccaggcaagtattccccttgcactttgtatttctctcccacacttaggtatccttcttgtcacagtcttctctgtccagggctggactgtcttactcttctttcatgtccaatatctggaacattcattcactgagtacttcttcccaccctgctgatccccagcctgatttcctgggtggtcagcgttgggtttgagatgtcgtctgaagttgtaagcagaaataatgtagctgctgaaggaataatgcctgggggtggagatctggtgagcttttagtgagcattaggcaatggaaggttctaaaaggccagcagaattctttgaaaagttcatttaaagccctttgtcccaaggctgtaggctgcagagttcttccaggtccacctcctccactttgtgacatttcagcttgcgaggaattaaattgtcgttaaaacacatttcagttctaggcatgagttcaaggtagcctggcgttcctctcgcccctggccatgagaactttgaaagggctttggcagcactggttggcctggcatgaggagctcatagcttgaggctcatgccccacctgtccataatgttcttattttcccatcatgagcatggacttgggtttgttacatgtccgataccattatggtcagtactatgcagatgacgaagcagccctgtcccccgtctgactcccatggctgcttcaagggcagtgtggttatttgctgggcagtggcatggggcttgtgcatttctactgtcactacagagggtttaaaaaaaagacatgggcaggttaagtggaagggaacagtctcacaccactacctttattgcttcttggtacttgggttttcaggaaattcctatcagcagacatcaaaaacagagaatgaagggacgcagttggcatgtgcctgtggtcccagctacttgggaggctgaggtgggagcatcgcttgagcccaggaggtgaaggctgcagtgagtatgatcacgccactgcactccagcctgggtaacagcgcaaccctgtgtgtaaaaataataattttttaaaaagattaaaaccaaaaaaaaattgtaaacagagttcaacgtaacttacagattaaaaacagtaaaatatgacagaaactgagaggtagtcatgatcagatatggcctccttcgggtgccgacatctgaactgagacctgaatgatgaaaagggccaacactgcaaaaattcagggaaggaacatttggaacagagagaacagtcaagtacagaggctcccggatgttcagggacagtaagcaatgagagaatgagaagaccagaaaactagggaggggccagatcatgtagggccttagaaagccatggtaagggtgtggtaagaagtttgggttttattccaatagcaatggggagtcacaggagggtttctggtgggtacagcaatctgctttgcactttaaaaggcttgctctggctggaggtggagaggatgaattatagagggtaggtataatcacagatataacctcagtgaggcggctggagcgagtccagaccagaccacggaggagcaggtgaagccaatggatttgggatatgttttggaggcagtgtaagcaacgcttgctgaggacctggatgtggtggtgagaatcaccccatctcgagcaacattaactgaggaaaaaattgaaaaaggggcgcccttgcttgggggcttcctattgtggaactgttatggaaaggagccccatccattgcttcctccttgaatggcaaatgcctttatgatccctataacttgtcccattatgtttagacccttggtggtcagaagggttctatttagggcagtgtcccctgcccctccttgtcctccaaaaattttgggaggcactgacgtggatgtcatggggtcagcacaggcatcaacatccccagagggatggaaccaagcagcctattgcccaggcattcactaacaggcagcccatcctcagcctcatagctggccggggagaagaaaggctattttgggtcccagatctttttttttttttttgagacagagtctcgctctgtcacccaggctgaagtgcaatggtgcggtctcagctcactacaacctccgcctcccgagttcaagagattctcctgcctcagcctcctgagtagctgggactacaggtgcgtaccaccaagcctggctaatttttgtgcttttagtagggacgtggtttcaccatgttgcccaggttggtctcaaactcctgggctcatgcagtccgcctacctcagcctcccaaagtgctgggattacaggcatgagccactgcacccggtctctgtttacaaatttatcaccagcttcatcccctaaggttataagctccatgagggtgggaagtctgtattgttcacctctgtatcctaagcatctagaacatagcccggcacacagtaggtgctgaagaacttgaatctgttaatgtagaaaggatgtttcatctagctgaagtgtcttgtacagaataaactctcaataaatgaactgtggacacatggaagggtgagctagagctctgctcaggggttgagtgctcctcttgtgcccttgtggttgtctggttacctgaactaattggagtgcgatgcagacatagtcatggagtgagacagcagaactttgctgtcttgtttgtgagcccacatcaggggttctagactggctggttgacatggtggccccagcctgtctcttcagcagctcggcttataaaaaataaccaccacctactggggaaaactgctggaaccttcagattgccaaattgttcttggtgtcttttccagaaatatttgccaaactcgaattagccttcaggagatttgataaagctcatgtttaagtcaagagaccaaaagattttgatggggagaattaggggctggatatagagggaatacttaacctgtataggggcagatatggttgtccatggagattctggtgtgaaaaagtacgatggcggccgggcgcactgcctcacacctgtaatcccagcactctgggaggctgaggtgggtggatcacctgaggttgggagttcaagaccagcctgaacaacatggagaaaccccatctctactaaaaatacaaaattagctgggcgtggaggcacatgcctgtaatcctagctacttgggaggctgaggcaggagaatcgcttgaacccagggaggcagaagttgtggtaagccaagatcgtgccattgcactccagcctgggcaacaagagcgagactccgtctaaaaaataaacaaaaaagtacgatgggagaaaggggagagggcagtggggcctggaaacctcatgacaaagagaatgaacacaagagggcctgtggtcctgtagactctgtgctgtgcacatccctcatgtgagcatgggccatccagctgcaggccatggtgtgacacactctgcagattacagtctagggcttcatgttccatgtgctggaggtaaggctgggcctcttggagctttccaatagcaccaacaagctgtcagccctggaggaggcctaaacctccaagcaaggaaaggtcaagtcacagagggaggaatcactggtctccgaatgctcatgtgtttgcttttcttcacagcttgggaaacagaagaaaaaatatatgccgtacaaccaccagcacaaatacttcttcctaagtgagtgtccccatccaacacaggggagctgcctcaggagggaatgctgagggaatgaggaggatgtggctgtccaagggattatggtattttaaggaaaggggctagaggaagtaccccactcccacccccagttactccctgcatgacagcagtttgccatctcagctgagcgaagtgaagttaggctgatgattggttgaaggcaaactagttcttcccatccaaccccagtttccactgggaagctgggtgtttggggtgtagaggggcctcttgctttatcctcaaccttatctttttttttttttttttgagacggagtcttgctctgtcgcccaggccggactgcggactgcagtggcgcaatctcggctcactgcaagctctccgcttcccgggttcacgccattctcctgcctcagcctcccgagtagctgggattacaggcacccgccaccgcgcccggctaattttttgtatttttagtagagacggggtttcaccttgttagccaggatggtctcgatctcctgacctcatgatccacccgcctcggcctcccaaagtgctgggattacaggcgtgagccaccgcgcccggcccctcaaccttatcttaaactttgtcaagatgggccaaggtaacctggtagagcccagtccaacccccagaggaacaaaggtacagatagttctggaaggatgggtcctgaggagagaatggaagagctgttagaacgaagaagatctttctgatgactgccacatattcccagctttaaaagtctgtcccagctactaaggaaactgaggtgggaccatcctttgagcccaggaatttggggctgcagtaagctccgattgtgccactgcactccagcctgggcaacagagtgagatcttgtttcttaaaacaacaacaactctgctccataatgcctaaaatgagctttaaacgcctttaaattttcaaattttttaaagaaggaagggaaggagtccactgatcttattttagtttgaaggaattcatcctaactgcctatcaccaactatcacgaatagagaaaggcgatggggcagaagggtagagcagagacctctggaagaaatagttttagaatccatggcacatcaagatggaggagccatgggtgagcattgtcatgctaggagttatgggtagcatcaggtgccacagagaagggctacagaaaaggaaatgaggaagcatgtagaatgcaacacttcttcaactcccagttttctttcaagagaggcccctctgttccgtcccacagctgacctccagggcttcagattggggtggcacaagcccatctccctagtttaaggaagtgagcttcacagcctgtgaaggatccacagggtccctcccaacacacacacactttcctgctcctgccccttcacctgcatggtggagctgccaggaacaaagggcagatgactgtagggacagggctgtggccaaggtaagtaagagagtattagcacccttttaaaagtgtgggatccttggagtgtgtatgtagaaaagagaagaaaaatgaaaaataataaaggtgtgggagcagagcaagtcccatgcgtggggcctgagttcccaagcacctgtcactgaagagtgccactcgcacccctcaccttccctggcatcctcttgggagtttttgccttccccagacttggatttatgcccaccttcagtgcctgctggttccagtggattgcagagcactcaagcacctggaggggagacagaagggatggttggaagaggcagccccctgctagaggccatctctcccaacatcaactggccctttcatgaccttcctgtgctcatgcctcctctttgtctcggtttcctccccagttgggcccccagccttgctgcctctctacttccagtggtatattttctattttgttatccagcgaaagaagtgggtggtgagtatccatggcccaagaagcccacatccttgtctccagcacccagagtgggggataggggttccccaggggaaacttgagactgactctaggcctaatttagaacaaaataatagaaccagacacagatcctccttatctctaagtgggacgaaatgatttgagcttagcaggcagcctgattcccaatgtgtaatttcatgcggtcagtgtctccagaggttcttgtactgggcataatgccagggggctgagttgggaatggggaagatgaatgagagacaatacctactttcaaggaaacttctgatgaagcagaatgtggttattaatcagaaaagaggtacaggcaataggttctggggactccaaaaggggcctgactgcacctggctttgtgaagtcacttttctagctggccttgaggctgggcagggtttctgacaggcagaggtggagcaggggggatgaactctgagcagagaagctggaaatgaggggtaagtttgaccaccagacatattgtggaggactagtgtcaggggaagagtatggtgcttggttcagtgatgagagatttgatcagggcactggcatggactgagccatggtcctggcagattcatttggcggcatgctgaaggatttagattggctaggaagagctagaggcaaagagaccttgtaggccttggtacttttgaaggggacatgcaagaagggctggggggtgccaatgggaatggaagaaaggagcagtggcactagatactgcaggattggacccctgagaagctgaagatgagtgagtctggataaccaggagaatggctgcaccatgcaaacaaagagctgctgagaggaagaggaagagttgttcgtgactgttatgctcgctgcttttctcactataggacttggcctggatgattaccttctacgtccgcttcttcctcacttatgtgccactattggggctgaaagccttcctgggccttttcttcatagtcaggtagtattcggtgggggcggatagggactggtgaaggaaatgttggggagtgaccagtctggtctaggggccgtgctggggctttgggtaacagtgggtgtttcaggagttggcttgggaaagtagacaggctggagcagttatctgaggggggaatcagaattctgggctctgtgtgtactgtttttgtctgtgtaatacatctaacaggttcctggaaagcaactggtttgtgtgggtgacacagatgaaccatattcccatgcacattgatcatgaccggaacatggactgggtttccacccaggtaagggacagtcactcagaagactggagcataacacaactattgaaaaggatgcgtaggtgaaaacagcaaaaacaaaaagtcccccaaacagcattttctcattagcctgaggctcttgttctgcaaccatgtgaagggagtgaccaagacagtctcatgtcccttcctcagccagctttacctggagaatgctgggctggcctttccatctgatattcaacatgctctcccctgaccttttccgccagctccaggccacatgcaatgtccacaagtctgccttcaatgactggttcagtggacacctcaacttccagattgagcaccagtgagtagggagcctggggaagcagggtcctggggagggtgtaagtgttgggtacaggtgggagcagagaagcaggaaccactgactcccccgttctccctaaagtctttttcccacgatgcctcgacacaattaccacaaagtggctcccctggtgcagtccttgtgtgccaagcatggcatagagtaccagtccaagcccctgctgtcagccttcgccgacatcatccagtgagtatctgagaccaggaagatggctagtagggagggaagagggcagggcaatggaaatgatgacatgtagggtggggagtgaacagaaggtgttcccagtcgtgtgggatggagttcaccatggcaaaggcaggattctttattggacctgtggccaggtcaggcctttgccctcattggggttcccctcagtaccatggcccaagctagctttctctaaagtagaggggaggaaaacctccagatggaagaaggccttaacctcactgctccatctccggtgggttcaactctgcttgtctccctcactgtctgcccccattttgtccctgcagctcactaaaggagtcagggcagctctggctagatgcctatcttcaccaataacaacagccaccctgcccagtctggaagaagaggaggaagactctggagccaaggcagaggggagcttgagggacaatgccactatagtttaatactcagagggggttgggtttggggacataaagcctctgactcaaactcctcccttttatcttctagccacagttctaagacccaaagtggggggtggacacagaagtccctaggagggaaggagctgttggggcaggggtgtaaattatttcctttttctagtttggcacatgcaggtagttggtgaacagagagaaccaggagggtaacagaagaggagggacctactgaacccagagtcaggaagagatttaacactaaaattccactcatgccgggcgtggtggcacgcgcctgtaatcccagctacccaggaggctgaggcaggagaatcgcttgaaccggggaggtggaggttgcagtgagctgagatcacgccattgtactccagcctgggcgacagagcaagactccatttcaaaaaaaaaaaaaaaatccactcatataaaaggtgagctcagctcactggtccatttctcagtggcttctccatcctcatttgcaaacctcagagggataaggcagttgaacctgatgagcaagaattataacagcaaggaaacattaatgcttagaattctgagatccagcacaactcagtctgtgggagctcagctcgctgcccagggataggtatgacctatgtctgccttaggctgctgggagatgccattctccagtttcagaagcaggcagggcaaaggtcaagactgtggtattggggtcttttggctctgaaggatcctggaaccactgattttggtttattccctccagggtctaaagagaacaagaggtgctagctcttaccaaaacagatggtagagagagttgctggctatttaaaaagctctttcatcttttaattcacctcttcttttcacctctttaaccactcctcaggaacagaacacttctaggactgggggtcttttagctccataagcaagtgagcagatgggacaagttagtcttttctccctagaaacaaaggggatgcccagtggtttccctttgcttcccaacctaaaatttcaagtttaataaaatagcaattagcagaagtgaccaaattgggagataattatcagtcatgaggaaagacacagatttcggtcataaagaatgtaagggctataagtagaaactttctataacctaaatgatgttatagaattatttttgagcaggagcagaaagattaaatatgatcacttcatacttctaaatcagaaataggaagattaaaaccacagaacagtttgtgatttctattgctgtagctaggtatcttactctgtccactcttgttcaagtatctaactcttctggaaaccaaataggctttagaagagattatcctatattcctatcagtataatactaaaatgtaactttttaatcatctggtttttaaaagataaacagtttagcccatctctccagagagcaaacataggaatatgactcaggagcctcctagggcttatcatcagccctcacacccgcttccccctccaacccacagcctttgcttccaggtggcaggattactactttgcctcttcagcagcatctactctaggcatattgatcattttagacactgggagaagagaacctcaaactaggaggaaaagacagagcctccacttagttttgggaggggatggcagacagtcaaggagatgagcgtcctaaggcatgttgggatagggtcagatgcaccacccatggagaggtttgtcaacacaaagacatggaaggttagaggtttgtcaacaaaaagacatggaaggttaggtttgtcaacacaaagacatggaagattagaggtttgtcaacacaaagacacaggaagaatgggctgcagaagatttagatgttttccatttgggcacattttacttagctggagaactaggtttaaaacagcctgggtaggaaaattagaagcaagctggatgcagtggctcatgcctgtaatcccaacacttttgggaggtccaggcaggaggatcacttgggcccaggaggtcaagcctgcagcgagctgagatcacaccactgcactccagcctggggtgatagaacaagaccctgtctcaaaaaaaaaaaaaacaacaaaaacttagaattgaggagttgtacctccattggcttcctcactccaaaataggtgctgatccttcctattcctattctttgccaccttttgggtgtggtgtcaccagcctgtttagccaagtagctttgggcataggctgcccaatctgagcaaacaccagtgaggctctattgagccaagaccaagtcctcaaagcacctgaaccactgtggccttctcagcctacagcagtgtggtctcttacatggccacaaagggacacacagtgacaaaaggctcggaatgttacaatggtaaaatgagtgatctcaaatccactgacagatataaaataggcttagagaggaaaagctgcctctggtcaagtagatcatggcagcatgaattccaactcacttttttacaactccaacttctatgtttatctttgttactttcacttttttacaacctggccagaggcattttttaaatcaggcccaatatcagtattctttttgtgtgtgccaattttgttatcacatccctatgaagttgaaaaataaagttaattttgaccaaaagacttcatttgtaacccatgatgttcatctgtgtgtgcacaggattcctgagtgcctctgctacgagttactgttcacctctctgtgctcttaagttcttgaatcactagactcccctttgtattgggcagaggaagaaacatcaggaccctccagaaaacaccaaggcaagggtgaagtatggcaaggaagagcaaggcaaagtccttctgatgactcccgtgttcaaatgtgagattgtcaataatctcaccaagtttcacacgtatcacttcctcctattcatgaggcaatgcccttgcccttttgtccttcagctttccattttgaattattttctctttatttttacacttacttgttttgagacaaggtctggctctatggcccaggctggagtgcagtggtgctgccatcttagttcactgcattctctgcctcccggcctcaagccatcttcccacctcaggctaattttttttttttttttttttttttttttttttttttttgagaccagagtttcactcttgctgctcaggctggagtgtagtggcgtgatctcagctgattgcagcctccgcctcctgggtccaagcaattctcctgcttcagcctcccgggtagctaggattataagcatacaccaccgcgcccagctaattttttatttttagtagagacagggtttcaccatggtggccaggctggtcttgaactcctggcctcaggtgatccacccgccttggcctcccaaagtgctgggattacaggcgtgagccactgcgcctggcctctctttacttttaaactcatttctagtttccaaatagtctccctaagtcctatctgcctaaatcttcctctgcaagtgtgatccctcagagcttgactgcagagcagtgcctcttaaccatccaactagaacagctctgagcaaaaacatttgtaggcatcattaatcttccctgcagtgtgcacacagaaagtcagattaacaaaattctataggagacaaacttaccttcaaaagacaaaagaaaaccactacattcttgaccaccacagggtataagcccttaattattaagagctactgcactgaggcaataactcctaagaaatcttaacatttcgccaggcaaggtggctcatcctgtaatcccagcactgggagagaatggcacacgtaatcctagcctttaggaggccaaggcgggaggattgcttgagcccaggagtttaagaccagcctgggcaacagtgagatcccatctttacaaaaaattgaaaaatcatccaggcatggtggcctgtgcctgtaatcccagctgcttgggaggctgaggtgggagaatcacttgagcccaggaggctgaggctgcagtgagccaagatcgcactactgaactccagcctgggtgacagagcaagagactctgtctcaaaaaaaaaaaaaaaaaagaaatcttaccgtctttagttcctatcaccattactgcagatttagaagcaatctacctgaatcagaaaatagagctcaaataagttgtgtggcttggtataatctgggaaaatcagtttcaaaagttacctgcccttgggatagaactttttgtcaacaccagttttcaaaaagtaccctagttatgaggccgttgctgggtaaactttatcccattccagcttcaaccagaggaacctgtacatcctaaagtttcacataagattacacttgaagaataggtttctccattaaaagacttgaaaactactggtcttcaggctccctacctgtttaatctgtcaagacattgccagcttaaatttcggacagttacataagtgtccctgttaacttcaaatggccctgacaggaatgctaaaacgtcagacattcaaatgggccaagctttatcaggattataaaactttcaaagctcaaaaacatgccatctctatgggaaacagtatcttggatttgatgttacaaaaggaacaagaaaatggtttctgaatggcagctttcagtttacaagtagtggcaaagtaaatgcttggatgttatgaggtagttgatctaaattgtgaggctttcttaaaggcactcctttgatctcatggagtgagagactagaaatctattcaacgtattaaaactcctctcccagcaaaataaaataaacaaaacatcctcctcctaatggctgaagttccatctagctgctatggccattttatggagcatggtgccatcttgtggccactctcaaaccacccattgttaatcaagtgcaattacagcatgttaagagtgaaaaggaaagctatttggagccatggtcacttgggatattttcaaatgttctcaaagaacatgacattttggttacttttagaattttattgacttttttcttcataactttaaaacaaaaacagcgcatgaaaaccagtgtcttattccaaagtctcaactcagctgattgccaggtgaacatcaccatcttactcctctgaataactagacacaaattacatagcaagttcgagtttctgcccacccaagacacagccagtaatcagtcacaaacacagacacagccaactccaggggctccagctttctgcccatcttctctcagcagttcctcccatctgctaagatgcgccttcctggtggctctctctcaaggtgggtcaaggctgaacaagacagaaaagcacagtctaggtccaccatcacctcccactggccaccagttggccagccaggaaatcatttctgtacatcttttgtctcccccttttatctccctctctcttctccaaaacttgttgctatctatcactttcatgtaacaatggacttagtgtccattaaactgcctgagaagtggtttgagcctgacatattttcctgagctaaaaaaggaaaagtacctctgtggccttcttgccattaagatcaagtaaaaaagggactagcactactgaaaagggtcacgctagaaaagccttagaatcctctctccaccccgtgaaggtttctctagctgtagctcttaagggtacaagacggcaaatattctggggtgaaggaggtataatggggaaacacatttattttccccttttaaacttccctgctgccccagtctttgccttcttcttagtggatcccttgggttctggctccttgcgcttagctgaagagagtgagccggtcaccttgaagaaatcatccaggcggccctgggtgctgccttggcggctcttactcagcctcttgaccccactgcggattcgctcctcagagaactgcttttcaccacacatgaacttgatcagctcttcttcatttggctcgctccacttcagctccacagactctgggtccagcacctcaggttccaagaagagctggtgagcctccttgtggagccaattttctggcacagggtacttgttggggtcaagtcgccgcacgatctcctcgatgctcttgtgcttctggatgaggtccacagcccgcttgggcccaataccccggatactctcacagtagtcactgcctagcaggatgcacagatccacaaactgttcctggttcaggcccagctcctgcagaatccggctcaggtggaattcctggattggcagctttttggcttcactggcagtcaggtgtcgcattagcacagggctgccgaaggtgaggcagtccatgtcctcggtagccgcagcatagactttgccagccttcaccagggcagcacagctggcctctgcctcactgggtgcatcaagataagggatgcccatgaggctcagcagatgtttgcactcatcattgtgctgcttagtgaccttcaccagccgcttagtgaatttttccacctcctgctcggccccagcagcctgagcctgctgcagctgcttctctgcctcagcccgccgctcactgcgtttggccagctcgcctgacttgagctgtggcggcttgccatcaaagacatacacgggcttgatgccgttctccatcatgcgaatggtgcggtagaacatgcccatcaggtggctggtggtctcaccctcctcattctgcagcacatccccaccctggcgaacagcaatcaggaactgataaatgctcatagaggcatcaatggccaccttacggccaaagtagctcttgatgtcattctcccggatggcactgggggccacatcagcaattagtttggccaggccttgaattcccatggcaacacagaggagggatgactaaaaaagaaaggcaagtcagagacggaggaaaggagaaaggttataactggtgttatctcaccaacttcatgccttcaactaaattccacacaacaaaaaggacaccatgtcagcactgctaaagataaaaagatgaacaaggtccccattctcaaaaaactcagtctagcaggagaatttactcaatagtaaggctcaacgagtaccagaaattgaaccacgtgcttagagaaataagatactgttgatattctaaggtagcagcattatttattacacaaaaaaaacctgcaacataggtctccatcaaggaccacagaaggccaggatgcttggcctggcttgaggagtccagggaccataatggcagacctgaaagacaggcaaatacaccagctaaacaaacagatctgatttgttttgagtctctggagaaccctgactaataaggcagccttgaaaaaggattgcaaacatatctgaatggaggtgatgtggctttctcacaagcttctctaaactctcttcatcatcgcctcagcacataagagtttctacttttattataatgttgctagagtttcaagtctttccctttgcgttttctcgccaccactcagtctgaaatgttaactccatggctcctccccaggtcctgatttaggggtctggcatgctgtagtcactgggctcaaaagagtattgcacttcagagttcagtgtttcccagatagcagtgtttcccaaatcaccctcacgatttttgctacttccaactaaaacccgtactttcattcacttagaattttttttaaaaaactaaactggaaaactcataagcaataatatttgtgttctattagttatattttaatatgtattaaatgtataactattaaaaaggatttttagggggtgcaatttaaaatcatcttgccatcctggccaacacggtgaaaccctgtctctactaaaaatacaaaaaaaaaaaaaattagctgggtgtggtggtgtgcacctgtaatcccagctactcgggaggctgaggcaggagaatcgcttgaacccaggaggcagagaatgcagtgagccgagattgtgccgctgcactccagcctagcaagagagtgagactccgtctcaaaaaaataaaaaactcatcttgtgcccactgttggtatgtgtccaatactccaagaaatattctactggggccaggcacagaggctctgggcagtaatcccagcactttgggaggccgtggtgggaggatcacatgagcccaggagttccaggctacagtgagctatgattgtgccaccacactccagcctgggcaacagagcaagaccctgtcaagaaaagaaaagaagacaaaagaaaagagaaagaagaaacgaaagactccatcaggccttttcattgttcccactctttcttcacagggttctttctagagcatcaatgactgttcaattcttccttctaattcagtccaaacacttcagcatggcatcacgatctttcatgttctggttcccaacctaaccctacattctgggatctcaacagaaagctggaataaggcccgccttttcccacttttccttagctgtgccctcctctcgccatcctctcacgcgtccttccaggtccatccctggattattaatcaattaataattaattgacaatgaattattcatttgattaatatgaataattcccctgtgaactgcagcggcaaaagctctggccttgaatctaggcgcggcatttaccatccgtgtgacattaccaagccactgaggtttattttctcgtctacagaagaagaacgattaccatgcctgtctctcagggctgctgccagggttaactgagacaacagacagaaacctctaatgtcccctctccaggcctgttcaacccttcggctcttgcctcaagccggccgcgctgctggagtgtggactgaggaccagaccatgtagcccttgatcccctcacggcgtcccacagacaggtaggcaggaaaggggcctaaacaactcaagtgtcagaaatgtttctcgtccaaggtcttaggaaaaatacaacacgaccccataaggtggaacttattaccgcttttctacaatggaggaaagagaggctcggagcttacgcgactggcccaaggctcacagggggaaaagtggcgggacctcttgactgcgaatcccgcgcactccagaccccggctccccacggcccccagcgccaagcggaccccgtcgctcccggaggcgcttcccatggggtctcacctggcctttgggacacgcggcctcggcggctaaagcttggttcggggttgccccgggcaggcggtcctaagctcgctctcccttctcagcttagcggcgggtggcctgacgttcagccgccttccaaagcccgcgctcccgtcacgtgacctgctcgccacgcacagcctcttggggcgcgtagtgcaggctgcgtcccctcagacggctgctctcatggcaaccagtccctccagggagaacagagtctctcagcgaccctggcgtacccttctccaccgcttgtccccactccacccacaccaggtccccgcaggcccctgctccctctacacccgaaatcgcaggactacaagtccctcaatgccacttgcgccggaggcacttccttttccggttgtgctaggcgcctgctcctgccgacgtgttcttccggtggcggagcggcggattagccttcgcggggcaaaatggtgagagcgttgaggggagttccagacggagatgcgaggacccctcggggtctgacccacaccgcgcttatctcctcagacgccggagatccagagggctagacgctcctggaacctccggcttgggctgaagggtggggaagggggaagccccttgccatgaactccttaggtttctcagctcgcgatttctaagggcgagaggcgtggggcgaattttgaataccttccagtttgtatatctctgttatcggtggtgtgttatctttatttggaaagttcttctgccgaacccgtgcccatcctacaatgccctgggcaaatgtttattggtgaagcacttccaactctcaggcacttggccagactttcctaggagcgcccacagcctctgtacagatctctggccacgttccatggacttctttgttttcggccacgcctcctagtgaccaccgtctgacgcgcatctagctctgggatgatgtctattcatctttgtattctcagtgccaaacagagggcccgtaattggaagctcaataaatggcagtgattgtctttatcattttgggggaagggggccgtgattgtttactgaattgaattccagtgtctcagaacaatgggggcagtttacttctctagagttgttatgttctggattttagaagcattggctgaccggtgacaatgaagttaacatttgtacagatctttacgtttacagccctctttcataaaagacattatctcatcatcttccctacagccttaggaaggaagcaaatacctgttgagcaaaatactccctgctaggcactagatgctttgattcatcatctttcttatttttcagttctgtgaaatagatattacagtcgctttactcagactcagattactcagaaccagaacttgaatgtcttgaccatagctcacaagattccataatagcataggtagtgaggaaaatactgaattagaaattgagggccaggcgcggtggttcactcctgtaatcccagcactttgggaggctgaggcgagcggatcaggaggtcagaagttcaagaccagcctggccagcaaggtgaaaccctgtctctcctaaaaatacaaaaaattagccgggcatggtggttcacgcctgtaatcccagctgctcgggaggctgaggcaggataatcacttgaacccagaaggcggagcttgcagtgagccgagttggcaccactgcactccaggcactccagcctgggcgatagagcaagactgtctggaaaaaaaaaaaaattgagcctgggcgcggcaactcacacctgtaatctcagtactttgggaggccgaggcaggcagatcacctgaggtcaggaattcaagaccatcctggccagcatggcaaaaccccatctctactaaaaatacaaaaattagatgtggtggtgcgcacctgtaatcctatagtcccagctactcgagaggctgaggtatgagaatctctagaacccgggaggcagaggttgcagtgagccgagatcgtgccactgccctccagcccgggcgacagagtgagacgccgtccaaaaaatgagactccgtcaaaaaaaaaagatattgagatctgggtaccaccagtcagtgacttatagcgggggttctcagcttggtgtctatagacactggtccacaaagctccggaaattgtaggcaaactttttcttgtatgtggtttttctcaggcagagagttcgtacctttagtcacgttttcatagtggtcagattattggcctcagaaaatgctaataagggccattgatctgcagctacatttccgggctaaaatcagcctctgtttcacggcagcaccaggctccttgataaccgcatgttctctccaggctgaaatcgtgggattctttgatagctctgatctctttccctcctctaggagctcgaggccatgagcagatataccagcccagtgaacccagctgtcttcccccatctgaccgtggtgcttttggccattggcatgttcttcaccgcctggttcttcgtgtatcctttcactgagcagccagaggaccagcattagtgatgtgggaagctcagggagaaaccacgctaggtacatggaccccgccggttttgtacattggattggggctgagagaaggtaaggaggagaggagggctagtgatgcccaggggcaggttatagccttatttcccaagttcaggtgagctcagtttgttctttggatttccaggacagtgagcaggggacctggctggagtggaggtggggaataggggtgctacagttggaaaggtggtataaggaagggtgcactcaggtgtcaggaggtctgagggctagtcccagctccggccctcatgagctgtgtgacctggggcaagtgacctaactcctctgggtctcattttcttcatggcagtggagcaccagagtccaaggcatctcttaggcccctctgcctggctgctctgagccagataggcctcccagaaggcattgagccaatgcttttctcctcagattgccgtgggctgggctctctgcactccacagtccaccccttcgctttgccttaactgctgtgcccagttacgaggtcacctctaccaagtacactcgtgatatctataaagagctcctcatctccttagtggcctcactcttcatgggctttggagtcctcttcctgctgctctgggttggcatctacgtgtgagcacccaagggtaagagctgcaatgggatggatgcgtgagcctccaaggcacagcccagggaagcctccccagagtcaggtcagcagggtccttaaagctcttaccagcatgaccccttggttgatggagacagactcagtggaatgggtagggacactagacatttgtgcctctttccctgcccctcatacggatttgagccaaatgtgactctcagttctgagctcacatggcccaaggcctcgatctgcctttgggatgtaccacctagaagtgtggacgcaggcatcccatggctgtacatttacattcttagaagtcagaccccagtgacttggagaggctgctgggaagtcagctggctgaaagggggtcaagatccagggcttaaaacttgctgcagacaatccaccaaacaggccactaggaatcagctctggtggctcatcctcagaggtgtgtgctcaatagcccttgccccaggagcacaggggtgcagggagagaaggaggaaagaagggccattggtcttattttgatacccctctcctcttttaggtaacaaccagatggcttcactgaaacctgcttttgtaaattacttttttttactgttgctggaagtgtcccacctgctgctcataataaatgcagatgtatagcagtcctgtctggggcccattctgcaggggtggtgggtgctgggacctacattgcttccccaatctcttccctttcccatttctcatctgcctttcacagttcctgctgctgatctacttaagggggatgagatttgtgtagcaccggtgttttgtcattggaatttaaggcttacctgtggatagggtctgggcctacccttttctattgtttctaggacaaacttctctgggaacccacatcggtccattctgccctaggccagtccctgccataaacatagccaccattctctgtgctggggcatcctcaccaggctcagcttctccccctaagaaggcttttctcctcagtggctacttttaatgcaggtgggcagcagcgggtgcgcaggaggggaaggtgtggccatgggagaggctgatgagtccactcctagccccaatatgaagctaagaggataaggggtatgaagcatccatttggccctctggttcaggcgctcagagattccaggcttctcaggaagaactttgaattccaattggccctagccttataggtgactcctctcccaccagaccaatcccaagaagagacaaggaggcaagctcagatacaaagcagtatttatacatttatttatatatgtatatttacttcagaagaaacgaacatttcggggacaggaagcaagcaggcccggggctgcttccctcactgcccacctcagagtcagagttggcacatgacaaataccaagctcagggagaagaactgggagttaactgggaagtagggggcgctctatgcacacgcaggcttctaagggtgcacggtatgggcaggaggatttgcactgggaggccctatgtacagcttgaagctagggggagattagcccagtgactacaggaacaaacgccaaaggagagagaagaagggagggatgacctgctggaccccagggcagggacagggccaagacactcacaccattgccagccgggcagctggcagcttccagcaggtggcccacttaccttccctgaagcccttttaccacaggcttaaggcaactttggtccaaggttgaccccctcaagcagcttggatccccagcctgtccccaactcctgcactgaggaacccctccccaggcttggaaacagagccagctgctaacggttttggggctgtgctgtgtccagatgggctccatggggcagtggacggtcactttccagttaaggactgagggcccgcagtccaagaacatgaacccccattgaggaagcccaggaatcctattacatggagtggggctcggcagttttaaggcatagggaggattcccccagtgggagggagaacaaagtcatcataaggaaggctcagcccctgcatggtttgggaatcgtaaaattcctatgtcaacggaaccaaattggggagggggctgggagcaagctatccctgctattcctgcatccccctgctcttccctatcctgaggacaagtgctttgagatcaatggcaaaagggggcctgcagttcataggcttcaaggaaaggcctccactatagaaaggcctcccattcaaagctgagaatgagtggtgggacaggggcaaggcctgcttcccaaagaggtggcagcataccacagggcaaggacagcaattccctttcccatttctggacccatggcagacatggctaaatgaatactacactccttccatgagcctggatgtagcctcggaatgcaccaggcaccactaagaaacttgaaggtggcacttaagatacaacttcttccctaacccagggtcttggtggttgggagtgggatgggtgtcggaggctccctgggagggatcagagtcagagccctgtctttgcaagtgtcacacccctgctctggcccactctgagctttctagctccatccttccattccttcctgccctggtttaagtgcatttagtaattacttcattaataacagcaaaagctatttgcatctgcccaccagccaagaccaggctgctgcttgagggattcctgctcctctgctcagagagaatgatgtggtcactgatcactgtgagctccagacgctcccaggaacgcaggcagtgaagctgcaataccatctgggggctcaaagggaatttcctcttcctggatattcctggttcaaggctctagggcttacctggcccactggcccctactggttcaggcctgtgaagggctgagggtggcttcaccaggcactgagtagacttaaggcacaaagtcagtttctccaacccaggcagggctggcctcggctgccctgggacttcttgggagccaagccctcccagggagaagaaacctcctgggccacacttaaagcttagaagtccgagtctggcgtaacaggcaaaccccagaaagtccactaccaagccatcccccagggaacagctttaagggggagagccgtctgccctccattgactcatgggggtccacccaagtctcttagggctggatccgagccccctgctgatctcaaaggtgggcaggtcctctctccaaaagggttggctccagtctcaaaaggggaggcaagggagaatgggctctgaacaaatcagggccacaggcttccccttccctccagggcacctgaaccagccctccaaccaccatatctggaaagaggtaaactggtcctgtcctggcccctagggggtggcaggcaggaaggcccaagaagtctctggctctcaggttccctctgtgccgtgaggggcgaccagctggaacagcaactccagtgtgaagacttccagtttcaccagtctcgggtagggccagtgaacagcagagctggcctgcagcgggctccagtgtaacaccattgcatccagtgttggggggtgcctgggcacccctggtccctggtgtggtgctgcctcaggagggcagctcagtcacacaggcggtagaagtggaagtggtagtctgtggctggctgggcgagagcctctgaactgcagttggcctgaccctgggtggaagggcagtgggaaggtgaggtggctctgggggtgcggggcagatggcactccctgctgacattgcttgacactgtgcccccagccctaccacatactgtgcaaaccccccattcctcaagccccacgtcgcagacaggggtgcccagacctccagggtaggtgggatgcccctgctcaccagcagtgccacccggaagtggtaggtgaattcacggaaggacaggatggttattggccaccggtgagaggtgccctggagagaagggagagaggggtcaggacagactgctgcccttatcccaaccagcatctctcaccacggccgtcgcagtcctggggtctgtggggagttttatgaaggaaaaaagcagagaactttgaagagataggaaggagcatgttctgctttggcagaaggagcaatggcagctactccatgcagaccgtgcccgggactggcaggtccacagccacctccacctggcccctgcctccttcccagtcctgttgtgctgggttccctcacccactatgctctgggcacatcaaagtatttcattagccccatcctcagtacaatccagtgacacagtgctgctactagccccatcttctggatgaggaaactgagccacttcctaaaaatcacacagtgtggcaaaatcacacagctgggattcaaacccaggtctgtctggctgtctccctcacagggtggcatgcagcctggctgcaggcagcttgcccatctacctgaggctttggctgtgcgtctgtgatgtggtttcaggcccgagcaccatgtctgctgtgtgtctagctgggctctccctctgtcttggaccctgtctcttctgcagggcgacagggctcgggcctccctcagaagcacccccacctctgttgcaggtgctttctgcacgtcttttctccctcactatagagtacgttcttggaagtcaaaacctgtgtctactccacctctctcccctgcagctaggcccacccagcacagggcctgggacagatggggccccaatcaatattttctgagtaaacacatgaatgggcaagaaaaaataatcactacttcccttcatttgtcctgagcgtcttctcccatggcctcttaggctcaagaagaaactgggggtccatcagccccagggacagtcataacttccggttacctggccagggaggagctcaccatccagttctcccagaagaggtggccaaacatggaacctgaggggccctctgatgctgtacatctagctgtgccacttccccaacctgagcatgaggtcggctccttcctgcttctgcagacacctccagtgagccacagccctccccgccatgggctcccagacacctgcctgtttccatcattgcactcatccacattagcacctgtgatctgctgtcttccccacgtctccagcacggcagggctgggagatgctcagcagagtgcaatgaacaaacacgggcacgcgtgcccctccctgggacacagaggcccaggccccagagtgtcccttgtggagaaggctttactctataactcccagcttctgctccttgcccattttggggcccagttgtgccaggagagaagcagctcgggcctggccggcccgcagcttcccagtcccacctacctgggtgtcctggtgggtgtggagactctgtggaaggctcccctcctcacatggttcctcctttgacctcaggctgcacagcaccacagacacgggggaggaggagctgtagacaggcccagttagcagagaaatgaggttctagagtccctcaaccccagccccctcccagccagcctgccacacgcctctgaatctccacccagcctgaaacaccgcataataaccagggccctcgaacaaaacctttcccatcgaccatcccatgtggtcctcagcccatgaggccaggtcatttagccagttaaccacgaagtaggcaatgaagtcagcacttatcccaccatgcaggaaataccagagactctccggctgtcctcagactcggctgttctgaggctctgcgggagattctccctggctcccctcctgcctcccacttccccacaccggcactcacttcatctgcagagtcaggctgaggtgcagtggggtgccactactgacagggatgtggtaggtgaagttcccaggcctgcaggggcaaaactggcaccttagcctgagggtaccctgccaccccccacccccaccagggactcctcagcccccaatctgtactggagccctccagaagagacagtgtccaagggtagcctggaaaggggctacccttccttatgggggaggctcctccctgaaagggcaagttccgggtgatctgtaccacctgggctcatgtcacctgaggacctccctgggtgaggggagggagcccagcccacctgcaggcatcccctggagcacagtactgggaggtgatggacatcgaattctccagcacctggatggaggtcagggagggcactggctctgcaaggagagaggctgttggggcaggagtaaggtgacaaggcaggacacaaatgagaagctggcaagtctttccttgccagacttgaagcagtcactcacaccttagtatgaataagttccaggttatttttttccagacctccacaatggccagcatcacactacaccctttcctcagcagccctaggactacccagttcccatgagcctgacgtctgcctcctcaaaagaactggaacacccagaagtagggatgggtcttcacatcccctgccaggtgtgcaggagcccgctcgaggcctgtgttcctgactgcgggcatctctcccagttctgggttcagaaacatcagttacactggtagcttgaaatcagcagtgttgacagcatcacacaaatcaggctcccctctgccccgaggccgatgattacaccgctaccagcacgctgctcctcgcagcctccctgaacaaaccgactgcaggctggctggctgggtaggggtgggactgaagtgtgacaagtcagatgggggagacaggacttcttgctcatctagttcacatacagtcttgctgctgcctgactatccacccaggaagggggaagctggggccgctgaacatttgctggacctggtacgttttcagctctgaggcatgacccagggacccaaggaccccaacaggatccaggacaccctgtgtggtcaggacaggtatcagatacagacgagatggaaggtgcccttcccacatcccttctgggcaaattccaaaggtcctttaaagagtcagctcaaatgtcaccaactccagagaagttttccctgatcctccccaccttcgtccggattaagtgtcctccccagtcccaaagctacctgcatgtcccctcagagcctcatcacactgctgtgttttcatctctgtgaggtctttggggacaggggcgtgtccatcttcatcacccccagtcccctgtacagagccagccacagagtggcaggcagctcagtaaacaggtgcctggcaaacatctcccccatggggttcccccatcacattgaatttccatctctgtaagccacattttccaggctttctttttcttgaagccacaaaatccatcagatgaaagttggtgagagcagagctgcctggttgaagccaggaagcctcccagcctccccttcaacccccagggcagcccccagcgcagcccccagggtacctcagaggaacccagtttgaaaactacaataaaaggttctgtagctttgttaaaaccaaagatccaaggtttgggaaatagtaggggagacccagtatagcaccctcctggtgctggcatggcgaaggaggagccaggctcgggatcaaatacaagccctgcctcggaggggctgtataaccctgggcaggtcacttcaccttagtctccatcccatttcttcagctgaacaataggaacaacaattcctttcttgcaggagtgctgtgaggactaaatgggatgatctatgtaaggctgcaggcctgattcctgatccttattctgtgctcagcaaacgtctattgactgacaagtctgaacccagacagtcacatgactgggctgaggtgggccctggccagtgagccttgccaggctgggctgggtagtgtcaggggtgcagcaagtacctgactggccctgggcccaggtgggctcagcagggcccacgctggactggagggcccctcggcgggcccggccatggaaaccaaggctgggactgttcttggctttgccctgccccccagggaaggggactgcagggctggccagaggctccagactcttgtgatgcttggagtggccaatgccattgactgaaagaccccaggacttggctctgatgttggtgactggcagaagggccatctggctggggcctgtggatagaaccaggcacaggctaagaagctggaagctggctgcttcctgtccagctgtctctagggccccacaagactgagtgaaccccatgtgtctcttggtcctctcaggggaacttcccagtcattgtccagagcctcgttctaggctccaggagaccctcccatcaatgagtatttgggcctttctctctacgcaggtagcccccgccccaagccccagcccacagaaagccttacctgagcggttggtgctggggctgggacttgggctgagaacatggccagggttaaagctggggccaagactaggaccagtggtagggttggtagtgggtgaggaacagcagatgacagggcaggggtggctggaacacatgtccaaggtgcggacagcagaacctggggccgagctggtgaggctggtggtcactgaggaggccagaggctgtatgagccagagaagccccaaagacagaacacagcaacctccctgtcctacccagacctgcccagacacgcacccagcagcaaagagggctgtatgcctggtagccccgtggtcaagggggactgtcggagctgcgtggtcccaaagctctggctggacctgctggggaaggatgggctgagctcagaggggctgggagagcttgaggggagagggcctgacagtcctggagaggcaggagggcaggaagaggcagagagggaggggagggaggcaggaagaggggcagcaggagccagaggagaggggcgctggtcagcacgtaccatgggcacaaggcctcactccccccagggggctggggccggagcagggccaggagacaggaagtggacacggcaaaagagctaaggggcagcaaaaaggcaaagggtgagacaggcaaaggggaagagaagagaagacacagtcagaggtggccccaggagctgggggtgacagtgggctcacagagcccaaggccctgccctggccctccttcctcctaccccatgttccaaccccagcccctcagacagccctgactcgcaggcccagctacctggaggggcactaaacaggccagacagaaacatcagcgtcagcagggactgggaaaggctgcccaccctccaaggaggccctccctggatccccacagcaccccagcaggctaagaggctaaggatgaactcctttagagaagacagtctcatggctctctgacctgggactgcccaccaaagccccacctggcctggcagcttggcttggcctccaggaacctacccatcagtgtctaccaggtcctcctctgtgcgcaggctcagcacgtacagtgtggacatggacaccacgctggagccacagaaaagggtgaccgttagagctggagccaccatccagtgccctctctctaggacaaggctgtggtccttgctcctgaggctgggctcccaggtgatgcctacaaaatgggtcaccccagaggggaagaggcagaaaggcccacctcaccgagacctcagctgcctgatctcccaagctacatcctcctcttcccccaggcctgagcccatgggcagctgactccactgggcagctccactcccctagtcagccaccatgagagcccaggggacaagtcacctgaaggccatgaccaccaccagggcaatgatggttccctgcaggaagcgctggctgatgcaggcctggtccggaaccacggacgatgactgaggaccaagaggaaaagtgcaaatgcaaagagggccaggctgaggctgtccccagtgggctctgctggaggtcggaggagcggttaagggggtgccccatttccccgggggcaaagggagaagaaagagaaacggggctgggagggctacagagtcacaaggagagggaagcaccagaggcagtgaggctggagaactgcaagccagaaagggaggccacaagggaggccccctttccaacccgcctgccatccctgctcacccctaccttgctggccaccttggggggcctcttcttgtgggggacgctgcccgcccgactgaactggctccctgcatggctgcagcaagagggccaggatcaggggtgtccctgggaagaagggtctcaccttcccccaccccgcacccctacctgaaggcgcccgagctgccggtggacttgaggctgtcgagccgccgcagcttggccagcttgtggctccagcgctccagctcatcaatgcgcgtctccaggttgtctgtcagcttgcacagctccttcacggcccctacgttctccatgaagatgcgctcctgccatgggccatgggccatgggccatgggccaacacagagggcccagtcagccccgggagccccaggctgccagacatcagggggcaggaggggcggccactgtccttggccactgggaggccctcaaagtctccctacctgggcgggcccctccaatccagcctcggctcccacagctcctgtgcctgtctccgagcaacacctccacctctgcaccttcacctgggctgtcccacctgcctgaatggccctccccactccctgccagagctctcctctcctaagcctgaaggctgcagccccgggatctgcccctcggatgactggtgtctcagatgtcagcacttcactattcagctggggtggagacctattacatgcctccttggcgcccagactcaggacaggtaagtgacaaacgtcgtcctcacaataaaccacgtatttcagcctggaggtaaccatacgaggatgtctgtgcagttctattaccgccctcattttaccgggggtggaaggccatggccctccacagggtttctcttgcccttgatcacacaggctccaggggccaaatccctacccactcatctccttgaacactcaccccttccctgtggggtgcagagggcgctctggaggcagcatgagagccgagggtgctcctgcctctgctttgcagtgcccccagtatctatggaggtgatgagtgttccccagctggctccccacttgcctctgggctccctcccattcccccacccacagaccttgttcaccaccaggaagttctctatggttttcccattggcaaagaccatgtctccggtgtctttcacagcctcaggcaagatctccttcacctcctgagcgatgacacctgggggcaggggacaagccaaagatgggtgggggggtggtaaagggctactcacagctttgtaatgtacagtgggagcaagactggagagggtgaagttctggaacccagagatttggattccaaggagccctggagcagggagatcccacgaaccagtgttcacaggattgcaattccagggctcaggtgtgaggttcctgggctggggtggggcggattcctgggggtaaggatcccagggcaagtgggtagtattctggcaggttaaaggtaggattcatctagcgcgaagggcgagggtccctgggccgtgattctcagatttccactgacaatggggcgaggttccggggacctggagaggtgcgattttccaaggtccgaggggcgggacttctagaaggcatgattcccaggggcgcagttccgggagtcaagaggagtaggatttccaggtgacagggggcaaggtcactgaggcccgaggtttctgggtttccggaccccagtccgcaccagcccggtccctacctgtctctggcgcggtggcctcgatgcccgcgctggcggcgaactcgggcttgtatctgtagtgcaccagccgcatgcgcgagatcctcttcaattgctcggtggtgtccacctgcggggagccaggcccgggaatgaacccctcctgcggccgtcccggagcaggccccggagcccaggagggcggcagcctggaggctgcagtgtggagaggagaccccaccactggagtggttagatcgggattcgaggccagcctccctcccttccttcccccgcagctccgcctttccgcgtagtcacgccccctccccaggagccccgcccccgcggcccgctccagcgtctggacccgcccggcccccacagccctgtccccacctcctgcacgtgttccttggcgcgcaggtcggaggggtgcataagcgagcccatgaccttgacattcccgtgcacaaccagcgcctcatccggccggtctgtgttgatgcccacgcggccgtggtggaagacggtgtcgggcacctgtgcccgctgccacaacacatcgctgtcgctctcgaactggcctgggttggaggcctaccgcgagttggggctggatcagtcctgggggatagggaggggacctgcagggccctgggagcagggggaaactccacagcagcccctccccttccagccagggtttctcactgcaccaagcccaacttgaactgtccctcccactgtgacaactttttgtcacttgtgggatcccagaagctaccaggcttcgtccacctccctgctttactgtggagaccctgcagcccagagagggtgggagctttgcccaaggccacacagccagtgcctagcaggatgagcatgcccactcctgactctcagtacccgggtacttctgcttgctgtttctcccagtcctggggagggctgtctacgccctgggaggaggtggccctcacccgcacaatgatgcgctctgagatctgggcggccagcgtgtagttctggttctgtgcatgagcctggagggccaccaccagcatgaagtacctgggacacacaggggtctcagaagtactcatggcctgcccccgcccccagggccaccctttccctggccagatgcatgttcatctcaccccctcctacagaggaggaacccgagcctccaccagggggcagaaattccccagggcccacagcaagaagccagggctgtttctcaacccagaagccaggcttctgctcttcccatccttaagtcaatgaagggctctaaatctcaggtctctcatctgtgaaatggctcagcctgtaggactctgtgcctggtgtgccacccagggcagtgtcttcctgcctcagaaatggaggggctccggggcagggcccccacctgctcacctctggtccgggttgggcttgcccttcttacgcatgttgttagcggtggtctcgctgaagtgcagccgccccacagtcaccttcgtgacctgctcagggggcagattgaccctgcagaggagaggcagggtgctcagggggcagggagggaggctgcaagagccacgccactgaggggcacccaggccagcaacgtacatgaggcggacaccctgggtacctccctggcccctccattcccaagccagctttagttgtggacccttctaggtaccacccccaacagggtcagacactcacgtgaccgggttgaagggccgcttgctccggtctgactgggactgctcgatgttaatggactggttcagggcctccagctgtggggagtgaagccagtggcacctcaggatggggctacccggctggtcctgccctcctgccccctctcagccaggcctggcccaactagagctcaccaggaaacagggcagcacccagccctcagccgcgattcccacaagctcagatgccttctgcatggtcacacccccccacaccctacttcacacccacaccctcctcacccctcacagcataccactcccccaacttctgcacagctacgcatgcagtcactccccaaacacccacacccccattccacacccacacgctccccccacctctgcatgtatgcactcacacacagacacacacacacactcacagccccaccctccctcatgtccatacccacacacctcacagcagcctccaagcccatccacttgcacctaggcccactcactccccagatcctctccatacccacgtctcctctactcctccacgtgcactggcagagccatgccaaggtaccatgcctggctcactcatcacaccgaagccgacagacccagccatgcccacagggagctcatagactcaaaatcagccactactggggttgtgctgtggtgcctcccaatgggtcttaggggaggggcccctggggaggggaccagcatggagtctgcctggagaggagggatgggtgttgggaagggcatccaaggcaaagggagccacagggtggagggcgggggctgcgatggtaccacaagtggcagagctggagcggagggcagggcccccaaggcccccgtggtgcagcttggaagccggggctttgctgggaggacactgggggccttggaaggatagggagtgctgtggccccctgagtctcaagtggggcaggagttgggggtcccagctgctgtggacattccgacaaggaagggaggtaacccagaccaggggatggacaggaaagaggcgaggaccggaccaggtagagggatcttccagggcaatagcaaggccagatgcatgatgaggttggggaaagagggccctgacccagatttgcggctcaggtaaccaaggccctgcgccccattccctgagaggggagcccagggtgggaggcaagtgtgcagggagtttagtttgggacctggagctgaggcacctggtagagggcccaggagatgggtcttgactggggttgcagacttgggaatcacaggctggagcaggaaacggggcgagagggaggcagggaggcaaggaggcacagagtcagggtaaggtgcccaacgagagggaagcaggctgaggagtctaacgtttaaggggcaggcacagggcgaaagggaggcagggaggcaggttgatgagcccaacaagagggaggcaggcgcagggcgagggggaggcaggctgaggggcaggcacagggataaaaggcgggagggcggggtggcagtagcagtgggggagtttacacacacatacacacacacacgcacacagatgcttgcttttttttttttcttttttttttttgagatgaagtcccgctctgttgccaggctggagtgcagtggcgtgatctcagccccctacaacctccgcctcccgggttcaaaggattttcctgcctgcctcagcctcccaagtagctgagattacaggcccgtactaccacgcctggctaatttttgtatttttagtatagatagggtttcaccatgttggccaggctggtcttgaactcctgacctcaagtgatctgcctgactcccaaagtgctgggattacaggcgtgagccacagcatccagccaacgcttgctttttctggggtctttcagtgcccccaaagggccctcctgccctcccttccttgctgagccccaaacttgccttcactccgtgcagcttcagatagaagcagtcgaggggcttgaggccctcgggcgtcttgacgtacttgggctcgcccagcatgccgatgtacactgtcacctggaagtggttcttcttctggcacacaaaggcgtcgtcgcccaccgaaaagttgaagcccttgtccgcatccacgcggtaggtgagcatgggcctgggggggcgggtgagggcactcccctgaggccccagagccgggcctggaacatcggttcctcctacctgctgggttccaaaaccatttcccacaccacacccctgcatcctcaaaccaccaatgcggctgcccccactcctgagaaatggaaactgagtcccggagaggattctagtacagggctgcaaactcctcagacaacattctctcctataccccatgccttaggccaccgccccgccctggtgatgggggaagcagggccagaccctgaggcccaccagactggagggaactcctgagtgggggagggcttgactgccctccccacactcggctccttcccagaaggctgcctgaagccccctcactcacccgagagggactgtgtctgcagagcctcacagcgcctgacagctagttgccctggaaacggtggaaccaggcgcctgctctgctgcagacccagcccctgcccaccggcttgctcaagcccccagatgccctcattcccactccctcctcattcctactccctccgtctgcccggggagggaaggggcactcctggactctccctcagactcagcctcagtttgcccatctgttgctgggtttagtgtcccatgtttggcccctttgagacacctctagttgacagtaaaaagagcaactgggccaggtgcggtggctcacgcctgtaatcccagcactttgggaggccaaggcaggcagatcatgaggtcaagagtttgagaccagcctggccaacatggtgaaaccccgcctctactaaaaatacaaaaatcagccgcctgtagtcccagctacttgggaggctgaggcaggagaattgcttgaacccaggaggcggaggttgcagtgagcagagatcatgccattgcactccagcctgggcaacagagcaagaccctgtctcaaaaaaaaaaaaaaaaagagcaactgttggcctgtggcttagcgcaccctcactcaggtccccaggcacaagagtggtcacaggagtgcccagtgctggcctggcggaagctgggcagggagaatgcttccaaacttgtgggaagaggcctctgggcctggccagtgttgccaaaggcctgggctcaccacctcttccctcctggagctccacccacctgcctgacctagcaaagcacccaggaagtgcctgggccacttccggggctgcagctgccaagcttcctggccttggggcctggggtggcaagggtggcccaaagagtatggcagtaagagtaaggggtttcctccccatgccagagaggctggagtgccatacgactgcacccccacctggcaggacttcatgggacccttcagccaccccagcagccagatgcccccaggcctgggactgctggctaagaattcccccaaagcctggagcacccaactccatgcagctggtctaatccactggcccaggcctggcaatatccacagttaccctgtcacctgcccactggccttctgggtgagccaggggagtggtccccacagggctcccggcctgcggcctggaaagatggagccatctgggtgttgagggggtgctaggaatgctcaggcagcctctgaccggatcctccccagcccctcctccctccctctagggagggggctgccgggagggcccagcttgggctcagcttccggctaccttcctggaatgcagagggaggaggtggggaaggaggaaccgggggaaaaaacacccatctgcccacttctccctgacttggttcccagctgcccctccctggcagtcatcaccttctcagggaggcctggggctggcctaggagtcaggagccctgactgccagtcctggctcttccctgagcctgtttgctcttctgtgaaatgagtgctcccaggccctgctccaggaccttgatggggtcctgggctggggcgtcccaaggtgggggggcctggaggagtggggagtgttgtagggcactcacagctccttgtagttagcatcgtacagggtcgcccacttgttctgctgatgaggctgccacttgatggactggtagttggggtccaggtaggagccactgaggctgtcactgtcctgcaggaggcctggagggagggaacgcccatgtgggccctgcaccttgggtcccacaccccaccttgaagagttggccagccatgtacctggggagggggcacctggcgggtgccaaggcggtgtctggacacgggcaatgctgagaggcaaggaaccagggcccggggagagcggaccctggggaggccagggtggcgatggggctcgagtggggtgcagaggcagggctgtcacggtcccaggctcctgtttgatcattccattcagcatctgggcattgagggtgctcgggggggattcagagtgcttcctcttcttggaggggtgtgtagggagcctggggaaacagaagtgtgcgccgtgggggctggctctccccgagcccctcccactgggtagtatccacctctctcccctctctagcctgtttgggccaggatgtgccccgcccagaggacacctccttcaggaagccctcaggctttgcctcctcctactccccattgctctgtgctgtcattttctgcttctgtcactcttcgcttcccccagactgtggacaggagccacacctgacttggtgtctccatcatgcccagcaacagggctggcttacagaatcacagcaatcgcttgaggaatgaatgagtttgtccctgcctgcagtgtcacactcaaggtcaccctttatagtgggggctccatggagagcaggccctgtgatcagaaacaagccacagagggcctgggccacaaaaaccagggaaggggagcttccgcacggcactccttccccttctggtttacaaaatgttttgacagcagaaccttcctttgaactaaacctttcatggaatctccacatgtaaaacagatgaaaagacaatcgtgcaggttgagtcagagtcgggggcttgggtctaggaagaagactcctcagaaacctgagggttccatgagacagctgcaaaatcactggggtctgggtaagagcacagccccgggcccagtcctggctctgcccctggctcatgatctggacgggacatttcccccatcagagcctcagtttacctacctgtgcccaccagataaggtagttgtgagcaattagccatggctgtaaacccctcaaggtattgctgggtaaacatgtataaatatgttacccccatctgccctgcagagccttctgccctccctgggtgcatcccggtccctacctccctctctggcctgcccgccgccctgcccaccctggtccctgtaccccaccttcccaccccatggagccagccacccacgtcttactcagctccgtgctgctgcaggagctggtgcagcatctgggactgctgggtgtggtgaagatcagtgggcaccagcccctgccccatggcagcgtagtgggggatcgggggctcggccttcatgtacagatcccgctgcaggacagggtagtgaggtgggggtggtgggggtggcggggggcctggcaagtgggctggaggtgggggcggatgctccaggcgggagggcactcccacgtggcacagtgtctcaggggttatcgtgcgcaggaggtggggctctgcaggagagatgggggagcgggcatctgagaccaacctcactcaggctcctgggcactgtcctcccaaggcagagtctcctgcttccaccccgtcctgagccaagcccgggggctgccccccacctaccctaggtgggagggccgttggtcagccacctactagaggcctgggcagggaggcacaaacctgcccaaggaggggcagcctttcacctcatcctagccacctcctgcccccaggctggaccaggagaatccaacccaaatctaaaggtccccctccgtccccatctcctctgaggcctgctcctcctctgggcctcaggaaggcgtctccggagacccccagcccaggcctgcccagtgttcccctctccggcaggcagtccctcttctgggctctcaggggccagccccccagcctgagcggggaggccccagctccctttgttccccaggaggcattccagggatgtttttggtaagataaacagaactcttgaccccaatccggactgcggggagcctgctcccgcggtggttctgctcttggccacctgggggccagggcacccctgagcaccctctaaggtgaggtgggcccggcctgggaagcctgcacccaggctgcacccacggccttccccagccacccacttaccgccgaagggtgcgtccatgatggcgcaggcgggcaggcgggtggcatcaccgcggggatacttgctcagaggcagggccaggctccccacccgcccgtggggaaacaatagccaagcgccagggagtatttgaccagcgataatctcagcccgttgggcagccgctggccccctccctcctcccctacctccctgataaggccgccccaactacttgcccaaaccctggagcaggagggcggtgcccgctggactcaccattcacctgctggggggagtaggcctcggagcccgagtctgggggagagtccggcagtgtgctgcgagagccaggggaaggggccggggggtgagcagctgagcttctgccttccagctgggcagcttctctgcgtggtagggtcccacagccccccagaagctggcgacactgaggtttcgtcacatccacccttaggggcatttctccgcaccacccacattggggtgcctggcagggcctggggccgaattgtgggtaggggaccgcccaggatcccctcagacctacagggcacttggggggcagttactagtgtccttgatgatggcacagggactcaaagactcccgccccagaccaaaggccaggacttcttctctcttcctgcacccactgaagccccacagcttcctggaaacacagggccctagggggctgggcctcagggcattcagcaggtcatggggggctgccccaccagaggcaggtgtggactgggaagggagccagcaccaccgggcctgggtttatttttttcttgcaggtttcacttttatcagtgttcaggaaaaagaacaaactcaacccaagaggtcaacacgtcctgcgtgaaccctgtgctcacccagcaagtggaaggctgtggccatatgggatccagctctttggccatccctggtccccacatctggagcaactccccattcccatgcccagggaactgccagagaggccatggccctgttgtggacacagccctggggctggctccagagtccccctgcatccctgtgccagccacccacccaccttcggggcctcatgtagaaacctatacaacgattcaagaacacagaccctgcaggttttgtgtgaatgatacaaaaacgtgtatggggactcaaacccatactcctcgccacagcctcaggccccctgggctgccactccgtcctgtacttccctgacaatggccaggccttctgtaatgtgttaaggtctttcacaccctgcagtccctgcagtcccatgccccaagtccacagcaccttgtgttctctcctcttaagttcctctggcacctgattattcctctacttggagatgtactggtgaatacctctccccagttaggcttcaggagccactgcagagccgtgtgtctgttttttttcttttctttcttttttttttttttttgagacagagtctcgctctgtcacccaggctggagtccagtggcacaatcaccactcactgtaacctccacctcccaggttcaaacgattcttgtgcctcagcctcccaagtagctgggattacaggcatgcgccaccacacccaactaatttttgtatttttagtacagacagggtttcaccatattgcccaggccggtctcaaactccaggcctcaagtgatctgcccacttcagcctgccaaagtgctgggattacaggcatgagccaccgcacctggccttttttttttttttttttttttgagacagggtcttactctgtccctagcagtggcatgatcacagctcactgtagcctcgacctccctggctcaaactattctctcacctcagcctctcgagtagctgggactataggcacacgccaccacacccagctaagttttgtattttttgtagagatggggtttcatcatgttgcagactggtcttgaactcctgggctcaagcaatatgcctaccttggccttccaaagtgctgggattacaggtgtgtgccaccacacccagcctcatgtctgtcttgtttatcacctagactcaggtctggccctgggtcccttcctggagtggccctgcccacagagtccctgtgtggctctggacaagcccctttccctctctgagcctcagtgtgccattaaaatcctgacggtagcagtggccagggctccttgtggggtctcccaggagctggatacccaggaaggctgatgagctcacgcaatcataggcacatgatacagcagtgggcaccagcaggcgcttaccaaatgttagttctcctccctctgcccccaggggcctgtagtttaggaacagcctcacagcctcaagcaaacagtttgccttctgcagcaaaggttcacccctggcaccccaagcctggcctccactcccttctccccaaaagccagggagctcaggaagcacggccggccatgtgtccatggccaccatgcacccagggcatcctctgtgcccttgttgcttcccacgataatcttgaggggtaagcatttgagggctcacttcacagaagaaactgaggccatgggttaccgaggcagacggctgataaatggggaagctgaagttggagccaggctgtctgaacacagagttcatgcacctagtgttttaatgctcttccacccagagacaggggcccctacatttgccctgagctcccctgcagacccatgctcccagcctcccgctgtgagcatgtgccccgggagctgccctggagtctggctggccgggtggctgcctggaacctttggtcaaagccaggcctaaggttcagccctgggtcaggcccttggtgtggactcctcagaaagatggggggaagggcctgggttctgggccccatgaggcttgcttgggtaggggggaactgaggtgccacatctgagccatgggccagctcctgtggccacagtacacgtcagctggatgcgtaagtgggtgggcttggcgcgcgtgcacgggtatgcaggtgttcccatgaaggtaaacagtcacagcctccagtcccgccgcttcctgtccactctccacacagcatcgagatttttctagcacttacgtcagccctcatcactcccatgcttggaagctttgtggctgcccactgcctcagaacaaagcccaggagtccccccttgacctggactcatcctcccttccctcacctgcccacgcacagccagtcacccagcccaacccatgccaggccagtgtctagcacctcccaggtcacggccacagccctgctccctgcctgcccctatgccgctgtatccccctactccctgcccttactcaccctggggcatagggagccttgggctcagccttgatggggggcccggtgccccccgggaagggcttgggggcagcgcccatgccgttgttgttgttgcagttcagcggggtgccgtagcccgggggtgggaggggaccatggcgccccggggagggtccacccccaggggggctcaggtggtggaccccgctggagccaggcatcgcaggctgcccgtgggagtaggaggccgagctggctggagcagagatgtcagggaagcagctgcggggaaggggggcggctcagctccagccaggaccccagccccagcagggaagtagccgccccctccctgcagggaactatggagatttcggaggagtcagtggctgggaagggacgaggagcagctttcagaggtgggaccacagcagaccccaggtccggccctcagacctccctggtgacagaagggaggcgaagggctggggctgggcgggtgcaggccgggcgagggggccactcacaggtcggaggcatcctccttgctgatgtactcctccaggatgctggtgtctatgttggagggctccagggcaccgttgatgtcgtggcctgcagggcaggagagatgggctagggaagaggcccagctccctgcagaccctgggcttcagggcccagccctccatccctgcccaggctggccctccaaaacagatgcccctgctccttcccacccaggtatccatgtgggggccggctctcaccctccactgcctggcacccctccaggaagcactgataatgcccccccgccccaccacaaggccaccttgagtctcagaggaggagaggggcccagggcatggatctgggtacagagaggccgatcctgccatgcctctttctagctgtgtgacagggaacaagtcctttccactaatctgtcaaatggggtcactgtgcctctgtcttatggggtgctgtgaggcacaaatgaggtgcttactgagtcgagagccccgtgggtgcccactgccctcgatgggatggctcggacccaacaggcactgtcctgccgtgtcctccaggggtcagtccagatggcccagctccaggaacgcaggagcacgaggcctggctgagtgggaccatatatcctgggggcccacagggctgtgggagtctcctgcacccaggccctggccgcaggcgggagtggggatcagaatcaggagagctccctgcaccctcattggatatgcccatcaccctgttgggcacaggcgggggaacttagccccctttttccagaggaggcagaagcctagagaaggaagggcttgccccggcctcccagcagggaatgatggccgccagagctccactcctctgcctgccgccctctcctgggccctctgcgctggccccggccccaccaaggggaggggcccctagaggaaaggcagccagggctcttgggcatcatgagggaggacgggggaggtgccggcctttcccctcccagggtcaccttgcagggggagccagagggcggggtgataagggggctgacgtgggagatgcgtcaaccccgataatggaggacagccccacccacacggctgacccgggctggccagccccactgaggcaggagggcccctcccacaggcctctggagcctgagtctggggtctgccctctcctgttgagctcagacaggtccaggaacaaatcctggctcagccactccctgctgagtgaccttgggcaggtcacatgcactctctgcgcctcagtctcctcattcgtgcaatggggacatgtacagctatggcttcaaggggctgttttgagtatgaaacgagatgaggtgtgtgaagtgccagccactttagtgggtgctcatcggtcggaacagccgtcctcacttcccagccccagagccctggggtccccgggagccccccgcccaggcccctccctggcctcagccggcatttcaagaatgctgagccccgcttaggtgattaatgagcggctaagccctcctaggagtcacgcgctgcctgcgacaggccagggccctcctgctgacccccacccccagctcgcccagctaggaacaagggacacccaccacgcaccaccaatggccgtccagggcggtgtggccggggcaagagcagcttctcgagctgggcgtggccagtctgtgtgcctgggttccaggaccctgcctctgctcaagccccaccctgctgtaaccacgggtcccatttactgagtgcctactgtgtgccaggcattttgtgaatcaaatacattaataatcacaggagtttctttactttatttcttttttttttgagactgagtcttgctcggtctcccaggctggagtgcagtggtgcaatcttggttcactgcaacctccacctcccaggttccagcgattctcccacctcagcctcccgagtagctgagattacaggcgcccgccaccacacacggctaattttttgtatttttagtagagacagagtttcaccatgttggccaggctggtcttgaactcctgacctcaggtgatctgcccgcctcagcctcccaaagtgctgggattacaggcgtgagccaccacgcccagcctaatcacagaagtttcttatgcgcaaggcatcctgcaggctcttcacctgcggtgtgttactcaatcctcccagcccagaatgctgaccatgacagagacagtgacttgacagtggctcatagtgagtatctcccagtgcttctcaactcatcatggcgatgatgacaaagacagtggtggtgacagtgactgcagctcacactgactgcctaccacgccagggacgattctaagtgctttatgcattttccctctctaaacagtggggatgttcagataggtaacataatcaccatcccctgttcagagaggtcaagtctcttacccaaggcaacacggcaaggaggattccaaccaggtgcaggggtctgactccacgagggagagtgtgactggcggttgctgtgccttccccaccccacctggagcgtcgcccccaccctggccgctgaagctgcaagtttttgagcctgaacttggaatctacggtgaatgatgggctgatgcagtcatggtgttgctatttataacagacccagccccctcctctcctggccaggagcactcctaatcgcccctaatcctcctgcccacctccctcgggatagggggcctcaggcagaggcatcctgggagaccctaacgagaaccagatgtgctttgggggaggagggaccctcccgtgccagggtccgggcggacggaggatggaggaaggaggcgggaggagggaactgatggggcagcgttgcggggaggccagtgggtggggaagaagtttgagggttgggggctcggagggcctcctgaggaacgctgaccccacaccttctcctggaagccctggaggccgcgtcgtctctttcccacgccgctcggcccccagcccgcccgtgaaccacactggagatttctaacagactttccaggtggacaagacaagggtgggggcttgccgaagctgggatagagcccccaagaacccaggacaggggcagggtcccatgggcacactctcgggagcgcccctccccactgctcccaaaagagccccagaacatcactggagcccaagcaggggtacctgccaggcaggaagcggaacatgggccatatggctcgttctgatcctcaagacctctctgagagaagggaagccgggcccgccagaggctgcccgaggctgcccagggcccaataacccgaaaacagcaccatgagctcacaaaccagcatctctgtccttcccttctcaaacccttcaacaacttcccactgctggggagacacccggagccctctggcagtccaaggcctgacatggtcccctgcctgcccccgacagccttttctccttccccaggtcccctgcctcccctcctctccgtggtcagcccttgcctcctttccatcctccatcccacatcaaggccttcacacatgccattccatgctgttccctaagcctgagaaagccaggtcctattcaggctttaggttttgtcttaaatgtaaattcccccaagaggccatctctgactctcccattctgtttagcaagggatgggcaggggcgttgtaattcctcatcagttctttaccttcccgcctacacacaccccgctgggcaggatgagtgtctgtccaccacccgcccaccacccacagctcactcgcccagtggccactctgtgcccagccctgtgccatgcactttacatggctcatattgaattctcatcccaacctacaaggtaggtgattttctttttcttcattttatagatgaggaaactgaggctcagaaaggatgggcatgtgcccatagcttacaggggcaggcactgggctatgagcgctgccctgttctgtctctctgggatatagtatcccagcacacagcaggcacccaggaaatgttcacggagtggatgagccaagtggccagtgagggacctcggccaggccatgctgtggccagggccggggctacctggggcccctccaggtcctgcccctgccctgctgagctgtgtgcctcagctgctcctcattaattaggccctttattacctgcctggaacaggaaccagacactgccccttcccaggcaggctgcgatccagactatgggaaggcagccccctcccctccgctccgctcttctctcctcgtctccttaaggccaccccagctggccaggaaaggaacggagggcacccaagccaggtgcaggatgagagcaggcaggggcccaggtggtccctccacccaggacccctcccttccgcccctccttgtgcttatgtgcccccccccccaccagctgtggccgttggctgagtctcggccattgtcccggggaacgggggagggtggggacacggcacagtgggaggcttgtgccctgcccaccccctcccctgccccgtcaatgaggcacttgtcaattcatgccccaaacatggcggaaatcccgtcagccacgtggctgtgggtagggtgggccggggcccgaggatgctggccaggcttggtggatctgaacctggggtgcagaggacaccagggcccaggcctatttccgacaaccccagttgctctgagtgtcctctcagagcatctgaacctgaaggatgccctagcttcaggcagcagctgagggccagggtggtagcagtcaagggacagcccacctgggcataaccacgatgcccagagagacctccagagtcaaagaggcctgttttctaatgtggacttcccacttgatggctatgaccctcagcaagtgacctgagccctggcttccttctccatcagatggagcacgaatccctgccatggagtgaaccttaaacgaggtgacccccaggaggccattccgcagtcagggtgaaccgccctgtttccatctctcttaggactcccatctcctttcctgcctgcacgcctccgcccaggctgtcccctctcccccaggcccctccgccttgctgcacacgtgctccagagcctccgagggacatcctcaccttctcctaagtccctctgaggcatggtcagcactctgctgctattcttacacatgcacagcacagtccagcctccgggcctcggccccagccatcccttccagtgggtcagccttctgcgactgcctccctgcctgccctggcagcccctccccatcgccccagtcacagagggcccccagtgctgtggctcatctcccaaccagtttacatgggggcaaggcacagtggcctcacctcctttggtttgggctttctctctttattaatatgatctatggccaggcgcggtggctcacacctgtaatcccagcactttgggaggccgaggtgggcagatcacaaggtcaggagttcgagaccagcttgatcaacatggtgaaacgctgtctctcctaaaaatacaaaaattagccaggcatggtggcacgtgcctgtaatcccagctactcaggaggctgaggcaggagaatcacttgaaaccgggaggcggaggttgcagtgagccgagatcgtgccaccacactccagcctgggcgacagagtgagactctgtctcaaaaaaaaaaaatctataactgctagctgccctgcttcaggcttcaacttgtgaccagagccgtcttagtcaaaatgccttcaggtcagatgtttgcttgtgcaagcaaccctttgcctctccgcatcaaatctcagttagcttgggcccagcagccacacctgacaaagatggggctcttgagccgtttttttatcaggttcttcgatctgagtcacagtagtctttgttctctcccagcttcttaccaaaaatgcagaagagcccccacaggctgcctacagagacccctctcttttttttttacctttctttttgagacaaagtttcactctgttgcccaggctggagtgcagtggcacaatcttggctcactgcaacttccgcctcctgagttcaagtgattctcccacctcagcctcccaaggagctgggactacaggcgcctgccaccacgcctggctaattgttgtattttttgtagagacgggatttcactatgttggccaggctggtctcgaactcctgacctcaggtgatccacctgcctcggcctcccaaagtgctgggattacaggcatgagccactggcccagccggagaaccctctcttctaggagacccagaatctttagccacccttgggctatggctacatccactccaagtccccatgaagctgccgccctgtcctcaggtcaacataaggctgaactcacagccccaagatgctccaaagccaggtccaacagcaccgaggccagcagctgcgacctgttcctactctctcccacagggaccagggcaggcaggccaccaggtgccaggtagagaccctgcagcttggggtggacacaggtctccaccagggtcacctgtgcccatctgtgcctacacaccggtgtggccccacgcaggcacactgccaacacacacacatatatgtaagggcacaccctgcagtcaggtatccactgacatgcgcatgatcacgtaccacctgccccctactcacacatacacagtactgacacacagtggcatgccccacacatatacccacacacatgcgcacaccagcgttcatccgtgtgccttcattcattcagcagttatttactgagcacctgttatgtgccaggcaagcatagtgcccagctttggggctacagcagtgagcaaaagggacaaaagccttgcccacatggagctgacattctagggagcagagtcagatgacgagagcagcaaaatgcctagcattctagaaggttccagatggcggggacagccggtgcaaaagccctgaggtacgagcatgcctgtgcatgttcacacctcagcacacttcacaggtgtatatgccaggacacgcatgtacacaaacgctcactgacccgacgacaggcccaggcccacaggcacagcgtcacatgcatgggttaggttagtggccacccaggaagagctcccacctcctcttcttccctccaagccccctccccgcctgctgtcagaccctccctaagcagctccggctggagccaggccccactgagtgaactcagtgtcacaggcacaacttccctcctccaagctagcagggcaggggatggggatccccttgccccagccatggagggagaagagaggggagtgagggaggccggagggagataggatcctcaaactccacaaaggagagacagaggctgtggttgtgcactctggcggctgcacggaccccggtcagctggagggagaacttccctcactgatgcgacctggggcacagggaggacagaatgtccgggagccccctccatactctaggccggcagggggctccggacccaactgtactccccacccaggggctttgcccctcccccctcactccaggccttggcactcgtgggatctaactgctaacatcacccaaccttgaccatgtgagtgagggctctgaggtctagagaggtcaaggaggctgcacggacatcacctggcgtggccacccgtgctggagccacccctcagcatgtcaggaggagaggccccttccctgcccatcccaggctggcacagagctgggacccaggctccagtcccagctctgttgtggccaccttgagggagcctgacacatcatcgccttcctgtcctgcctcacagtccccctcagaaatgggaggccgtcacccacgcttccactgcaccccaggactccaggaagacaacgtgcaaagagcctgggtgcagcagatgaagtcacaatacagccaagcccctcctccttgctggcagcaagaacagaacccaaatctcagagggggaggtggggcgggccccactggatgtgccagggaccaggaccaggccacgctgggccagagctgtcatggttcaggccttgcacacagaaccacagaacatgttcaacaagccccctaagcttaggggcactgacctaccctggggactagtaatcttcaaggtagggcgcagaacacctgccatggaccaatggagtgttcaccaggccaggcacaatcttacctaatcaccccagaaaccctgggacggaggccctgccattacaactgcactcccgttttacagatgagaaagcggaggcacagcggtgccctgatacggccaagagaagcactgtgggtaagcaggagagctaggaacagaccccagctgccctcgctggcgaatgcacagaaccattacatcatcctaccccgagacccaaccaagaggtacccacaccccgtggcagccggggctgaaggcctggagataggagaggaggccccacatactccagcacccaaggcaatgagagaaactgaggcccaggaaggtgctaggtccgtgaagaggaaggtgggaaggtaaggcaggctgcctgggtagggcggggccacccagttaatgattcagttaataatttctgctcccagttccttatcagggagggcaaagtccaagggtggcagccaatgagcagctctgctgggctgttacccagcagcctctgctgccagggccctccagtctgtaaccccttgggagttggtaagtggggagtcaggcccccagggaaaaggccattctgccctcaaatgccctccttggctctacttaagaccccaaggagcactctgtccagccttccagtctcaggagagtccctgaggccaaagggttggtaactgcctgtttctcacccctgcactgaccccaggccctccagagaggtgctttctggggtgcgtcccccacccccgccgcctctgttcacatacccattgttgtcaccattgacctggagagcacttcctgcccaccccccacccctgccctgcactgggtgctggggacatggggatgagtcagaccccctactaccatttcctcccctgcctgggctcaggaaaccctgtgcctggccacccctcccatctacttactccctgggtgcaccagggacagacagagacaggctgacacgggccacagtgccacccccatcacgaagcccagctcagcccccggattcctgtccaggtgggagtcctctcttccaaatcatcaggtagtctctacctgggacctcctcctgccctctggaggcagagatgttggtccctgacaggtagccccctcaaccccaaggtactggtggcagagtagggagctgggggctaggtgtccactctggctaactctggccaactcccttctctctgagcctcagccagcgccattcccctccccttacccatcccacagccgggaagggtggctttcaaaccagtatcctggtgcttcaggggctgtgaggagcccagcccccattatccactgtatctgtcctatcaggagactatgagtttgtttgatggttaaaaaatcacattggaagcccctgctctggtccaacccacttacttaccctgggaggggaatgaggccagagaaggaagtcaccagtccagccacccatcagcttcagaaggggcgaaatcccaggcctccctcctccagccctggtggggctccagaggccgggcagaggcccactaaactccaagtggtctttccagcacctgctggaaggcgacttccctccatcctccaaggcccctgcacacccacctgctttctgggggacactggttgctcactcgagcctcatgtgcccctagaatctagggccagcaggcaccccttccaggctcggccattcatactctaacatgtctctccttcccagggctgggcagtgagcttcttcagagctgaggttcttctctgccaccccctcctgtcttgcaggtgaggaaaaaggacttaaagagggcaagagctctttgggggttccctgccaggcacagacggtcaccccactctcagtggtccagcctgcaccagaactctgaggtcctggcaggattctcagacactgccctgtcccgtgcctgccctggctctggagtccaaagcccccttataccatggcccggttacctgctggaagccagtgcatcctgcccggtgggtcccctctctgcaggccctgtgcccgccgatctgggctgccttgcctctctctaggggattagccgggcggtcacgggggcccggctgtaccagcctcgagggggccgctctgtcccggcctcccacctgaggtccaaagcgccttagcccccagcccaccaccggcacagggcaggacccagcacctatgcttggtgtgtgcccagggagggggaccacgtcaggtgagggggcgcgctgtgctgcagccccttcggtaaaaccctttcccagtctcccagcccagagccgagagcacagggactgctacccactgtccagagggatgaccaaggccaagtggggaccaggatgagagctcaggtgtccccagccccagccccgagtgtgacagcactcaagagtgacgcagccacggctcaaaagcacaacttcccgctccctcgcacttcacacactcacaagcacaccaggccctgccactcccaggccttctctcacacctacagtgggtcccccacatgggccttcccctcccaagtggcctggagaccctaggcctcaggggccacccacaccttcccccatcgcaggggctgggagctgtttccagcccagccctcctagacgggcagcctcacacccctcccctgctccccacagacattcttgagtctcctcttatctctctggagggagtagcgcagcctccccccgccaggccgctgcatggctaagccgtggcgtcagcccccaccccccaacccatggtcaggagggagccagggagtccaggccagccaggcccacccctctgctctctgtcagggcccagcgtcctggggcaggcagtgtggaggtcaagggagcctggcctgcgggtcctctgggtacctagcaggctcaaggcactccagacagtaacccaagcaagcacgaatgtctggtcccctcttccctgaaggtctcaaaccgcgtcaggcccctcgagagctcctatggatcaacagtgtctggggagagccagagccccgggacagatgcagggctgcctaagaccctcagatggcccacctgatgcagagtcaaccattcaatctagtccaagcctgaactcttgggttctgggtctgtggggtgtccagaatcctggagtgggatgactgaggcttaggggtgcccctgcctgggctgctcagccagcaggtgtgaacaagggttcctgcctcccaagtcacagagggagagaaactgaggcactggaagacctgcttctctcctccacaggactccacaggaatctggggcttgaaacttgggccttggttccctgccctgtagccctgataggttcacacatgaagggaaggttctcaatgcaccaaggagcaggatgtggccttagggactagagggagctcggggcaggggctggtctcgctgcattggtagacaggggcacaaaagggggccagagggtctggctagatgttccagggaggttctgagaagcggagtgggctgggaggcagtcagccagaacttcccctccccctcccactgtggtcccatccctccagaacccagcaccaggaggagtggtggccctgcaggaggggcaggggtcgtccaggaaaagacagggagttggttagatggaggagcagacctccaaaaccaatgtaggggtgggggcagaagaagatattatggggtgtatgtcaattccaccccagagggctcctttcggtcaagtgggggtgaggtcactctttgagggggcgaggtcagagaggcacagctccagggttggggggacatagtgctgaggagcctcagagggctggtgggatgcagttcacagcactagaagggtctcagagagcagaggtgaccggtggcagggatgtcagcttcaagaaggttccagccccaggagagcatgctagggaggggggtcccagccccaaacaggagagcagtcactaggcagcattgtggaaagcaggtggcagtctccaaggggatccaggctcgaaagtggtcctaccctcatggaagcacagtggggaggtcccagctcctagaagtcatgggggatggcgccaaccagaagggcacacagggggtcttggtctctaggcgggggtcacagattctgggaagcaggctggggtccagcctcaagaggtacggaaggtcctagaaggcacgccgggggtctgggccttgaatggggttgtatcccgcttggggttctggggaagcaaagtagagggtccccagactcgggaagtttgctgggggcgagagtgtcacaatttagggaaagttccgggtcctggaaggctcaaaggagtccggacctggaaggggacacagtcccaaggaagctgcgagttgaggagcggggagggggagcccaacttcagcggcggtgggtggtaaccgctgggggactcccagccccgggagcctgtcttggcgggctggtgccagcctgaaggagggtcccagccagaggaggcggaaacacagcgaggagccccagttcccggggagatcagccgggggttcccagcgccagagggtcgccgccgccagcccgcggtctctcaccttcgaagaagcgctgcagcgcctccgtctcgtccaccacctccatgtcccgcctgcccggcgcacactccagccgcggccccgctacagcccggcccgggggcgcggcatcgccggcgcggcccgcgcgacagtcccggctgggctccggctacggtcccgcccggtccgccgccgcgcttgccccccgcgcgtccctggcccggcccctgcccgccccacgcgccccgcccgccgcgcccagcgccccctgccggcccgcgccgcgcccagccccgccgcgggcaccacgctcccgactcctgcaggcggcgctcagcgctgggcagtcctaggcttgcggggcgcggggccgtcccgggtcgggggacgcgagaccgtcccaggcttgaggggcgcggggccttcccgggtcggggtgggggcgaagggccgcttggcctctgtggggtcgggactggaagggtgtgccctcgccgtcctcgccttcgtcttgcacgggacaagatgtcacgattccgaatccaaacctcagagacagcccccatccctctcgttagccacccacacaccccgctcagcaacaataacaacctgcatttagggaacgtgtgttatgtgccaggccacacaggcattatctcatgtactcctcacaggcaccttatcaaggagatgctgttgttacctgcattttacagatggggaaactgaggctcagtgcattaaggactgccaggaagccctgtcctgtggctgtgatgatggaaatgttccctgtgttgttcagtatggtagtcactggccacaagtgagcactggaaatgtgcctattgagactgaggaactgattttttcattttgtttaattgtaattaaacagttacgtgtggctgtggtattggacaatgcaggtctaaaagctccttttttttttgagatggagttctgctctgtcgcccaggctggagtgcaatggcgcgatctcagctcactgcaacatctgcctcctcggttcaagcgattctcctgcctcagcctcccgagtaactgggattacaggcgccaccacgctgggctaacttgtatttttagtagagacggggtttcctcatgttggccaggctggtctcgaactcctgaccttaggtgatcagcccacgttggcctcccaaactgctgggattacaggcatgagccaccgctccccgccctgcctaagagtttcaaggtcattaaagttcagagccaaatcctggctgccccgggaatccgagctctcctttgccgtggccctgtctggtataatgaaacctggaggttctaactcgatataagtccaggataaagcggttgtccttgtgcccctgccttcacccttatgactgactgcctccacatctctgtcctgcccaacttgcacagcctctcgtctcactgatatccccttcagttctcccaaatcaccctttctgaaacatacatccgatcatgtcattcctttgcaaaactaagtttccctttgcactcaaaacaatatctgaatgtcttgctctggtttctcaggccccgcctctaccactggcctcagctcttcccctctctccattgctcactgaataacagccaccaagacctccttgccattgctcaaacatgcaaggcctacacctgccacagggccttggcacatgctattccatctgtttacaatgcttgtctccacatggctacttctttgtagcagttggtctcagctcaaatgtcatgtccccaaccagcctacctaaagcagttctccctacctaggcctttcttgctcaccatgtaaaagattcctatttagtttctgttattatccttcttgctctagaatggaagccctacgagggcaagatatttttctgtatcggtcactgctatagcttcaacaccaagaacatgacctggcacacagtaggtgctcaataaatgtgttgaatgaatgtatggtggcatcttcaaactaccgaatccagtcaggcttcagtggctcacacctgtaatcccagcactttgggaggttgaggcaggaggattgcttgaggccaggagttcgagaccagcctgggcaacatggcaagaccctgtctctacaaaaaattaaaaaattaactaggcacggtggcacatgcctgtgatcccagctactggggaggctgaggaaggagaatcgcttgagcccaggaggttgaggctgcagtgaggctgcagtgagccatgtttgcaccactgcactccagcctgggcgacagagcaaaaccctgtctccaaacacaaacaaacaaacaaacaaaaatctacagaatcctggacctctgaaaccttgggagcggataattctggaatcccagacctagagaatcatcccgcttcagagtggctcaacttgaagcctctcgggacccttcaaggcagcacgtaaaagctggaaaaacctaccccacccaaccactgtttgacaagccactaaacagaggccagaggtgtgggggactgctggcagatcaagatgccaacgtagccagcttcggactctcacctctgccttgcagcatccccagggagggtggggcacaagccaggccaccccgtggggatggggtgagaggcctggaagccgctcccaccccagcctccctgtcagttctcagtggccagccgtgggggaggggcagccaatgcctgagccccagatgtggcccagtcagcaggcccatggtggcccgccgaaaagggtcaatgccacgacagttctggggttgggggagggggtgctgaggccggcgggtgcctcacaatgaggttttgtccctctgggggccgctctcagagctgttgctcttagatatatagaatgggattttgctggaggccccagctgtgtgtgctgaccgcagctccctcaccgcccccgcaggggctgggctgagaggggggagaggggccacactgagactcctattcttttccagctgatacaccccagaggtttttctccctccgcagactcccttaagacaattgttattctccaccctgcccctcctccacccggggtcaggcctgcctgcggacaaagtagacacccgcctacaccacgcgattctgagaaacggatttacattacgagtcgcctgggaccagccacagaaccagcttctctacaagcctccacatacccacggatctttcctccgtatcccacatactgcataactgaccatcatctaagttctcaccaccatccgttgagctacacattgtccctgtcctggtcagcaagggctggaggtagaagggaagactcgtactttgtccctaacgccccaactccattgcattataatcaattaagagtatagattattcaatctctagggtagccttgaagttggaaggggtggaatggagcctcctgttaaccctgtagcagctgacctggctaagggagctcaggccctgccatctcccctgttacactaggtcactgagcaaaggagcaactgtccccagggattttcatctctggactggaggaaagaggtggctgaaatgtcccagactcaagggctcagccaagagttgaggctgccatctgccaactccataatgaagttgggtcccaagcagcgctggggcagaggctggggcaggaaggtggctgggccggtgaaagtagcccaggggacttgcatacaaggacctaggggggcccatcaatggagatgagtcctcatctgtgcccctggcttctctaccgagccacagtgagtgaggggctgagatttcagccctagcccagcagacatggctgtcccctgtagccagctccacctagtccccaaggcctgccctctgtcctcagaggcctcatctataaagcacactcagtatccctgccttacagtggaggtaaagtgccaggtcagtgatcagtaaatggtgccctctccagttccaatcagctctcagcacccatcactgtcccttgagtgggagcagggccaggaggaggtggtagaccgaaggcagcactggggagagggatgctggcacctgagggttaatgggtaatgggcgtagaggccagcccaggagaaggtacagccctgtcctccccaccgtgggactctcctggcctcctgtggacccacacagcactggcatcaggccatttcgcagaggaagaggagggctcaaagtggggtgagtgtcaatccagcaagccagtgaggctggtggtccagcttccccggactagggcccaagggcacacctgagtgtggggtcctgcagggtagaccccttcctgactgcaggggcaccgggacaggagggggctgctgcaggtattgagtggagcgtgaggcagagtgcctctctagcccttcccagcactgccctctcaagaccctccccaatgccacaccctggctgcagccccgggcaagccacagagcctccctggccttcagtttcttctgcctgtgctgtgctcactggacaggataatttgcagaccattgagaccactgagggcaaagaacctctgaaagccatcaggtgtggtggaggccagagtcctaggctgagaggccctgattctggtccccagtctgtccccacctcccatgcgaccttgggcaggtcttcacccttgtttggcccgtttctgcttctgttcagtggctgtgggtgaagacaggctctaaggctgggggcattcttctatcactctccccagcccctcaccaaatagagccactggacactgggggccgagatgggggcagggtcaggggaagggaaaggtccggtcagcttggctgggtcagtgccgaggccagactctgcggccaaggcgggactgactggctgaacagcgccacctgctgtgtagagggggcaggccccaccacctgggccttccagccactccctaggcctcactgcccggaagctatgctggcctggggttcctgggctgcactgggtctggccaggtattttgcgccctctcaggaaagccctcagcaaagacttctagtggcccctgcatttcagtgctgtcccactgggatcttccacccctgcctgccctagctgtctgcattgttggggagggaggtgggcatggtcagactagcctggtcccccagtcgccagcttggcagtcttgggcagctaatcctctcagacccctcagggaggaaggggaggccagcaagctgtatctttccaggctgtagtatgaacgtgcacccgctggtacatctctcacacaggcaggactccgcaagtggctgccctcattcacagggggcttcaagggtcttctactccctccctgcaactcaaagtgtggccccgggccagggcactagccgagcaggagcaggtaagaaatctatacctgggccccaccccggaccactaaacccgcacctgcatttagcaagcgccccagtgagtcatgagcaccgtgaactttgagaaacgaagttctaacccaatacagacaaagggctggacctgaaccacccaaacacaccctgcgtcttgtgggtgaaacgggctctggtcccaaggaatctgtttcccccttaggctttctgttccatccagggaacagtggcagaggcccccccggcccccggccccatgccaaccccctgctctgctgcaacctcgacatcaaatttctacccagtccccacctgatgcaaagacattcgaggcagccagcgtgcttctacatccagtttatacacagctctatacaatatacagaaacctttatatacagatatatttatagaataagctatattaatttgtctctcctttttacagcaatattagtttggatctttcatacattaagtacaaaaaaagtctggggagaatggcacgtaagagagtgcatgagggtctgtggggcccggctgctcgctactgattgcatatggagtcgcccaggcccctgggaggacaggcccgcgcacttgtgctgcaggtctggggatggagtgggggtcggtctgagccgaacggggctgaggggggtggctcagaccccccagtgtggtatggggtggaggagggagacgtgcagcaggcccatccttcaagggcaaggtgggtaggagccaggttaggggtgggctgcccctgggtgcccaggattgagcccaagcctgccccagccccaagcctgaaacatggtgtggctgcagccttgggggtggggggtctgtccctgatggctcgtcctggggtggacgacatgcccacattagaggtcccaggacccaccctggcagaggaggaattaaaaggccagacatcaagtctctccctgtgactggccacggtgcttgtcagatctttcatctgagagtctgtcttgttttctaaactctaagagccactgattttgtcttgcttctgtgctgggctgaagctctgtatgcctcagcagggccagggtgtcctcgagtctggtgaaggcgggagttacagaggatgaggggaggcccagctccctctgtcagggtgggcaggggctcccaggacagccatccaggccagtcccagctgtgtggggagccgggggccagaattcaggcccccaggtaccagtgatcatgagagggaggtctcttggtcgggggagcctaggccacccagggaggctgcaggtggagccagaatgggagggaccatgccgctgcagaatgaaggcacgagcaggcggtcagccgtgcagtcagcgcctcggtacacaccagttttccaaaacgggtcacagcagcaggcgcgatgggaacagatggtgcctaaagctgagcttgtccctgcgaccctgcctcaaaggccccatcatgctcccctaccgttttcttggcaggctgggaggggcagcaggcaggcagggcaggtagggtgggcagccccagaggccccttccttaggaacggtgcacactcatgcacatgcatacgcgccaacactagcatgcacaccctcccaccccgcttctggggaaactccgggtcgctatctccctaactgcttcccaaacccagcaggggaggaagccctatggggacctcaggctaaaccgggactgctcccagccccaggcccctccctgggcagtggacagaggtctccagccaaggcccaccataccccactcttggccccacctcctaccaacaggacattgggggtgggagggaggaaggcctgctcccaggagggtgcccaggccagcgaggagggaaagctgaggggaacaggggtgtgttggttccagatcccagggcccagagctgcctaggcgtggtgggggtgacaccaaggggtgaggtggggccctcagaggaagggggctctcagtgccttccttccacccagggcactgactctgcagctggggtggtcacagcagtgcccaccaccctttgggtggtgaggatccttgggggtagaaggtaagccaggaagtagccagcaggcagggcaggcctgggtgcccaggacccatgggcagaggaggcagcatgagaggcacaaggcagagaaggggcggccctgaccccaccctcctctggcccctccaggcccctggctgccttgggccctgctcagaggacggctactgaacacatgattgggcggggggcttgcaagcccagaacacatcctgagccaagcccagcagcttctgtaaacatgtacagcactgcaggccacctcggcaggggcaccccagggggccggccagcaggcaccagatctggggggtggccaggacgatgccggcctggaccacagatgagaatacatgtgtcggggggcactgctctccacctggcccctgggagagcagccagcaggcagtgatgggaggcagcttgcccatggcctgtcctggagcagggggtgccagaatgcccccatggagggcagtcaggctgagtgtggcccacccagcaggctgcccaggctcctccccactccacacccttccccatctttccccatctgtggggccagatcccagccaccttggctctgggggtcctaagctgaggtagggatgcggacccccagctcagcagcgatgcctgtgcctgaggctaaactgcccctgggggtctgtccttaaagctgcccggcagggggcaggcaccaggtgcccacagggccacctgctcctgcctgggcccggctggccacgcaactggggtgctagcgtgctgagatgaccagctcatcttgcttggcggggctggctccgtggccagtgggggtagaagtccggatcttgtcagccgccaggcattcctggctactgaggcccgtgggcgtcaggtccatgagctcacccgaggagctgagcgggaaggagggcgagagtgagatgcccgaggaggggtcggctgagccggcaaagagccgtgggggcttgggcaccaggttgggctcgaactgggcacggagcaggatctcttgctggctgggggacttggggccctcagcgtagtcactggtggggctctcgggcaccaccatgcagtagaggtcttggaaggagctgctcttgctgtccaggttgaagaggctgtcgatgaactcggcgaattccagcacctgaggactgggcgagtcccccaggcgcccattgtgcagcgccagctccccgcgggaggccggcccgccacccccaccgccaacctcttcctcctcgtcattggccgcagcactggggggccgctcaggagtgacgccgccactgcccagggccgcctccaggggctgcgtgtcctgtgagtgcttggacaggctgtcggccgccagcagctcagtgcgcgagctcagggatgggttttcctcggggatggcagggtcaatgtagaagaggtggccttcatcacgctccagcacagcgtggaggctgggggagccccggatgctgcggaagcctgaggagcggcgcgagtcgaagctgtacagggactcagtgtccgagaggctctccatggtggccagtggtgcccgccgggcctgcagctccgccgccagccgctcctgggtagacagcagcagcagctccaccgggtcctggcgggccgccgccgcaaccactggcgacagcagccgcccctccgagaagccctccaggctcatctcagactgggacttgctcctgcagagggagaggagagcagggggtataagactcagaagggagaggggactgaaccccagctccctggctaaaaggaacttgcagggaataaagggtacagttcatttagcagttgttgatgatgtgcagcagggaatgcttattttctttttttttttttttttttgagacggagtctcgctctgtcgcccaggctggagtgcagtggcacgatcttggctcactgcaagctccgccctgggttcacgccattctcctgcctcagcctcccgagtagctgggactacaggtgcccgccaccatgcctggctaattttttgtattttttagtagagatggggtttcaccatgttagccaggatggtctcaatctgctgacctggtgatccgcctgcctcggcctcccaaagtgctgagattacaggcgtgagccaccgcgcccagccaggaatgattattttttaaaaacaactcacaagaacccaagatagaagacaaaagagttgatgctgggttgagccgcggggtccctgaggggctaaggccctgctggcagcactaggacttcaggagtgctgctggggttctctgcaccagaacccctgtcattgtaccaatgtgagaatgaggctctgatagactggctgccccagatcactcatgagcctgccccaggtcactcatgaggccacagtggaatgagagagacagagggagggaaggagggagggagggaaggaggaagggagggagggagggagggacagagggcagcagggagacagggaagggagagagccctgcacatagctgcccaactggttccaccccaatctcagagccagcaaccctgggtgccactcccagggatctcatcacttccttcctcatccgggtctcctcctgtctcccatgggccgcagccctctgctgggtggggagcctagtgcccctggctccgcagaccagcctgcagggaatgagtgacagggcagggagtgggtggcttgcagcagtcaccgcagccggaaatggacactggcttcttcatcgggttgtgcagctgccacaggaaatgcacaaatggcagggagagacgtccagttgtccctaccaagggccaggaagcagcctcttgaccagatctgtgaccaagcacacagggcctgtgtgggaaggtcctagaaaggcaggacaatcctcccctggaaggactaccacttaagagcctcgcacccctcaaagagtgtgtgaatagcaagggcgctgtggcccccatgtgcgtgcccctgtgagcatgtgtgcacgcctctgttcatgtgtatgagtgtgtagaccagacgtctgtgtatgtcagctggcttgtgtgtctgggtctgtgcacaggtgtattcatgcatttccatgagcacctgcctgtccacatgtgtccttgtatatgtgtctccacctttgtcttggtgtgtgtcttgtacatgtgcatgtctgtagggggtgacctgtgtacttataactaataattgtgtgcacatgtatgtgtgtaagcttcaatacaaatatgtaagtaaatgggtgtccatctgtttgcgtctaagtgtgtaagagtgaatctgtgcaggccggccatggtggttcacccctataatcccagcactttgggaggctgaggcgggcagatcacctgaggtcaggagttcaagaccagcctggccaacatggtgaaatcccatctctactaaaaatacaaaaattagctgggcacggtggcaggcgcctgtaatcccagctacttgggaggctgaggcaggataatcgcttgaacctgggaggtggaggttgcagtgagccaaggtcgcgccattgcactccggcctgggggaaaagagcgagacttcgtctcaaaaaaaaaaaaaaaaaaaaagagtgaatctgtgcttttgtggcccagggtttgtgggtctgtgtgcctcccctggctcatgtaggattcagggacagcaggctgtgggacagctggagcacagcaagagagccctagagcacagagggtgagtttgacccctcctgtgcacgtgtgcagagctgagcccagtgcatgcacaaaatgcatgtgcacacaagtctatgtgctctgaaccacactcaccctggggtggggctgggagtggccaaggctcacctgacgctgctgttgcggtggtctgcagtcggcagctccagggcaaggccagtgggcatgggcggccccgtggggagtggctgctgctggaagatgagctcaggagtcaggtccacctcggtagggctcaccatgaccttggctgcagagagcagagcggtcttccccttgttgtagttctccagcacctgaggacaggacagaggaggctgggggtggtggagggacatcaggccccatcgtggggccgatgtggagccagggcccaggcctctcaggccaagcaaagcctcatggagtcacttgggtcccactctcctcctcctgaggtcaccactccccaaggcctgagacttgcccatctggtcacgactcgccccacagcccggcgagtgctcctgccctacctgccttcagcctttccgcagccaggggatggctgcggctgtcgctgcttgcccattcatctgttaagggccaggtggccttccgggcctctgagctgagcctgcctcagggacaggcccctgggagtctccttatctcctccccaccatggggcaacgtggtgatgtggacagagccaggggtgtgaggttgaagtatttgagtggggctttctggcccagctacctacttctctgagccccagcacccttgtctgtaaaatcgggcagtgatctgatggtgcttacggggttctgatggggtgacagtgccttattccctggtggtaccctgccgggagctgcctcaccttgttgagcccctccatgaccacatagggcaggtgctcatgcagcatggctggcgagatgatcacctcattgaaggccttgttgtcgccccagatggcaaagtatgtgggctcctcctgctcacagcagctgagagggacatggacagaggggagttaagggtggggtggtggcctggccctcggtgccagggcctcctggctctgttctctgccctgctcagcagagctggcatggtttggaggcccctggcctgcctggcagcagggctctgttccctggcctggctcctgccctgccctcagcctgggaaaggctgacctcgagcctcagccatggtccctccacagccttcgacctgcttttggcctgggccacacctgctccacctgctgcacggcccagctcaccagctgtgtcaggggaggaagccgaccctggagggaggagccagggcccagccgtctgaaggagcacagtgggaaaggtctacccacttgcctgctcctattctctctcctggcgcagcccccaccttgctcacagctgtcttcgaggaattcccttggtgaaaccaagtgacaactgaggtgtgagctggccagggcctgaggggtgagccctccagggcacctacttttaaatggaccaccagtggggagagctgccctggggcacaccagggaagggctgacactggaggcaaagccagactatggagagagacgcctggagtcctgctcagggctggccttttgttccatttccagagcccgatgctggggaaacccctccatggaggccctgggccatcttctcccagcctccacccccagccccgagcggtgattgagccaaggccggccctgctctccactgcccctgccctggccactaccccctgcagcagcagaccctggcagaacctaccagcactgctctgcagggtggttgtggaccacgtggatgatgcggccgggcgggtagagtggagtgctggctgagagggctatagttaggtcgctggggtgggtccagagccgcgtgctggccagggtggtcacctctacctcctcaggcagctccgacttggggatgcatttggtggcccccacgatgatccgccactgcgcggggtggagtgggagagatggggacagagctaagtagcactggctggggggcaggggcagggggaccgagaaggggggctcagcaggtgagaggtgggcagtaagatggcaaaggggcaggggaagggcagtggccagagcattaaaggtcggtgcccacctgaagaggcagtggctgaggtgcacggtggccagacggccaataaggtgccaaggacagatgacatggaattgttgaatttcagggctggcaaggggctggaagcccagccaacccctcatctagtagatggggagacaggcctagtgaggggaagggacttattctggatcactccacaagtccgaggccaaacacaccctggagttgagtccagctggacctgccaggcctggcctgacaaaagcccaggactaatctggtgggagcagttccacctccccagaaccaggctcctccaggcaggcaaagtcccacaaagctttgctgccctgctcactgcctggcacctggtacctggcccagggccctgcctgccacagggtctagggcaccaaagctgggaacggtccagacggggctgagatggtgaatgggctgagggctcgcccggggcagggggcggggggcagggggtgaggaggggtgaccacacagaggaccctctcctcctgcgctggcctgcctcagtgtgcctggccaccatgtccccacccccacctggccaccccgtctgccagtgtcctccagagacctgatgcggattaggaagggctgaccctctcctcttggtcacagcagaaaatcagaacaaactgtacccaaatcctctccacaggtcattcccagccctccctgagcctagggaatctcagaggcttcggcagaggcctttcctcaccgctcaaagcctccagatcgctttctcctgactgtgggcagctcccagctctgtgtgatgggagcctctcggttcctgtcctgattctgttctaactttttatgtgagcaaatgcaagtccctcccactctgggtctcagtttccccatctgcacaatgacaggggatggatgggttgagcttggggatgctgagggtctgacttcctgaagttcccacaacaccagccacaccctgccctggccttccatggcagggcctcttgtgctttgtcccaagaaaccggtgggggtcaagggcagggacagatgaggctgcacagaggcagggtgcccaggtgggggctcactttgggcttggtgcttcgctgcaggacatccaggagctgtctgcggaagccttccagctgagagaggccaatcctggggagggaacgagacagggccgtcagccaggcctggtcagcggctatgagaggtatggggccaggggcggaggggcaggcacacgcctagcccctggaacaagaagacacgtcagccagggtcacggggtggagaggtgtccacagagcagctccccagagcagagctgaggagtgagaggacaggcagggcgggcgccagcacgtgcgttcacctgggcttctcaccactgggcaactaagggtggggaggggcgtggggtcccttgagagacaggaatcggactgagagagatgcgggggctgggggtggggagaggcctggaggagggaggaacagcctggcaagggaccatggagcggggccaaggactcacctggggacgaggtctttgcccagaaccacagcagtcacgaactccttggaatactccatcgcatcctcactgcaagggaagccgaagcagaagctaaggccaagggggcggggtggtggtgttccggaatcggggggcccagccacaagcaagccctgctcctgcactcctgggatggctcccggggagctggctggtggcaggctgggttgcctgctccctgctctgtctttcccactggtaaggctttgctaggtagatcctggggggcgcatggcatttcagagcccccaccctccaccctccaggccactcccagacctccatgtgaccagaagtcagactcccagtccagcccctagcaccagccaaccctcagcctccactggtcccaactgccccagccaactctgaagccccagatggctcacctcagcaggccccctggcggggagtaggcaaagcacttgagggtcggatactgtgggcgcagaaggaaggagaggatggcagcagtgcccgcgcccagggagtggcccaccacaatcaggccgtagtgtttggttccgcggccctggagaccgagagaagcctgagagccctgccccaatgcccgccaagcgactgtcttagccaacccaagggaggcagagggtcttcccatcttcccagagtcctgggatcttgtctgtgctgtgtgaatgctagggcacagagaaccaagatagggccccacagagcgactgcttaggcagactgttctaataaactcttatttacgcttccaaaccttgctcagaggttatgtccttggggaagcccttctgattttccaggagtggctcactccctctagtcattgcatctgtacctgggatggagctttttatcactataaacatgtggttacctgaccccatctctctaccctcactactagactgaagtctcctgaggccagagcctgctttgctttggaaagggcagctggtggcacctcaggagctacctgcacagaccgtggccagtgggcaggactcagttatcccctaggtagagcagcaccccttctctctgctctgtattttgagcctctccatgtttccttctgacaaacggttctgcagctatgaggcttaaaagccgtctgccctgaatcatctttgtgcctctagtgtctggcatgaatcaggtgcccaatgactgtaggtggggcggagcaggatgcccacaggacctggcacaaaagaggaggggttgggagccaggctggaagggattgcaggagcctggcttgtgtgggagttgtgaggctccatcacccatccatcctctcctctctgtgctgcgttggaggagggggacccaggtgtgaaaaggcttggtgccatggaaaattcctcaccaggtctcgcccaaaggcctgggacaggaccatctcctgctccagtttcttcttgatgtactcagctgagaggaccataccctgggtgggcaggaacagaagcaggtgttggtgggaggcctcccagtgaccagcaaacccacagtgacctgcagctcaggaaccctgccccatccatttttccctttgggcctcgtgacaacccagctgtgggggctggcagacacgctgatcctgtcacttccatttcacaggtgggaactgaggctcagaggggcagtgtggctaatgaagctggtatgatctctccgcagctgcctctcaggttcttccatggtcaggctctgggctgtgcagggcagtggggtcgcagcagtgggccgcaacgggccttccagactaattcatgcctctctgaccaatctcttccagtgagcccagcgagcagggaggaacccccaaccatacacgcctctgcacactggcagggcaggaaagaagcccaggggccctggggtccatgacgtgggttaccttgtggcccagccaggtgccgtggtgcccctccacggggaggcgctcagcatcacccgtcaggtcagtcagggcatccttggggagagaggagacaggtgagggggcggctaaagaggacaggaagagggaggcaggcacccccgggggctgggagccatgggcagcgtaccttgggggacagggtcccccggatactgatcaccactttcttcttgtcatggtccaccgccacgtagaagggcgtttcatagacctaggaggcgggcagctcgtgagcctgagcggccctggtggggccacactcagggaaagtgacctaggcaggtctccttcctggccaggaactctggctccaccagccacggagcctctgccgccagaaaggctgacgggctcccagggtcactggggatctcctcccgatcccagccacaggcctgccctgccctccccgctccttgctggctctggcagccctgagtgccaccacttgcccctgagtccaggtgatggctgcccctccctgcttctgccctcaattcctttccctaaagggctagggctcggcaacccaaacactgggtgtggggttgatgtctgctttcccagccccagaggtggtacaggcaagccagggtctggggaagagaagggggccacctctggtctgcccagctagggatgcctggaagctgcagccagccagcaccagccaagcaagggctcctgccggcctggaaggatagcctcagcaccctaggccctcagctgcctgctcctgacaccaggccccagccctgcccggcctcaccgcatcatggcaggaggtatagacgatgtccaccgcagtcatgttctcgtccaggaagtggcgccggatggcaatggcattacagccacagcagttgtcttcctcgatggtgactccaggggcgaaccgcggcctcgcaggacacaggcaacacctagggtggggtgacaagagagttcagggccagggagtccccgagggaacaaatgtctcctgccactgtccctggaaccagttccagttgggcattcagccccactgcctctaccaaattgcccttgctaagtcctagtgacccccacgtcaccaaatccactggccactcttagccttcctcttaactgagctcttggcggcacctgaccctgtgggcccttccctctccccacctggctggggccccctcctctctgggatctcccctccgggcagggcctactcagcgatgcacccaacactgaagccctggggtccctctgggggcactggctcctccatgcactcatgcagtcttgtgttttagacaccatctgcatgctcaggaatccaccccaggcctgccccaacacccagatgcttccatccaatggcctagccagcacctctctcggacacctgacaccctgccagctctcaaaccccttccctgcttgtgtaccccaaccctcctgaggtcttcccaaggcccctcggtggcttggcctctggcttgcaactgtctgtggctcctcagccctcacccccacggccatgccactcggtcagtacacgtactcggcttcccttcagactcagagctggactccaggcactccctcacctcccctacccctgccctggcagctctgcctgggactgtcatggtggcctcgactggcctccttgcacttgcccctacgctctcagctcagcaacagagtggcccttttaagataagttgagccacatcattttctttttaagaccctacagcaacgccctgtctaccccacctggctctggtctctctgacctgctgccagcgtgttcagcagcacctgagacagcgtggcctggcccttgctcctctgggcctctgttcaaacgtcctgtcacagtgaggtctctcttgccacctcatctaacagccagggctccccaggcccccagcactccccatcccaggcacctggctttatgtgggtccaaagtgcccatccgctccaccatgtgccctatttgccttgtctatgcgctgtccgcctcctcgctgggcagtgagcaccacagagaggtccacagctgtatccccagcacccaaacagggccaggtacacagtagcctccccacagaaatgaatgaggcagcctgggagctgggcacccagctaggtgcagcggcacctcaggccaccagagggagccagcatccaactgctaaggcaccagacgctggagcccacgtgactgggcctgccagctgtcacgggatgacagctgagattttattaagaagcttggattctggtgatgctaggaggtttgtcttcactcagagcatcacctgagtgactattacacactttccaatggggagagactttgctgagaaagccacagtgcttgctggggggacaaagccgatgtacaatgggagagcatggtcccccacactgcaggtcaagtggtgatgggccagggtctaggggctgagctcctgtgctcggcagctgttccctctccaacctcagctgagcatgaggctgtaacagtgtggcctttggagactggaggcttgagtttgaacccttgctgtatcacttcctgaccgcaagggcctggaggtcactcagccattctaagcctcagtttcctcttctgtaagagcaggtggtgacagctacttcacaaggctggtgtgagatcaagggtccaagatgcagaaatggtctggcctataataggttcttaataacgagtggctcctcgcttctccggtgacagggctgcctctgagtcagtgatgtgtgggccaggaggaccagtcaggggagcagggccagcaccccggatgggagggccctggggctcatccagggcagggctagggccaagccagaagcaggcctggctcgctgtgctctgcatgggctgagaactgctgccaggggagaggcctgggcccgaggcagatgggcagcccttctccctctggccaggctgttatggacaggctggggcactggactctggcctcctcccaacaccctgggctgcaggcctgcctctctctgccccacaggcacctggttcttccaggcaggggcctggctgggccctcatgaggtctagggactctgctctctctgcaacactaaggcacctaatacaaatgccagcacccctcctgtctgcagagcaccagagagccctgcctgccagtgataccctgggttctgaaacaccctatgggcaggcaggacagataccacctgttacagtttaggaaacaaaggctctaagagctgtccccacaccaccagtgagtaatggagcctggtgctcattttgaagagttctctgccacagctgggactcccagggatgcaggcaagaatgccaggcacatgcagctgacaaagatgggaagggggcatgaggtgctctagtcctctctgatcagtcgctggagggatggtgagaataaggccccgagagccacccagctttctgaggacagggagggcgctgcagagtgggtgtggctgctgtgggtcccaagggcaggggtgtcaaggaaagaagctgctgcccagcatgccagcctttccagaacgggagcccagggaactgtcctccttctgcctggcatgagctgagggcggagacacccaggacagggaggggttcctcctggagcaggcgcccttctctggcccacttaggaatgcagagtccacccagcccccaagcggtgggctgagcgcagagctaggctgcaggccaggtctggggctaaggcctttcctagatcctatgaagaaggttggagccttaactaacaggccttcttggtgccttttcaaagacctctatggattgggcctctctactaggaaagtcctttcttctagaaaggcagagcacatgaggggagccgagagaagggaagatgtgggcagaagggaatggctgagggggcagagagagaacgccagaaggggaggggaggcagcagtgtgggtgttatgcaatatctcatctagccctctccaaaaaattccacgaggtatgtatcaacatctccacttcgcagataaagaaactgaggctcagagaggtggacccacttgccccaggctgcaagtgacaacatctggattcgaacccataactgtgtgactccgaagcctacaacttcactgctcagggataacacagaactagaaaggttgaggcccagagaaggtgtagaaaagaagccattcagggcaaagcagtaggcgcagcccggtagcccttcctcacacaccacccgggaggagaggtgcaatcgctgggggatgggacaggggtactcacgagcaggaccgagccagttggcagaggccgcaggcgggcttccgcatcaggtacatgggccacccgtaggcagccagggcaaagagcatgtagtagcagacctctttgtagcggagcatctcttgctagaagagaggaggcagagggcggtcacctcctgcccttcctgcctacagcctcagggcccagcagttccccagggtgggagcctgcggacccaacccctggcagggaggggttgctggtcccctgttgaggtgtggggcccaggccttggaggaaggacactcctccaggtgataattgcatttccctaattatctccatgcaaccaggacacgaatcctcagagacctgtcctgttgctccagtctcagaattaatgatttggggacagaaaatcacttggtccatttccttgcctgttttccagagaagggaagagttgagggatgtgagtagtaatccccccacctcggcaatcagccctgagaagggcccttgatgctgggaaaatgtagccctgagaggccccagccctccagctgggcggcgtgtgtgggccttgggcaacagggcagccacgctaggccaggagaccaatcaccaaatctctggcccttgggttctttgactgcaaatattgggagccttcaacttgactcagccagctgcaggctcccagggctccgggcaggggctgcgttggtgggagactgggatctcttgggagaaaggcaccagtttgaaagccagtgtgtctgaggcccagcagccactgttgatgctgaggaggttattggctgctggggtggagggaggaagaggcaggggtgccccagcaaagtgtctgccagcttccagtctttcccgagtgccccaggcaccgggagagggaattagtcaccttgtaaaagttaaggagggtggttagtcaccttgtgaagtgaaataggtggcaccttgatcagggcccggaggggtggaaacatccctggccagctcagctgctcttcaggaacgagagtggagaggtaattatcctctccctgtcagaagctccctgcagccctgggggcggggtgggccctggcagcctctgccaggtggcaggtgtgaccctggcacctcgatgggagtcacttgatgggagtcacagctgcctgccctccccgctccctgtgaggagtgggagggagaaggtggtgagaacagccagggcagagcctggcaagcagaaatgggctggtttggggcacttactatggatgtggctatttttagagaggatacaaatgcctgctttagtggggagtagggacaggcagggaggactgaggcttttctagaggactgagtgttggttttttttttttcttctttttaagggacagtgcagctggagtgcagtggcaatcatagctcactgcagccctgatctcctgggctcaagcaatcctcctacctcagcctcccaagtagctggggtcacaggcatgtgccaccatgcttggctaattttttttttttttgtagagacagggtctcactatgttgcccaggctggtctcaaactcctggcctcaagcaatcctcccacctcggcctcccaaagtgctgggattgcaggcacaaggcagcacacgtggcctaaaggactgagatttctaagagacggaatcctttccatcagcatcctggctggcaccgaggcttcctggcactgtgatgggaatggctcgtgtcctctcagcacagctctggtagaaggtgtgcctagtgtcatttcacagattcaggatccagctcagaggggatgaggggcctgctggaggtcgcagcgacaggcatcagagcagatgcacgctccagccatttgcttcctgaggcagggcctgtttctcccggctgccagctgtggtttcagcctgggctgtactgggccctgggctgtactgggccctgggctgtgtgctgggccctgggctggggttctcccaccatgttactggcaccacctttccctattacacactggatttctacgaaaggcgattgagaaaaggttccactactaaaaaagcttggaaaccaagtactacgcccattgcgtttcattaacagcagcagcagcagcaaaaatgctagcagctcaccctggtgaagtgctctgtcatctcaagaggccaggaccagacacttctgaacttggtaaaggaattcaggggatttgtctgtcgaaccggtgtgaagtgggtggttctcgtgaggggcatgatctgagcagagaggctctctggagagccggggggagaccgggcaggggcaatgtggctggcactgcaagggcagctgggaggagtttgcttaggtcattgtggcagagtgggagggatggggacggggtggggtgagagttgatgtctgactcactgaattcttgaggtcgaggtacttggtgtttctggtcaccggcatcccagacaggaaggccaagatgtcattgtttgcctgtaagaccggcaggtgaagaaggacaatcactggcccaggcccggctgcatggctgggaaagggggcccaggccctggcgtccgcctgcttcccaaaggccgagaagcccaaacgagcatgcagcttctagttcttccaagattcagccacttttccaaaatctgaggtttccccatatttccagatgctccccttctacccaaaacatcaagcccctgaggacattcctggcccacagcaggcgaaaggtattttgtatgagacactgagaaaccctaactggggttggtgtgctggtggggatgtggggtgggcggagcggccacgcagaagaccgactcgggagctcaccacgtccactaagcctgtggttagaagtcctttgagggccagccccagaggcagccatgcacgacccagaaagtccctagagtagtagtcacggaaagcctggccgaaggacaagctcaggaaggcagggggagccagaggtaaaggtgacctccagggtccaagagagtgcgtggtcactggggagctgcgtgggagccgagccctccgctgcaggggccacagggaaggggcctgaaagaagggtggtgtggagaggtgacctggagaaggggctggtggtgctcacctcgtccagcacggcgttgcgcttggcccgctgccgctgccggagcagcaccaggccagcaatgatgtcggatggcacaatgtcaaggtcccggaagaactccgcaaagaggtaggcgatttctgagtaggcatcctacgaggtccaggaaggcaggaggcagtggcaggggagcaggagagaggacgagaggccaggagtaaatcccccagggctgggaggctgcagaagcaggtgtctgctcggggtcccctggacaggttctccccagcacctccacagcgcccactgagcctgaccccatgtggccctgtgaccctgagggccctgcccagggctcctagacctggcagtagccacccagccctctcctctccttggaattcgcatggtgcccactgtctaccaagagcaggcgccaacttgagccactcctttttgctttcccagacgctagaatcaaggccgggtggctctggctcatttctcctctagccattctctccagcacagaaaccaaactaagctcctggctgcctctgacccaccagctgggaccttggaagtccctcgtaaggcctctgtggagcctgccaggtctcagggcccctcccccagctacccacaggctgctggctcagtgacccccacaatgtgccctagaagggggtgtactctctggcccagtggtcccccatggcttctctccaggcccttggcctgaagacagtgcatgtctgggcctcagggcaggaggcgagccctgctggctggtgccctcttagtcttcccttcctggccccaggctgcagcccagagcctcttccctaacctgttaggagacgctgaggtgggaacaaccacatggcaatgaagtctgtctcactgggtctcgcccctgagtgtttggcacttgtaagtgactaaatcaagggctgcaaattcaaatgccgaatggagccaaacggagccagatactgctcggctccagctgaccggaggccctccagggcccacttcaccagattcagaaatacagaagtttatggaaatacccctgatttttaaatgctggcatccaattaaaatgtgtaagcaacacaacacacgctgatcaaaacatgcttgggaccagacctgccccctgaggccatcagtgtctaacaggacctttgccgtggggctctgctgtgatgtgctatcttttccccagactctgacaacagccccagctctgcccgtgcacccagaggggcaggcgtgccctccacacagcagccccagcctccatccgccaggggccggctctctgccctctgcatggcctgccttgcagcccagacccctcagaccgccccagagagacccaagggggtgctccccgcccaccagggaacctcgggggctttcttacacttgattactcactctacggctcaccaggggacgctggtgggcaggagccactcgaggcttcccggtggcttccgtggaaggcactttgctgtctgcctcagggaggagtggtctcctgacctcactggctctgctactaactagctgtgggacgctgagcaagtcactccacctctctgggcctcagctgcctgatctgtaaaatgaggggtgggactagatgatctctaaggtccctgcccgctgcggggcacccctggatgatcccggggcctgcctcccttccctccccttgggggccgcccccagctggccctgtcttccttctgcagtgccctggcattaagtccggccctctggtcactcctctgagctcccaggtgctgaaggctatgtgtccccatctaggaccgtgctaaacgcctatcggctttgccaggccttcttgattaatttgctgctggtgaaacgctacttttctttgtcttcaggtcaccctgactttgcatatttcttctcctaaactagagtataagttccaagggagttgatgcagtcttcacagctttctgttcccttgacaaagcaagtggacgtggtcctgcgtgctggagcgagtggctcagtgaataacaggccctgtgtgagcaggccatacttgctcacgctggaaacccagctccttcccaccagccctgccccatcctgctttgccaaaggagccaacagccccttaatcacctgaccacaggatgtgagccagaggggagcgacctcccagtacttactgactgggagtccttcgtccgcgtgcagcagaggaacactttgagccggcgcgaccagctggtggcttgaccctcctctaagcggtgcctgcaaagcaggagaggcggtatgtgtgaggtcagagggctggaccagaagagctgggacccagacgttatggaaacagggcaggctgttcccaggaccctaccaaagggttcccgcagtgggttctgggggagaacagggcccaggccctgccagagctggtggccagtggcctggctgctggccagcaggggccctccctgacagactcctgctagcctaagatggtgtgtgccgttggccaagggtgggtgggtggaagagagaggtggggagcagttgagaggctccttggcttttggaagactgaacacaggcaggctctggggcttcagagctgggagccctaagtgggggctaccctgcagctcaggtgtccaaaggctcaaaccctgggaggtcagcagggtgttgggcctccctgtcgtctcattctaaggcctggaacagaccttccagaaagacctgcttttccccagaaaggatttcagacacttacatacttacatactctacttacaggaaatctatggggctgagtaaggctctgcatttcccaattccttggatctgatacctaggtagggagagggctctacccctcacccacatggttgcccttgtctattctcaccccccaaccccatccccagtgggtctggctgctcagatggagaatcagggtctccaggagtctgtacccaaaggcagagcaatgggccagttattcacagaggttcctcctaggctggatgtctgcagtcagtgtgttgagcataaagataacagatccaacattaaaagtgcagacctccaaaccgagcaagaaggggctagcttgcttttgtgccatgtgcggccccttaaaagcctgatgctgggtggtcaggagaggaaggcaagggtggccctcatatgcattcaaggcacttaacatcaatctgtagtgacaggccaggccctttttgagcctcttggctcctccgtgtgtctaaggaccgcttcccgctctccaaccctggcttcataaggcaaatggccacaaggagaaggagggcaacagggtcttccagggctacgggaggcaggtagggaagggtgcagggaattgctactctggggacctgctggctcttagggacttggacagctgtacatcctaaaccaatgtcccaccttctggggcatgaagggacagtgtgctggccaagcagggttcccagagcactgtgggatgggtggtggtggccagctgggctgggagggaatatgggctttggggccttggctcccagacctgacattttgggctgggacgtggccacagcaggcacgggtgtggctctggctgcagtgctgagctgacgtggaaggtccacggggagccgaacacagcagtgcaggagggtgggacggtgagaattcctgccgggcagcgggggtccagacagcctgctccccaggtgcttgagccagctgctctgggctgcaggtgtggtgccagttctgcaccccagcagcaagacccacggcaggtgacctgccctctctgggacttggattcctcatctgtagaatggatctcacaaccatgccggggttcacaaagggattaaatggatgaattgcgtaaagggcttggcatggggagctccttacataatgcactgtagaagccccattaacaggaggtactgggacccaccctggaagcccctctctttttctttcaacaaacaaattattgtgacactacctggatgccctccctcattttgtctgccatggcacactttcccccatctttaaaacatcatgcaaaactcaccccctctaggaagctttccttgacttgcctctcccaatctctgaatcctagaggcagcctagcctaatttaatagctagttaagcgaggactctaaggccagactgcctgggctagttcccagccttaccattttctagctgtgtaacctcaggcaagtcccatcatctctctgtacctcagtttctccacccatattatggggaagttgacagctgtgtggtggacttgtaacttactacacgcaatgcttggcttcactgttattaccattgttattatcagcagtggacaatgatgacaacaactactattaaccgagcacttacccagtgtgagcactgtgttagtcactctgcaggtattagctcagttaaatctcacaacaacatgagacaagaattgttattattcccactttatagacaaggaaactgaggcagggagcagttaagccctttgactaatgcccacggctcacacgaggttggcatgcagtctgggaggcctggggtagccttctgaagaatggagacctctgcccaccagacagcaaagcccaccctgggactgcccacccagcccgctgactgaccgcaggttgtaggtccgcaggttacgctgcctcctcttggtggctctcagcttgacaaaggtgcggcccgtggggtcgaagacgcagaggacagtgatgcacacactgaggatgactacccagttgcagacaaccattcctgcgggcagcagtgggaggcattaggtaggggcgctggggacacctctctggctcacccgctctgaagaaagggacattggagcctccctaaccccaaatgcttctggggacaaaagccaggctccaaagcccctggtcccagtctctggccacatacgtggccaccctattgcccacccacaaccccaagggccactcttggctcagagcaggcagctctgtgggtttccaaggaggtgctgaggagcctcggcttgacctgagcagctctgtgcctgctgcagcccaccccagaccaggtagctggcaggcctcaagggtgagggaagcagtctcgcccagccaacctgctggtgcccccacagaaggcactgccctctggcaatgcccaagcttcttcctctctaaactgatctcatcccctgtgcccccggggctgctgaggctccagcaggcctcacccagacgtaccgagggtgacattcttggcagtgaggtcgttgcaggaggtgtagtactgagtgagccagacgatgcccacgatggcgtagatgaactcgatcaccaggatggctgcaaggagagcaggcctggctgaaggatggctgccacttgcatgccagggaagggcctagaaccccggcctggcctttcctatcgctgggctttcagccagctcagtagcaaaggcagaggcagcgggccattagcagaccccccaccccccgcctcccaggccccaagcccgtcctgtcaccatttggtcctgttggcccctgaatgaccgcttgcaatgtgcccaccacctctcctagcttctgtgctctcaagtccccggggcatccctgatggagttttgctcttgttgtccaggctggagtgcaatggtgtgatcttgactcactgcaacctctgcctcctgggttcaagagattctcctgcttcagtccctagggtagatgggattacacgcacccaccaccaggcccagctaatttttgtatttttagtagagacggggtttcgtcatgttggccaggctggtcttgaactcctgacctcaagtggtccacccgcctcggcctcccaaagtgctgggattacaggcatgagccaccgcgcctggcccatttcctcattctatcaggatctcagaatcatgtctgaactgtggaatcagacacatcttaggcaagtttcctaatctctctgagcctccatttcctcatctgtaaaatgggagtgacaacatttatgtcataggactgtgcaaaaattagatgagagcgtgttcacttcatggaaactatttcccagcaagaggcctctggaacctgatggaggagagaggaagggcccagcagctggtctgcatccagctcaggcccctcaggggctgagactggaggggaggggtatggagtggtggctgagaaggagatctgctggcctcatgggggcagcctggaaagccccagctgcacgggcagcagtgtggcagctcagagaccagactttggagccagacagcgtgggttcaaatcccagctccgacatttacacgcttactagttgtgtgagagctaggcctgggccccagtttcctcatctataaacggagaccaataacacccactccctgtgagttaacacaggaaaaagggcctagcccagtgcacagaagcacaagagcagtgttcactacaaatgaccagaaggggctgcaacctaagcccaagaagaggacacaggctggtcctctggggagctggcccagactcctgagggggttcccaggaagcagaaggcctgttttgagaaggatcacaaggaagatatgctttgaagagatgcacatggttgaggatggggtcagcaccttttcctgtaaagggccagagagcaaatatcttggactctgggagtcctacagtcgctgtagtaactactcaactcggctgctgtaggggcaaagcagctggagacaataccttactgaatggatatgtgccaataaaaccttattttctttttttttgagatggagacttgctctgtcacccaggctggagtgcagtggcgcaatctcggctcactgcaacctctgcctcctgggttcaagtgattctcctgcgtcagcctcccaagtagctgggattacaggcgtgtgccaccacacctggctaatttttgtatttttagtagagacggggtttccccatgttcgccaggctggtctcgaactcctgaccttgtgatccacctgcctcggcctcccaaagtgctgggattacaggcatgagccaccacacccagcctaaaaccttatttaataacacatacagcaggctggatttggccctcaggctgcagtttgctggcccctagtctagaatgtaagctacagaaggccttagttcactgctgtaccccagtgctaaaacagggcctggctcgcaacatgtgcgcagtaaatactggctgagtgaatggagaggtgggagttgtctggggcagcaccccagggtgggtggcccttacccaggcgcacgtagagcacgtactgcatggagtcacggggctccgtgtagaggatgcccccgcgcatgctcagccagatgatggccatctcagcgatcatgcagctcagcaggatgcccaggtagccgcggccgtggtccaccaggttcagggagcaggcctcgtgcgggttatagaccaggccgaagagcaccacggacaggatcacaaacctgtcacaggaacgcccgtgtgagcaaggccaggtggcccctgtacctcgagatgctactagcaggcaggcccttccccagcccagattcagtggaaggagggctggcagcaggcacctcctccataagaccattgtccacctggcatcgaatgcctagaagggcatgggcggccagtaaaagactcagggtcagccatggggagacagtagcagcaactccccccagtgttggggtcaggtccagcaatggtagcaggggtgtcattgccctaaggggctagatgtttcaggcacctcctccgggcagctgggggcatgacagggttgggacttgggcccaagcagggaggaacaaatggccagaaagcgtccttccagacctttctctccaaacccaggcctgtggccccgggcctggggactcaccaggtggtatgcaggagaaagaggaagatggccggtaggacgaggtcatcactgcccacagaccagcgccgccggaacaccacgatcccgggcatggctggtggctctgcagaggctcagtgggcctggtgctcacctcctgaaagaaagcagaggaccttatagctgcctgaggaggtgaaggcacccagggccactgcattccttgggccacgggaccagtccccggtgtggccagaagcacaggcatttttggagctggccactggaagtgctgacccacctccgggcaggagccaacacaaaggaccttagcagcaggacacagacttcagccttccccctggagtctctcctgtcccccgagactggtactggccactagggatcggcttctacctggggttaccccagcagtcactgttgagctctattaaagaccccgtttcctccttcatgggatcagtgggaccctcagcccagccctcaaaccctataatctttagacctggcccagtgcacactgtccttggagtcaagggaggggcttcccagaccaagaacaagcccacccaacagcacaaagcccagcagggcaggaggaaggctgaaggccttgggaaggtgggggcaagggaccctgtatggttggcagctgggactgacaaacatggaaggtgaggagtgcctggcatagagcaggtgctcagtaagtatttcttgaatgaaggcttcagtttcctgctttgctggaagccaagagcgtgctctatgacttggttttgaacccatcagacagaagtccccaccacagctatgcctccagggagggaagagcacggttgaggtgcagggtcaggagtagggcttgggacaccttccaccccacactgctggaaggatggggtaagccctgcagggtcacacccctcctggcaaccatacctcccaagcccaccctgagccatgcagcttttccagctggattttcaactctctgaagtagctgaattcaaatcagccccaagcaagctcaggaaagagtgcccaggaactcagggccctcactccttagcatcccaaagagaaaggaagcagcatgggtgggaggtgaccccacagggagctaggtccccagagatacccataaagggctccagggtagctctgcactaaactgctgcagggggctggggaccaagttggtgggcagctgtcccccgccgggggccagtagaggcttacatggcacctggtccggggcaggcggcagatcctcctctccccagtggcggctccagggaaaatgtgtgtccgaggagcccggcatcattcggggaggaagcagccaagtctcccttggccagtgggcatagcccccagggtgggcgagagggcgtggggccaggtggccagcccgcatgtccgcccggcccgcctccctatccccggtgcagccacttggcgagctgtggcctggcgggctggcgggctagcctgccggggtcgtgcctactcctccccccaccctcaggaagtgacatcatcccactctctctccaaggaggagtcggagctcagcttctgggaggcagggagaagggtggagagtgagggagcatggtggtggggtggctgggctttgggggtggggggtggtctgtggactgcaggggtccggggcgtcagcagtgcctgtgacatgtggctgacagcaccagcttcagattagggttggacacgataggacaggagggggggctggggcaccgtgggtggcagttgggctggggcagaacagagctgccaacagctggtattgccgccccctccctgtctccaagtagctcacagagggtaaggtgcagcgctgggtcgggctcagggggctgtcggggctgccaggagcccctcacatgaatggaacagaatgaaatggaatgaatctagaggctgggggggcagtacgcccccgcaggtgctgtagagccgcatcctgctctgatctggccagaccaggggaggagggagcagtgctgtcccagaggggctggctggagggctagggtctggccctacccagcctgcccccaggcctgcctctgccagcagccaagaatatctccttctcaggtccaccccatggatggcccctctcagtcaccctgggaggtccctcctctcactcccacccttggacccatggaacccaggatagctaacactcctcgagatcacacaccatccacccaacacacacactcactctgcactcccctcctctgcccgaacaatgcccgctcgcttcagctctcaggctggaaggagtgagccgaacctggccctgggccctgcagaggtgaggtggctgaaggactgtcaagacgctggagggatatgaccagtggtaaccactgcccccacctcagggtgaccagcctgaggccaattgccatggtcaacagcagtacctacctagagtatgaggcggggctcctgggggccgaccctgctgggtacccagtgacaggcctgcaccagtggccggcccaccaccatagaatccgaggcacagaggctgggacacaagtgccaggctggctggttttgaacctgggctctaccacgtacccactgtgtgacttattagtcgtgcctcagtttcctcaactgtaaaatgtcgatttgtaaaatgtcgattatccctacctcctaaagtcctggtgagaatcacatgagaggtctgcagaggctctagctgtcttagctggggcgggcgaggcggagggagtgcaaggaaccccttgctggaccagccacccctcccgcctgggctggtggaatctccggctggtcaccaacaagtcaaggtctggggtgggggtggcagggcctgtgctgcataagggttgggggtgggctgcaccactctccaggccaattcatacatctcttggggctatttttaagggccttgaatggtgccctttctctagagaccccggcccatcacaataagggcctgttcccctgctggggatgtgatttcatctggaggaaatgtctcaggagcggggagggcagaggctacttcctggtctggggctgccacaaagcacctcttctggctctcctcccctggggcatagggtcctcccctctaacagccacagtggggcgggggtaggcgctgcctgcccttcctatcccacaccagtggggcttccagggcaggcacggcataccttccagcaggggccacaggggcactgctgggggctcctcctgcctctggttggacccccagcacaggcaagtgtgaatggggtgccaggacccctctcacatggatggaatgacttaagcagcccaaggaagcctccttcttcccccacccacacagcccaattttcctgctggtgattcaggcccctggactaagtactaaccattctgggagttcctctttctaaaaatgcaaactctttttaaaaatgcatatgctgccccctactttaaaaaccttcctggctccccatggcctgcaggacaaagtccaagcccctcgggcggcagcgacaggcggtgcaacctcaggcatatgcctcgccctctctgaatccacgcattcccttatcacctgagcagaaagcgatcctggtgcagacagactccagcacagagcccaccctcagctgacaaatccttctggctggagaggctctccagcaccttcttacactgccacatccttctttctcgacaccccaaacatgctgctccccagaaacacatcactggaagggtccatgctttgcttactccagttctgatgggtgaaatccaactcatctctctaggtcagctaaaagtcacctcctctttgaagccctccctgacagccctcatgcaacccactctcctcctgggaaacaggctgctcccttatgggaaccctagaccccttcccccagcatggccctggtcacactgtgttacggttaacctgctgactccttgctgcccatccccaccccagctcaacagtccccggggccagggtctcacagtacccatcgccacacctctgggtgccagctgcagtgcctggctccagcacctcagtcccaccccatggcctcctcagcacagctcccctcccagtcacaagggctgagacagtggctccttccccctctgagctcacacccttcccttctggggaaacgtccctcccttcctgactgtcaggctgggttcccaccccagtgtcttccctgacagctcagggagaaccctctcccccccctctggctagatgaactgttctgggacctcagtttcttctcttgtaaaatggggctaacaacatccctctcaaggctgtggtcagaacagactggggtgatgtcactacaggactctgcacaggtcctgcacaccccaaggatctgctgatggctgctgttgcattagcagacacctgaggggctttgtggggacctcctgtgatgtgacctgtgactgggtgctggggtctggaaggtgctgctggtgcccagctggtcagaaagggctggagtgagcaaacagaagccctgaccgaggagcctgcccccaccatgagtgctccggtgctgctggtaaaagcaccccaggctgggcctcgccccctcgtcctaaggtaccctgtgggcttggccctgggagcagattttaaggagcagagtcccttggcagcaagactcccagcagatggggctccaagagctcccagggggatgggggggaagaaggtactggctcagccctctggagtgtccacagggaactggacaatgagcttgggaacccccgcgagtgccacctccagcccatgagatttcccatctggccagagatggctttggtcattggcctggggatgggatagaggttgtgcctgaaggaggggatgacagccaggtccagccatagggatccatctgacattagctgagcaccttctgtgtcccaagtcctggactaaccggcttcagtcctcacagcagtaacacagggtcgcagtgtcgctctcattccacagtgtgtgcaaggggtggttaagaccctgcactctaaaacaggctgcatctgagtcttggctctgccacttactggctgtgtgaccttggacaaggtacttaacctctctgtgcttcagtctcctcacttctaaaccagggataagaagagtacctacctccgaattatcaggagggttaaatcagtcaacacttcaaacagcgcctgtcatctggtaactgctcagcaaatgctgccactgccattactattactactgaagaatgagactgagatgcagagactgcctgacaccatccgaggatcaagaggccaggcaggcaggaggcgcaggtcattcctgctgccatccaaagcccacacctaacaaaggtcagagttaaaaggagtctcagaacagtcccactgtcccctttcatgggcgaggaaactgaggttcagaaagaacacagaggccctagctcttcccgtgatatccatcccagcagcgtcactgccaggtgctggacacacaacccaagcccccaagccagcctgctcccttctacctcactacataccccactcaaactccccagtgacaacagcattagtagcgtgtcaccacagggagcctgggctgagatcctctctttcacgatcttgaagatgcctaaccctcctagaagccagcaacatccacagaagctccctcacaggagataaacctgtagggaggcatcaaccatgtgcctacttcagtcacctgcggctggctctcctgcctccagcggtggagtccctgttgctctgcagcagctgtggtgacagagaggagactctcagacagatccagagagccaccttccctgggcccccattttactcctgcctctgggggctggtgatggggaccaggtccagccacatcctagagctgcctggtgctgaatgaagagcagtgtccccaggacagaaagtcccaacccctctaggccccagtaaatcaaaattgagggccgggaggatgagtccattgcacacatgtgagacataagggcccccacggttgctatatgtaaaactagcactggacgccacacttcctggttgccaaagtaaatgtggaaactggcaagtttgtaagggctctttttcgctctgcagggttttttgacccttggtgtcctgaagggagagcccaggactcccatttccatgacgaatgggattcctatgtgaaagggctttgaaattggaaggtggtccaaaatagtggagaggaactgatgcctactgcctgctatgctctcgtggtccatccgattttgaatgtgccttgttgggcactggagcttatctggtctgggggtgggcatctgatctgcgggactcagcacagtgaggctgggccccccagtggtgccccgcaggacactggtggcccgccccccagcagaggcgttgtgttcagaggctccaccccagctagggtgggctcaccagcaggtcgctgtctggcctcgctgggctggcagacaggtcctgctctctttagcacaggctttggtcgtggtgagattccagctgttcactgtggctgcaggactgtggtagcgagttaacctctctgcactggtgaaactgcaggctccaggatcctgggtagtgacagggacagaatgatctcagccacctataagttggggactgggctgcttcggttctcctaacatttatgaattgcctacaaggtctcggcgcacatctatgccctttacaaacatgaactcacctagtcctcataacagctctgtgaggtaggtactacccttccccttatttgacagatgagctgaagtgacttgcccacagccacacagcctaggcccagaacccaggtctttacctctgcatgctgtttctgagaagcaggattcagctaaatgcctgtttctgaactcaaaagctggctctaagcctcttcttacagactgaggagctctctgggtcttcatctagcttcagactcacaatcatgtgggatagcacgggacccattctgcagatgaggaaaactgagcccaggggaattccacggagcaggctgtggagtcgggagagagcaaggcactagaaacactatgtgtcatccacctccagcctcatcaggccacagggtattaccccaactttacagatgaagaaaccaaggctcagagaggcaaaatggtttgcacgaagatccctccacgaggacatcgcagagctgggatttcaagtagcttccttgaactacttgcaagaaaaaaataccctctctgcctgtcagtctgactccttattgtcacaaacacagagacagtaggacccacaggtcccaccccaggctcccggggctacagtaccttccccttcttcccagtggccgagaggctggcctctgaaagcacaggaggggagaggtgacaagggagacgacggagagaaagcacgtgtgggctgggggccacgtgcgccaccagcctgtacctgggtgtgtgcaacccaagttaggggcctgaaagctgtcgcttttcacacatcagctgcgctagagcagaaggcagagcggagcctgcccaggactggggccagatttcagcatgagataggtcctcacacgcccaggcctagggatgaaaacagtgtgccttgtgcagccaggggcaggagtgggaggccactgacatttgtcccctcctacccgccgcccagggtcttaggctaacaaacgcctttcccactctcccccaggatggcctggaaggaccagaggaggcacctcctccacccctcaccatgtgccagccacataaccatcctcactacaaccccaggggtgggtctagctgttcgcatgtcatggatcgggaaactgaggctccaagaatttaaagaagctagcaagtgagtgtccaagtcaggctctgaagccaggtctacctgctgtgttctctctgtgccctcctcgtgcttcttggccagagacccctcccctataaaacagcagtcagggagctgggcacagagttcagggaggaggacggaaagagaagctccagtgacttgggggcaatgccagcctgggccggacccagaaatagttccaacaattactcgatcgtgtttatttaaaaacaaactcttatatagcatttactacatgctggttactttaacaagcagttcacaaaaattacctcctttaatgtaatccttttaacaacctcttatgccctgtattatggatgaagaaatggaggcccagagaggctaaataagttgcccaaggccattcagctcttcagcggcagagccaggcctgaggttgcagggcctgtgctccaggcctctccccagaaggcttcaccagggctccatttattaccaaggctccagctactcgttctcacgctaattattttctactcatccacaatgagcagaatttgccatctgccaccagccctgctactgacaccagccaactccctgggaatcaattgaggcctttcgtttcctgctggttattttggaaagatggctggctgctggggagcgggaagtgagggccaggagggcagcagcacccttccctggcgaccaggctgggccctcctcctgcccccagccttcctctgacctctcttcccagggggattcacatcagagcccactcagtcctgtgctccgacaatgttttccaacagtggaaggagtcccccaggctctggccagaccaggtctggcttctggattcttccttggagattattcatttttctgaaactcagaacaagcccttgtcccacacgtccacatcccctctggagaggcccagacaggcgggttctgctggcctctgtgatgggtgcggccgggcagcctggatctccaagccctcacgcaaaggccgacaccgccccacactgggtggcaccaggctgttttctcctgcctgtctgtggggaagggtgtctgtggttttcgtcctttctacctgccccggtggtcttcttggtcagtcccctcatgccctaacacgtctttaccccactctcccgggaacgcgactctctcaaaggcagcgacttggagggggtggccatccaatgagctgaccgaggcctgccttctggccccagagcagggcagcccgaatttgaatcttagttccatcacttctagttgtctatgactgtcacttcactgagcgtcagtctcctcatctgtaagatggaataatgaaggtactcacttcatagtgagtgagtcatgaggagttaacgaaataacgcacataaagtgctcagctcttagaaaacaggagctgccatcattgtgatttagtaaccatgtctccccagtgtgcgcagaacctttacctcaccttgcatggcaggggcaataactctccgcgatctaagtcaatcttcccaaacagacaggtgagcaggctgacccacacctgccctcacccttccagcctgcataatcctctgacttgccttcttggaaagggagagctccaactcctaggagcccagcacggccgcactggcactgcctcctttaatccacaaccacccagggagaggggacccaacacccctgggacagcttgagccacagagttctcgcccaaggccacaagactctagaacactccaaagcctgagatcctgccaggatgccccgcatctatcagcttgcatgtttgagtttcagggtgtctcattgcaggccccttcccagctcaaacgcaggatgccctgagaggtagcggtcccccctccctttaagcccatctgcccttccagctttccactggccccaccctctgctcctccccccagagtcaccccctctcctaggagccacttgctgggacctcactccccagatggcccccctgccaggcagttcatcagctcccagcacgaatcccagcgctctggcttctcagaacttccttgagaggagactccgtctgggtgctggcaacgcctcagtgaagaattagtaccttccacttcattaggggccccctaatgaagctgttaatgatatgctaagtgggcacacctagcctgatgcctcccctcttggggcccccgcccccttgcccagcctaccctgagccctggtcctgctgcctcctctcctcaggctgtgggttggccctcggggtctggctggtgtgggtgcctgctgctcaaaggtggggaggcttcgtgggccacctccctaagctgcatggccatctagggcacaggctggccaactgggctattgggtttcccttcgactgtaccccgggcatctcggaagcaagcagggatcaagtgacttcgtaacaggagctctttccccaggggaagaggttctgcagagctctagtatgtgacaggaagggccaacatcccctgcccccacagagactggagagggaggtggcacctgccaccaccaatggcacacaggctgcagccccgtcccctccctctgtcaccctcctctccttctgtgctcaatgagggggatctcagtgctcttcagtgggtttccagaagccctcagggaccccagatgaggggaggtggccatagtgggcaggcttcagtgggcttgcaggcaatgtcaaccacagcagctttcagctgctctggatcacctgaggtcaggagttcgagaccagcctagccaacatggtgaaaccccgtctctacaaaaaattagcggggcgtggtggtgcatgcctgtaatcccagctacttgggaggctatggcaggataattgcttgaaccgggaggtggaggttgcagtgagcgaagattgcgacattgcactccagccagccttggcctcccaaaatagctctaggtgacagaactagactctgtctcaaaaaacaaacaaacaaacaaacaaacaaagtttgaaagccactaagcaggatatgctctcaggtccattctagtctggacttttagagttttacttgcagaatggccaaggagagagcctgggggctacatacaggtgcctgagctcacacaatgatcacagcatttcctcccctcgcctgagccaggagggcaaaaggggccacagaaaaaagtcactgacccagaagcttagagacctgggcctacagctgactattctgtccttcagacctccctatcccctcccatcaccccaggcagggcaaagctggacccaagcacaaggcctccaggaaggggcaggggctcagaaggcccctgctgccgggtggaggacaggactggacccggctttggtcccagtgccttgatttactcaaacggccacagagttgtgaccttcaatatacaacgcagccctctcctcgtctataaaataggatgaggatgatgacagtgcctccctcttggggtggctgggaggacaaagcgagttaaaagttgtaaagtgtgaggctgggcgtggtggctcacgcctgtagtcccagcactttgggaggccgaggcgggtggatcacgacgtcaggagatcgagaccatcctggctaacacggtgaaaccccatctctactaaaaaatacaaaaaaaattagctgggcatgatggcgggagcctgtagtcccagctactcgagaggctgaggcaggagaatggtgtgaacccagcaggcagagcttgcagtgcgccgaaatcacgccactgcactcaagcctgggcgacagagtgagactccatctcaaaaaaaaaaaaaagttgtaaagtgttgaaagcaggctctggctcagaggaggagattggtgacatagagctttaattaaatcaacccccaagtcgggcgcggtggctcacgcctgtaatcccaacactttgggaggcctaagcgggcggatgacttgaggccaggagatcgagaccagcctggccaacatggcgaaactccatctctactaaaaatacaaaaattagccaggcatggtggggggcacctgtagtcctagctacttgggaggctaaagcaggagaatcgcttgaaccagggaggcagaggttgcaatgagccgagactgcgtcactgcactccagcctgggcaatagagcaagactcagtctcaaaacaataaaataaataaataaataaataaatacataaataaattcccttctcaagagcctattatgactcctaaatgccctttaaataaaattaaaactcccaaccattagctataaagctctccaccaaccacacccctaccccgccctgcccagccctgccaccagcacccataccctccaccttgtctgactctgtccctgccggccgggcacgcccactcccagctcctgtctttccacctgctcagccactgagtgcgccccatgcccaggcatttcctcctctccagatggccccgcttgctttgggcactccgccccgacatggcctccacagcctgcgaggcctgctcagtgcctgtcccagctggccttcagccccagccctggcaaaccagcccacaaatgaccaggtaagcccgtgacccactttcctgcatgcttctggtgtgtctgcctcacctcctccattacactgtagttcccaagaagaccctggcctccatctgcctctctcccagcctgtgggggaataggccaggaggctctgggcaacatagagactggaaaggagaggggagaacaggcctccacgatgaggggaaccccatcaggcccctgacaagtgccagcctctgcctgcccatgcctgagcaaggccactgacccactctgttctgggtaggtaagtgcccatctgctcgacctctgaccccagaatttggcatcactttccttcccaagagactcgcccagccttgtcacgctgtcacttctgcggcctctgcttcccgacctgctcagggtgtggtgggaggtggagctggggccacatgctcggcacagcccctctggccccagtggcacttcactcccacttcacgaggacacggcagggagggggcgggagtttggcagggcttcatccctgtcaaccaggggctggtgccctcggcccccctaactatccgcagtggggaaaaggcaggctcccgctaacccctgctggcccaggggaggtcagtgaagctgctgtaactccaggggatgaacctttccgtgaaggagctgacggcaacgtctgagagagaccagcagtgctaatgggatgcccagctggggctgtcaagccagacaaggtcctggtgagaccggcagaggccaaggctcctgccaggcagaaagtggcacctcgtctcctccagggtttggggaggcaatctgataatgcctgcttcctcagcaggcccagtcctaggaagactctggggtgggggtggtggtaagggagtcagcgagagctaggggacctcggcggggtcagcctgcgtcacagctcatgctgactcctccaccttcagtggccgccggctgctataaataccactcctgtctctggatgttgtgggaggtgacctagaatcatgggctctgaggcctcctgggtgcaccccccgcctgttttagacagagcctgacgaccagaaaatcctcacaggttagagcccacccccaaccacgagcagggccctcggccagcagataaaaccccaacactgagggagatggcttccaaacctagagcttcctccaacttgcacctcgacatgttcatgggtggggtgcagacaccaggtccctgggagcagagccctggccagcccaagacccgaaagagacatggcacccagggccattggctcagcctgagacctgctgccattcattctcctccatgcccactgccctctggagcccagctcaagggtgaaggctccaaagccatttgatcctgagtcccttccccgcccccaacttctcagtcctacggttgtcctcgattcttgattcagcctggtttccaaacttgtcaccaccctggaagcctccctggggtgtactctacttcgaaaggggccctgttagactgttctgcagttgctcagatgagtccttgacgatttcattcttccatttggtagcacgcttctgagtgagcccttccctcctccagagatcccagacaggcccaggcctcaaaccccaggctgggctggcccaggagcaaggacaggaggtggtcctggcctcggcaggtgtgaagacaccaacacccacagatggccagggcttggttccagagtccctggtttagggcaggggcaggctctcagagtagaaaaggctggaaacagccctgagggtgggccctgggtggtgtgaacacaggtgaaatctggttaaagtcaagttagtgcatgcagccattctccatccatccacaaatcaccagagtgcctactatgtgccagggattgggtggatggtgacaaaagccgacatggtgccagcccttatggagcctgcagaccagaaggaaagaaacttcaagtgaaccttcacatacaacaaagaaaaatcctctgacacgtgctcaggcggggaggctgcctatagaactaggagctggagctgtttctgaaggactagcagagggaagcaaccacaggagagagcagcgcggaacaagcactggaggataccctcggcagcagggcctggatgtgaggacagtggaggcctggaggatggagaaaaggccagagtcaggccagcagagaggaggccaaagcaggcaggctggcagggccaggccctggactctgagcctgggaatgacaagccaaggtgggtgcgagggtgaagagaagtgggtggcccagatggaaattcagcagacaaaatggggacagacagggcaggtattaaggatgtttactgctcgctgtaacactggcgctgtcaaagacgaccccagctgtctggcccgtgcaattgggcgggcagagggggcactggatcccagaggaacgccttgagaacggaggcctggggctgcccatcccaccctcagagcaacagctccgggagtcagccctgggctctgtgaacacaggtgaagtctgtgtcctccccctccccccagtctcagctcagcccagtcccgagctcaggcgagcccgggcacggcaggtcaggatgtcagtccaggagtcccactcaggagcagtcagtgggctctgctcccaccgctgagggttcccaatcatgtgcttgagggggtttgaggcatttctcctgaacattcagctccccactcttcctgccatccgggcccgaccatgaataggactacgcagaggagctctcagagttaattcaacctactacaggaggggaatggaaagagggtctctgtatgccagtcatccactctcccaaccacatgttggggctcagaaaatggtaccccaaagtgaacgcctcacaaacagcctcagaagcaaagcttttctctgaacatctcctgccttcctgtctctatcccttactctcccgacacaaaccacagaaactagaattctcttccccacccctcactctccccagaggcaagccatagaaactagaattcctctttcccaaggcaggtcacagaaaccagaactcctttcccctaaagccacccataaaacctaaaagtattagccttctcctgcctttctgcgtaagagctggccataaagaaatcctttggtcgggcagggcacagtggctcacgcctgtaatcccagcactttgggaggctgaggcaggcagatcacctgaggtcaggagttcgagaccagcctggccaacatggtgaaaccccgtctctatcaaaaacataaaaaattagctgggcatggtggcacgcgcctgtaatcccagctgcttgggaggctgaggcaggagaatctgttgaacccgggagacagaggtgccatgagccgagatcgtgccattgcactccagcctgggtgacagagtgagactccatctcaaaaaaaaaaaaagaaagaaattctctgacctactttgtttgatagtagatcataagacccccactcagaatcctgccccataccctgaaggaaggaatgcagcacagagaggccaagaaggatctgagagcaggccttgctgggtttccccactcagtctgctcccatggggtcttactctttgtgtccaatcatagctcttcatagttgcccattcctcctcaaacttaagcataaaaatggagtttccctggatctttggatcttcattctgaaggctcccatgtcacgtaaaactttgattaaatacatttgttatgctttcctcttgttaacctgtcttttgttacaggagtgttgcctatgaccctcatgatggggagaaaagggatcaccccatagctgcacctacaatccattcatccatccatccatccatccatccatccatccatccatccatccattcctccatcctccatccacccactcaccatttccagtcattctacactgttcatcacacttagaaagccctctccctcttacgttggcctgccagccctgtggcctggcctctgcctgccctcaccagcctcccaggcaccctggccttctctctgttcttgcaacaggccaggcgtgccgaacgcctttgtcctcactcctcctctagcctggagagaaccccaaccccacccccacccccagagctttgcgtggctggctccctcctgtcattcagctcctagctcaaacatcccctcctgggacctgcctgccaaatcttaggtaccccaagcgcccccatcataggactcagttttcctatcagcacttctcaccatctaaagttctggtgaatgtgtttaccatctggctccctccaccagggtgtggcttctcaggggaggggtctcgcctgttttcttccttgccaggttccctgcactgagtaaaggtttggcaggttgggggagctcaccacgtccctgctgcctgaaagagaaaccatttcggagcacggcctgagaaggacagaaacaggagaacgtaggagccacagcagagctgcacccagaacccagggctcctgactcccagccctggcctctttccacaccatctgctggccatgcctgggatccaaagccctatcctgaactgcccacatatgcaacttcactggctaccaacgaccacgctgtgggcgaggcagggaggaaatgtggcatcttcattttactgatgaggcaactgtggcaggaaggggctgtgggtgatttgcctgtggtaatgcagtgagtggtcctgctactggagggctccctagcattgacaagcctggcttccctctacctccctatgcatctggggccgtgtgacttgcgtccacctctgtacagcatcctgtgggagggagggcgcacctccaggaaagagcacagaaagctacgttctcaggatgcagccaggagactgaagccctctcccaaccgggggcccggagggcacctcagccatggcctggctataagtgagaaggggaaggacctggggaaatgacttctcttctaagagactcagtgtcttcatctggaggatgagggggttgaccagatgatctctaatttccctaggatccacttttacccccatcccccaatgctcagtttataagggtctgcagcctctggctcaggaatataatcccacagaagactcggagccttaaggtgctatcatctttctcacccactttcttctgggccccaacattgtcctggaggtagagaggccaggaatttgcacaccatggcccagtgctttgatgatccccacttttgaaatctgtcagaactaagttcgaaacctaacatgttcagcttgtaattatcagagttaaagacagagagagagagaaagagagagagaacctaacatgggctagctgtgggggctcacacctgtaatcccaatgctttgggaggccgaggctggaggatcactgaggccaggagttcgaaactagtaagaacccatttttacaaaaaaaattttttttaatttagccagatgtggtggtgcatgcttatagtcccagctactcaggcagctgacgcaggagaattacttgaggccagaagtttgagaatagtttgggcaacatacggggaacctgtctttattaaaaaaaaaaaaatttatctgggcatggtggcacatgcctgtagtcctagctactcaggaggctgaagcaggaggatcacttgagctggggagttccaggctgctgtgagctgtgattgcaaaactacattgaagcctgggtgacagagcaaaaccctgtctctaaaaacaaaacaagaaaacctaaccccccactgactgccgctgtgtgacctcagcaggctcgggggtgagactcggtaaagggcaggttttcggggtcctcatccacccccttccctgtgacacagaactgccctttgccaacttccctcgaatgtgagaacaaacaagatatactgagggttccttagaggaaggcactagaacaagcctcagcaatactccttccctttaagcagagccttgggcccctgcgcgcacacatccccaccacatgggggctcatcgaatcccggctgctttcctcctccaggttcgtacaatccacgagaccagaggaagacagcaggtgcctgagacatgcccgagcctcggcagcttccctacctagagcagagggagaggcgggcagcaggcatgcagtagggctgggcctggcagcggagaggctggctcctagtccccatggcccctcagagcccagcctcctctctgctcttctggggccttggtaggacacatgagatcacgtctgggcggtgctcagggcgtctgagagagaaaaggcccaagggatggaggtgggattaattatgtattagcacgcttctttattagcacttctgtttactgcagggcacagtggaaaacacatggggcttggtgtcagagaatccaggctggacatggggcctggccattcaagaggtgtgggcaagtcacaacctctttgggccccggttccgggaaaaaggggatgaacaacatctgagcgatgctggagaaagcatgacacaaatcagatttcctcacctgtcagtgggattgcaagaacaccagcctcccagcatcgctcactgtgaggtggccaagtgcctggcccggggccacatgtgagtgacatgcagggggtctcgttgctggaggagcagggaggtgcagggtgaaaggcctgaggatcgggctattggcagtgccgttcaggctggcactctctgggtgtgtcccaggtgggtatgctgggccagctctccttaggcagatacccacagcagcaagagaaggaaggggctgtgcaggactgcagggagggaggcacccggctccttgcctggctaatgcaagcctctctttggggtcccagctgtgggagagaaagggctccctcttccctaggatgccagatccatcagcagctaattatctaatctgttccccttggcctgaggaccacgatcacaggctcaaggagtcactggccatgagctgaatctgacagaaaaggacgcttgcaggccacaccctcaggagggcaggtgttggggaggcaggtccagggcttccgcctccagggctggcccagaggctggagaagtccaagttcaagttcctggggctgactcatcagaaagagggtgaagagaaggtcagggcagggactggttgaatcaagacaggctctccttgcaggagggcctgcagacaggctgctgcagaaaaggaaggcgcagacgtgtccataaatactcccagattcagttatgtgctcctctgcctcctgccatacaaaagtctcactgatgcatcccgtcacccccacaacccaggaccagtgccccaacaggagggctctgggggcctctccagctccttactgacagttcggctgctgctgccgctgccctggcacgccaggcatgccaggcccaggcactgccaagtcacatgctctgcgcgggcgaggccgggcactgctggggcagccttggggatgcagggtggtgtggcattcgcaggcagtgtgggtctgcagaaaaacggagtgcccagaggcagccggccacctgcctgccaccctccccagccccaccctccttccaggggagaaatccttgggcaaacagtcagccaggtgtgagcagcacagctaatgcagggctgggaaaagcaaacacggagggcctccatgctgtgggcccgctgccctatggggtggcattcgggtggccctgcccacagctgccattggtgtccccagcactctgcctacagtatttggagggtcttccaggatgaatgctttggccttccctccactgtactccccggaggggcctgactgtgaggtgacagaagcagcgcagggaagaacaggcaaggcatgagtctgcaaagggtgaggcggacctaggcctggagtctctgctgggccacgccttggctgggtgacttggagcaagtcaaaggacctcagggccagggatgcccaccgcacatggcctttgtgaaggttaaatgggatgaggcccatgtgggaccactgagaaaggatttggcacagaagagggtctggatatgtgggtgctcagcttagtgccacctgtgggtgtggggtggagccagggcaggtcgcagtaggagaggcagtgccatggaggtctggcccacacactctcccagggcatgctcacctggctgatctgtgaccccctggccttagctccagggcagtaaggccaacaccagacttctggcctgtggctgcagggccagccaggagggaaggatggtccagttctattctaccagcaggggctgctgcgtctactggccccaaactcagggcagaattccccccaactgagaaaggcctgttcccccaatggctcccatccagggcttcagcttcaggctggcccccacccatacgcagccagaggaggccctgtctttctgagggtgcatagcatgtcctgctttctctgctctgctgtgcaccacagttgagcgtgctctgcaggcggtctgcatgcctctgtgcccttgcacagtctgttctctttgcccaaaaggccttttccaatcctgctcccctgggaactcctcagtgttccaaagctcagcctaaacacaacctcctctgtgaagctgccagggcccgccaacccccaagggcagacctaatcagtgccccctccattccgggctccccactgggctgggagctccaggagggcagggctacactctgcatctctgtgtccttggcacccagcaccacgcctggtgcctagcagctgctcaagaaatgtcagacaaggcccccgggccagctcccttgctcctctcagatcatgctgccggcacatttggccaaagagactcagagatggcatgtgggaagcagggtaagagtgagcttccccagggaagcaggtggggtacgaggtttcctttcctttggaaactgtccgtgctacgtgcaccaagcttcacccactatcagaagtggctctggaggcttgcaggctgcctccccatctccaaaagcagaaaccaaagttagcaggggggtgagcaaaggaaagggaagtgcaccggaactgcagagagaaaggcagttgtggctgccatctgctgtgagcaagatgtttggagaacatgcgctcctcattctgaggtctcccagccaacttgcagagagctgggccgcccctctgcagatgggagcctgcagctcagccaagctgcagaggcaccacaggagagatgtcagggaccctgcctgcctgccctgaccctctggctggcccagtctgaccttctgattcttgagcagactgggggccaggatgccagcccaggacaagagtcacactgccttttccagggagcccccaacaggctctgagaaggcaactccacaataaggctgatgataatgtaaacataagggtgataagggcagtagtaccagccattgctcactgagagcccaactagctgccagaagacctggtactgggaacttccagtcattatctcactttgccccatgactcccaggggaggaggaaatggagggtccaagaaagggccctggcactgctcctcactgcagagacacctggctacccagggccatcacaggaggaaattagctgggcatggcagggcatgcctgtagtcccagctgcttgggaggctgagatgggaggatcacttgagcccaggaattcgaggctgcagtgagtgcactgagctatgattgtaccacggcactccaggctgggtgacagagcaagaccctgtctaaaaaataaaaaaataataaaaataaaaaaaaacaggagaatatctgagtgggaaggaacctctgagccactgagtcacaaatgctcatttgagggaggaaggtgaggaaggatgtagacagctgccccaggccacatcgaggtcagcagcaggctgggagcagaacctggaaccctgccccacagcccaggctcctggggccttggtgtgctcctgcgcaggaatggctgctgtcctcctgtccttggcaccacctggggctcagccacgtgtggccattcccccaagcagagcgatgcatttccgaggactgaggtaatgctggccttgcctggagggcccatctcagtttaggccaggccttccctcgccctggcccggcttctatgctcctgaccacagcagcgggccaagctcaggaggctgggtagggttgggcctaccaaccacattcctttccagggccaccttaccctggggctacccacaaaggaatttgcacagccaacagcctcatcagagtcactggagctgtccatggcactggggcacagaaaccgcttcatttctcactggccaggtgagcaggtagggggctgagaagtctgcctgccaagaccgaaccatgccagggtcctgaatgtcgccctgtgccctcagccctggcaggccagtccccagaggctaccatcccctgctatgccatcccagggaggtcatgggtgacctccctccccttggcgataggaaggtgaggatcttggggcaaaccacccagatccacacctcccatcccaccccacgcagctctgctgccactgcccccacaggccagctcacaagccgcacactccacatttctgtctgctcagtcctcccccagccccctacacacggtaattgcaacacctccaccccactgacagtgcctgccgctgcctgctcgctgccaaggaggctgggatggcccaaagatgtgcttcacgcaaaccttgctaggggaagggactacagttttccccttttctccaaggggtctttggatccgggtgctgaccccacttcctgcctctcacagctccccaccccaccccaccccacccccaaccccgggtcgcccagtctgtgaaatgcctcttactctgggagggatggagggaatcaatggcttccctattctcctgcctctcccacaggggaaggggaggggaggcatgtggcccctggagggatctttcagggagcgccccggccccactgctcctccccgctgggaagtgggggtggtgtccttgacggacggacggctgggcgtcaggtccactgggagtggaaggcaggcagccagggtagtgggcacctccacccccactctcccgctcccaggactccatgggaatcgctgtcactatccagacaccttcacagagaactcatgcctaggctgaggcacagccaggccgagggtgagtcagccagggaaatcccggcactggcgcccaccgctggtgacggttccgctgacacctacggaacggggtgcccagcccctcccgcagagggtgagaggaacacccaggctcccccactctcatttcctgctccctgagagcaagcctggtggtggggacagggaggagtctcagtgggggcggagtcctggagcgaggcctccgcaggctgccgtctttgggcctctggtccctcacccttgaacatcagcggggaaggaggtgggagaacggtcaccacagcccctgggctctggcccggagcctgtcatccacactctgggtatctggctttccagggtctcaccggggcacgcagggatgcacaccctacctcattcctgaagggccctgcccctgccctccttccaggcaaggccactgctctgcctgagcccagcacccccactatatgctgtcctggaccccaaaaaggcaagatagagagcagacttaagccagaagtcagtaccctccctgggatgaaagagagagaggaggagcaaagaggagccaagaagaacagaaagccaggcacaaagcctccttacagcaggacattctgtccctggagaagcgcctgtggccaggtccccacaaactcgccagaccagttggctggagcggggtgggaggctcagaccagggccagagagtggacctaggacctgaaagctcccagacaagaagctcccactgctcctccccgctgggaagtgggagtgggttggactcagcaggcccttaggcaggagcttctggggacatgaactcgaggatgccaagccctatcctcaagtagctcacagtgcagaataacaaggaaaccggggcgggtcagtgagcacagagctccgacactgatgcctggaccactgctcagccccaggcagacagaga

SEQ ID NO: 2897 - DNA, 399 bp, Homo Sapiens
ttttttttttttaagggaaacaagaaataaatgtatttaattttaaaacagccataataaaagtagacttgataaataaaacccaaaaccacttctttgaaaagaccgttaaaaaaacctctgagaagtcaagcaaaagagaaagaaaaggcacaaattttaaaatgttagatttagaaaaatggcataataaccaacgtgcagaagctgcttcaaatcaaggagacgggaggccagcttcattccatgggaggccagcttcattccagtaggttctgtttcacctggatgaaatggaagattttcttggaatgtataaattggcttagcaggaggcagaaaaccctttcacagctggggagtggagcctgggcctgcgcctctccgcgccagagccgg

SEQ ID NO: 2898 - DNA, 301 bp, Homo Sapiens
ttttttttttttttttttttttggaaattctttacagaaattttatttgagatctcaagtccttataaaaagggcattacatcaagattgcaaaagacactttttaaatgagagacttctatctattcatccattttaccctatgattcatttcctaccctaacagaaatgatgaaacagtttttctttcttccttttcttcctcctgctttgaaagggcaactgtcatgagggatatcttaacagaatgtgccaattaatccttgccaggagagcagtagcttcctactggctaaattta

SEQ ID NO: 2899 - DNA, 460 bp, Homo Sapiens
  misc_feature (137)..(137): n is a, c, g, or t
  misc_feature (359)..(359): n is a, c, g, or t
  misc_feature (404)..(404): n is a, c, g, or t
  misc_feature (419)..(419): n is a, c, g, or t
  misc_feature (447)..(447): n is a, c, g, or t
  misc_feature (457)..(457): n is a, c, g, or t
tttttttttctattttaagtgcaaatatcataagggaagactgaacttcttttaggagtataggacaagcagcaaggaggtgggatggctggagtagagtgaggaagagcaatacagagataaagtaagaggaagantaagccgggtcacatagatctcacagcaaagttttaggttttcttttgagtaatatgaaaagccatcgggagggttttgaagaggaagagagagacatgatctgacctacatttttcaaaagcttactctgggctattgtgtgggaagtaggaaggcaaaaagtccctatgggtgggttgtttgcaaccatcctgggggacagaacgtgggtggcttttgangagggcagtgggtaggtgatgggtgcttgatggaccaaaagagtncagtttcagggtgtncccaggggcttttctaattgaaggggcnccttaggctncca

SEQ ID NO: 2900 - DNA, 300 bp, Homo Sapiens
  misc_feature (177)..(177): n is a, c, g, or t
  misc_feature (284)..(284): n is a, c, g, or t
accaggccttgtttttccagctgagcattctcattttgcttttctctaagactatcaaagacaaggtattaatagtaggattattcctagatcagaatgtttcatacattcctaaaggtttatgtggaaattggcttaggaaaactttgagtagcagagactgaggatgagtgctanagatgaaatcaggacagatttgttgcagttaattcttgccaagcaaattagtggtaaatgtcacattgttatgtgaattgagcacatatttttaaagaaagtttacnaaaaatttttagaacc

SEQ ID NO: 2901 - DNA, 387 bp, Homo Sapiens
  misc_feature (230)..(230): n is a, c, g, or t
  misc_feature (336)..(336): n is a, c, g, or t
atggctacggcagggggtggctctggggctgacccgggaagtcggggtctccttcgccttctgtctttctgcgtcctactagcaggtttgtgcaggggaaactcagtggagaggaagatatatatccccttaaataaaacagctccctgtgttcgcctgctcaacgccactcatcagattggctgccagtcttcaattagtggagacacaggggttatccacgtagtagnagaaagaggaggacctacagtgggtattgactgatggccccaaccccccttacatggttctgctggagagcaagcatttttaccaggggtttaatggagaagctgnaagggagaaccagccgaatttctggtctttcaatgtcctttaaccaaagcc

SEQ ID NO: 2902 - DNA, 449 bp, Homo Sapiens
caaataaggaaagtgagttctagagtgatgaatttagtttacaaataaggaaggtgagtcctagagtgattaatttgctcaaaaatgcacagagaaaacattaggattagaacccagatcaattgaacctagtccagtcctctttctaccttggcatgttgctgtgggaagaacacatggacagtagtccaggttcatacctctgtaaatggggagacagcctagcctagcgttttaagatcacacactctgaaatcacctggctgcacctccaggatatgtgacttgcaacaaattattaagtcctcgatgcctgtttcctctttgtaaactggggataataataataatttcctcatctaaaaaattgggggccaggcatggtggctcatacctgtaatcccagatacttgagaggctggggcaggaggatcgcttgaacccaggag

SEQ ID NO: 2903 - DNA, 999 bp, Homo Sapiens
gggcgaggctgcaccagcgcctggcaccatgaggacgcctgggcctctgcccgtgctgctgctgctcctggcgggagcccccgccgcgcggcccactcccccgacctgctactcccgcatgcgggccctgagccaggagatcacccgcgacttcaacctcctgcaggtctcggagccctcggagccatgtgtgagatacctgcccaggctgtacctggacatacacaattactgtgtgctggacaagctgcgggactttgtggcctcgcccccgtgttggaaagtggcccaggtagattccttgaaggacaaagcacggaagctgtacaccatcatgaactcgttctgcaggagagatttggtattcctgttggatgactgcaatgccttggaatacccaatcccagtgactacggtcctgccagatcgtcagcgctaagggaactgagaccagagaaagaacccaagagaactaaagttatgtcagctacccagacttaatgggccagagccatgaccctcacaggtcttgtgttagttgtatctgaaactgttatgtatctctctaccttctggaaaacagggctggtattcctacccaggaacctcctttgagcatagagttagcaaccatgcttctcattcccttgactcatgtcttgccaggatggttagatacacagcatgttgatttggtcactaaaaagaagaaaaggactaacaagcttcacttttatgaacaactattttgagaacatgcacaatagtatgtttttattactggtttaatggagtaatggtacttttattctttcttgatagaaacctgcttacatttaaccaagcttctattatgcctttttctaacacagactttcttcactgtctttcatttaaaaagaaattaatgctcttaagatatatattttacgtagtgctgacaggacccactctttcattgaaaggtgatgaaaatcaaataaagaatctcttcacatg

SEQ ID NO: 2904 - DNA, 3075 bp, Homo Sapiens
aagtcatgctggaaactccggagtacagaagtaggtttacgagtgaagagaccctgatgttctgcatgagggtgatggtgggagtcatcatcctctatgaccatgtccaccctatgggagctttctgcaagacatccaagatcgatatgaaaggctgcataaaagttttgaaggagcaggccccagacagtgtggaggggctgctaaatgccctcaggttcactacaaagcacttgaacgatgaatcaacttccaaacagattcgagcaatgcttcagtagagctctgctcaaagaagaggatctatgtgctgacctcagaagatgtatatgtttacataatttaatacagattgatgttaatacttgtgtatttacataaccgtttccttcttgtcactgaaatatatggaccttaatttgtatcctgactgactcaacccagcagagcataaattgacttgagagccttacctttgatgtctgaaatgaaacccccttctccaaaggcaaaattcggagactttgatctttgctactggagtcctttaacaacacctataacgataaaaaattcctaattgtttgtggtagtattttaattctagatgtgttatctctctgggaagtatagtttatagaaacacaaaatatttgatttcctgtgtcggttcagctacaagaaacacaactgttatcttgacagaggaagagaggaatccaagaaaaatgcatgtggagaattaaacccaagtgtttcgaattcagcacaccccctctctgtcctcagactgcagtccacacgtgcaacttttctgtttgcacgtgttttattaatcagcatactccttttctgtttggatttatatccctctaatgttctcctttaatttcacatgaaaaaaaaatctgtatttttttcagttagtgggagagcagcagaaatagatagatgtgatgttgccactggactgatgaaggtggctgtcttggaactgggagacaggtcctcagaggtgcactcaggcaacaggacagccatctctctgcttcagccctctgcctacaggaattagggaaatggagctctggctttgaagttatttgtgagtttagcaaccttccagttacctgcagagttctgggtgcacagccacccctcataagagccctgttctctgaagaccattcatatgagaacaaaggtctaggatactgcattagttaccagaaaactaggggaatttagagggaaaaaaaatccatgttttctatttcccaggtttttaaaaagtagctcttccccaaccccgttgctagcttgttgcaatataaaagccctggtgcacctgaatttactcctggccttactaatgattcataatgtgatcttgagaaatgtgtttaagctttctgagtcttaacctctttgtctctaaaatgggcaattaaaacaatcttcaagagccctgtaaggttaatgccgataaaatgactgactccgcccttcttccttagtacgtagtatccagcaagcatttgccccaccttgtcttgttgatgaacaatattatgaagcctgcagtcattctctctgtacatcagagcttagttcgaatggaatcatgaaaatctctgattctgacctcctaaggaaaaatgaaacccagaggatgtggtcatacaggatggctcccatgtgggcctagaacccaggatgcttcactcttgactccatgctcttccttttataccatgtggctgtgaatacatactatgggatgggattcaacccttctaagtaaatcctcagtctggtctatattgttacttgcctgtttccactagaaggagtcacccaggcatttagtgaatgataatcctagaagttgagtctgagtacatcagagtttggcattatttgcaacatcccaggaatgagctataagactccattgctttctggactttagtgaccagctgatcttcccttggatcctccagtaaaggggaaaaaatacttgtcttatgttgttttagcaagggagttcagccaagtgacaggaaagattccctggtctgcatctaaaccttagtcaacagaaggaaaaggctcttttccttggagattttcaagttgaaaaagtacagctgcttggatggagtttctctcatcagaatagaaatatgctaggtggtcttcaagaactttttgaacctacagattctaaaccttagaggaagccagaatatgtgatcataccaggtgaggaaagttaggagatattcatcttaagagatatcctatttggcagtcacatgttacacttgagcaacaattgtctaggctagaaatatagaaccacacaatatttatcatcattgggtcaatttctccccctctatcaagtgaggagattaaggcttaaagaaaggaaaggacttgccagccaccacagggctcatgaggggcttgaacccatgtcgtgtgtctctaccacagctgactctcagctggctaatggagaaaatgtgaggaattacctgtcaaattagattgagctcagagtaaatagatgagcacatttataactctaaattagactttctatcaaatgggaccaaacatatggaaggggctgctgtcctgcctcaatttagccaagacttgtcttgtctcaaagccaagactcagcagtacatggattctgagaagtccagggtctgaattgttgtctctgattactggaaggacaggttaactgaatgtctgtgatcactaacaggtgatgggctttgtgcccactccagagatattgtgggagacaaattcttttaacagcctgtcctcccggcatcaggagtcattgaacaatcatggattgttgtgtttgggattttttttttttttggctttgtttttggtttttgtgtgtgtgtgtgtgtgctgcatgcacatgcgtccaagacttatgggtggtttaggggaaagtgctagcaacagtgtcaatgtcattgttaactatatttcatatttgaggtctcattgttttcaaataaacagtgttttccatgg

SEQ ID NO: 2905 - DNA, 430 bp, Homo Sapiens
tttttttttcagaaagtaacaaaatacatttatttcaaaaccatgaccgcccagctcaccaaagtcccataaaacctgtgaccgcattgcaccaggggctctgttggcatggagcctgaagacccagcgtcttgccagactgagaccgaagtggcgcctgggtagggccagccgcgtgggagaggagaggagacccgatggcagtggaaggcagctcccacctggctcccgggacgccccatcgtgaggccagccaagggagggctttcgtccttggccgcagctgtccttgccagggtgggcgaggtggggaggacacaggctcgggccacactgacaccggtgtcagcattatgttctgatgcaccatgaacaggttcaggggcagggctgacccccaaaaatggcctttaaaagcctaaaaccctgg

SEQ ID NO: 2906 - DNA, 390 bp, Homo Sapiens
ttttagatcgctgcatgctgccgcgttgggttaaccatggtagcattttaccatgagaagccatagcaagatgtgccaggtgcatgctgctggaacacctggctgaggctccaacagcattttcctatgactgagggtagggtaggtagatgactcattacaatttataaaatggggggcttagcttgggtatcatcgtggttattccaagcagtcttccagctggactagcttttcgggaacacgtgtgtgtttgtgctggaagccccagtaatatcatttaattcgaaagcttttttctatgatgaattattcaggcagtgtttaccaaaattgtcattgatcagtacagacccagagagcatgtacaacagcgcctgtgctgggcct

SEQ ID NO: 2907 - DNA, 508 bp, Homo Sapiens
gcaaggcactgtccaagcaataatgtgttgtatcatgttttaattcaacattttttcttccttagtcatacataaagtaagaatttgtcttatattttaatccagcatttttcttccttagtcatacacaacataataacttggccacatggcaagaacatggtggcgggggtgggcctctaaggagctcaaagtggtccctggctgacagccagcaagcaaacagggacatcagatctacaagaacaaggaattgaactcttcccacaaccggtgagcctggaggagaacccagagcctcagaagagataggagccccggctgattccttaatttcagcctagtgagaacctgaggaaagacccagctaaaccatacccaaattcctgaccaatagaaactgtaagataagctgctaaatttgtgttaatttgctgtagagcaggggtccacaactggtactggtccgtggcctgttagaaacccggccgcacagcaggaggtgagc

SEQ ID NO: 2908 - DNA, 395 bp, Homo Sapiens
  misc_feature (318)..(318): n is a, c, g, or t
  misc_feature (336)..(336): n is a, c, g, or t
ctgcctctgcccttctgagcctgttcctcttccctgagtacagggcacaaagcttgcgccctgaggggcggccggcgcgctccctggcccggtccccgcccggccccgggccccccgcccctccccgacccggggccggggcccctgccgccgccgccgccgccttccgacccctgcgccccggccccggtcccccgggccatgcagcctcggccccgcgggcgcccgccgcgcacccgaggagatgaggctccgcaatggcaccttcctgacgctgctgctcttctgcctgtgcgccttcctctcgctgtcctggtncgcggctctctgcggccngaaaggcgacgttgtggacgttctccagcgggagttcctggcgctgcgcgatcggttgc

SEQ ID NO: 2909 - DNA, 254 bp, Homo Sapiens
tgcccaaagccatagagttttcaagtcataaatttgatcttagacctttctagttgccaaggccttcctacttagacagaatccatttggagagaaaactttctaacattcttctaagaggtcttgattcttggcacattcttctgtgtgatgtgttctctgtcaggcttgtcattataggggcaggaagaacgcactcatttcacttatacatatctacccattgggatgtgttagtagtggggaaaagtaaa

SEQ ID NO: 2910 - DNA, 862 bp, Homo Sapiens
cacaggcagttaggcagaagtgatccccgtgtctctgccaaagacaagcctgttgggttgaaagatgaagaagaacgaagaatgaacaataaaaaaactcagtgcaaagtcacaggtccttcaacaatttgattcacttgaaaggaagcgtgcagttggagaagtgtgagaagattgaattggcccggtggactggcattgtgtgaccactcttcttaagttgaaggagtcttccgtgtttcacattcggacgctctgtgagcagagaggacaccccggaataagcattttggtgaccagatcgagtgaatgcaggtgcttggaaatgaccattcttcaaaggcgacaggacacccaagtgcctaaaggatgtgccatgtgagcaattggaagatctcaaagacattgccagacggctgcttggcaggactctggcgaagacaagataactccccgaagaaataattctcacccacatcattagacagttctcatgtacttgagcaacaagaacaacttagatccatatcaaaatgattcagacaccagcgaaacaacttcacatccagacttcgcgaaacactcaactgtaatatttaccagacacatatcacacccttgactaaacaattccccatcagcatgacaaataatacacacaaaattagaataacaagctccaacacccaaccatccactcaaatttctccacaactccaagacacaaaaaatttaacaaagaccactatgacaagacagaaaatctattcagataaaccaccattaacacttaaaaagctttaatatataccactcaaaaaacccattaacacatgacctgaaacaaatatcactatcaaga

SEQ ID NO: 2911 - DNA, 320 bp, Homo Sapiens
ttgaggcctacgcgaaaatctgtgacccagggctgacctcgtttgagcctgaagcactgggcaacctggttgaagggatggacttccacagattctacttcgagaacctgctggccaagaacagcaagccgatccacacgaccatcctgaacccacacgtgcacgtcattggagaggatgccgcctgcatcgcttacatccggctcacgcagtacattgacgggcagggccggccccgcaccagccagtctgaggagacccgcgtgtggcaccgccgcgacggcaagtggcagaacgtgcacttccactgctcgggcgcg

SEQ ID NO: 2912 - DNA, 305 bp, Homo Sapiens
  misc_feature (43)..(43): n is a, c, g, or t
  misc_feature (143)..(143): n is a, c, g, or t
  misc_feature (173)..(173): n is a, c, g, or t
  misc_feature (183)..(183): n is a, c, g, or t
  misc_feature (205)..(205): n is a, c, g, or t
  misc_feature (217)..(217): n is a, c, g, or t
  misc_feature (262)..(262): n is a, c, g, or t
tttttttttttttttttttttgcaggcggcggtgcagcggatntgccttcatcttttaatggccggtgcggtacagttagtggacagacgggggatgggacacagcaggggtgaaacagggcagtcacagccggggccggggntctggaagcgggggcgttcctccccctggnaaacaccgtntctggaaggaacacccttaggntcccctgacctnagggtgaccacccacacgggacctggttttctgggaggcccgggntggagtgacccccagcccctccctacgttccagggacccttgg

SEQ ID NO: 2913 - DNA, 621 bp, Homo Sapiens
actttttcttcccttgcattttagaataggctggtatctcatttgaacgggggagcagacttgatctcaaatgaagctgtgcccaggagccaggcttagcatattgagatttttatagataccttaaaaaataaaatatttaaacctctcttttcttcctttttctatgaaataggttttttctctagtttacaaatgacatgaaaataggttttatttgtgttttatctgctttattttttgatgcttagacaacagttagacttactgagctcctaaaaaaacgaggaagaagtccttatttgtgaaaagcactttatgagtaattgtatagacagtatgtggctgcgtcactgatcatcttgtaagggtgtaacagtcttgtctgtaaagtggctgcagtgccttctgtagtgtgttttatttttggtagggagaggtgaagccttctgaaaaatttgagagcaactacagaggattgtttgtaactgtgtagtattcctgatggacttttttcatcgttagagtcaaggacctagacttttgccactgaaataatattgaccaaaaaaatagtttataaaagggatttgtgaatagaaaattcagtgtgatcatttg

SEQ ID NO: 2914 - DNA, 461 bp, Homo Sapiens
gtttttttttttcagcagacccaccaccaataccctgcttatgaataaaagcatttaaaacattgatatccttgatttctccaggtcatctgtcaggcttgccaccttttgggccactgaaggtttgtgacccacagcaaaggcagaggcaaaccaccccaccctttctcagttggggctgagaaagagctgggaccctggcagcccacacacagtctcttcataagctgtaataaatcacttatactccttctcccaaccgcccagctaggcttcctacttatgaggtttttcctcttctagattgttctactaagtgttcatttaaaaaacgcttttgttgtctaccttggggaagggtttcacatcacagactgtccttccccagtccagaatgttccatctgctgccattcaaaaggaatcaataaatctctttaaagtctaataatgttagaattt

SEQ ID NO: 2915 - DNA, 133 bp, Homo Sapiens
  misc_feature (59)..(59): n is a, c, g, or t
  misc_feature (61)..(61): n is a, c, g, or t
gctcccacccccgcttttttccgaagcgctgggcgcgcagccctccggccggagcccgnanctgcacaaccccctccgactttcaatgttccacactccccggccagagcctcctcggcttctttttttccct

SEQ ID NO: 2916 - DNA, 268 bp, Homo Sapiens
tcttcatcatacctacccaccaaaatggtgagctgtgagtaagatattcagacctgcaccgtcccaagcagtagccacagtggcaagtagcctcctcactggacagtgcagctacggaatgatgccatcaccggaaagttccatcagccagcaccgatgcagacctttgcaactgcccctcacgctggacagcacctgtttgatagattgtccactatgcagtgaaaagcctgggtgaaaagcggtatttggtaggtatgatgaagga

SEQ ID NO: 2917 - DNA, 530 bp, Homo Sapiens
tgacttgaatttaggtgacactatagaagagctatgacgtcgcatgcacgcgtacgtaagcttggatcctctagagcggccgcctactactactaaattcgcggccgcgtcgacgctggtgcacaggaaggatgaggaagaccaggctctgggggctgctgtggatgctctttgtctcagaactccgagctgcaactaaattaactgaggaaaagtatgaactgaaagaggggcagaccctggatgtgaaatgtgactacacgctagagaagtttgccagcagccagaaagcttggcagataataagggacggagagatgcccaagaccctggcatgcacagagaggccttcaaagaattcccatccagtccaagtggggaggatcatactagaagactaccatgatcatggtttactgcgcgtccgaatggtcaaccttcaagtggaagattctggactgtatcagtgtgtgatctaccagcctcccaaggagcctcacatgctgttcgatcgcattccctttggtggg

SEQ ID NO: 2918 - DNA, 590 bp, Homo Sapiens
  misc_feature (569)..(569): n is a, c, g, or t
gcaaactctggcggatagttgtgagtaatccctggtccttggaataagtgtcgacctgagacagaaggggaactgtcagagagctgccggagaccctgaaaaaggccagagacggggacttgtggggctgacgaatggaatcacccaaggagaggtctctgactctaacaaaacaccttggggacggagctccttggctgggatacagagcagaaacaagtccgggatcttttagtgaattgctgccggcttctaaggcctggagcagatattcaacaacaaactccacggacctagaaactctccacttatcctactattgtagacggtggcttacttttagtcttccctatgctctaagcttctggtaagtaggaatcgtgcctaactcacttactgtatcttgttgaacctagccccgcgcctggtggcacgtcaaattctcggtaaatatttgtggattaaatgtgaaagactgcctgagtgtttaacctggatttttctgagtcgctgatgggagaacagtaggtagacggggaaccagcgcctctggtggggcttgtggttcngtgacgagacatgctgggaac

SEQ ID NO: 2919 - DNA, 190 bp, Homo Sapiens
gtttataacttgaaaaatcctctccgtctcccttccctgcctcctttcctttccctttcctctgccagtacaactagacccggcgtctggcgtccccggtgcccagcattctgcggggaggccggattaattggaattgttcaaaatgtcaggtgtggtacccacagcccctgaacagcctgcaggtgaa

SEQ ID NO: 2920 - DNA, 409 bp, Homo Sapiens
tttttttttttttttatataaggagcgaatttattccaaaggattgttgtgggggtgaccattgcaatagggaaacgttgcagtgcggccactcgcaggcttcccatatgatctgcaagtgtctcagaggttaggcaaagggctgatcttgtatagggaggcgtaaacgtggctagaaagaactgttatgggaaagtgggctgagcaagagtgtcacgatcgaggaggtcttaccctgcggacagcctgttctcaggagggaacctcacgagggctgcgggttggcacaagctgtgggtgggccaaagctcaagggcttggaaaaggagagaatctgaaccaaggtttggttacaggcttttgttcttattgatctgtgggacaagcagcccagctaatcatttatgag

SEQ ID NO: 2921 - DNA, 420 bp, Homo Sapiens
  misc_feature (88)..(88): n is a, c, g, or t
  misc_feature (93)..(93): n is a, c, g, or t
  misc_feature (107)..(107): n is a, c, g, or t
  misc_feature (114)..(114): n is a, c, g, or t
  misc_feature (117)..(117): n is a, c, g, or t
  misc_feature (137)..(137): n is a, c, g, or t
  misc_feature (152)..(152): n is a, c, g, or t
  misc_feature (186)..(186): n is a, c, g, or t
  misc_feature (266)..(266): n is a, c, g, or t
  misc_feature (290)..(290): n is a, c, g, or t
  misc_feature (296)..(296): n is a, c, g, or t
  misc_feature (329)..(329): n is a, c, g, or t
  misc_feature (341)..(341): n is a, c, g, or t
  misc_feature (344)..(344): n is a, c, g, or t
  misc_feature (347)..(347): n is a, c, g, or t
  misc_feature (358)..(358): n is a, c, g, or t
  misc_feature (364)..(364): n is a, c, g, or t
  misc_feature (369)..(369): n is a, c, g, or t
  misc_feature (383)..(420): n is a, c, g, or t
tgctgcaaactcaccctctgctctcccagctcccagctcctgggcccaggttggtcgtttctcctgctttcctcctctactgaatagnacggnactgtcccacctgnaccatgntgngttctctcagaaccacctgngattctgccactggnctaattcgtgttctcaggtgtgtcctcccttctngacctggccccgcacccactgttccaccagatgaagtcctctctgtgtcacacgtactgcactgaatccacacgctctgntgtccaagctcacgtcccagtggnccaggntatgagtcctttccaggggcccacaaccctgantcccctaaaccnccngantagaattcagnttgggnttaancaggtgaattgaannnnnnnnnnnnnnnnnnnnnnnnnnnnnnnnnnnnnn

SEQ ID NO: 2922 - DNA, 420 bp, Homo Sapiens
cacgagggcggtcggcgtggggcgctatgccggggcggcacgtttctcgagtccgggcattgtacaagcgcgtcttgcagctgcaccgtgttctgcccccggacctcaaatccctgggcgaccagtacgtgaaagacgaatttaggagacataagaccgttggttctgacgaggcacagcgtttcttgcaagaatgggaggtgtatgcaacagcgttattgcaacaggctaacgaaaacagacaaaattcaactggaaaagcatgttttggcaccttcctcccagaagaaaaacttaatgactttcgtgatgaacaaattggacagttgcaggagctgatgcaagaagccacaaaacccaataggcaatttagtatttctgagtctatgaaaccaaaattttagtctatacaacaaagct

SEQ ID NO: 2923 - DNA, 615 bp, Homo Sapiens
tttttttttttttttatgacacagaatctttatttttccatcagtatgtgctgaagctacagatgttgaaacacgaactaatcttgtggctgataaatgaattttgaaatgtctatggaaatgtgaataaaggcaatccatgaataggtcaacttcttcctgggtaacctccccaggtgttttgtggacactgtcccatagagcttttgcatcctctggatgtattgcgaaagaaatgtccagactttgagggctacagggtacagaccaaagaaattcagtagtagccacataatggtccattttgcatgcagtccacatggcagccatccaggaaagattaaatgcattgattgctaaaggactgaaataacagtcaaaggttttctgaaaccaagttccaattattgctgtgttagactctgctccatttgcaaggaataagggcagacaggtgaaatcttctgaaacagtctccagaagactgtctccaaatacacagcagaaccagccagtccacagcactttaccttctctattctcagatggcaattgagattttgacacaatctggacaagaaatgttccgggtcctttgtgttcctttcattccta

SEQ ID NO: 2924 - DNA, 6846 bp, Homo Sapiens
ctgtgcaacggggtcaacgactgtggtgacaacagcgacgaaagcccacagcagaattgccggccccggacgggtgaggagaactgcaatgttaacaacggtggctgtgcccagaagtgccagatggtgcggggggcagtgcagtgtacctgccacacaggctaccggctcacagaggatgggcacacgtgccaagatgtgaatgaatgtgccgaggaggggtattgcagccagggctgcaccaacagcgaaggggctttccaatgctggtgtgaaacaggctatgaactacggcccgaccggcgcagctgcaaggctctggggccagagcctgtgctgctgttcgccaatcgcatcgacatccggcaggtgctgccacaccgctctgagtacacactgctgcttaacaacctggagaatgccattgcccttgatttccaccaccgccgcgagcttgtcttctggtcagatgtcaccctggaccggatcctccgtgccaacctcaacggcagcaacgtggaggaggttgtgtctactgggctggagagcccagggggcctggctgtggattgggtccatgacaaactctactggaccgactcaggcacctcgaggattgaggtggccaatctggacggggcccaccggaaggtgttgctgtggcagaacctggagaagccccgggccattgccttgcatcccatggagggtaccatttactggacagactggggcaacaccccccgtattgaggcctccagcatggatggctctggacgccgcatcattgccgatacccatctcttctggcccaatggcctcaccatcgactatgccgggcgccgtatgtactgggtggatgctaagcaccatgtcatcgagagggccaatctggatgggagtcaccgtaaggctgtcattagccagggcctcccgcatcccttcgccatcacagtgtttgaagacagcctgtactggacagactggcacaccaagagcatcaatagcgctaacaaatttacggggaagaaccaggaaatcattcgcaacaaactccacttccctatggacatccacaccttgcacccccagcgccaacctgcagggaaaaaccgctgtggggacaacaacggaggctgcacgcacctgtgtctgcccagtggccagaactacacctgtgcctgccccactggcttccgcaagatcagcagccacgcctgtgcccagagtcttgacaagttcctgctttttgcccgaaggatggacatccgtcgaatcagctttgacacagaggacctgtctgatgatgtcatcccactggctgacgtgcgcagtgctgtggcccttgactgggactcccgggatgaccacgtgtactggacagatgtcagcactgataccatcagcagggccaagtgggatggaacaggacaggaggtggtagtggataccagtttggagagcccagctggcctggccattgattgggtcaccaacaaactgtactggacagatgcaggtacagaccggattgaagtagccaacacagatggcagcatgagaacagtactcatctgggagaaccttgatcgtcctcgggacatcgtggtggaacccatgggcgggtacatgtattggactgactggggtgcgagccccaagattgaacgagctggcatggatgcctcaggccgccaagtcattatctcttctaatctgacctggcctaatgggttagctattgattatgggtcccagcgtctatactgggctgacgccggcatgaagacaattgaatttgctggactggatggcagtaagaggaaggtgctgattggaagccagctcccccacccatttgggctgaccctctatggagagcgcatctattggactgactggcagaccaagagcatacagagcgctgaccggctgacagggctggaccgggagactctgcaggagaacctggaaaacctaatggacatccatgtcttccaccgccgccggcccccagtgtctacaccatgtgctatggagaatggcggctgtagccacctgtgtcttaggtccccaaatccaagcggattcagctgtacctgccccacaggcatcaacctgctgtctgatggcaagacctgctcaccaggcatgaacagtttcctcatcttcgccaggaggatagacattcgcatggtctccctggacatcccttattttgctgatgtggtggtaccaatcaacattaccatgaagaacaccattgccgttggagtagacccccaggaaggaaaggtgtactggtctgacagcacactgcacaggatcagtcgtgccaatctggatggctcacagcatgaggacatcatcaccacagggctacagaccacagatgggctcgcggttgatgccattggccggaaagtatactggacagacacgggaacaaaccggattgaagtgggcaacctggacgggtccatgcggaaagtgttggtgtggcagaaccttgacagtccccgggccatcgtactgtaccatgagatggggtttatgtactggacagactggggggagaatgccaagttagagcggtccggaatggatggctcagaccgcgcggtgctcatcaacaacaacctaggatggcccaatggactgactgtggacaaggccagctcccaactgctatgggccgatgcccacaccgagcgaattgaggctgctgacctgaatggtgccaatcggcatacattggtgtcaccggtgcagcacccatatggcctcaccctgctcgactcctatatctactggactgactggcagactcggagcatccaccgtgctgacaagggtactggcagcaatgtcatcctcgtgaggtccaacctgccaggcctcatggacatgcaggctgtggaccgggcacagccactaggttttaacaagtgcggctcgagaaatggcggctgctcccacctctgcttgcctcggccttctggcttctcctgtgcctgccccactggcatccagctgaagggagatgggaagacctgtgatccctctcctgagacctacctgctcttctccagccgtggctccatccggcgtatctcactggacaccagtgaccacaccgatgtgcatgtccctgttcctgagctcaacaatgtcatctccctggactatgacagcgtggatggaaaggtctattacacagatgtgttcctggatgttatcaggcgagcagacctgaacggcagcaacatggagacagtgatcgggcgagggctgaagaccactgacgggctggcagtggactgggtggccaggaacctgtactggacagacacaggtcgaaataccattgaggcgtccaggctggatggttcctgccgcaaagtactgatcaacaatagcctggatgagccccgggccattgctgttttccccaggaaggggtacctcttctggacagactggggccacattgccaagatcgaacgggcaaacttggatggttctgagcggaaggtcctcatcaacacagacctgggttggcccaatggccttaccctggactatgatacccgcaggatctactgggtggatgcgcatctggaccggatcgagagtgctgacctcaatgggaaactgcggcaggtcttggtcggccatgtgtcccacccctttgccctcacacagcaagacaggtggatctactggacagactggcagaccaagtcaatccagcgtgttgacaaatactcaggccggaacaaggagacagtgctggcaaatgtggaaggactcatggatatcatcgtggtttcccctcagcggcagacagggaccaatgcctgtggtgtgaacaatggtggctgcacccacctctgctttgccagagcctcggacttcgtatgtgcctgtcctgacgaacctgatagccagccctgctcccttgtgcctggcctggtaccaccagctcctagggctactggcatgagtgaaaagagcccagtgctacccaacacaccacctaccaccttgtattcttcaaccacccggacccgcacgtctctggaggaggtggaaggaagatgctctgaaagggatgccaggctgggcctctgtgcacgttccaatgacgctgttcctgctgctccaggggaaggacttcatatcagctacgccattggtggactcctcagtattctgctgattttggtggtgattgcagctttgatgctgtacagacacaaaaaatccaagttcactgatcctggaatggggaacctcacctacagcaacccctcctaccgaacatccacacaggaagtgaagattgaagcaatccccaaaccagccatgtacaaccagctgtgctataagaaagagggagggcctgaccataactacaccaaggagaagatcaagatcgtagagggaatctgcctcctgtctggggatgatgctgagtgggatgacctcaagcaactgcgaagctcacgggggggcctcctccgggatcatgtatgcatgaagacagacacggtgtccatccaggccagctctggctccctggatgacacagagatggagcagctgttacaggaagagcagtctgagtgtagcagcgtccatactgcagccactccagaaagacgaggctctctgccagacacgggctggaaacatgaacgcaagctctcctcagagagccaggtctaaatgcccacattctcttccctgcctgcctgttccttctcctttatggacgtctagtccttgtgctcgcttacaccgcaggccccgcttctgtgtgcttgtcctcctcctcctcccaccccataactgttcctaagccttcaccggagctgtttaccacgtgagtccataactacctgtgcacaagaaatgatggcacatcacgagaatttagacctggattttaccatgaacctcacatcttgtactccatcctgggccccctgaaactgcttattcgtgattcctcaccagcgtagagctccacctcccctttccccagtaccctcagtgcctgcttctcagtgctgatgcagctgatgacccaggactgcgctctgccccatcacagccagcatgactgcttctctgagagaacttgcccatcaggggctgggacatgggggtgtgggtaaagacagggatgaaggatagaggctgagagaagaaggaagaatcagcccagcaggtatgggcatctgggaaacctccagcctcaagtgtgttggtaacatgaaaaagctctggggggtagttggatctgggtgtctggtccattgctggcagtggacattattcttgccctaagagacactgccttttcagcagcagatactggtgagatgggggtggctcaggctgttcttcctcctcctagaatgtctggagctgtttctacattcagataactgggtcccctatcacaaggctactggctaataggaattccctcctggtgccaccactggccagtacctttcctaagtctttgctcaaattaaccaggttgtgagccagtggcttgagtgaatgttaggccttgggggctgagtctctgaaaagtctaagaagctctgcctagaccaaatatggtatacctcctgacccctctctccctcatgtcctgggattctggggaagagacctagaaacaagctttcaaagaaaaaccagaagttgtcataaatggtcagaaagaacgatcaggttggagacttgggaaacccagggcctaaagagaagtatccatgagggtcaaacttcctgttgaacttcctatgttctttctcaagtgctcagggatctaagttagtggacagcaagcctgtggctacggggtggtgatgttcctcttccagctgtcccctcagctaaggggcttagtttccatgtgggatgccatcacttggttcatgctcattcacacaaagggcacgtgtctcagcctggtatcagggaaattgagacttatttttgccctaaaacgtctccctagctgttcttcgtggggtttttttgtttgtttttttgcctaatttgctttttctgaccaagccttgtggcaccagcaatctccaaagtcctgtggtgggagggctgaataaataaaaatacaaagaggtgggtaaggagtaggaaggtagagagcaccactgatgaggccctcctagcccatggcagacccagacctcttctcccccaggaattagaagtggcaggagagaacaacaggggctgggaatggaggggagaatttctaggggaagtttcctgagttgaaacttctcctgtggttactggtattgagaaatcagctaccaaagtgaaaaaggacaagatcaattcttttctagtcagttctaagactgctagagagagataccaggcccttagccttgctctcagtagcgtcagccccagttctgagcctccccacattacacttaacaagcagtaaaggagtgagcactttgggtccttagactcatgtctggggaggaagagcaagtagaaaagtggcattttcttgattggaaagggggaaggatcttattgcacttgggctgttcagaatgtagaaaggacatatttgaggaagtatctatttgagcactgatttactctgtaaaaagcaaaatctctctgtcctaaactaatggaagcgattctcccatgctcatgtgtaatggttttaacgttactcactggagagattggactttctggagttatttaaccactatgttcagtattttaggactttatgataatttaatataaatttagcttttcttaatc

SEQ ID NO: 2925 - DNA, 267 bp, Homo Sapiens
tttttttttcagattgtctgagtttgctgttagctctgtcatcacctcagccttccttgcacaaagactcctgactcactgaatggctgtgcgctagctggactgcctgcccctgtagtccaccctcttgcctggcaccgcacaagcagtggccagtggggattgaggaagcaattcctttggaatagatttctctccctctattcaaaaactagtagcctctactagatggaacctgtaactttccatctctatagacccacttac

SEQ ID NO: 2926 - DNA, 345 bp, Homo Sapiens
ttttttttttttcttctttttaagtaaagaacacatttgctgtttttattggtgccttgcatggcagtaatactgaaaaaggagaatgcaaaaaaataaaataaaatagacaaaaaacaaaaacgaaaaacaggttgatggcaaccacatcttttttttaagagcacataaactcctgttttatttttattgtggcatgaatgataacataaaaccaaaaacatgaaaatatacaacttatattacactatgtgttatgatcaaaatatagatctataactctatgttatatttacataattacttattatttgattaaatttcaagtgagatggtaggttgcac

SEQ ID NO: 2927 - DNA, 509 bp, Homo Sapiens
ttttttttttctcccaaaaatttccgcatcaaatatgctcatttgtaacgatccaattcaaaatagacatgttctgacctctggcgccacctaatggcataaaacaaactcatcaaattcatattgctttgaaaaaacggcagccattcaaatccagtattttttaagcctcattattgataagacagagacatacatcaaacctcaaaaaattttatgaggtaaaattctaacttaaaaaaaactattatcctatgtctttaggtaattgaaaacatagaagaaaattttaaaaaaccatttaaaataacacaaagcctgacagaaacaaatttgaagaaacgttaaaagatgaatctacatctactgccgaaagaaatgaatcttatttcctagtgaagaaggtctcaacatttacagaagcaattagactgccacacccacatagccaggaccatagagcttgagaggcgttcagaagcaggagcacttgtgatagaaataaacca

SEQ ID NO: 2928 - DNA, 359 bp, Homo Sapiens
caattcattaacatagatttacactttattttaaatttgcatcctgagataataaaattttatctgacaagtgaacaatgacagaagcagcagtgaaagtttcggagaggcaggtatccttcattttggcacagctgtatatagattgagtttttccagggaagtcattcctggactcaagggagaaaaaatgaattcattccacaggctatgtaacaatgcaagatgcatgaaagttcttagtttggatgaacatatccgctattattcttttctggtaaagctgtcccaacaggaatcctctgacaaaaagttgaaatcctaggcttctccaccagatatttttatcaatgcccact

SEQ ID NO: 2929 - DNA, 1041 bp, Homo Sapiens
tgacatgcctgatcctctcttttctgcagttcaagggaaagacgagatcttgcacaaggcactctgcttctgcccttggctggggaagggtggcatggagcctctccggctgctcatcttactctttgtcacagagctgtccggagcccacaacaccacagtgttccagggcgtggcgggccagtccctgcaggtgtcttgcccctatgactccatgaagcactgggggaggcgcaaggcctggtgccgccagctgggagagaagggcccatgccagcgtgtggtcagcacgcacaacttgtggctgctgtccttcctgaggaggtggaatgggagcacagccatcacagacgataccctgggtggcactctcaccattacgctgcggaatctacaaccccatgatgcgggtctctaccagtgccagagcctccatggcagtgaggctgacaccctcaggaaggtcctggtggaggtgctggcagaccccctggatcaccgggatgctggagatctctggttccccggggagtctgagagcttcgaggatgcccatgtggagcacagcatctccaggagcctcttggaaggagaaatccccttcccacccacttccatccttctcctcctggcctgcatctttctcatcaagattctagcagccagcgccctctgggctgcagcctggcatggacagaagccagggacacatccacccagtgaactggactgtggccatgacccagggtatcagctccaaactctgccagggctgagagacacgtgaaggaagatgatgggaggaaaagcccaggagaagtcccaccagggaccagcccagcctgcatacttgccacttggccaccaggactccttgttctgctctggcaagagactactctgcctgaacactgcttctcctggaccctggaagcagggactggttgagggagtggggaggtggtaagaacacctgacaacttctgaatattggacattttaaacacttacaaataaatccaagactgtcatatttaaaaa

SEQ ID NO: 2930 - DNA, 505 bp, Homo Sapiens
ttttttttttttttttttttttgacttttgcatccctttatttgtgtattgaaagaacaagcacctttatgggaactctatgccctgacagtttaattacttatcaagtttactctgggccggtattgatcattctttcgtgaaacgaattagatacttaaattaaaaacaaacaacaaaaccccccttttcacatagcatggcggcatgtcccttggtaacaaggttgagtggatccaccaaggcccagcagcttgcctccttttcgtaaggatgtaactattgtccaaccagaagagagaggcatggagtgggatgtgcaccaggatgaactcgccggaatcgtcaagagtcgttgtgtgaccctcaccttgacttcgggcgttttgtggggacccaactgctttcttgccgctgctctttggtctgagtttccctcagccaaacacttcacccacccatgaccctccaactgtcccgctacagcaggggatgggggttgtct

SEQ ID NO: 2931 - DNA, 1005 bp, Homo Sapiens
aatttcggcacgggggggaggcacagtgagtccactggggcacggcagcgtctaagccacaagccgactgacataagccaggtcctaacggagcctatgtgtaagtccactactggtgcaaggttgcacacttctaagaagagcggcgtggggggctcggcgaccttcgcttcagtcgctcccccgtgcagtcccctgtgcccaagacacagcctgatgcttgtgctccggtgggcggacttggaggcggcgggaactgcaattggtggctttgaagggcggcgagcgggaacagctcttgaggagtgagactgcaggagatgtgggccgtgccaaagagatggatgagactgttgctgagttcatcaagaggaccatcttgaaaatccccatgaatgaactgacaacaatcctgaaggcctgggattttttgtctgaaaatcaactgcagactgtaaatttccgacagagaaaggaatctgtagttcagcacttgatccatctgtgtgaggaaaagcgtgcaagtatcagtgatgctgccctgttagacatcatttatatgcaatttcatcagcaccagaaagtttgggatgtttttcagatgagtaaaggaccaggtgaagatgttgacctttttgatatgaaacaatttaaaaattcgttcaagaaaattcttcagagagcattaaaaaatgtgacagtcagcttcagagaaactgaggagaatgcagtctggattcgaattgcctggggaacacagtacacaaagccaaaccagtacaaacctacctacgtggtgtactactcccagactccgtacgccttcacgtcctcctccatgctgaggcgcaatacaccgcttctgggtcaggagttagaagctactgggaaaatctacctccgacaagaggagatcattttagatattaccgaaatgaagaaagcttgcaattagtgaacatgaaaggaaaataaaaattcctcacagtcaaaaaaaaaaaaaaa

SEQ ID NO: 2932 - DNA, 356 bp, Homo Sapiens
  misc_feature (32)..(33): n is a, c, g, or t
  misc_feature (35)..(35): n is a, c, g, or t
gtacagactccagacagaggggcccttgctcnnanacctcaggtgatgagctgagaaagatgttcacgtctaagcgtccagtgtgcacccagcgctccatagacgcctttgtgaactgaaaagagactggcagagtcccgagaagatggggccctggctttccagggagtgcagcaagcagccggcctgcaggtgagcatggaggcccggccctcaccgcctcgaagccatgccccagatgccactgccacagcgggcgctcgctcctccctaaggctgttttaagtatttggatttgcattccatcccttgggagggagtcctcagggccactagttgatgagccaagaggagtg

SEQ ID NO: 2933 - DNA, 341 bp, Homo Sapiens
ttttttttttcccagccaggaggatgatataaaactgtgttgacttccttgccctcccaaccctggaacctggctgtctgtgctctgttacactgtgactaccattaatcaccctcactataaacgctgttacacttaaccatgcacattgtcagcagggtgaatcagaagcaggaacagttttgctgttttaaggaaactctgtatatctacaaggtaaatattcatggaacaaatattaagatgtctattttagcactgcctgtacattaagatgcagatgtgtgtgtgtatgagagtgtgtgtgtgtgtgagagtgtgttgtgtgggtgtgtatgtgt

SEQ ID NO: 2934 - DNA, 476 bp, Homo Sapiens
tttttttttctaaaattttttcttctctgtgccccagacctcaagaaattttgtggccctagtgagaaatggcagataattaaagtcatcaggccaggcaaacttcctttccaaccagagagtctgaggtccccagagggtggggaaaccttcatgctttttctctctggcttctcgctgcttagctctgacgtggttcagtcaagtgcaccagagagtagggtaaatcaagcctcaaccacccaagttggctggagggctgaaaaggtagagcccagggacccagacactactgggcaggttacaatgaggaagggcttcgggagagcaacccctgaaagttgctcatgaactcttgggcttacccttgagctctacatgtatggatccgaccctacacggaccacacagactttgagtgctgaaatgtgggatagattaccaccagagtcccaggctggccactaggtggcgct

SEQ ID NO: 2935 - DNA, 350 bp, Homo Sapiens
  misc_feature (15)..(15): n is a, c, g, or t
  misc_feature (161)..(161): n is a, c, g, or t
  misc_feature (231)..(231): n is a, c, g, or t
  misc_feature (239)..(239): n is a, c, g, or t
  misc_feature (246)..(246): n is a, c, g, or t
  misc_feature (254)..(254): n is a, c, g, or t
  misc_feature (261)..(261): n is a, c, g, or t
  misc_feature (268)..(268): n is a, c, g, or t
  misc_feature (276)..(276): n is a, c, g, or t
  misc_feature (294)..(294): n is a, c, g, or t
  misc_feature (338)..(338): n is a, c, g, or t
ccgggagctgcagantacgcagccttcggtgcagtcgtcactcgtgtctcgctaccagctccccgctgccctgcgctcgggggcttggcatccggcccgggggaaagcggaccagcccttctgcaggtctgcggggccaagtgtcccggcggcgcacctcncgtggcgagaatcgggagaaggaggagactacaaggataggcccaggagtaatggagtccaaagagaaangagcagtnaacagtntcagcatngaaaatnccaaccnagaaaatnaagaaaaggagcaagttnctaataaaggggagcccttggccctccctttggatgctggtggnatactgtgtgcc

SEQ ID NO: 2936 - DNA, 421 bp, Homo Sapiens
  misc_feature (410)..(410): n is a, c, g, or t
ctcttaggtgaggaaactgaggctcaacatggtaaattaaacttgacaagtatacacaactcacaaggtgtggagtcccactagtttcttggacagtttctaaagtctatgatctttccacagcacccagcttgtggcatgctaattgcttaagtgcccctagagtccagatgaagaaagttcagggcacaagactctgagagtacaaagcactccagaaataagccagttgcatttgtcattagctttcctgtccacattcccttttcttagtcaggttcagtccatctagaacttcaatttcaatggaaacagaggaaatgaatgtggtagcagacatcactaagcactctcaaagctttcttgttactttgaaatggtctaaaaagcccattctttctacccactgngtccccacctt

SEQ ID NO: 2937 - DNA, 2330 bp, Homo Sapiens
gtgagcgtgtgtgcgtgcgtctactttgtactgggaagaacacagcccatgtgctctgcatggacgttactgatactctgtttagcttgattttcgaaaagcaggcaagatgtccagcacaccacatgaccccttctattcttctcctttcggcccattttataggaggcatacaccatacatggtacagccagagtaccgaatctatgagatgaacaagagactgcagtctcgcacagaggatagtgacaacctctggtgggacgcctttgccactgaattttttgaagatgacgccacattaaccctttcattttgtttggaagatggaccaaagcgatacactatcggcaggaccctcatcccccgttactttagcactgtgtttgaaggaggggtgaccgacctgtattacattctcaaacactcgaaagagtcataccacaactcatccatcacggtggactgcgaccagtgtaccatggtcacccagcacgggaagcccatgtttaccaaggtatgtacagaaggcagactgatcttggagttcacctttgatgatctcatgagaatcaaaacatggcactttaccattagacaataccgagagttagtcccgagaagcatcctagccatgcatgcacaagatcctcaggtcctggatcagctgtccaaaaacatcaccaggatggggctaacaaacttcaccctcaactacctcaggttgtgtgtaatattggagccaatgcaggaactgatgtcgagacataaaacttacaacctcagtccccgagactgcctgaagacctgcttgtttcagaagtggcagaggatggtggctccgccagcagaacccacaaggcaaccaacaaccaaacggagaaaaaggaaaaattccaccagcagcacttccaacagcagcgctgggaacaatgcaaacagcactggcagcaagaagaagaccacagctgcaaacctgagtctgtccagtcaggtacctgatgtgatggtggtaggagagccaactctgatgggaggtgagtttggggacgaggacgaaaggctaatcactagattagaaaacacgcaatatgatgcggccaacggcatggacgacgaggaggacttcaacaattcacccgcgctggggaacaacagcccgtggaacagtaaacctcccgccactcaagagaccaaatcagaaaaccccccaccccaggcttcccaataagatgatcggcaccagaatccactgtcaataggcccgtgggtgatcattacaattgcaaatctttacttacaggagaggaaacagaagagataaaaacttttccatgcaaatatctatttctaaaccacaatgatctgattttctttcttctttctttttttctaattgagaggattattcccagtaagcttccatgaccctttcttggaggccttcacaggtaatacagatactggcactgattgtaattaaaatgagagaaaactctagcgcatcttctggcacggttttaacaacgtgtttgtgttgaatttcctttttatgcatcaaacgaaggccatattgtccataaatgctcagtgctcaggatctcattaatatgccgaacctaactacagatgactttttaatattgtaaaatattttctgctttttgacttgcatctgagagtttcttgtttcagtaaaaaaagaaaagacaaaaaaatcagctttggaaagtaatttaaatgtaccttattttttttttctttatgttttctttcattgggcaacagctaagagggcccagcaaggtaatttatggttgagctgatgtcaattggttcttgtcttgagtcgactcaatttagcccaagtgctgaaacaagaaatgtcatttttttcatcaaagacaccagggcagatttttaagtaaagaaagacaattggacccttaagaatttatgcatttgtaaagttgctgttgatccaaatattttcaagccatgtaatccattggttttgtgggcagtttaataaacctgaacctttgtgtgttttctaattgtacctgagttgaccatcctttctttttatagtatatttcttgtatgatattttgtaaagctctcacctggttcttttatggggacttttcgtttttgggcaactccagtgtatttatgtgaaactttataagagaattaatttttccatttgcatattaatatgttcctccacacatgtaaaggcacagtggctccgtgtgttaaaaaacagctgtattttatgtatgctttactgataagtgtgccaataataaactgtgttaatgacc

SEQ ID NO: 2938 - DNA, 5025 bp, Homo Sapiens
gagccggtggttgcagcggaggcggtgatgtcggtgcaggttgtgtcagccgcggctgccgccaaggtgcctgaggtggagctgaaggacctgagcccctccgaggcggagtcgcaactaggactgagcacggccgccgtgggcgccatggcccccccggcgggcggtggagaccctgaggctccagctcccgccgcggagcggcccccggtccccggcccgggctcggggcccgccgccgctctcagccccgccgccgggaaggtgcctcaggcgtcggccatgaagcggagcgacccacatcaccagcaccagcggcaccgcgacggcggcgaggccctggtcagccccgacggcaccgtcaccgaggcgccgcgcacagtcaagaagatccagtttgctgaccagaagcaagaattcaacaaacgtcccaccaaaattggacgtcgctctttgtctcgttccatttctcagtcatctactgacagctacagctcagcggcttcatatacagatagctctgatgatgagacatcgcccagggacaagcagcaaaagaactctaagggaagcagtgacttctgtgttaagaacatcaaacaggcagagtttggacgaagagaaattgaaattgctgaacaagaaatgcctgcattgatggctttgaggaagagagctcaaggagaaaagcctttggctggagccaaaatcgtgggttgcacacacatcactgctcagactgctgtgcttatggaaactctgggtgctctgggggcccagtgccgatgggctgcctgcaacatctattccactctcaatgaagtggctgctgctctagcagaaagtggatttcctgtttttgcctggaagggagagtcagaagatgacttttggtggtgtatcgatagatgtgtgaatgtggagggctggcagccaaacatgatcttggatgatggaggggatcttacccactggatttataaaaagtatcccaacatgtttaagaaaatcaagggcatagtagaggagagtgttactggagttcacaggctgtaccaactgtccaaagctgggaagctgtgtgttccagccatgaatgtcaatgactcagtcaccaaacagaaatttgacaacctctactgttgccgtgaatcaattcttgatggacttaaaaggacaacagacatgatgtttggtggaaagcaagtggtagtctgtggctatggagaggtggggaaagggtgctgtgctgccctgaaagccatgggctccattgtgtatgtaactgaaattgaccccatctgtgccctgcaagcctgtatggatggatttcgactggtgaaattaaatgaggtcatccgacaagtggacattgttattacctgtacaggtaacaagaatgtggtaaccagagagcacttggaccgtatgaagaatagctgcatcgtttgtaacatgggacattccaacacagagattgacgtggcgagtctgcggacaccagaactgacctgggagcgagtgagatctcaagttgaccatgtgatatggcctgatggcaagaggatagtactgctggcagagggccgcctgctgaaccttagctgctccacagtgcctacatttgtgctctcaatcactgctactactcaggctcttgccttgatagagctttacaatgctcctgagggtcgctataagcaggatgtctacctgttgcccaagaagatggatgagtatgtggccagcctacacctgcctacctttgatgcccacttgacagagctgacagatgaacaggccaagtatctgggactcaacaagaatgggcccttcaagcctaattactacaggtattaagttcctgtaactcaaaccagaatttttaaggaatagaactccaagccttttctccactactatacaagaaagaattcagcaagctgcttctccaatcaaagctgcctgccgtgctcaccctgtgtgttaggttatttatttattaaaatcaagaatcctgtgcctgtagtgttggcccagagtgtggttactgccctgagggccatgaaagccacagaggatgggctgaggaaggaaagaaatggggttactgctcccagtgcatcatttgcatcattccccattgactgaatcctcagcagtggccgtttttcctcttgtccaggctcacgagttagtccagggattccatactccctattccctggagttttctggaataaattttcagcacctgcttttctcagcttggcccttccccgggtgaggccgtttggaattaacatggccagtgtttcacacaagattgggttcccaatcttgaccatcactatcactgccttctttatataaaggctaataaggaaggagtgttatttatggctttgccaagctacatcaagaactcagctgtgctgtgcctaccaggggtctcctttcttacccaggactcctttcttctccttgaatatttatgtccattttaacacttcctggttgcaagagggatgtgcctccattatttcctccacagttttggtatttgtcagacatttgttctgctgtctttctaatccagccaacgtctgctcaggaagtggggccagctccactgggacccatagttttacttccttgtcatttgattggatagtttccaaggaagcccctccagattggcactatctcagaaaaggagagcttgttgtgaaacactgcttcctgaaacttcctgctattgcctaaagctacgtctgaaactgagtagggaaaggcatacttttccagggacttagggggataggctttggaaatgggacaggtctttcagactcacagcttgataccctaacaaagcagagtatatttatttgtttcccaggaaggccattgcagtttgactggctgagggatacagagatgaaattgtaaactgtatccagattatcaaagctaatttgactagtttgaacctcgtcagacattcattcctttggccattgccatggatgaaaccgagatctgcagtctgatctgtggacttctctgctggcatatcttttatgatttaacctcttccatttgatgattctgtatttcagagtcagtttcttgagtaactccagtgctacaaaaagaattagtaatgtggtgtgggcagcgtgacattttatgtcccacccaaaaattggattccttttggagactgatctgttggtctcaggcatttcattaggaccagattggttctaagagttagtctggactggccctaggaaacttgaattaaataagcctcttccccttaccgatcctttttaacactctcaggtttgtttgtttcccacttttttcctatgctggtctgcctcaaagtctcaagaccaaggtgactcaagataacaccagaccacgcatgatcaccaaaaccttcccatcctgattctcttcttctacctctaccctctccaacttctcctggtcttcacatatactctcaaagctagtctgaaagtgaccttactttcggaagtagggaagtggaactttggtaaatgactgtttgcctcatttaatagtatacaggctcagcccatagactacagttcttcagaggccatatgtctcagcaagtactggttatattctttttttgtaaggaagatcataaatgctaaaaattccactaagccattcagttcttccttttgcctacctagtcctgatttttgtattaattggttccctttagcaagggattcagatctttgtaccttatcttatatccagagcagattccatttggcagatagatggtctctagcctattgtattcttagaccaaaaatcataacctgctgtttctcagcaaagccttgctctctggagcttactatgtgctggtacttaaagagtacattctgccttgctgtagtgaagagacccactccaaataaaaaaggggccacacggggcttctaagttaggttgccagtgttgctgcccatgatgagttatttgcctctgagtttcagatgacctctctgtagggacactgtgttatcaaccattaagaagaaagaaccacaagcctcccaagtatttgggttctatcttagggttgaaatctggtcattattccctctacccttggaatcagagcaatgtgtcttctttcctccaacctcttaccttagatgcatcctggttatctggaagcatgggaaagaaggctacttatctctttgtatgtggctccagtctgtgaggatacataacattttctctacaatgaatctgtgctaatattttgccttctttctttcttttcttttcacccttagagacagggtttcactatgttgcccaggctggtctcaaactcctgggctcaagcaatcctcctgcctcagcttcctgagtagctggaaccacaggtgtgtgctaccgtgcctggcacttttttgccttcttaatggagatattcagttttctttttttcatttaaacaaagaaaaaaaatgtatctactctaccttccctctgctctcctccctccctatcctacttgcccatatgagcacggctccccatggccacatactcctgcaaagcttttatgctgcttcgcttttctctaaacagatctgatattgctgctcctgtggttttctcaaaattaactttgccgtggtttttaaaaaggaatcaaaatgcattgttgcattaagctttttcaataaaggaaaattacggaaggaaaataggcaacaccagcaaattatatgtggacaggttctaaactctatatatacatatatatatatatatctatatatctatatacgtaatcatctagttctgtcatcttactgaaaggaataacacttctaaagatcaccatttctgagaagttcttggaaatctttatgtctaagtgattgtattagatcagcaataatgactatgtaatctcaaaaaacaaataaaatattcttaacatgg

SEQ ID NO: 2939 - DNA, 4563 bp, Homo Sapiens
ggtatcgataagcttgatcgcctcacagcgatggcggccgagcagggccggtggcggcggcggctgcggctacggccggagacggcagtgttggcggtagtggtgggtggcaggggcctgtgaccgggagctgcccccggacccgggcaccatgagccaaggcccccccacaggggagagcagcgagcccgaagcaaaagtcctccacactaagcggctttaccgggctgtggtggaggctgtgcatcgacttgacctcatcctttgcaacaaaactgcttatcaagaagtattcaaaccagaaaacattagcctgaggaacaagctgcgtgagctctgcgtcaagcttatgttcctgcacccagtggactatgggagaaaggctgaggagctgctgtggagaaaggtatactatgaagttatccagcttatcaagactaacaaaaagcacatccacagccggagcactttggaatgtgcctacaggacgcacctggttgctggtattggcttctaccagcatctccttctctatatccagtcccactaccagctggaactgcagtgctgcatcgactggacccatgtcactgaccccctcataggatgcaagaagccagtgtctgcctcagggaaggagatggattgggcacagatggcatgtcaccgatgtctggtgtatctgggggatttgtcccgatatcagaatgaattagctggcgtagataccgagctgctagccgagagattttactaccaagccctgtcagtagctcctcagattggaatgcccttcaatcagctgggcaccctggcaggcagcaagtactataatgtggaagccatgtattgctacctgcgctgcatccagtcagaagtgtcctttgagggagcctatgggaacctcaagcggctgtatgacaaggcagccaaaatgtaccaccaactgaagaagtgtgagactcggaaactgtctcctggcaaaaagcgatgtaaagacattaaaaggttgctagtgaactttatgtatctgcaaagcctcctacagcccaaaagcagctccgtggactcagagctgacctcactttgccagtcagtcctggaggacttcaacctctgcctcttctacctgccctcctcacccaacctcagcctggccagtgaggatgaggaggagtatgagagtggatatgctttcctcccggaccttctcatctttcaaatggtcatcatctgccttatgtgtgtgcacagcttggagagagcaggatccaagcagtacagtgcagccattgccttcaccctggccctcttttcccacctcgtcaatcatgtcaacatacggctgcaggctgagctggaagagggcgagaatcccgtcccggcattccagagtgatggcacagatgaaccagagtccaaggaacctgtggagaaagaggaggagccagatcctgagcctcctcctgtaacaccccaagtgggtgagggcagaaagagccgtaagttctctcgcctctcctgtctccgccgtcgccgccacccacccaaagttggtgatgacagtgacctgagtgaaggctttgaatcggactcaagccatgactcagcccgggccagtgagggctcagacagtggctctgacaagagtcttgaaggtgggggaacggcctttgatgctgaaacagactcggaaatgaatagccaggagtcccgatcagacttggaagatatggaggaagaggaggggacacggtcaccaaccctggagccccctcggggcagatcagaggctcccgattccctcaatggcccactgggccccagtgaggctagcattgccagcaatctacaagccatgtccacccagatgttccagactaagcgctgcttccgactggcccccacctttagcaacctgctcctccagcccaccaccaaccctcatacctcggccagccacaggccttgcgtcaatggggatgtagacaagccttcagagccagcctctgaggagggctctgagtcggaggggagtgagtccagtggacgctcctgtcggaatgagcgcagcatccaggagaagcttcaggtcctgatggccgaaggtctgcttcctgctgtgaaagtcttcctggactggcttcggaccaaccccgacctcatcatcgtgtgtgcgcagagctctcaaagtctgtggaaccgcctgtctgtgttgctgaatctgttgcctgctgctggtgaactccaggagtctggcctggccttgtgtcctgaggtccaagatcttcttgaaggttgtgaactgcctgacctcccctctagccttctgctcccagaggacatggctcttcgtaacctgcccccgctccgagctgcccacagacgctttaactttgacacggatcggcccctgctcagcaccttagaggagtcagtggtgcgcatctgctgcatccgcagctttggtcatttcatcgcccgcctgcaaggcagcatcctgcagttcaacccagaggttggcatcttcgtcagcattgcccagtctgagcaggagagcctgctgcagcaggcccaggcacagttccgaatggcacaggaggaagctcgtcggaacaggctcatgagagacatggctcagctacgacttcagctcgaagtgtctcagctggagggcagcctgcagcagcccaaggcccagtcagccatgtctccctacctcgtccctgacacccaggccctctgccaccatctccctgtcatccgccaactggccaccagtggccgcttcattgtcatcatcccaaggacagtgatcgatggcctggatttgctgaagaaggaacacccaggggcccgggatgggattcggtacctggaggcagagtttaaaaaaggaaacaggtacattcgctgccagaaagaggtgggaaagagctttgagcggcataagctgaagaggcaggatgcagatgcctggactctctataagatcctagacagctgcaaacagctgactctggcccagggggcaggtgaggaggatccgagtggcatggtgaccatcatcacaggccttccactggacaaccccagcgtgctttcaggccccatgcaggcagccctgcaggccgctgcccacgccagtgtggacatcaagaatgttctggacttctacaagcagtggaaggaaattggttgatactgacccccaggccctgcagtggggctgactccagatctctcctgccctccctggcagccaggaccagcacctgtagtcaccccaccacacgcagactcatgcacgcacacaggagggaggcctagctgctcagaggctgcagggagggcccaggagccggctgggagggtggggtccctttgttgccaagacgttaggaaagcgaggaaagtgcttggattaggagagtcttgtgggcccctggccagccttcctgcctcagctcccctgctgtctccaggggcaggtggtaggcatgggtacctgcatttcactggaatgggttcttggatctctgaggggaaggaacagcaaaagaggcccttcttcctcacccaagatgcagggtggttggggccaggagtttggaccctctaggtcttgggggaagagctgggtaatacctggtgtctgagtgattctctgcagacccttcccctcctcaaggatcacccatcctcctttcagccccctttatggggaccaggcagctctggagccagccacaggggctgttagagaagcaaggcctggagtggcctgcaccgagtagcagggtcagggttcgtgtgctcctcctcctgctgcaggggctgcacatcccattgccccacttctgctttgtgtctccctctgtctagcttccagggcagggagcaggccccacctagggctgcaggcagtctggcctgtgccagcacggtctcctgtgcccaccagccccacaggtgctgtgctttgtgctcttggctgctgtgctgggacagaatgggatgccaggaagagaagaaagggggtgcagtctgaggccaccaccccccttcctatctaagggagggctgaagacaaggggccggcattcagtgggcagcagaaaggagaggccccttgaagctgctcagtcagaggcccccgtccctccttttgccttccgcaggactgaagacctgaaggggctggcttttggagtgttgaggtgaatatctgggagcagagatcatgaatagctcagggcagtgaatggcgcaccaagagcagggctgtgtgtgggaggctgcagccaggattgcctcagctcctccccctcaggctgggaggatagcacaggctaggggctcggggtggagggtctcagctctgctgcccccaccccagtactagcctagcttcccaagctgtggcttagaggatagttggcttcctgcctctctcctctaaaatagcaagtctgggaaatcctggggtgagtggagtcaccccactcccagttgctggcagagactgagactaaagcatcacttaataaaccccccaagccc

SEQ ID NO: 2940 - DNA, 451 bp, Homo Sapiens
ttttttttttttttttttttttttttaaaatgatctaggtcagaatttttatttcctgcacttctggcagcaattttcttccctaaatcgctggtacttctccttaggatactcaggggctcctgcctgtcaggcttctttgcttgcaaggccttctctctctggcacttcttcctttcatcagaactttcctgtcctgctcttatctgctcaccaggtgggaaaacagctcgagaaactaatctgagcaaaggtgttaaaggctgacatggatttaataggtttaatatgcatcttctccaagaagcaggtcaaatgtcatactttctgtgaagattactcatttccaaggaggctaactgcttcctcctgcaagctaccaccacacttctatcaaccttctagtaaagtacttctctggctgaagtttaatttgctgtatattaatatg

SEQ ID NO: 2941 - DNA, 389 bp, Homo Sapiens
  misc_feature (384)..(384): n is a, c, g, or t
ttttgagactgcatagggctcggtggagaggcctttgtaggcagataaaccagggtcagaatgttgtaggaagagatgttgcaaaatctgggtgggtacatccccttggcttcagtgactccttacctgaggggagacagcagtctggagaagacacatgtatcgcagggcctagaccaggataccccctgtccagctctaagagcagcactactgctcatttccgatgttatatatgatgggtaggtaccccatgttcacagataagtccagttatccacgcaagtatcaaaaatatagtattaaatatactatcaaagctaactaccagcacacacatttcataactttcccaggtttatgaattctgatatcaccactcanaacac

SEQ ID NO: 2942 - DNA, 614 bp, Homo Sapiens
ttgagacagggtctcgctttgtgactcatgctggagtaaagtggcacaatcatgactcattgcaccctcagcctcccaggctcaagtgattctcctactttagcctcctcctgagcagctgggactaccgccatgtaccaccacgcccagctaatttagtttaccctttgtagaggggaggtctcatcatgttgcccaggctagtcttgaattcctggactcaagtgaattctcctgcttcagcctcccaaagtgttgggattacaggtgagccaccggcaagcccaaagtgacgtttcatcaacgagctaaagaaggtgatgtagtgagtcatgtggtatctaggggaaagagtattccagatagaggaaatagccagtgcatgcataggagcataccctgtgtgttcgaggaacaaaaaggaggccagtgttactgtagcatagagagtaaggaagaaactagtaggatatgaactcaagagaataggggcaggcaactgtgtaggtagggtcttaaagatcactgtaaatcactacctttttattctcggtaaaaggggaagtcactggaaggtttttagcagagaagtgaaatgaccagacttacattta

SEQ ID NO: 2943 - DNA, 382 bp, Homo Sapiens
cactaaagacaaaaatgaacttattataatgtaagtggaatgggtagctcagtttcatcaagaggtctaaagacccagattctgagaatacacagccaaagataatacatctgcattctaaatcacatgaaactccaggaccaagcaagataccactgctgcctcctccaaggagcatgatactgcagcctccatgccatcatgaatggcattggccccatggcactgctactccaggaactccctcttgctgtcactgacaccatgaaattgtggcctcacctttgtattaataggttgaggaatctggatcttgtcactgccccagaacagaacagacccacactcagctaccccagctcacatgagactaatgcagaaa

SEQ ID NO: 2944 - DNA, 680 bp, Homo Sapiens
aaagggccgcgagcggcggaggcaccgagtgcagagcatgtagaccaaggagccatggataggagaagtatgggtgaaacagaaagtggagatgctttccttgacctgaagaagcctcctgcctccaaatgcccccatcgctatacaaaaaaagaactcttggatataaaagaactcccccattccaaacagaggccttcatgcctttctgaaaaatatgacagtgatggtgtctgggaccctgagaagtggcatgcctctctctacccagcttcagggcggagctcaccagtggaaagtctgaagaaagagttggatacagaccggccttccctggtgcgcaggatagtagatccacgagagcgtgtgaaagaagatgacttagatgttgttctcagccctcagagacggagctttggagggggctgccacgtgacagccgctgttagctcccggcgctcaggaagtccattagagaaagatagtgatgggcttcgtctgcttggtggacgtaggattggcagtgggaggataatctctgcccggacctttgagaaggatcaccgtcttagcgataaggacctgcgggacttgagagacagagaccgagagagggacttcaaggacaagcgttccggagagagttggagatagtaagcgggtctggtgacgtaaaaaat

SEQ ID NO: 2945 - DNA, 330 bp, Homo Sapiens
ttttttttttaagaaggcagtacccaaagacaactaattcttaggtgcaatcgcagaatttgcatttataaaattgtagtattcacatttctttctaaagtatgactgctcatttagatcaaatgactgttctaacataattaagccaatttttcccctaaatgttctcctgaacattaaacacatacataatagcagttaaatattggctcctttagcttggaagaactttacaggcaattagattgtgccagatttcaaataggagatcagttccgttagtagttctatttttttcattcaactcgtggaacaagggtcaacaaattg

SEQ ID NO: 2946 - DNA, 290 bp, Homo Sapiens
  misc_feature (100)..(100): n is a, c, g, or t
  misc_feature (243)..(243): n is a, c, g, or t
ttcatgatggcctcatgttactaatgaggaaactggggcccacagtcagacatgagccactggtgggacagaaataggctcctggttctgtgtgatccanagttggtgcttttctgtctatccctagctgttggtcaccaccagctttctgcatattttctcacggtgcctctcatttcccagagccgcctggagcccaaggctgtacacgtgccctgtgctgattctctgcctaggaaaggnccatgcagctagagatcaaagtggccctgaacttcatcatctcctac

SEQ ID NO: 2947 - DNA, 450 bp, Homo Sapiens
ttttaagatgatattgtgtatgttaatactttattttgcagttcagttgggagagaacagtgtgagccttagtttttaggaaagcttcagggaggatgtgggactgtttttgtttttgatgttgttgtttgtttgtttttaagaacaggtaaccccttttaaatttttctcctttttttaataactggggatttggatggacaaagaaaagaatggcatagggacggcatttcagcctgggggagcagcagacccagtagctcagagatagaaaagccactggcatttgcaggagtgcagaaggccaggcctgctcagaacagaaggttcactgggaaggttagtgtgtgacatggtctgagaagtcacagatgatctaggaataatcccagcggccatgcctcctgtaccaagggttaataagtatttgaggcacatttccccattggc

SEQ ID NO: 2948 - DNA, 355 bp, Homo Sapiens
  misc_feature (6)..(6): n is a, c, g, or t
ttaggnttaaatgatgtcttcatccctgtgtctcccaggtataagttttgtatttttctaagttcaaaacaagcaaggatcatgtttgccttatttatccttaaaatcatagtgcctggcagagttaagtgcttgatatagactgctgagtcaatgaatgaatgtaggtcctacgtatttttaaagtttactcctaggctctttttaataatttttgttcctatcaatctcttttcatcaccattatattttctacctgggctactattgggcacataggataaggaaaataggtttctattcattcattcaatcacttattcctttccaaccaaaccatttgccaaatccaact

SEQ ID NO: 2949 - DNA, 3811 bp, Homo Sapiens
  misc_feature (1088)..(1088): n is a, c, g, or t
  misc_feature (1099)..(1099): n is a, c, g, or t
  misc_feature (1129)..(1129): n is a, c, g, or t
gctgattttgggaggtgccaatattaattaccggacagaggttttaaataatgctccaattctatgtgttcagtcccatcttggttacacagaaatggtagccctgctgctggagttcggggccaacgtggatgcctcttctgaaagtggcctgactcccctgggatatgctgcagcagcagggtacctgagcattgtggtgctgctgtgcaagaaacgggccaaggtggatcatttggataagaacgggcagtgtgctttggttcatgctgcactccgaggtcatctggaggttgtcaagtttttgattcagtgtgactggacgatggccggccagcagcaaggagtatttaagaagagccatgccatccaacaggccctcattgctgcagccagcatgggttatactgagattgtctcctacctacttgatcttccagaaaaagatgaagaggaagtagagcgagcacagatcaacagctttgacagtctctggggagagacagccctaacagctgcagccggaaggggcaaactggaggtgtgccgtttgctcttggaacaaggggcggcagtggcccagccaaaccgccgaggagcagtgccactattcagcacagtgcgccagggccactggcagattgttgatcttttactcacccatggagctgatgtcaacatggcagacaagcagggccgcactcccctgatgatggctgcttccgaaggccatctaggaaccgtggactttctgcttgcacaaggtgcctccattgctcttatggacaaagaaggattgacagccctcagctgggcttgtttgaagggccatctctcagtagtacgttctctggtggataacggagctgccacagaccatgctgacaagaatggccgtaccccactggatctggcagctttctatggcgatgctgaggtggtccagttcctggtagatcatggggccatgatcgagcacgttgactacagtggaatgcgccctttggatagggcagtggggtgcccgaacacttctgttgttgtcactcttctgaagaaaaggagccaagataggttgtcagacgttncgagtcgcccncgaggtccagccacatgggcgatggccccntccaagccagacatcatgatcatcctgttgagcaagttgatgaaagagggggacatgttttataagaaaggtaaagtaaaggaagctgcccagcgctaccagtacgccctgaagaagttccctagagaagggtttggtgaggacttgaaacctttccgggaactaaaggtgtctctcctcctcaacctctctcggtgtcgcaggaaaatgaacgattttggaatggcggaggaatttgctactaaggccctggagctgaaaccgaaatcttatgaagcttactatgcgagagcaagggcaaaacgcagcagcagacagttcgcagcagccttagaggacctgaacgaggccatcaagctgtgtcccaacaaccgtgagatccagagacttctgctgagagtggaagaagagtgtagacagatgcagcagccacagcagccaccgccgccaccgcagcctcagcagcagttgccggaagaagcagaacctgagccacagcatgaagacatatactctgtacaggatatattcgaggaggagtacctggaacaggatgttgaaaatgtttccattggcctccagacagaggcccggcccagccaggggctcccggtcatccagagcccaccctcctctcccccgcatcgggactcagcctacatctccagctcacctcttggctctcatcaggtttttgacttccggtccagtagttctgtaggctctcccactagacagacctatcagtccacctcacctgccctttctccaactcatcagaactcacattacaggcctagcccaccacacacttccccggctcatcagggaggatcttaccgtttcagcccccctcctgtgggaggacagggcaaagaatacccaagccctcccccttcccctctccggagaggccctcagtatcgggccagccctccagctgaaagtatgagtgtctatagatcccagtctggttcacccgtgcgctatcagcaggaaacaagcgtcagtcagcttcctggcagacccaaatctccattatccaaaatggcccagcggccctaccagatgcctcagctccctgtggcagttccccagcaagggctcaggctacagcctgccaaggcccagattgtgagaagtaaccagcccagcccagccgtccattcaagcaccgtcatccccacaggagcctatggccaagtagcccattcaatggccagtaaataccagtcttcacaaggagacataggagtcagccagagccggttggtttatcaagggtcaattgggggaatcgtaggggatggaaggccggtgcagcatgtccaagccagcctgagtgcaggcgccatctgtcagcatggaggattgaccaaagaggatcttccacagcgaccttcctcagcataccgaggtggcgtgagatacagccagacaccacagatcggacgcagccagtcagcatcctattacccagtctgtcactcaaaactagatctggagcgctcctccagccaactaggttcccctgatgtgtcgcatttaatcagaagacctatcagtgtcaaccctaacgaaatcaaaccgcacccgccaactcccaggccgttgctgcattcccaaagtgtaggccttcgcttctctccatctagcaatagtatctcctccacctccaacctaactccgaccttccggccatcttcttccatccagcaaatggagatcccactgaaacctgcatatgagaggtcatgtgacgagctgtcgccagtgtctccaactcaaggaggttaccccagtgagcccacccgatccaggaccacaccattcatggggatcatagataaaacagcacggactcagcagtacccccacctccaccagcagaatcggacctgggcagtgtcatctgtggacaccgtcctcagtcccacgtctccaggcaacctgcctcagcctgagtccttcagtccaccatcatccatcagcaacattgccttttataacaaaaccaacaatgcacagaatggccatttgctggaggacgattattacagcccccatgggatgctggctaacgggtctcgtggagacctcttggagcgagtcagccaggcctcctcctatcccgacgtgaaggtagctcggactctacctgtggctcaggcataccaggacaacctgtacaggcagctgtcccgagactctcggcaagggcagacatcccctatcaaaccaaagagaccgttcgtggagtctaatgtttaaaagacgttttgttggagtgagacccatatgttttcactgcacattttcaggcttggtttccacattcgaggtagttctctggcttaatttctcatgtagtttctgtgtggtgttcagaggtggcagcccacatgctgaaatcctttgcatgcagccgactgggaagcggcctcccgggagccaggacttcagtttctcttgtctgtgcccagccacatgctctctccctctcttcagatgccaacgaggagattttcgtgctgtgtgctttaacccagggagatcagacacactggtcagctttttccaggagacaatcgctttcactgatgttcttgttgtgtaattgtctttttccttttttaaaaaataaggtgttcttgttcgttttcttccaaaaaaaaaaaaaaa

SEQ ID NO: 2950 - DNA, 3125 bp, Homo Sapiens
gcccagttggagccagacagcggggtggacaagtggcgtgtgtgctgcgaccccgagggaagatgaacgggacgcggaactggtgtaccctggtggacgtgcacccagaggaccaggcggcgggcagcgtggacattctcaggctgactctccagggtgaactgacaggagatgaacttgaacacatagcccagaaggcgggcaggaagacctatgccatggtgtccagccactcagctggtcattctctggcttcagaactggtggagtcccatgatggacatgaggagatcattaaggtgtacttgaaggggaggtctggagacaagatgattcacgagaagaatattaaccagctgaagagtgaggtccagtacatccaggaggccaggaactgcctacagaagctccgggaggatataagtagcaagcttgacaggaacctaggagattctctccatcgacaggagatacaggtggtgctagaaaagccaaatggctttagtcagagtcccacagccctgtacagcagcccacctgaggtggacacctgtataaatgaggatgttgagagcttgaggaagacggtgcaggacttgctggccaagcttcaggaggccaagcggcaacaccagtcagactgtgtggcttttgaggtcacactcagccggtaccagagggaagcagaacaaagtaatgtggcccttcagagagaggaggacagagtggagcagaaagaggcagaagtcggagagctgcagaggcgcttgctagggatggagacggagcatcaggccttactggcgaaagtgagggaaggggaggtggccctagaggaacttcggagcaacaatgctgactgccaagcagaacgagaaaaggctgctaccctggaaaaggaagtggccgggttgcgggagaagatccaccacttggatgacatgctcaagagccagcagcggaaagtccggcaaatgatagagcagctccagaattcaaaagctgtgatccagtcaaaggacgccaccatccaggagctcaaggagaaaatcgcctatctggaggcagagaatttagagatgcatgaccggatggaacacctgatagaaaaacaaatcagtcatggcaacttcagcacccaggcccgggccaagacagagaacccgggcagtattaggatatccaagccgcctagcccgaagcccatgcctgtcatccgagtggtggaaacctgagctgcctggagatggttgctgccattgctgctgcctctgcctcggagaagcccactgcccctgttggctgttaacactgcctttgacttcctgactgtcccctggctgcacccaggacttcgggctcctgtgtctcaccattcccaagcccctggccactctaagctgggcagacggagcacgagcacctattcaaggcactgcagccctttggaagacattgtcctgcaagcaggagccagggcaatatctatattcctacagtgactatttttctctgtagagagcctcccttctgttgtagactggactctggctgcgccataagccaggccttcatcagattgggagaggtgacaagatttgcctcagccctaaaagctggagacacagatgtccagagtgattggagaatgtcctgggggaatgaagttccttccacaaacacagctcagttcttagcaacaaactgtttgtttttctacttgctccatctgcagcctacgctgccctggcctcctgcagacagatagtggggttacctggcaaggcctggtgagagccagtgaacctaagctttgactgggtggccttgtctttctggggaggagggaatgtacattcagggagtagccttttgcggaaaaattctctagggctacagacagtcatgtgtgacttctctctgctgtgaaaactcccagagtctctttagggattttccctaaggtgtaccaccaggcacacctcagtcttcttgacccagagcctgaaaactgttttcactgggttccaccagtcccagcaaaatcctctttgtatttattttgctaagttattggtggttttgcttacatctcatgattgatataataccaaagttctatagccttctcttgcagtatttggatttgcttgaaaccgggaaaactgttcccattaggcttgttaatgtcagagtgacactattatgaatctttctctccctttcctctgcctgtttcttctctctttctccttcaaacttgctctgcagctaaggaaggtgagtctactttccctgaggctttggggtcagagtatatgttgtttggagaaagagggcaatcaggactcttctgggacccagatgagttcttcactagcccttctgaaccccttgctccataattggtcttttatcctggctctgaatgaccctgcaggtcatcatggttttctttttttattgtttttttttttctgagacagagtctcactctgtcacccaggctggagtgcagtagcgcgatctcagctcactgcaacctctgcctcccggatttaagcgattcttctgcctcagcctcccgagtagctgggactacaggtgtgccaccacgcctggctgatttttgtatttttagtagagatggggtttcaccatactggctaggctggtctcgaattcctgacctcaggtgatccacccacctcggcttcccaaagtgctaggattataggcttgagctactgtgcccggcccatggtgtttttctttagggctcttcctacagccttgagaagtagataggcatcagagtatggtactataggaatcagaaaaattcaaaacaaatgtggattaagtgtttaggctctatgtggctcacgcagccagaatccttaagtctgtgtgtttctgtgtctcaagactgggctcacattctggctttgtccataacaatgctctgggatttcagggagttccctcatttgtaaaatgagggggtcagagcaggtgatatccatgtttcttccctttctgatattgttgtctgtggcatattctttgtatggcgaatttaataaattatattaatgtgtctctttgaaaaaaaaaaaaaaaaa

SEQ ID NO: 2951 - DNA, 609 bp, Homo Sapiens
acatgagaggtatgattggtggtggatttttccgtggatctatcaattcacaattcgaatttggaagaaagaaggaaaacatgacgtctccagccaaattcaaaaaggataaggagatcatagcagagtacgatactcaggtcaaagagatccgtgctcagctcacagagcagatgaaatgcctggaccagcagtgtgagcttcgggtgcaactgttgcaggacctccaggacttcttccgaaagaaggcagagattgagatggactactcccgcaacctggagaagctggcagaacacttcctggccaagacacgcagcaccaaggaccagcaattcaagaaggatcagaatgttctctctccagtcaactgctggaatctcctcttaaaccaggtgaagtgggaaagcagggaccataccaccctgagtgacatctacctgaataatatcattcctcgatttgtacaagtcagcgaggactcaggaagactctttaaaaagagtaaagaagtcggccagcagctccaagatgatttgatgaaggtcctgaacgagctctattcggtcatgaagacctatcacatgtacaatgccgacagcatcagtg

SEQ ID NO: 2952 - DNA, 436 bp, Homo Sapiens
ttttttttttttaaaatgaaatcctttatttactttgtaactactagttacacttttcctgagagatttcactctgacatgactgtcacacaagataaaagtatttggcacatagctattaaggcaaaggcttccatggagcctactgattattatcgttttccttttaaaaactgcttgatgaagaaatacttggatcttactttttaaaagtttaccctccccacagcccaaatagtcattcaatagattttccaagtggtaagctgatgctgttggcataaacagagctatgtaaatatatacaaaattcacaaatcacagcaaacatacaaataatgaggaggtgcctggatgtttcaaggcttaaaaatgaaaaggaaaattacatttcatcttctgattgctaaagacagaaaagaagtaaagaggggga

SEQ ID NO: 2953 - DNA, 418 bp, Homo Sapiens
tttttttttctttataggacttggacaggggtgttataattcattatgctatctatggcctgtttttaactgactgcccatagctccactagtttctataaacctagctagaaactataaaaaaatgctttggtttaaagaatgattcaaggattctggcaaaatggaaaggtacttctgataaaattgcaccaaaactacaaattaagaatctttttaactttagtggctaactttacaattacatgtacagaatcactccttttctagcagtcttgaggggtggggagactggagggagatatcactctcttttttaggtggagggtaaaagagagagcaccactgaaagccaaggttttagatacgaaccacatactggtagatcaagagctttgagtgagatgtataagaaagt

SEQ ID NO: 2954 - DNA, 2962 bp, Homo Sapiens
gggactgaaccgagaggtgccgaaggaaccggcgggccgcttgatcccgctgcagacgtaggagatgcctgggacaaggaggccaccttctcagggcaaaagaaaaagaaggtgacaggcgttgagaccaccgaagggaacccatggctaggatcagtttttcctacctctgcccagcctcctggtacttcactgtgcccacagtgagtccatttctccgtcagcgggtggcattcctgggactcttcttcatatcctgtctccttttacttatgttaatcatagactttcgacattggagtgcttcattaccacgagataggcaatacgaaaggtatttggctcgagtaggggagcttgaagctactgacactgaagacccaaatctgaattatggacttgttgttgactgtggcagcagtggttcccggatttttgtttatttctggccaagacataatgggaacccccatgacttgctggacatcaaacagatgagagaccgcaacagccaaccagtggttaaaaaaatcaagccaggaatctctgcaatggcagacactccagaacatgccagtgattaccttcgtcctctgctgagctttgctgctgctcatgtgcctgtgaagaagcacaaggagacccctctttacatcctctgcacagcaggcatgaggcttctccctgagaggaagcagttggctatcttggctgacctagtgaaagatttacccctggagtttgacttcctcttttcacagtctcaagcagaagtgatctctgggaagcaggaaggggtttatgcatggattggaatcaactttgttttgggaagattcgaccacgaggatgaatcagatgctgaggctacccaggaattggcagcaggacggagaaggacagtagggatactggatatgggaggagcctctctccaaattgcttatgaagttcctacctcaacctctgtccttcctgcaaagcaggaagaagctgccaagatcctgctggctgagttcaacctgggctgtgatgtgcaacacactgaacacgtgtacagggtttatgtcacaacttttctgggtttcggaggcaactttgcccggcagcgctacgaagaccttgttctgaatgaaactcttaacaaaaacagattgcttggtcagaagacaggtctgagtcccgacaatccatttctggatccctgcctgccagtgggactcacagatgtggtggagaggaacagccaagtcttacatgtccgaggaagaggagactgggtgtcttgtggggcaatgctgagccccctgctggctcgctccaacaccagccaggcctcactcaatggcatatatcaatcgcctattgacttcaacaacagcgagttctacggcttctctgagtttttttattgtacagaggatgtgttgcgcattggtggccgctaccatgggccaacatttgccaaggctgctcaggattactgtggcatggcttggtcggtactaactcagagattcaagaatggcctcttttcatcacatgcagatgagcatcgactcaaatatcagtgttttaaatcggcttggatgtaccaagtcttacatgaaggattccactttccctatgactacccaaacctgcggacagcccagctggtgtatgaccgagaggttcagtggacgctgggagccattctatataaaacacgattcttaccactcagggatcttcggcaggaaggtgtccgacaagcccatggtagctggttccgtctctcctttgtatacaaccactatctcttctttgcctgtatcctggtggtgctactggccatcttcctataccttctgcggctacgccgaattcaccaccgacaaacacgagcctcagctccattggacttgctgtggcttgaagaggtggtgcccatgatgggagtacaggtggggccgtgaggctggaccaggactagagaagcttgagcacccccgagttgctgctcattgaattcctccactttcttatatagcctcagatgctgtgataattccttctccgtacccaggtcttctctgagagaagctataatttaatctgtgaggaactaaatgacaggagattggtgctaatacgggggaccaagctttgtccaagtgaagcaggcttcgactccttctgagaggtctggtgtgttcctagaatctcaccttttcttcccttgctaaagcatgaagtttggcatttggcacactggaagcctggttgaaatgaaatttgtagcatctgatacaaagccagagacattctagcaagtgcagcagccccttctttctctgtaacagagatatcatttatgtggagatccacaacctttaacagggatccaagatctttgcagttcaatcgaccacataggaatttccaggcaccaaaatgatataacttccttgcttccttgacaaagaagccatcatgggtgtgatccaagatccctgtcgtagtgttgatgatgttagtacatgattttaaaggttagaaccccttctaaatgaatggtctgtggaagattttagtatcttatctgatgcctggtatgatgaggatagaaaatttttccatttttatgtgcctcacaggctgtttgggcattaattttgctttttgagccttaagtgtgttagtaggatggagaaactgtgatgggggactgggaacctggattgtctgattttaggtcactgttccctgggcctgtttttgtgagcccttacacaggaagatataaagagagttctttcatttccctgctaaaatcagtatgtagtatggggaatgtatttgggttgtttttaaagaaaaggggaacagaatcaggagagtgggcaaaggcaataaaatcaaagtttttattaattatttttgagaaaaaaaaaaaaaaaaaaaaaaaaaacaaaaaaaa

SEQ ID NO: 2955 - DNA, 448 bp, Homo Sapiens
  misc_feature (195)..(195): n is a, c, g, or t
  misc_feature (347)..(347): n is a, c, g, or t
  misc_feature (401)..(401): n is a, c, g, or t
  misc_feature (410)..(410): n is a, c, g, or t
  misc_feature (433)..(433): n is a, c, g, or t
atagtctcagatattcaacttgtttgtcttagatttgcttaaaccccaaacaatctgtgtttaatgtttttggtgtcccactgctttgcaagcagacataccacttgcaaatgtgccagccctttgtgcaaacacccaaaaggctacatcagatccaaaagctctggctcacaagggggccagcaggtggagagncgaagaatcagccatgagtgtgtgcctttcggcctgctaagaaggaagacagtggcataaagagagtattatggttccaggcacaacttcagtctgtccaagaggctctatcgttaacggagaatacagagattacattcagtttacccgantttctacaagctttctggtaatgctcaaaaggtttaaggtgcacttatctggtncatcccttncactttccctttttgaaatgaantcccctttggtaata

SEQ ID NO: 2956 - DNA, 388 bp, Homo Sapiens
tttttttctcccagtcatttgattttattgtgtttttactaagcatttttattatcttcatgtagtcaaatgtgtcaatattttgttgccactggatatttccaccacgtttccttctgtatttatatggcttcattttcttacatttggatcctggatccagatggagttcattcttgcatatggtgtgaagtacaggtctaacttcaactttctccaaggggctttccagttggctcagcaccatttattaaagtctgctttgacctgcgattgaagatgccacctttaactcctcatcccccacccctaagaaacctcacggaacatatgacccaagagcagagcagacataaaaagattaactgagctactgagattcggtcaa

SEQ ID NO: 2957 - DNA, 305 bp, Homo Sapiens
ttttttttttctcttctcagtagagagcctccaatcaggattaaggtcatcatagcctggctgctcattttgaccccattccccttgttgcttcagagatggaatcgcccagatgctcagtttccctgagaagtgaatggctgccaggagcatcccatctggagaaaggctcatcttaaaaattccatcctgttcttgtccctggcgactgtaaaacttgacacttaacatccttaataatcccagtgtcttcggtactgcagtaaccccgtctccaccattagtaacctgcttataatacggtg

SEQ ID NO: 2958 - DNA, 492 bp, Homo Sapiens
gagattgtctttttgagtttagtagaatataaactgacgacaaaagactgacaggcaccaaataagtagagtgtaaaacaacaacaaaaaaaagaaagataaattcaggtaatgatattcaagcagtatgactgcataagattgcataagaaagaatacatttccaaatccaaaacaatatcatcctgttgtattatatgcatatattgaatacaataacaaaagtatcaagagttcttattaaagcacccattatcatttatgtaaaatattgcaagactttaaagtcacagaacaaaacatattttttccccattatcttttttgagatgatcacatttcttcacactttgtgaactgcgtagttaagatggagcaatgatttgaactatttgcaaatgcagttccttccccactctttatatactgtttgggccatgaatctatggaaagaggtgttttacaagaacgaaagtcacatcattcaggact

SEQ ID NO: 2959 - DNA, 8624 bp, Homo Sapiens
gtaaaaatgatgccaactgtgattgtttttctggagacgatggttatgccaaggatgcaaagttaaataccccatcttccttggctgtgtgtgctgatggggagctctacgtggccgaccttgggaacatccgaattcggtttatccggaagaacaagcctttcctcaacacccagaacatgtatgagctgtcttcaccaattgaccaggagctctatctgtttgataccaccggcaagcacctgtacacccaaagcctgcccacaggagactacctgtacaacttcacctacactggggacggcgacatcacactcatcacagacaacaatggcaacatggtaaatgtccgccgagactctactgggatgcccctctggctggtggtcccagatggccaggtgtactgggtgaccatgggcaccaacagtgcactcaagagtgtgaccacacaaggacacgagttggccatgatgacataccatggcaattccggccttctggcaaccaaaagcaatgaaaacggatggacaacattttatgacaacctcagatggcaggaattatcatccacattttttacatatgaagtacagagagattagataacaagcctgaaaccacacggtacgacagctttggccgcctgacaaatgtgaccttccctactggccaggtgagcagtttccgaagtgatacagacagttcagtgcatgtccaggtagagacctccagcaaggatgatgtcaccataaccaccaacctgtctgcctcaggcgccttctacacactgctgcaagaccaagtccggaacagctactacatcggggccgatggctccttgcggctgctgctggccaacggcatggaggtggcgctgcagactgagccccacttgctggctggcaccgtcaaccccaccgtgggcaagaggaatgtcacgctgcccatcgacaacggcctcaacctggtggagtggcgccagcgcaaagagcaggctcggggccaggtcactgtctttgggcgccggctgcgggttcacaaccgaaatctcctatctctggactttgatcgcgtaacacgcacagagaagatctatgatgaccaccgcaagttcacccttcggattctgtacgaccaggcggggcggcccagcctctggtcacccagcagcaggctgaatggtgtcaacgtgacatactcccctgggggttacattgctggcatccagaggggcatcatgtctgaaagaatggaatacgaccaggcgggccgcatcacatccaggatcttcgctgatgggaagacatggagctacacatacttagagaagtccatggtgctgctactacacagccagaggcagtatatctttgagttcgacaagaatgaccgcctctcttctgtgacgatgcccaacgtggcgcggcagacactagagaccatccgctcagtgggctactacagaaacatctatcagccccctgagggcaatgcctcagtcatacaggacttcactgaggatgggcacctccttcacaccttctacctgggcactggccgcagggtgatatacaagtatggcaaactgtcaaagctggcagagacgctctatgacaccaccaaggtcagtttcacctatgacgagacggcaggcatgctgaagaccatcaacctacagaatgagggcttcacctgcaccatccgctaccgtcagattgggcccctgattgaccgacagatcttccgcttcactgaggaaggcatggtcaacgcccgttttgactacaactatgacaacagcttccgggtgaccagcatgcaggctgtgatcaacgagaccccactgcccattgatctctatcgctatgatgatgtgtcaggcaagacagagcagtttgggaagtttggtgtcatttactatgacattaaccagatcatcaccacagctgtcatgacccacaccaagcattttgatgcatatggcaggatgaaggaagtgcagtatgagatcttccgctcgctcatgtactggatgaccgtccagtatgataacatggggcgagtagtgaagaaggagctgaaggtaggaccctacgccaataccactcgctactcctatgagtatgatgctgacggccagctgcagacagtctccatcaatgacaagccactctggcgctacagctacgacctcaatgggaacctgcacttactgagccctgggaacagtgcacggctcacaccactacggtatgacatccgcgaccgcatcactcggctgggtgacgtgcaatacaagatggatgaggatggcttcctgaggcagcggggcggtgatatctttgagtacaactcagctggcctgctcatcaaggcctacaaccgggctggcagctggagtgtcaggtaccgctacgatggcctggggcggcgcgtgtccagcaagagcagccacagccaccacctgcagttcttctatgcagacctgaccaaccccaccaaggtcacccacctgtacaaccactccagctctgagatcacctccctctactacgacttgcaaggacacctctttgccatggagctgagcagtggtgatgagttttacatagcttgtgacaacatcgggacccctcttgctgtctttagtggaacaggtttgatgatcaagcaaatcctgtacacagcctatggggagatctacatggataccaaccccaactttcagatcatcataggctaccatggtggcctctatgatccactcaccaagcttgtccacatgggccggcgagattatgatgtgctggccggacgctggactagcccagaccacgagctgtggaagcaccttagtagcagcaacgtcatgccttttaatctctatatgttcaaaaacaacaaccccatcagcaactcccaggacatcaagtgcttcatgacagatgttaacagctggctgctcacctttggattccagctacacaacgtgatccctggttatcccaaaccagacatggatgccatggaaccctcctacgagcttatccacacacagatgaaaacgcaggagtgggacaacagcaagtctatcctcggggtacagtgtgaagtacagaagcagctcaaggcctttgtcaccttagaacggtttgaccagctctatggctccacaatcaccagctgccagcaggctccaaagaccaagaagtttgcatccagcggctcagtctttggcaagggggtcaagtttgccttgaaggatggccgagtgaccacagacatcatcagtgtggccaatgaggatgggcgaagggttgctgccatcttgaaccatgcccactacctagagaacctgcacttcaccattgatggggtggatacccattactttgtgaaaccaggaccttcagaaggtgacctggccatcctgggcctcagtggggggcggcgaaccctggagaatggggtcaacgtcactgtgtcccagatcaacacagtacttaatggcaggactagacgctacacagacatccagctccagtacggggcactgtgcttgaacacacgctacgggacaacgttggatgaggagaaggcacgggtcctggagctggcccggcagagagccgtgcgccaagcgtgggcccgcgagcagcagagactgcgggaaggggaggaaggcctgcgggcctggacagagggggagaagcagcaggtgctgagcacagggcgggtgcaaggctacgacggctttttcgtgatctctgtcgagcagtacccagaactgtcagacagcgccaacaacatccacttcatgagacagagcgagatgggccggaggtgacagagaggaccaaggacttcttgccaaagacagctactcttttgtggccgcatacctgactgtgttgtacttttaaaaaaatgattttttaacaagtgcagaaacaaaaagatactggttgcattgtaactcatgcaacatccttttttttagaaaagaaaaacacagatttggccttcgcacattttttgcaaagaacagaaggtatttttttctgtagtgtgatcacaatgaaaactttattgtcttttgttccctttttccttgaggatttttcccttgtcgtttggggtatgtatctcctctctgagatgcatctcctggggtgtgtcctcgtctgtccctaggtacccagtgtgatgtgggacatgaatgtctgtgctaacttgtctcatgtgcaaccctttcttcttcgactggggtcgggcaggagtaaagggagtgatgggccagtacaacaccccttccaagggggcctgggaggagggtctgtaggacctgaggctccttggcagggctcctgcagaagagtggtggatttcttctcaccttgttctctgcctccagaggatcatagatggcttcatcttgctccagggaatttcatggtgttgttcagcaccttttttaagctgccccaaactcctgttcaagctttctattttgatgctgaatgaaaccccctaccacttttgcaaatcctgtgtagttgtcggtgccacccccatgctgggatagagaaagtgtctcccaggtcctttcccccagaccagtgacataacatcctgggctcagagtcccatcctcccgggagggaaagcacccaggatgcctgtgattggttggtcctccatgatgttcctgttcatctcctcctttctcccaaagccagatgtgagaacgagcactgcacagcaagccttcaatgtgggcaccatgtccacagaacagaaggccacccatggcaaaggcatggcagtggtggcgagggcaccagcctgccttccgaggcaaagccctctctctatgactttgagtatcttccctccaccactcagccgccaccactgagacgtaggaatgtggagggaggtgcttggtggcctttgattctggaaaaatgcttaacaaaaaaagccagccaaagagaggaaggcataagctaagcatccttctaaccagttcccaaagtcccatctgcctccatgtaccagctgatcgcagagctggactggggcaggctgggcttccaggaaattcctgaagttctgaaacagcttcccctctagagaagcccacccaatgtgttttttagtgacaggaagaaaggagggaagagctgatgtggtgtggcctgcccatatcatacaaccccaccaggagcagggcagttcccaaggtgggtgcccgtagatctgggaggccaggctggcatgattcctgtgaagaactgtgcctgtgtcgtcagggagaggcctgagccctctcagaagcagggacagcccacacctgaagagcacgcccaagctgaggcagcagccagcaggctgggggagcagtgagggcagggggagtcacagccagagctgggagccccttgttcaaggattccattcctggttcatccgcctaattaccattgtcattaccactcacaggaggctctgggagatgggaggggaagccaaatgcttccttttaagctgggcttcttagaaaatggaacttttatgggttacatttacattaagtgtggaaaatgaattctgagtctgagctattccccgtggaaaccttgttggactgataagctcatggcacctctatagccttactcacatagtcttcagaatattacacaagttaatgaaactgagaaggtctgactgcatgaggatcggagcagcatgtagtctgggttctgcctggcagagggaggcaaccaaaacttcttggggagaggagatttcgccttaacgtcatcccactgggattagaggatgtgtttcgctaagtgctcttcctgtttccaaaaaaaaagccaccctgctgcagcagtgcgctttggcctgcttgtccactggttgcccattgcccctggatccagagctctactgagtcagatacagtgctctgcaggcctgctgtgggaggcatgagctggagatgggggctcccatctggcaggatcattcttggatgagatggaaaacagtttggcctgaagaacacaagttttgtcctccagaagggacttacgcctctcaaaatgtactcttcataccaagggcccttgggcaaagtgctcctgcccagttgatcagtcccatcctggctgcctgacatcagtgaagacctgctggggatgtctgctcagaggtcaggaacggcatgcggtccacaggaaccagctccctacgcttcccccacgccctgtccctcctccacagccccctccccaaaggaatagggtggacttttagggatcaaaaacagaattattgggtgtttcatttctttttttctttctttcttttttttttcatagagatggggtctcactatgttgcccaggctgttctcaaactcctggcctcaggcgatccaccttggcctcctgaagtgctggggttacaggtgtgagccactgcgcctggactgagtgtttgtttctttaaaggatcttatatttttcctgtgctacataccaccacagcagcccagcttctgtggggagagaagttgaaggatcccgaagctttagaaaaaggatctcagctgtggcacaggcagtgttatgcgcctcactgccacattggtgctgttgtattgaaggtggtgcttctggccttggcccttttgagttggtttccatttgggctgcaggtgactcagtgactccctcctcaagctgtcctcctgctaagaccagcagtcacaaacccatggcaagggtgagtgtgaaggcctaaccctgtgcctatgtaataggctccaagcatcgactcccatcctgagaggaccggcccttttgacactcaccaaccaaatctgttcattcgatagagtgaccaggcctccctcacctgcccaggtgtatgatcctacagttcctgccttctctcctaccccgcacagctgccaactggtcctacatcctcagcccctctgccaccaccttaaataggactttactgattccccaactttgtttttttgtaggatgagatttcctttttatcccacccccccacaccccaaacagacattgctggagggcagactggaggaaggggaaggcatgcaggtaaattactgccttgtcagcctctgaccctcatctctcagaattgttggctgagaattaacccaaggaccacaccagtgcctgatttctacttagggagagaggattggaaacgatccctaagaaactgactgagggtgagaatggccaggaggtgtgtgtccaaataaccaggagggggcacagaagatgatggcaaggcagactgggcagtgttttgtagacacagaacaaagaatcagaatttgaaaaaagaagaaaaacaaatcttcgcagctgcaactttaaagtatcacctttatagatggcagggatttccattatgcaaatggaatctaagatttcaatgtgaaatcttagaatgcagttttaccacttgcagtcttgtatttgtggtggccatgtggtgagggcggtgatgctgagctttctgcccaggaggaatgagctttcaagctctcagcagggtgtcaggcttggggatttgagcatccactgctcaaagtccaggctattctccagtcctcacggcagccactaagcccaggagccagacctggcccagggacacatctcctgagggatcccagaaagaacccagtctttcctttcccttggggtccttgttagaatgaaaacctctctatttaaggcacatcattcccagctaggtttatacacttgtctatattttactggaggaaagggaattaaaaaagaactctgcagttcaaggccctttcatttaaccttccaaaaacagcaaactcattttaaagactcattgctgaggtgatagagagaaaccttatcctctccaacctttacattcacaaaaaccatccttgtgtacttgactgccctagacagtggtgactcttaggtttcattacgaatgtggaatatcagagtgtgggaaggcccaggcgagggccaatgttgtgtttcttaccccctctggaatgccaaaggcaaggtactaggtgacctcctggtccccaagaaaatgtgatttattctgagggcgaacagccaagggaggactagtctggagcacgctcggccgtcctggcaggagctgagcctcaggtgtctggcggtgccccagcagccctggattcacccaacaccagaatcccacttttctaaatccacctgttgttctgagcacctctgaacccgcagcttcggcaaaaggagtctgtaccaagctgcttctggatgaccaacactggagactctggccttaccatgtggaaatcattttcctgaagtctggaaccaattttgagaagtttttttctcaacacttttgtgtttctaacactgtatcttgactgtgtaaataccaacaaggctgtaaataaatgcagatgtagataccttctagaaaaaaaaaagcataaaaacaaaaccagaagtgatcccgtgtagccttcgttgacaaataaagactattttgtgttt

SEQ ID NO: 2960 - DNA, 4391 bp, Homo Sapiens
ccccacgccaccccaagcatcccaggactcttctgaaacagggcagtgacccgggaggaagtcaccaggtgcagaggaccgtgccctgtggggacctgcctgcaggctgctgacagactccgggctaccagatcggccgtccagctggaatcaaccgatggaggctccgctgcaaactggaatggtgcttggcgtgatgatcggggccggagtggcggtggtggtcacggccgtgctcatcctcctggtggtgcggaggctgcgagtgccaaaaaccccagccccggatggcccccggtatcggttccggaagagggacaaagtgctcttctatggccggaagattatgcggaaggtgtcacaatccacctcctccctcgtggatacctctgtctccgccacctcccggccacgcatgaggaagaaactgaagatgctcaacattgccaagaagatcctgcgcatccagaaagagacgcccacgctgcagcggaaggagcccccgcccgcagtgctagaagctgacctgaccgagggcgacctggctaactcccatctgccctctgaagtgctttatatgctcaagaacgtccgggtgctgggccacttcgagaagccactcttcctggagctctgccgccacatggtcttccagcggctgggccagggtgactacgtcttccggccgggccagccagatgccagcatctacgtggtgcaggacgggctgctggagctctgtctgccagggcctgacgggaaggagtgtgtggtgaaggaagtggttcctggggacagcgtcaacagccttctcagcatcctggatgtcatcaccggtcaccagcatccccagcggaccgtgtctgcccgggcggcccgggactccacggtgctgcgcctgccggtggaagcattctccgcggtcttcaccaagtacccggagagcttggtgcgggtcgtgcagatcatcatggtgcggctgcagcgagtcaccttcctggcactgcacaactacctgggtctgaccaatgagctcttcagccacgagatccagcccctgcgtctgttccccagccccggcctcccaactcgcaccagccctgtgcggggctccaagagaatggtcagcacctcagctacagacgagcccagggagaccccagggcggccacccgatcccaccggggccccgctgcctggacctacaggggaccctgtgaagcccacatccctggaaaccccctcggcccctctgctgagccgctgcgtctccatgccaggggacatctcaggcttgcagggtggcccccgctccgacttcgacatggcctatgagcgtggccggatctccgtgtccctgcaggaagaggcctccggggggtccctggcagcccccgctcggacccccactcaggagcctcgtgagcagccggcaggcgcctgtgaatacagctactgtgaggatgagtcggccactggtggctgccctttcgggccctaccagggccgccagaccagcagcatcttcgaggcagcaaagcaggagctggccaagctgatgcggattgaggacccctccctcctgaacagcagagtcttgctgcaccacgccaaagctggcaccatcattgcccgccagggagaccaggacgtgagcctgcacttcgtgctctggggctgcctgcacgtgtaccagcgcatgatcgacaaggcggaggacgtgtgcctgttcgtagcgcagcccggggaactggtggggcagctggcggtgctcactggcgaacctctcatcttcacactgcgagcccaacgcgactgcaccttcctgcggatctccaagtccgacttctatgagatcatgcgcgcacagcccagtgtggtgctgagtgcggcgcacacggtggcagccaggatgtcgcccttcgtgcgccagatggacttcgccatcgactggactgcagtggaggcgggacgcgcgctgtacaggcagggcgaccgctccgactgcacttacatcgtgctcaatgggcggctgcgtagcgtgatccagcgaggcagtggcaagaaggagctggtgggcgagtacggccgcggcgacctcatcggcgtggtggaggcactgacccggcagccgcgagccacgacggtgcacgcggtgcgcgacacggagctagccaagcttcccgagggcaccttgggtcacatcaaacgccggtacccgcaggtcgtgacccgccttatccacctactgagccagaaaattctagggaatttgcagcagctgcaaggacccttcccagcaggctctgggttgggtgtgcccccacactcggaactcaccaacccagccagcaacctggcaactgtggcaatcctgcctgtgtgtgctgaggtccccatggtggccttcacgctggagctgcagcacgccctgcaggccatcggtccgacgctactccttaacagtgacatcatccgggcacgcctgggggcctccgcactggatagcatccaagagttccggctgtcagggtggctggcccagcaggaggatgcacaccgtatcgtactctaccagacggacgcctcgctgacgccctggaccgtgcgctgcctgcgacaggccgactgcatcctcattgtgggcctgggggaccaggagcctaccctcggccagctggagcagatgctggagaacacggctgtgcgcgcccttaagcagctagtcctgctccaccgagaggagggtgcgggccccacgcgcaccgtggagtggctaaatatgcgcagctggtgctcggggcacctgcacctgcgctgtccgcgccgcctcttttcgcgccgcagccctgccaagctgcatgagctctacgagaaggttttctccaggcgcgcggaccggcacagcgacttctcccgcttggcgagggtgctcacggggaacaccattgcccttgtgctaggcgggggcggggccaggggctgctcgcacatcggagtactaaaggcattagaggaggcgggggtccccgtggacctggtgggcggcacgtccattggctctttcatcggagcgttgtacgcggaggagcgcagcgccagccgcacgaagcagcgggcccgggagtgggccaagagcatgacttcggtgctggaacctgtgttggacctcacgtacccagtcacctccatgttcactgggtctgcctttaaccgcagcatccatcgggtcttccaggataagcagattgaggacctgtggctgccttacttcaacgtgaccacagatatcaccgcctcagccatgcgagtccacaaagatggctccctgtggcggtacgtgcgcgccagcatgacgctgtcgggctacctgcccccgctgtgcgaccccaaggacgggcacctactcatggatggcggctacatcaacaatctgccagcggacatcgcccgcagcatgggtgccaaaacggtcatcgccattgacgtggggagccaggatgagacggacctcagcacctacggggacagcctgtccggctggtggctgctgtggaagcggctgaatccctgggctgacaaggtaaaggttccagacatggctgaaatccagtcccgcctggcctacgtgtcctgtgtgcggcagctagaggttgtcaagtccagctcctactgcgagtacctgcgcccgcccatcgactgcttcaagaccatggactttgggaagttcgaccagatctatgatgtgggctaccagtacgggaaggcggtgtttggaggctggagccgtggcaacgtcattgagaaaatgctcacagaccggcggtctacagaccttaatgagagccgccgtgcagacgtgcttgccttcccaagctctggcttcactgacttggcagagattgtgtcccggattgagccccccacgagctatgtctctgatggctgtgctgacggagaggagtcagattgtctgacagagtatgaggaggacgccggacccgactgctcgagggatgaaggggggtcccccgagggcgcaagtcccagcactgcctccgagatggaggaggagaagtcgattctccggcaacgacgctgtctgccccaggagccgcccggctcagccacagatgcctgaggacctcgacaggggtcaccccctccctcccacccctggactgggctgggggtggccccgtgggggtagctcactccccctcctgctgctatgcctgtgacccccgcggcccacacactggactgacctgccctgagcggggatgcagtgttgcactgatgacttgaccagcccctcccccaataaactcgcctcttggaaaaaaaaaaaaaaaaaaaaaaaaaaaaaaaaaaaaaaaaaaaaaaaaaaa

SEQ ID NO: 2961 - DNA, 395 bp, Homo Sapiens
aagattgactaagtaaccacctggaagttccacataaattactatgattaacttcctgataaggatgaaattttccaccctctactcagacaatttctcatggccagaaaaaaaatgattatttttgccacatctgaagtcttcagtggactttaaaaagctgctctttttttctttctccctcacccaaggtttagattacaataagttaagagacctagttgcagccatcactggggcatttatgcttcctagcttcacctccctgttttgagatgtttacgcagtctaattcctcctaaaatcatcagagatgtagcattgttaagaagttaacagtgccttcaattaaacataggaatatgtgggtcaaaatttcccacatagcacaagca

SEQ ID NO: 2962 - DNA, 919 bp, Homo Sapiens
aacttgctctgcaaaataacaacccaggatcagattttccccttcctcatgctctgtcagctgcagagaaggatgcacacactgtggcaggagcacttcaaactggtggtcctcttcagccagatgaggctggccaacttccagacagactctcaggagagtattcagaaaatattagctgtgcaggaggaatcttcaaatttaatgcaacacatcttaggtttcttccagactttgacagatggcacatgcgaaaacgatggttaagcaaacaaccaatgtatcttggatgctgaaataaaagacaagaaaagtcacacagttcagataacagtgtaattggacattcacctgtttgccatttcacacttccatgaacgaaaaactcactcacctcccagcatgctttgccactcttttactcacagcaaatccataacaatgaaacaggtgactttcatgctgctgtcaggaacgatctaatttcagctctgggtgactgattgcaattggctttgcctcgtctgataattaatctatgtcaccattaattggaagagagaataattactggcggtgttgacagtgactgttcgcttccccagatttccctatcgtcttggcccaaataaaggctttgccattcagtacttaaagtttgtgtaaactgtaacaatatctatgcccatgtgacactttgagacactctgtctaatgtacttttgtttttgtgtttaccagtcttttttagctcactgagagctgtctctctcaatcactcctcaatgttctatcttaattttgtggaagtttaaagttttcaatgagctggagatgaatgattaatgaataaatttaaatgcttcattttgtccaaaaaaaaaaaaaaaaaaaaaaaaaaaaaaaaaaaaaaaaaaaa

SEQ ID NO: 2963 - DNA, 1013 bp, Homo Sapiens
gaagaccacccggggttaaagaacatactcaacatttaaaagacattatcgggcattaccacttgatataagctgacactgtgggagcagaacttattagtataaacatcactgaagattctttcctcttactgtatttttctaaataacactgatgaactagtgggagcaattttccttcttgtgaagcctatgagtgtcaagtggcacctccaatacaagtaccggggacaaatatgcttggaacagttctttcaccagtcattattgtagagagcggtctatggaactggtttccatattgcaagcaggtccagttccaccactttatagttgaacattacatagtacatggaaaagctttaattgccattgtacagtaagaacaggatgtatgttgagaaaatcaccacacaattatcagaaatgtttgcttggatctggtttcacaggcgccgacagctaaaagtcatcacagaagaatgacttgaaggtaggagcaacataccatccgccagagggccagcgagctttgcacgcaagggataatgctgcaaagactcaccagagccgcgcgatgatcagaagcccagccatgaacgagcacggcaacaatgcgttccagaatacaaagcacgcgtcccaagacaagcagccagagcagggcagcccaagatacaaggggcaaggagcacaaggatcatgggaggaggaaagctcaaagtgccggaacaaccgaggactgaaagagaaatggacgggggtgaggatcagcttcacagagactcattggaacaacagagcgagaaaagacaccgacaccggacaccaagggtactgggtggaagaaaccacaaataagcaatccaggaaagaacattcacgaaacaaacacagataaaagggaacaataaacagagcaaagcacataaaagagagcaaacggactgagacacaagagttagaatcagggaatacaggacaagaagataaaaagagacaaaagcaatgaa

SEQ ID NO: 2964 - DNA, 650 bp, Homo Sapiens
ataaagcgggacaacacagaacttcccagttacaccaggcatcctggcccaaagtttcccaaatccaggcggctagaggcccactgcttcccaactaccagctgagggggtccgtcccgagaagggagaagaggccgaagaggaaacatgaacttctatttactcctagcgagcagcattctgtgtgccttgattgtcttctggaaatatcgccgctttcagagaaacactggcgaaatgtcatcaaattcaactgctcttgcactagtgagaccctcttcttctgggttaattaacagcaaaacagacaacaatcttgcagtctacgacctctctcgggatattttaaataatttcccacactcaatagccaggcagaagcgaatattggtaaacctcagtatggtggaaaacaagctggttgaactggaacatactctacttagcaagggtttcagaggtgcatcacctcaccggaaatccacctaaaagcgtacaggatgtaatgccagtggtggaaatcattaaagacactttgagtagaaaaaaaaaaaaaaaaaaaaaaaaaaaaaaaaaaaaaaaaaaaaaaaaaaaaaaaaaaaaaaaaaaaaaaaaaaaaaaaaaaaaaaaaaaaaaaaaaaaaaaaaaaa

SEQ ID NO: 2965 - DNA, 348 bp, Homo Sapiens
ttttttttttttttttttttttttttttgtagtcagtcaataaatatttattgaatgaacgaataaattaatggaaggtgttccagatcctggtaggcgagagtcagtcggagggagtgcttgttcttggtgcactcacaatggagaatcaaggaattcaccttggacgggctcatttctccctctcctaggccccgtgcagcctcttctcagacttactagttctgaggggctcctggctgcctcacaccaacagcagtggccagtggacactggcgatggtgtcctgacattttggtttgtgaagagtttgtgctccgagtcaaatcctgggaggagtggggaggg

SEQ ID NO: 2966 - DNA, 303 bp, Homo Sapiens
gctcgacggatcctgcccatactcaagggaagcccataatacaagcatatggtcattaggggccatcttagtcactactgttcgtggattgttctccagcttcctggaggagaggagagcaggagacagagctaagagtgtttgtaaaatagggcagtgggaaaaggtaggtcttgtgagtagcaggctacttaagatgcctagtgggtctaaatgtcaaatgctattggcagattttccgtgcaaggtatgaccaaaaaataattatttcattaactttgtgcaaaaaaaaaaaagtcgacg

SEQ ID NO: 2967 - DNA, 3268 bp, Homo Sapiens
aatccaactcacctccatgttcaaggatgtccctctgactgcagaagaggtggaatttgtggtggaaaaagcattgagcatgttctccaagatgaatcttcaagaaataccacctttggtctatcagcttctggttctctcctccaagggaagcagaaagagtgttttggaaggaatcatagccttcttcagtgcactagataagcagcacaatgaggaacagagtggtgacgagctattggatgttgtcactgtgccatcaggtgaacttcgtcatgtggaaggcaccattattctacacattgtgtttgccatcaaattggactatgaactaggcagagaactcgtgaaacacttaaaggtaggacagcaaggagattccaataataacttaagtcccttcagcattgctcttcttctgtctgtaacaagaatacaaagatttcaggaccaggtgcttgatcttttaaagacttcggttgtaaagagctttaaggatcttcaactcctccaaggctcaaaatttcttcagaatctagttcctcatagatcttatgtttcaaccatgatcttggaagtagtgaagaatagcgttcatagctgggaccatgttactcagggcctcgtagaacttggtttcattttgatggattcatatgggccaaagaaggttcttgatggaaaaactattgaaaccagcccaagtctttctagaatgccaaaccagcatgcatgtaagctcggagctaatatcctgttggaaacttttaagatccatgagatgatcagacaagaaattttggagcaggtcctcaacagggttgttaccagagcatcttctcccatcagtcatttcttagacctgctttcaaatatcgtcatgtatgcacccttagttcttcaaagttgttcttctaaagtcacagaagcttttgactatttgtcctttctgccccttcagactgtacaaaggctgcttaaggcagtgcagccccttctcaaagtcagcatgtcaatgagagactgcttgatacttgtccttcggaaagctatgtttgccaaccagcttgatgcccgaaaatctgcagttgctgggtttttgctgctcctgaagaactttaaagttttaggcagcctgtcatcctctcagtgcagtcagtctctcagtgtcagtcaggttcatgtggatgttcacagccattacaattctgtcgccaatgaaactttttgccttgagatcatggatagtttgaggagatgcttaagccagcaagctgatgttcgactcacgctttatgaggggttttatgatgttcttcgaaggaactctcagctggctaattcagtcatgcaaactctgctctcacagttaaaacagttctatgagccaaaacctgatctgctgcctcctctgaaattagaagcttgtattctgacccaaggagataagatctctctacaagaaccactggattatctgctgtgttgtattcagcattgtttggcctggtataagaatacagtcatacccttacagcagggagaggaggaagaggaggaggaagaggcattctacgaagacctagatgatatattggagtccattactaatagaatgattaagagtgagctggaagactttgaactggataaatcagcagatttttctcagagcaccagtattggcataaaaaataatatctctgcttttcttgtgatgggagtttgtgaggttttaatagaatacaatttctccataagtagtttcagtaagaataggtttgaggacattctgagcttatttatgtgttacaaaaaactctctgacattcttaatgaaaaagcgggtaaagccaaaactaaaatggccaacaagacaagtgatagtcttttgtccatgaaatttgtgtccagtcttctcactgctcttttcagagtcttgctatggagatacacttcaattcctacttcagtggaagagtcgggaaagaaagagaaaggaaagagcatctcactgctgtgcttggagggtttacagaaaatattcagtgctgtgcaacagttctatcagcccaagattcagcagtttctcagagctctggatgtcacagataaggaaggagaagagagagaagatgcagatgtcagtgtcactcagagaacagcattccagatccggcaatttcagaggtccttgttgaatttacttagcagtcaagaggaagattttaatagcaaagaagccctcctgctagtcacggttcttaccagtttgtccaagttactggagccctcctctcctcagtttgtgcagatgttatcctggacatcaaagatttgcaaggaaaacagccgggaggatgccttgttttgcaagagcttgatgaacttgctcttcagcctgcatgtttcgtataagagtcctgtcattctgctgcgtgacttgtcccaggatatccacgggcatctgggagatatagaccaggatgtagaggtggagaaaacaaaccactttgcaatagtgaatttgagaacggctgcccccactgtctgtttacttgttctgagtcaggccgagaaggttctagaagaagtggactggctaatcaccaagcttaagggacaagtgagccaagaaaccttatcagaggcctcttctcaggcaaccctaccaaatcagcctgttgagaaagctatcatcatgcaactgggaactctgcttacatttttccacgagctggtgcagacagctctgccatcaggcagctgtgtggacaccttgttaaaggacttgtgcaaaatgtacaccacacttacagcccttgtcagatattatctccaggtgtgtcagagctccggaggaattccaaaaaatatggaaaagctggtgaagctgtctggttctcatctgacccccctgtgttattctttcatttcttacgtacagaataagagtaagagcctgaactatacgggagagaaaaaggagaaacctgctgccgttgccacagccatggccagagttcttcgggaaaccaagccaatccctaacctcatctttgccatagaacagtatgaaaaatttctcatccacctttctaagaagtccaaggtgaacctgatgcagcacatgaagctcagcacctcacgagacttcaagatcaaaggaaacatcctagacatggttcttcgagaggatggcgaagatgaaaatgaagagggcactgcatcagagcatgggggacagaacaaagaaccagccaagaag

SEQ ID NO: 2968 - DNA, 328 bp, Homo Sapiens
  misc_feature (180)..(180): n is a, c, g, or t
  misc_feature (299)..(299): n is a, c, g, or t
  misc_feature (309)..(309): n is a, c, g, or t
ggatcctgggaagcagagtgtctggatggaacctgagctgggtctctgactcacttctgactttagttttttcaagggggaacatggcaaaggtgttcagtttcatccttgttaccaccgctctgataatgggcagggaaatttcggcgctcgaggactgtgcccagggagcagatgcgnctcagagcccagggtgcgcctgctttgagacccgggtcaaacagcaacaggtcaagatcaaagcagctttttgcagggagattgaatccagttcctttgataaagggagatgagattantgtcctttgntctttgggaagcaagagca

SEQ ID NO: 2969 - DNA, 1974 bp, Homo Sapiens
aaactgcacgcgccgagccgggaagcttcgtccagcggtcgtgttgccatgggccggaggagagccccggccggtgggtcgctgggacgggcccttatgcgccatcagactcagcggagccgaagccatcgtcacactgactcctggttgcacacaagtgaactcaatgatggctatgattggggtcgtcttaatcttcagtcagtgactgaacagagctcccttgatgacttccttgctactgcagaacttgcaggaacagagtttgtagctgaaaaacttaatattaagtttgtgcctgctgaggctagaactggactactgtctttcgaggagagccagagaattaagaagctccatgaagaaaacaaacagttcttgtgtataccgaggagaccaaactggaaccaaaatactaccccagaagaactcaaacaagcagagaaagataactttctagaatggagacgtcagcttgtccggctagaagaggaacagaagctgatattgactccatttgaacgaaatttggacttttggcgccagctctggagagtcattgagagaagtgatattgtggtccagatagtagatgctcgaaacccactcctgtttagatgtgaggatttggaatgttatgtgaaagaaatggatgccaataaggagaacgtcattctgatcaacaaggcagacttgctgactgctgagcagcggagtgcctgggccatgtacttcgaaaaagaagatgtgaaggttattttctggtcagctttggccggagccattcccctgaatggtgactctgaggaagaggcaaacagagatgatagacaaagcaacacaactgagtttggacattccagtttcgaccaggctgaaatttcccacagtgaatccgaacatctcccagctagggattctccttcacttagtgaaaatcccacaacggatgaagatgacagtgagtatgaggactgtccagaggaggaggaagacgactggcagacgtgctcagaagaagacggtcccaaggaagaggactgcagccaggactggaaggaaagctctactgcagattctgaggctcggagcaggaaaaccccacagaagaggcagatacacaattttagccatctggtatccaagcaggagttactggagctctttaaggagctacacactgggagaaaggtgaaagatgggcaacttacggtcggactggtgggctaccctaatgttggtaagagttcaacaatcaacaccatcatgggcaacaagaaagtatctgtgtctgccacacctggtcacacaaagcactttcagactctctatgtggagcctggcctctgcctgtgtgactgtcctggcttggtgatgccatcttttgtgtctaccaaggcagaaatgacttgcagcggaatcctcccaattgatcagatgagagatcatgttcctcctgtatcactagtttgccagaatattccaagacatgttttagaagctacctatggcattaacatcataacgcctagagaggatgaagatccccaccgacctccaacatcggaagaactgttgacagcttatggatacatgcgaggattcatgacagcgcatggacagccagaccagcctcgatctgcgcgctacatcctgaaggactatgtcagtggtaagctgctgtactgccatcctcctcctggaagagatcctgtaacttttcagcatcaacaccagcgactcctagagaacaaaatgaacagtgatgaaataaaaatgcagctaggcagaaataaaaaagcaaagcagattgaaaatatcgttgacaaaacttttttccatcaagagaatgtgagggctttgaccaaaggagtccaggctgtgatgggttacaagcccgggagtggtgtagtgactgcatccactgcgagctctgagaacggggcggggaagccctggaaaaaacatggcaac

SEQ ID NO: 2970 - DNA, 440 bp, Homo Sapiens
agttcattatgcatgttccccagcgcaatcatgcccatcaaatccactgcagtttaatcagcataatgaagcaccagccaaataaagttcctaccggtgatctacagcacccctgcgcgctgacggtgggaatgcacggatggacatatgcggctcctacctcctcagggcttcactcccggctgggggcgtgttacatcctctccacttcctccgacctactaagcgctctcggtctgggaggtggacactcgtccatcagtcaccaggaggctgcccatcgcggtgggctcccgggggtgtcccccgccagaaacgttaccatggttgcaagctgaggcgtccgtggcgggccagccaggcgagttagagccgagcatcacatcccccgcagtgcaggctgcatgctcccggctccgtgcgtgcgtgctctggctgga

SEQ ID NO: 2971 - DNA, 631 bp, Homo Sapiens
ctaggtacgaggccccgtgttgatcggccgaggcgggagctggcgccatggtgctgttgcacgtgctgtttgagcacgcggtcggctacgcgctgctggcgctgaaggaagtggaggagatcagtctgctgcagccgcaggtggaggagtccgtgctcaacctgggcaaattccacagcatcgttcgtctggtggccttttgtccctttgcctcatcccaggttgccttggaaaatgccaacgccgtgtctgaaggggttgttcatgaggacctccgcctgctcttggagacccacctgccgtccaaaaagaagaaagtactcttgggagttggggatcccaagattggtgccgcaatacaggaggagttagggtacaactgccagactggaggagtcatagctgagatcctgcgaggagttcgtctgcacttccacaatctggtgaagggtctgaccgatctgtcagcttgtaaagcacagctggggctgggacacagctattcccgtgccaaagttaagtttaatgtgaaccgggtggacaatatgatcatccagtccattagcctcctggaccagctggataaggacatcaataccttctctatgcgtgtcaggcagtggtacgggta

SEQ ID NO: 2972 - DNA, 405 bp, Homo Sapiens
ttttttttttttgatgtcagaatgtagtttctattctagttcaagttgaatcctgaaagcccagtgcccattccgacagcaggcaagcagggtgatttccctgttctcacagaacactgaccaactgcggctgctcatggccactggacctcagcctgtgccctcagtggttctcagttcagtgacagctctatgtcccaatcaagtggcttttcttcagtgttctgcagagccaggggaccaggtactaactcatgtgtccaatggatacatctgtgcttatccttgggcccactgatcaccagggtagttgagctctttgcaccatagagggtatgcctcgtggagggggacagatggccaacaggaaacaagaggaggtctgatgggacaggatgctcttta

SEQ ID NO: 2973 - DNA, 490 bp, Homo Sapiens
  misc_feature (10)..(11): n is a, c, g, or t
  misc_feature (13)..(14): n is a, c, g, or t
  misc_feature (16)..(16): n is a, c, g, or t
  misc_feature (19)..(19): n is a, c, g, or t
  misc_feature (61)..(61): n is a, c, g, or t
  misc_feature (70)..(70): n is a, c, g, or t
  misc_feature (359)..(359): n is a, c, g, or t
  misc_feature (388)..(388): n is a, c, g, or t
  misc_feature (427)..(427): n is a, c, g, or t
  misc_feature (449)..(449): n is a, c, g, or t
  misc_feature (474)..(474): n is a, c, g, or t
ctagtacccnnanntngtncttcttcaactacatgttgaaaatgtgcacggggtatatttnctttttccnatacgccactgttgcttcccacttcccacctccaccccactccttagcatctatcacggcagagggaagggaggaaacagtgcagggaagggagagggcaggaggagaatcagggtctcagtggggagtagacatggaagggcaaaccaagtccgtataaaccacaaaccccattctagccataaaagctttgcatccctttgatagcagaattgagacttttgaagtacccaactattgccaaatatctttcatggaaaagaaggcatagggtgaacgaaggggaagnaggaagggagaggaggtcgcggacccagntaggcttttccaaggcacaaggcttccctttggcaaccngggtgggctgttgcaggagggntgaggagctgggagggagcagggtntgggaggaagactttc

SEQ ID NO: 2974 - DNA, 254 bp, Homo Sapiens
tttttttttttttttgacattttaaaactacttttattttgagtaagttttttggctccttgtcttttgaaagccttggctttgttctcggggcctgctgctttatttcttcagacctggccaaaggaaattcccctgcgccacaaggtatctgcaaaatctgctgtcttacgtgcttgcaaagggcagagggagatccacggcccacttgccatgtggcctcacatcgagggacgccgtgtgatatggcttgg

SEQ ID NO: 2975 - DNA, 606 bp, Homo Sapiens
aattttgcggggctcaacggctcgcggagcggctacgcggagtgacatcgccggtgttgcgggtggttgttgctctcggggccgtgtggagtaggtctggacctggactcacggctgcttggagcgtccgccatgaggagaagtgaggtgctggcggaggagtccatagtatgtctgcagaaagccctaaatcaccttcgggaaatatgggagctaattgggattccagaggaccagggttacaaagaactgaggtggtaaagaagcatatcaaggaactcctggatatgatgattgctgaagaggaaagcctgaaggaaagactcatcaaaagcatatccgtctgtcagaaagagctgaacactctgtgcaggagttacatgttgagccatttcaggaagaaggagagacaaaccatctgtgcaactagaaaaagattggcgcacccaagtggaatttgatgcgaaaaccgaaaacggagagaaaacaggaactgaagctacttcatgagcagatcaagaactgtgcgaaattcttgtatggcccactatgatattgacagtgcctcagtgccagcttagaagagctgaacagtcaggcacatgg

SEQ ID NO: 2976 - DNA, 180 bp, Homo Sapiens
tttgagttttcattttagttttattgtagtgagtagtatttttaattttcttgaaaggcacccaagaataattacttttgtgaaccaaaactatataaaactgtacagaataaatatttcatagaaatctaactatgccttcttgtaaaataaagctacattgtccctctcttgaggcaa

SEQ ID NO: 2977 - DNA, 2720 bp, Homo Sapiens
gtgtgcagcagccacattgaaggatagagtggcagcagaggccaaggatcgtgagttgatggagtttgctgctgaaaatgaagggaagtctgggggaggtctccacagcgtagctgagggggtgcggctaagtccagagcctggcagggagggagtaagggacttagcaggggcggaggagttcggcggcggagaggaggggacagggctgacagggataaaggagataggggatggagaggaaggaagtggacaaaggccagaggaaataccgatggacctaacggtagtgaagcaggaaattatagactggccaggtacagaaggcaggttggctggccagtgggtagaacaggaggtggaggataggcctgaggtgaaggatgagaacgcaggcgtattggaggtgaagcaggagacggatagtagtttagtggtaaaagaagcgaaggtgggtgaaccagaggtaaaggaagagaaggtaaaggaagaggtaatggactggtcagaagtgaaggaagagaaggataacttggagataaaacaggaggagaagtttgttggtcaatgcataaaagaggaattgatgcatggagagtgtgtaaaagaagagaaggatttcctgaagaaagaaatcgtggatgatacaaaggtgaaagaagagcctccgataaatcacccggtgggctgcaagcggaaactggccatgtcaaggtgtgagacttgtggtacagaagaagcaaagtacagatgtccacgttgtatgcgatattcctgcagtttgccctgtgtaaagaaacacaaagcagaactgacatgtaatggagttcgagataaaactgcatacatttcaatacaacagtttactgaaatgaatctcctaagtgattatcgatttttggaagatgtggcaagaacagcggaccatatttctagagatgcttttttgaagagaccaataagcaataaatatatgtactttatgaaaaatcgtgcccggaggcaaggtattaacttaaaacttctacccaatggattcaccaagaggaaggagaattcaaccttttttgataagaaaaaacaacagttttgttggcatgtgaagctccagtttcctcaaagtcaagctgagtacatagaaaaaagagtaccagatgataaaactattaatgaaatcctaaaaccttacattgatcctgaaaagtctgatcctgtaattcgtcaaaggttgaaagcctacattcgctctcagactggggttcagattttaatgaagattgaatatatgcagcaaaatttagtaagatattatgaactagatccttataaaagtctcctagacaatttgaggaacaaagtgatcattgagtatccaacattacatgtggtattgaaaggatccaataatgacatgaaagttcttcaccaagtgaagagtgaatctaccaagaacgttggcaatgaaaattgagcattttttctggaagaagaaagtgaaaacttccagacaactgcagcagactctgcattgatgggctgttggctgattggggtattgtcaatgggtgattggaattttttctttgtatgaaaaataagcttaactcttttaaaaaatgtattttataacctcttgaattaattgacttgtaagacccatttattcatattaagaactctcctttgcacttgatcagcatagtacttattaggccctggctttttaatatgcttaattgcttaattccataaactgaaaactttttttttcttttttctttctttttttgagatggggtcttggagtgcaagtggtatgagcatagcttcctcaaattcctgggctcgaatggtcctctcactgcagcctcccaacaggctggtaccaccacactcagctaagttttttgttgttgtttttttttggtagagacagggttgcgctctttcgcccaggctggtctcaaatttgtggcctcaagcaatccttccacctcagactccaaagcattgggattacaggcatcagccaccacacctggccttgaacattttttatttgttaatttcatgcgtgacgaaacccaaggatcacccatgtcaaccacaaagttggcatcccctttagtagaacctcactaaacggaaaggctgtacaacgcaccgtctagccacaggagaactaatcttctatcagttgccctttcttctttggagtttttatgtaacttacccttgtgagacaagttttctacttgagaaactcctagtacaatgtcttatactagaagcctggataaatactattaactactgtttcttatattcacttcagaaaatcagtggctccacattgtttgagccattagtgataacaaatttggatctacttattcaagtcttatgaattctgtgcctttcatcacattcctagcccactctcatcattactgcagaagggtgttgtgatgaccagttttatactgtgttttgatatgtctagcaataacttaaagaaaaaaaaacctgggaaatcttcaacatgttattggaacatatatgtatgtattaatgtatatacatggcttaacttatacgttatggcagctctgtatacagtttgatctcatgtactgaaaaaaaattcttaattttattggagtttataccactgtgaaactgcaatatgactgtaagagagtaaaaagattgttacatct

SEQ ID NO: 2978 - DNA, 312 bp, Homo Sapiens
ttttttttaaggtgctggtaatctattgtgggatgtccatgaaggatgaaataggaaatagttaatgtgtcttttaaaaaatattcaggaaaacaacagtatataatattctttattttttaaggaacatttcctcacgtaatagaattacattagcttacagtgaaactcatttatttccacaaacgaaactttcctatacaacaaagcttgactatctctcaggaaaacatatttaatgacttgtgtggaggagaaaaaattatgtgtggaaaagtaactcaaaccatacaagctgtaatacacagaaat

SEQ ID NO: 2979 - DNA, 436 bp, Homo Sapiens
tttttttttggctataataccagttatcctccatcagggctacagtgttccatgaacagaatttggaaatgctggctggccctaaatccaaaaagccagcctcgcatggtagccaccagcatgtgtttggggtcggcacgttcctccacgccctcagctatgtggtctcagactagtgtctcagattctcaaagattccctgcttcatctgcagaaaggagataaacctcctcagactattaagaagagagaggcgttcgggagagtggggtgctggctagaaagcagggtcattttccttgtagtcattggccccccaggctctggatgtgggccttactgagctttacccttcaagtctctgagtctctgccacaagacggctaacatcacgatacagtcaacttgccacaccatgtcctctggcattttaaac

SEQ ID NO: 2980 - DNA, 651 bp, Homo Sapiens
  misc_feature (567)..(567): n is a, c, g, or t
gccccacccccaccacctgtccccacccagtgtcccaggccacaggagcttattggccaggagggaataatgtcccccaatactgcctgttgagggaccagagttggggtctttggtgcttccaacctcctgccaacctggagttcacaacaccagagccccacggcctcgcacactgaagcaggggcgtgcggtgactcggtgcttctgttttggaagaaccacctgtcatcaaaacatggacagcagggtgttctcagctcccagcgaagcctccacaacagaatggggccacagggcagccgggactccctgtctcacctacattaacccatgcatactgtatgccataaactcactttggtatatccgcgtcacatgcagagaggaactctgcgacgtcaaagtgttgcttcttaaagtttcattattggcaactagagggttgtttttaatgcatggaaactaaacagattcctcggggagttcctgaaggaaccaggtgggcaaacctttgcttatatacatgcggcctcacctggaagagaaataaaccacttgtactanaaaaaaaaaaaaaaacccgtggtgaacggacccgtcgccatgggccgggtgaccggggccagaagaagggccgggtctggtccg

SEQ ID NO: 2981 - DNA, 259 bp, Homo Sapiens
ttttttttaaattataggaccacatttattaataatatacgttatgagaacaatcatttgcagtctcactgtgaaggcaaaaaaaaaaaacaaaaaccaaaacccaaaggataaacagaaatagcacagtccaccgaatacactgcatggtgtttataactgtataaccaaactaagtaatctttcccctctctttaacttttatgcaccacctgccattctagatactatcaatcacacttaataataataaaaacca

SEQ ID NO: 2982 - DNA, 429 bp, Homo Sapiens
gcggccgctactactactactaaattggcggccgctcgacaaccgctccctggaggaggaggagagtcagctgtaggggcgggggcgggcagggaggtatttatttatttattcgcaacagccagcgctaaaagagggggaggccgagccaagaggaccccaggagcccagagcagcgggagagggtccttcctagcctcggcccgccgggtcggttcctggctggtgtctgctgagggagtggggggccagccattctcttctcccccgccaaaccacagtgggagctggggcagggggagagccaggcaatcgggggccaaagatgggggtgctcgcctacagtctgcatctgtagtgccttgtggggtatccaggaacaccctcccagcaggggatgggaaccctgttccatgaagccctctcctt

SEQ ID NO: 2983 - DNA, 1707 bp, Homo Sapiens
cgtaagaatctgagtttgtttttcaaagatcactaaattttagttatgattatatcacattttccaaaatgtgtggcagtttttgccctccttgctctgagtgttggtgcactggacacttttattgctgcagtatatgagcatgcggtgatattaccaaacagaacagaaacacctgtttcaaaagaagaagctttgctcctgatgaacaagaacatagatgttttggagaaagcagttaagctggcagcgaagcagggtgcacatatcattgtgaccccagaagatggaatctatggttggatcttcaccagggagagcatttacccctatctagaggatataccagaccctggagtgaactggattccatgtagagacccctggagattcggcaacacaccagtgcaacaaagactcagctgcctggccaaggacaactctatctatgtcgtggctaatattggggacaagaagccatgcaatgctagtgactctcagtgtccccctgatggccgttaccaatacaacactgatgtggtgttcgattctcagggaaaactgttggcacgctaccataagtacaatctttttgcacctgaaattcagtttgatttccccaaggattcagaacttgtgacttttgacactccctttgggaagtttggcatttttacttgctttgacattttttctcatgacccagctgcggtggtggtggatgaagtttcaattgacagcattctctaccccacagcatggtacaacacgctgcccctcctctcggctgttcccttccattcagcatgggccaaggccatgggagtcaatctacttgctgcaaatacccacaacaccagcatgcacatgacagggagtggaatctacgccccagaagcagtcaaggtgtaccactatgacatggaaacagagagtggtcagctgttgctatcagaactgaagtctcggccccgccgtgagcccacctaccctgcagctgttgactggcatgcgtatgccagcagtgtcaagccattttcctctgaacagtcagattttctggggatgatttattttgatgagtttaccttcaccaagcttaagagaaatacaggaaattacacagcttgccagaaagatctgtgttgtcacttaacttacaagatgtctgagaagcgaacagacgagatctatgccctaggtgcttttgatggactgcacacagtagaaggccaatattacttacagatatgtgcattactgaagtgtcaaaccactgacctggaaacgtgtggagaacctgtggggtcagcttttaccaagtttgaagacttctccctcagtggcacatttggaacgcgttatgttttcccacagatcattctaagtgggagtcagcttgcccctgaaagacattatgagatttcaagagatggacgcttgaggagccgaagtggagcccctttgcctgtcttagttatggccctgtatggaagagtgtttgagaaggaccctccacgcttagggcagggatctgggaaattccagtgatctcctttagcagagcccttttaggattagcctggctaagaaaggaagaaaaaaaagagatccgttagtgtctgtttagaaaagatgttataaacttacagaaacaaatataataaactgaagcagatttgaaaagcaaaaaaaaaaaaaaaaaaa

SEQ ID NO: 2984 - DNA, 370 bp, Homo Sapiens
gagatgagggctccctatgttgcccaggttggtctcgaactcctggactcaaagtatcctcccgcctcggcctcccaaagtgttgggattataggagtgagccaccacaccggccaagatgcttttcaaactgatacagatgacaatgggagcctcataaagatggcttttgtttcttcccttcaaggtcatttacttgtacgagacagaaaaagatagcattggggacatgggatgggggagggagggcaatagtggaacgaactttccatgggaaactttcccttttgtaagttgagggccaggggtagggatattttttagtttgtgattttacatttatctgtacatactttttcaagattgatca

SEQ ID NO: 2985 - DNA, 348 bp, Homo Sapiens
tttttttttttttttttttttttttttttttcataaaacaaaatttatctttaattggtaagggccaccagcagcccaaaagagggagggatgacaactagattagggtagagaggacagcctggaggtaaaggagcataaataggcagttcttatagaccctcccctaaggggcctgagccccatcacggcatatccattatcacccaaagagggcatgtggaacatatcaggaaagccccttgggcaaaagggaaaaaaaaaaagtagctagggggccaacatcccccaggatagataaagacagggggtctttcaattttgcctttccccttaattatgaggcag

SEQ ID NO: 2986 - DNA, 1088 bp, Homo Sapiens
attgcccgcgcggtgagggagcgtggtctcgcgcaagccggcgtgcggtccggcggcgctgcagttgtgtccagccggtcacggggcggctatggcggccacgttcttcggagaggtggtgaaggcgccgtgccgagctgggactgaggacgaagaggaggaggaggaggggcggagggagacgcccgaggacagggaggtgcgtctgcagctggcgcggaagagggaagtgcggctccttcgaagacaaacaaaaacatctttggaagtttctttgctagaaaaatatccgtgctccaagtttataattgctataggaaataatgcagtagcatttctgtcatcatttgttatgaattcaggagtctgggaggaagttggttgtgctaaactctggaatgaatggtgtagaacaacagacactacacatctgtcctccacagaggctttttgtgtgttttatcatctaaaatccaatccctcggtttttctctgtcggtgcagttgctatgttgcagaagatcaacagtatcagtggctggaaaaggtttttggctcttgtccaaggaagaacatgcagataactattctcacatgtcgacatgttaccgattataaaacctcagaatccaccggcagccttccttctcctttcctgagagccctaaaaacacagaatttcaaagactcggcgtgttgtccattgctagaacaaccgaatatagtacacgaccttcctgcagcagttctaagctactgtcaagtatggaaaatcccggcaattctgtacttgtgttatactgatgtgatgaaattagacctaatcacagtggaagcttttaagcctatactttctaccagaagcttgaagggtttggttaagaatattccccaaagcactgagatactaaagaaattgatgacaacaaatgagattcagagtaacatttatacatgatcttaaacattgttttgtagtgtatattacttgtccattcctttaaggggagcagcctgcactcttttgtagattacttttgggggatatattttgagaatgatgaaacggaataaaattgtaaaaaact

SEQ ID NO: 2987 - DNA, 460 bp, Homo Sapiens
ttttttttttttttttataatctgtgttataagagggtctttcactttattgcttattgtaaacactttggccatagcaaatgttagtttttaaataaccgtaattcaaaactttcacatcctatactatttttccccaagaagcatcatctatgaaaacaatcagtgaactccaacagtctatactggtaatgtgcacattgatgctattatgacacttaatacaaatagtaaaaatactcatctattgtaggcttatgggtttgtaaaatgccttaagggaggccataaacaactcaaagaagagatggtgtggactgaactggcttctatttggggaaaatttgcagaatataggaggtacgcaataaatgtttattgatggtgaagatgagaaaaccctatttctgctgatctttcctttccgttttccttaaagaatataaggtatatttgtatt

SEQ ID NO: 2988 - DNA, 375 bp, Homo Sapiens
  misc_feature (9)..(9): n is a, c, g, or t
  misc_feature (11)..(11): n is a, c, g, or t
  misc_feature (19)..(19): n is a, c, g, or t
  misc_feature (22)..(22): n is a, c, g, or t
  misc_feature (42)..(42): n is a, c, g, or t
  misc_feature (294)..(294): n is a, c, g, or t
  misc_feature (328)..(328): n is a, c, g, or t
  misc_feature (337)..(337): n is a, c, g, or t
ctcgtgccngncgcaggcntgngtaccccgttggtccgcgcnttgctgcgttgtgaggggtgtcagctcagtgcatcccaggcagctcttagtgtggagcagtgaactgtgtgtggttccttctacttggggatcatgcagagagcttcacgtctgaagagagagctgcacatgttagccacagagccacccccaggcatcacatgttggcaagataaagaccaaatggatgacctgcggagctcaaatattaggtggagccaacacaacttatgagaaaggtgtttttaaagntagaagttatcattcctgagaggtacccattttnaacctcctnaagttccgatttttaatccattttttcatcccaacatg

SEQ ID NO: 2989 - DNA, 995 bp, Homo Sapiens
gttaggcacgtaaggtaatgaccctgctaaatatttaatattatcaagcttgtgtgactcaagcatggtttagaggccagcaacctcagtttcgatcttcctgtcgtgtctgggtaagggcccgatcttgctgggcatgcaatgccactatttctgttctcaattccagcagcttcttttcgttcaatgaatacaattcttttactctgtctcttttctaggttgaagtctaatttggtatctgttcggactttgatcacttcatccattacttgttgttttaactgatgtagttcgagttttattttctcattttctgctctgagggctgaaaattcactcttctccaaaataatcatatcctttttcacattcgcaatctgagacattacttgctgaaaagtgatttcctgctgcatcttggtgaccatatctttgtagacgatgtccatgttggcctccaggatcttgaccaatgcagacacaatgatttctgcttgttgagtagcaaacccattgtcttccagtaagcacactaaggcatgagtgtcgaagtagagtttcctgctcccagaagaggtgaaatctctccttttgcgctccagctgcagggatccagcagacaagcttagctctctcctgcaggaaacgagtgcaggcgcgggccgggtactggggaagggcgccggcggcagcggcgacgcccggtgagcaacctccacgcgctgctgcgcccggcgggggtgcggcatacccgagcgcgagcgctccagtcccgagctgcgcgcgtgctgcgggggcagcgcgggaggcactaagctgaggagacccgtgaggagtgaagccgcgggcgcgggcgaggcaggcccacgtcggaccaagggctgtagtcctcgccggttccaggcaggaaaaaacgggggagaggctgggaagagggacaaaaccggcccttttgggccgtccacagaggccgggataggccattatattag

SEQ ID NO: 2990 - DNA, 2709 bp, Homo Sapiens
cacgcggggtctttgttaagaaacgatcttcgtccagctaacaaacttgctaaaggaaataggttattcatgagatttgctacaaaagccccaggtctaggatccatccaggactgagtgtatgacaaaaaggaacttggagcagccagaagaagtcagtattacatgaaatatgggaatccaaattatggaggcatgaaaggaattcttagcaattcatggaagcgaagatatcattcccgtcgtattcagcgggacgtgatcaagaagagagccctgattggggatgacgttggcttgacgtcgtataaacatcgacattctgggctagtgaatgttcccgaggaacccattgaagaggaggaagaggaggaggaggaggaagaggaagaggaagaagaagaccaggacatggatgcagatgacagagtggtggtagagtaccacgaggagctcccggctctcaagcagccccgggagcggagcgcgtctagacgatccagtgccagcagctcagactcagatgaaatggactatgatctagaactgaaaatgatttccacgccttcaccaaagaaaagcatgaaaatgactatgtatgctgacgaagtggaatctcagttgaaaaatattaggaactccatgagggcagatagtgtatcttcaagcaatatcaaaaaccgaattggtaacaaattaccacctgagaaatttgcagatgtccgacatctattagatgagaaacgtcagcactcccgtccacggccaccagtcagcagtactaaatcagatatacgccagcggttaggaaaaagaccacattctccggaaaaggcttttagtagtaaccccgtcgttcggagagagccctcttctgatgtgcatagtaggctaggtgttcccaggcaggatagtaaaggcctctacgccgatactcgggagaagaaatcaggtaatttatggactcgcctaggatctgcacccaagaccaaagaaaagaatacgaagaaagtggatcacagggcgcctggcgctgaggaagacgactctgagctgcaaagggcatggggggctctgattaaggagaaagagcagtctcgccaaaagaagagccggttagataacttaccatctctccagattgaagttagtcgggaaagcagctctggttcagaggcagagtcctgatgcccctggggcctatggcagctgccctaaagcctgacattcttgcacagggtggggcgcgcagtaggaacctcccccgcaggagctggcgccctctcgctcctgctcacacagtcaccctccgctcttgctacttcggcaagacatcttaagaatgtgacacattttcaagggcatctctatctttcgctgcagagttgtagttctgggccctcgattcctttcccaccaccccacaggctttaccctttgagaaaaaggcagccctccagattttgtagacatttttcttaatatttttaacattgtgtcttttaaaagaaatgttttacacagttcatccaaagagcagagaactgaacttctcactattgccttggccctgacagctgttaccagcacccttttcccaagaaaagtcaattcccaggtgcttattggacatccttcgagggggaagaggagggaagcggccagctcacccttccgggaccctagtgtggggcgaatctcacggacctgacctcagaggtgcaccagtgccgcccaggtagataagagctgcagcattgactgtgcttccgttcttccctcggggattgctcatggcatgggcctcttacgtgctgtcagcttgatgtgaagatcaagttcagtgctgtgggatttttaggaacaaaaaactgtgacgtctggatttggggttgatttttgtgctggggtgggattatgggtcaatgttgaagaatttttaagtctgtattatgtttaaaacatgaatgatttgaaagtttaaatttttaatttttatatgtggaaattcttcctgttggctaaaggggaagctcaagtggtgtcgtcttttgtgctgttaaatatatattctattctttggaagaaggcagagagaggagtcttattatttttaaatgctcctagttgtatagtctgtctgttgtacatagagttcagcttgttttttggctccagtaggaaaaaaaatccatccatctgagatggggtcctgttgtttattatcactctagaagttatacattgatatttattctttctgtccccacgttgtggcacctgaagacatcttcaaaattggcagaaaagataatagttataaaaattttagttcatttatttttaaactcctttcagattattttaccattaggaggaggtagattgtttcgtcttcctgtctgatttttgttttgtagtatttaattttgtattcctctgcagttttaagaaacagtgtttttcttcggtttgctggaacatgggcgttagagatggtaataaaccgtggtcctttttgcgatgtcacgactcttcacctgcctgggctgttgtgcacacagtgcagcctggatcctgtcgatctttacttgtggcggagctaatggtcacattgatagttgattacactgtggcacgaattaatgcagaacactgttattaataaaggaagtaaagggctgcaagatttgagagctgcaacaaaaa

SEQ ID NO: 2991 - DNA, 457 bp, Homo Sapiens
ttttttttttttttttttttttcagctaaacctttacattggccaatttattataaaggatacagatgaacagccagatgaagcagcatgaagggctaggtctggaaagattccaagggcaagagcttttgtcccagtgaaactggggggcagggccctcccagcttggggacgcatttactggaagctcctcaaatcttgttgttcaagagtttttaggcagctggatctccagcaccttccccacccagagatcagggggtagagctaaaagttccaaccctttaatcctcaaatgacctggtctttccgggaactagccccatcctaagaatatctagggccccacattaagtaacctcattagcataaactcaggagttatcgaatcaaaggggctcattatgactaatgagatattcctaccactcaggaagttctaaaggtttggggaact

SEQ ID NO: 2992 - DNA, 264 bp, Homo Sapiens
cacgaggagcaccatggcctggactcctctctttctgttcctcctcacttgctgcccagggtccaattcccaggctgtggtgactcaggagccctcactgactgtgtccccaggagggacagtcactctcacctgtggctccagcactggagctgtcaccagtggtcattatccctactggttccagcagaagcctggccaagcccccaggacactgatttatgatacaagcaacaaacactcctggacacctgcccggttctc

SEQ ID NO: 2993 - DNA, 456 bp, Homo Sapiens
  misc_feature (116)..(116): n is a, c, g, or t
  misc_feature (325)..(325): n is a, c, g, or t
ttttttttttttttttttttttgggaaaatcatttcttttaatgacagagaaagcacaccaaatgataacagaagcctcattgggagttaccactgtacaaatcaatgcctggagncctgaactagcattagacattcacagggaagtcagctgaggttaaggaaacatccacgcagcatctctgaggatacagaagtgggaggaggaaggtgacagccgcaatgcacacgctgtgtatctgtagcttggactcttcttcaggcagttcttgttttccttccacattggatggtaggggctgggggaggtttgcaaatgatcatntggaagagaggccttgtgtatcagcctcgcagaaagagccaatactgttagacagatatcacccagatgctccatgggccatgccatgaaagcgatgtgacattgggtcctctgaacaatggttcagggaa

SEQ ID NO: 2994 - DNA, 714 bp, Homo Sapiens
gccaaaaccaaccacacacagacagccaaaaacagaaggaacttacggctaggaagcgaggctggggtgggtgcacgtggcgggctgaacctgagcgcataatgttatgaggagatgggagcactagtgattcgcggtatcaggaatttcaacctagagaaccgagcggaacgggaaatcagcaagatgaagccctctgtcgctcccagacacccctctaccaacagcctcctgcgagagcgataagtctctatccagaagttaaggagagatggtcgtaaagatgaaaagtgtgtcgtttctaaaagatgtgtattgttgatccaaagatcctgtgtcttccttgcgaggtaaaaggctgtgaaacatgtcaagagccgaaggaatcagattgccgaaagacatcatttgatatgataaatattaggagcatcccaaaggcaaaatttccattgtagaagcattgacacttctcaataatcataagcttttcccagaaacctggactgtgagaaaataatgcaagaataccagctagaacagaaagatgtgaattctcttcttaaatatttggttacttttgaagtcgaaatcttccctcctgaagacaagaaagcaatacgatcaaaatgaagaaaatcacagaaatttcctatgtgtactcctcatccctcgtgtgtatatttctcatttttggtaatacattatgtttat

SEQ ID NO: 2995 - DNA, 330 bp, Homo Sapiens
ttttaattttccgtgttgctttatttgttccttttaccacccaggatattgaattctgtgggctctggttgagtcgttggtacttcaggcgttcagtaataagaaacataatctgctttttccggcagataataaatctcatttatattaagggaggcttactccaaactcttttacatagtatttttctaaatcttctgcatgaacaaattcttccttgagccctagcactggggacccggtctggcaacctgcgccccattccgcgggaatcaagcgtgacccggtgcggccttgcgcgctgccgccagccagaccctccctccggct

SEQ ID NO: 2996 - DNA, 269 bp, Homo Sapiens
  misc_feature (192)..(192): n is a, c, g, or t
tttttttttttttttttttttccaagaaagataataacttctttattagggggcaattgtctgtgtacctgacaatgcatcagcgacatccatggaagagccactaggtggccacatagctaacaaaattcttgttagctagaaaactgctccaggctgctgctgtcccttttccaggtagcactaggctgncaaaatcatgactttaagtaaatttcttaaggaatttgatcaattccattcttgatgattccagatggaaatcttgg

SEQ ID NO: 2997 - DNA, 403 bp, Homo Sapiens
tttactataagaatttttattaatgacagctttgcaattaaatgtacattcactaaatatggaaacaagtgagaactaacaataaaaaggagttccaagaaaattgtcacggcatgaactgaatggactcatactgggccagcactttcggtcttggcatgaacagcttcatcattccagaactttcttgatttccaaggtttgtagtaggtgcttaacaaatgccatcttgaatgaatgaagaccctttctcacagtaacaaagttgggtccaggctccttcatttttgctcagcaagatgaagctgggattaggcatgttctaaatggcagctccatcttctctttttgccacccatgtttacagaaacgagtggacaagacggcccctgccaagtgggaa

SEQ ID NO: 2998 - DNA, 372 bp, Homo Sapiens
ttttccttatgtcagcagaggctttattctagtggaaaaggcagacaataaacatataactgcatgatgatttaaaagcaactgtgataagtgctataacaagatgatgaagtctagggtgttagtagaacaattaacagtgaacatgacaagctcagggtcatcttcatcttctgtgcccccaaatataagtgacctgctcaaagttaaccagtaaaagaggggaaaacaaaactgtcttcctacttagggattctctggtctttggaccaaaccttggaatacaacttacatttgggccaatagccttgttttccctatttatactcatagggaaagccagctggaatatgcatgaatcaacattctaac

SEQ ID NO: 2999 - DNA, 233 bp, Homo Sapiens
aagctaaaagctttattagatatttctctttaagctaaatccacacacacactactacacacacacactcatgtctaaatgtgtttactatttattttttactcttaaagtgatgttatttacatgtgttgttagaatgcaaaccttatcagtaggacatctaggattaagctctggcagtattaatagttagaacagtcacatgtatgcaaatttttacatagttaaaaaga

SEQ ID NO: 3000 - DNA, 388 bp, Homo Sapiens
  misc_feature (11)..(11): n is a, c, g, or t
  misc_feature (44)..(44): n is a, c, g, or t
  misc_feature (134)..(134): n is a, c, g, or t
  misc_feature (307)..(307): n is a, c, g, or t
ctaactgcggnttgtaatcttggccccagtgttcagccactcgnaggggcgggggctgtggcatttcaggggctgctggtgggctgtagtggggtgggatgacctggccagagccaacgaggatactggagccnaaagtcaagtttagagaccagctgggaacgtgaatggggctcttgattttcttatcaaaatcaccactcctcccagcttggactaaatattctttctagcaagcagctttgtgagctccctgaagcccaaggaaacccttcggtggggagaaatttcatttcttgtcttgagnaggatttaagggcagcaggtgactccccctccttcgcctggccgtgttcctgcttatttttcagggcagctcttaagggag

SEQ ID NO: 3001 - DNA, 382 bp, Homo Sapiens
tttttttttgtagaaacagggtctcagtatgtttcccaggctgggaggaaaccttctgttagagccttttacacgttctcattcctataataaactgcatgaaagcaggatttctgcagctaaaagtgcaccttctactcagcaggtatgcaatgactgtttttccatggtccaggttccacagccccatttctaagctccctacttaacagaattttaggcagcatttagaacctcctggaaggtctgccatccttagggctcagatgttccatgccaccaaagaatttacatagcttgggcaagaccctcagagtctgtgtctatctacactaacagcaaagggtgtccaggtcagtcttgaatggaatcagggccgggt

SEQ ID NO: 3002 - DNA, 245 bp, Homo Sapiens
ttttttttttttttttttttttttaggtgaaattttttttaatgatacttttgaaacccaatatatctaaaatattatttcaacacataatcaatataaaaattaaggtatttaaagttgttgtcctcttccatgcttcatacctggggtttcagagtcatgacacacttggtttggctacatctcagtagccacacatggctgggtggctgctgctgtggacagcatggacctaaagtccactc

SEQ ID NO: 3003 - DNA, 649 bp, Homo Sapiens
  misc_feature (5)..(5): n is a, c, g, or t
ccaangatcaaggtgtatccattctatatgtatcagcacatttcacctgatttgagtcgacgctttcctccccgttcagaagtgacgagactgtatggatcggtttgtgatttaaggacgaacaaacttcccggttcccctggtgctaagcaaatctatgtttgatcttacaaactcatctcagcgattcatccagagacatgattcattgtccagtgtacccagtagttcttcttcaaggaaaaattctcaggggagtaacagaagcctggatacaattactctatcaggagatgaaagggactttgggagactgaatgtgaaatcgttttataattcttcagtagaacagatctggatcacagttttacagtgcagagatttaagttggccctctagttatggagacactcctactgtttctataaaaggaatacttacattgcccaaaccagtgcatttcaaatcttcagccaaggaaggttccaacgctattgaatttatggaaacgtttgtatttgctattaaacttcaaaatctacaaactgtaagacttgtatttaagattcaaagccagactcccaggaagaaaacatgggagaatgctcatgtcactcagaacccttagcacacggaaaggttactcttg

SEQ ID NO: 3004 - DNA, 404 bp, Homo Sapiens
  misc_feature (377)..(377): n is a, c, g, or t
tttttttttttttttctatttaagcaccagcccagggtgaggtggaggcgtccgaaaccctaaagggacttctcaatggggttcaaggtttcagtgagggacgcagggagggggaaactgcctcagatctgcaatctgactttgggaaggccacccccaggcctgtctgtgatgttgaaggccggagacccccaacaaatgccgctggtttgctctgaattccccaaaggcccagaacgtggcagttggggattgccgggtcctccattccccgcccggacacaatggccgccggcgccctgcacaaagactgggtgagggtgaggcgctgggcctctcctcaggtcaggaagaggggtcgaggcctgctcgacggncccacagctgagaccacgttttcctgg

SEQ ID NO: 3005 - DNA, 830 bp, Homo Sapiens
  misc_feature (18)..(18): n is a, c, g, or t
  misc_feature (624)..(624): n is a, c, g, or t
  misc_feature (632)..(632): n is a, c, g, or t
  misc_feature (654)..(654): n is a, c, g, or t
  misc_feature (687)..(687): n is a, c, g, or t
  misc_feature (783)..(783): n is a, c, g, or t
tttttttttttttgccgncatctctttatttgctgccagcagagtccaccaagcctgccgggcagccctgctgcccaccacgggggggtccaggcccagcccaccaccccgtggctgtctcctccaggctccagccgtcctgagggggccctggcagtgtctggagacccccaggctggaggtgaggggtgaactggactgagctcagggttagggttcccccagacccttctgggattcctacttcctgttccctgccgagaggggcaccccaaatcctccagagggctgggatggattagagttgagaatgggacaccctcaaaacccagggggtccttgcaagtccctggcgggcatccctgctgccctcacccgaccccacccccgggagctgggtgaggatggagggtgggggtccaaaaaaaagtgaggggcagtgggggcttttccccaaggccctggggggcatcctcgtgcgtccccacagttcccttgcacaggtgcaggaggctgtcaggagtcagggccgggcatcacggtcccagcgtcgcaggcgggtcggccacagcaggaggctacagagacacagggcagcggccacgcccacgccgcccgcacagncaccatcngccagtggtaaagctcacgcangccctgcgcagagctctgaagggcagggtgcangctctggatggcatgactgccagccattggcaccttatcaagagctcatgagccgacacgaacgctcgctgttctgtgggacccgatagtcgccgnatggcccacaggtgccagatgtggaacccagaacaacaaccacccct

SEQ ID NO: 3006 - DNA, 240 bp, Homo Sapiens
tggtggcggatggcaggcggtggtggctcttatacccagggtaagggagtggctggcaggggagggtccacagggctcctcttctgggactctcaggctgtcggcttctcctagagcgcaccctagtctcccttcccttgccagcttccctggtgaccagccaggacccaaatcacctgggtcccctcccctacgccctcctgcaaagaggaagtgctcatgaacttcggcccttccagg

SEQ ID NO: 3007 - DNA, 436 bp, Homo Sapiens
  misc_feature (119)..(119): n is a, c, g, or t
tttttttttgattcatctttatttaaggtgctaccgttcatctttccgttgctttgttctgcatcaccatcttgctcatccagctgttcaagagctagctggcgccaactccgcaaggngacttccccacccaaaatccatcgctgccctttactgctgctttcagcagattattaacagttttataatcttcatttagttggttcttcagacgcaatatgcgacaacgttctactacacattccttacacagggctttcacagttagtcttggacctcctccatatctactatagaaaatgtcagctgcatattcagatatcctcttcataattgatattttatccgggtgaagcttgtcatgggaacacaggcaagcgtgattatcaataggtttggtaggtgttgattcatccaaccacttttgcagccattc

SEQ ID NO: 3008 - DNA, 458 bp, Homo Sapiens
tttttttttcctgttccatagaaataacagggctatccccctaggcagtggcccagtctcacactttttcagatgtttttatagatttctatttcccagtgattgcagaaactctctgcaattatttcttgcaaagactatcagatcatccaacattagactgacagacttctattttgctgaaataacaaatcgtgtcaatagaaagtcatttttcatctccaaatactgcaataaaaacctgagatgcttcccttatgatcgatttttaatttcctaacttctatagaaatttttcttcatggtttttatatttttggcatttctaacttaaaatatctaaaactctttaagttatatgcatgaagcatttgtgctttgattttaaaaaaaagttaatatcatgctgtttgaacaatgtgagcgattaaagggtatgactgtgctaccatggtatt

SEQ ID NO: 3009 - DNA, 488 bp, Homo Sapiens
accaggatctccccctcaaagtctgatacaaattaccctttattgtcagagtatttgctcattagtcctgtgagctctacattcagactcattgcttcctccagatagaggagcttgtaccataatattctgtgtccatttatgttagtttaatgaaatcttgcgaatttaggaaaataaaagaactgctcattcttccatatctttgtagtaacttctgttgagtgtccttttgtagtcccatatttccatatccatatgctttgtaattcttttttctttcatgtcgttttctccattcttcaccaaaacagcagcatacataggcacatggttttatgatctgtttttcccactcaatatttaaaaaaaaaatttgccatgttaggtaggctgggttcggtgtcttacatctgtattcccagcactttgggaggccgaggcaggtggatcacctgaggtcaggagtttgaggggaaaagaccctg

SEQ ID NO: 3010 - DNA, 484 bp, Homo Sapiens
ttttttttaaatgaactaaaatagctagcacacatctataaaccactctgacactggtgttaaggcctattctcaaaaaagaaaaaatgaaattactctgaataacagtataacatcatgatataagggatatctgaataaaacataggcaagtggtttacaaatggtagtcagaaaacaaaggtcagaaagatggtagattctaagatggttagggagatagtcaaaatgatgtggctaggtatggatgaaactttgtaagaataaaaataaaataaaattggccactaggaaatcattataatgttcttttactttgagaaagggagaaattacatcaaaatacaaagatgtaaattagaaaaacatgtcagaaagtggctatttctgaaatgaacaagccaagtcaggtcacagccaatgttagactaaaagcagaacacaggagtactgacaagaaggggttgaagataagctgggggcc

SEQ ID NO: 3011 - DNA, 459 bp, Homo Sapiens
tttttttttttttttttttttttttttttgggataatcagggcttcataaaggcatcctaatttttatatctttaaagacaacctaccatgaaataagaagaatccataattataattctaaaaaccatgtaatcaacttgggtccatgaactcacgcatagcagcatcctttactcagggacacattatgttgctatgaatccttttcaaaattctttgagtttttcttcctttctacttctacctcattatatctacacctttcttaactaccttgcagtcaaaagccaaactacctgggatgctgctcctctagtttgtcttcagctaaggatagaggccaaaaaatgagggaggggaggaaaaagggagcagggataccagaaacagaaaggaagaaaaaagaatccttttattttccaccctctcttcgcccattttttttcttttcccttcac

SEQ ID NO: 3012 - DNA, 239 bp, Homo Sapiens
  misc_feature (2)..(3): n is a, c, g, or t
  misc_feature (18)..(18): n is a, c, g, or t
  misc_feature (21)..(21): n is a, c, g, or t
  misc_feature (24)..(25): n is a, c, g, or t
  misc_feature (63)..(63): n is a, c, g, or t
  misc_feature (70)..(70): n is a, c, g, or t
  misc_feature (140)..(140): n is a, c, g, or t
  misc_feature (151)..(151): n is a, c, g, or t
  misc_feature (159)..(159): n is a, c, g, or t
  misc_feature (165)..(165): n is a, c, g, or t
  misc_feature (178)..(178): n is a, c, g, or t
  misc_feature (200)..(200): n is a, c, g, or t
  misc_feature (213)..(213): n is a, c, g, or t
  misc_feature (218)..(218): n is a, c, g, or t
  misc_feature (234)..(234): n is a, c, g, or t
annttttttttttttaanttnaannaacttggaactttatttttaaagtattctgaaaatttnccaaganttttaaccaccacctacttcccttaaacacacacacatttttatcttacaattataacccctattgcagnacaaaacaagnaacaatanttctangttagccagccantcaaactacttcagtaaatgancatactacagccnggggntcactcaaacaaaaanttctt

SEQ ID NO: 3013 - DNA, 465 bp, Homo Sapiens
gcgtcgacgatggagtctcactgtcacccaggctggagtgtagtgctgcgatcctgactcgctgcaacctccacctctggagttcaggtgattctcctgcctcagccttccgagtacctgggaatacaggaatgcaccaccatgcccggcgaatttttctattttcagtagagacggagttttgccatgttggccaggctggtctcgaactcctgaactcaggtgatccacccgcctcagtctcccaatagattacatatattattaatgaattgcttcctttaacaccctattcattgaattttccagtaaaccacaattactaattactcctgaaatcagaaaagaggttaaaaagattttataacagtatcctatgaaatctactactttcaagtaatagtagttgaattaccaaaacccgtcactcaagccaatgactacaattaagatatgagtaacatt

SEQ ID NO: 3014 - DNA, 405 bp, Homo Sapiens
aggctgtctgcaagacagtcaagcgcattgcaacagtgcatgtctgacaaacaccacacattgtcgtgagtccaaattgcgcggtgataaattgttacattaagtatttgtttttaaactttttatttttaatgatgataaaattttaagctaatgacataattgctttatttttatttactcattcagagttaaactccctcaatttccgaactactcccttgctgaaagtcaggttctcagttactattacaaaatttaataatagaactgttccatatgcagaaaggaccaagacaaaggaatgggaaggctagggaataacattaacatccacacactgtatactgtgctctctgcttgatgctttgcccacagtgataatttcttcatatagtgcaatgt

SEQ ID NO: 3015 - DNA, 6706 bp, Homo Sapiens
agcccacccgcctggctgcgcgtcccgggcccggcggctgaagaggagccgcggcgaggaacaagagtgtggtgagaggacgcggaaacacctgatatcccagcaaaggaagctgcagaggaagggtcctgccccgtgagcgaggacagcctccaggagcacagcggcttctcctaacatccccctggcagtgaattacggatgaccccgtatatgaggaggtgtggatgccgacacacggggagagctcctgagaccagcacacaggaccagtgtcctccccgtgaccttgcagttgtgtagccacaagtgggagccacagagaaggagagcccataaggggactcttttcaagacacggtgttaaatcaaggctctgaagttggggccacagccggtctcagctttctgtgttctgggggcgcggtgatatgacagcatgtgaagtgagtgggtgagcacggactcctgagagcgagggcgcacccaatacctagttatccggtactgcagagagacacctggtcagccagcgttgcaaagagggatagctagtcactcaggctgcagagagagacacctggtcacccaggctgcagaaacaaccgcagtcaactgcagctccagtcattgctggatgttggctgacgcggtcctggcgccagctggagatccattcaccaagactttctgggcagatttaaagtggctggggttcagaagttcagcaagttggacacacccctcctcgctggagaggagagggcaaaggcgaggcgggggagcagcgtgtgagattccccccttcacacacacaacaaagcgtggacacacagaagtgaaatctgatcgcgtgccaggaaaagctgtgaggctggaaaccccggagtaaggctcgaccttggccagacctgcaggctgcggaaccgggggcgcgcgggcgcagcgcagcacagcccggccatggagcacgcggtggccccctgcgtcctctacccagggactgagcccggggctgccggggagagcgagagcgagggcgccgcgtccccggcgcagacaccctgcagtctcggcgcgtccctgtgcttcagctccggggaagagtccccgccgcagtccctcgcctcagcggcggaaggcgcggccacctccccgccctccagcggtggcccgcgggtggtggagcggcagtgggaggccggcagcgcgggcgccgcgtccccggaggagctcgcgtcccctgaggagcgcgcgtgcccggaagagcccgcggcgccgtcccccgaaccgcgcgtttggcttgaggaccccgcgtcccccgaggagcccggggagcccgcgcccgtacccccggggttcggggcggtgtacggggagccggacctggtgctggaggtgtcggggcgccggctgcgcgcgcacaaggcggtgctggcggcgcgcagcgactacttccgcgcgcgcgcgtcgcgggacgtgctgcgggtgcagggagtgagcctgacggcgctgcggctgctcctcgccgacgcctacagcgggcgcatggcgggcgtgcggcccgacaacgtggccgaggtggtggccggcgcgcgccgcctgcagctgcccggcgccgcgcagcgcgccaccgacgccgtggggccgcagctgagcctggccaactgctacgaggtcctgagcgcggccaagcggcagcggctgaacgagctgcgcgacgccgcctactgcttcatgagcgaccactatctggaggtgctgcgcgagcccgccgtgttcggccgcctgtcgggcgcagagcgggacctgctgctgcgccgccgcctgcgcgccggccgcgcccacctcttggccgcggcgctcgggccggcgggggagcgcgcgggcagccggcctcagagcccctcgggggacgcggacgcgcgcggggacgcggccgtctactgcttccacgcggcggccggagagtggcgcgagctgacgcggctgcccgagggcgcgccggcgcggggctgcggcctgtgcgtcctctacaactacctcttcgtggcgggcggcgtggcgcccgcgggccccgacggccgcgcgcgcccgtccgaccaggtcttctgctacaacccggccacggacagctggagcgccgtgaggcccctgcgccaggcgcgctcgcagctgcggctgctggccctggacggtcacctctacgccgtgggcggcgagtgcctgctcagcgtggagcgctacgacccgcgcgccgaccgctgggcccccgtggcgccgctgccccggggcgccttcgccgtggcgcatgaggccaccacctgccacggcgagatctacgtgtccgggggctccctcttctatcgcctgctcaagtatgacccgcggcgcgacgagtggcaggagtgcccgtgcagcagcagccgcgagcgctcggccgacatggtggctctcgacggcttcatctaccgcttcgatctgagcggcagccgcggcgaggcgcaggcggcggggccgagcggggtcagcgtgtcccgataccactgcctggccaagcagtggagcccgtgcgtcgcgcccctgcgcctccccggcggccccacgggcctgcagcccttccgctgcgccgccctggacggcgccatctactgcgtgagccgcgcgggcacctggcgcttccagcctgcccgggaaggcgaggccggcggcgacgcaggccagggcggcggcttcgaggcgctgggcgcccccttggacgtccggggtgtgctcatcccgttcgctctcagcctgcctgagaagccgccccgaggggagcagggcgccccgtaggccggcggggtcggcgggcgtctccctcggcaggggtttgcggggcccaggtccctttgggcccgcggaggaggacgtggtggggagtcggggccgctggccacgctggtggtttggacacttcgaaggagccccgaggacgctctcagggccgctttcgctttgctttccttttgcttgtctttgcttctgggggtggatgccttgagacccaggaggtgtgcggatgggtcccttgacagacaggacacagagaaggctgtgggatccaaagggtcagcctcagggtacagtgggggttcctgaggcagcctgcagccggccccggggtgtcccgaaccccgcagagcaccgaggctgtgcgcaggagcctgggaccctcaagtaggtcgccgcgaactatcgggggaagcacgcagagaggggtcacgccttttatttttggcttgagatttaaaattataactgataagtaaagctctttctgatttagttgaaaatttcgtaccatgtgctcgctttggttggctcaactccaaaaagagtaatttaataagcattaaaggtaaaatctttgattaccagtaaggtttcttgttcaatatgcattggaagtatttccttccccacaccattgctactcaaactcacatgcctagagcagctccgtctcactgttggaccgagggggctttcatattttcagttgaaaggatgttaactgatgtagcgatgatttaccattatttaaattttaagtcttcagtggctaaatgtgaccaaacagcacatcataagtaggaaaaacttaccagggtgcttgtctatctaaaaagcaatttttgatagtccactctgtatgcccagccgctttcataatctggaacgagataaaatattcctaaaaagcggggaaaatcattttgctttgacagttctataaaaaaaagtgtaggcacattttaaacccactgtatatgatgttttcaatgtggatcgtgtagttctgatgagggagattaatttttacaatcagtattctaagtgtggccgagtgacagtgggcatagatttataacaaggaagtgacgtgcttatcaccatagatttgcaagtaaactgcatgtatttaattgtattgaattgagttccaaaataccctaatagaattaacacgaggctcactgcattgacagggtatgaggattaaaaacaaatcagttgggtcgtttctcatttaacattttacttttcaagtgtgtatacagaggacttactattatgactttgaggatgagatccatgctcacaaatagaggcgaacatttgaactccgaatccaacccattttcttactgtaagaggaaaagttactggaacgtaactagttgaaatcctgcctactttaatattatttgtttgttaatccagtaatgggaactgccatctctgtagaaatcagtgggtaattgaaaaataggttatgctttttaaagagtctgtggttatgagaggtctcagttaagtgtgtttagaagtgatcagcttgaaccttatgcatgactcgggggctggaatttatgatctgggttacggtatgttctggggacgtgtctgcttgcccatggttactcatgaactgaggggatagcttggcaacttggttaatcatcttgggaaagaaaaacagacttcatatcgcctgacttgattggccttttataggagtatactggagaaatggttgtagaaacagtatttacagcaaaaggaaacaaataatgttcattttaagcaatgtaccattcacactgtcctgccttttcctctagaattttattaatggtagaaatttttatatgaaatgggaccaggaccaggctaatattttcagtccttaaatatcaaactcatatgctgttatcactgtgattttacttgtgaaatcattcctgtaatgtttagtgtttgaaaatgaaatattgaaattaggtttccagagtaacactgtccccggaaaaggatatgagaagtggtggatgttggatgggggtggttgcacagtcctgtgcggttcccatggctttccagcgtttcatttagtgaaggaatgctcacactagatgtagcacagcttcctgtggggcccggcagcaaagccccaggtgctccctgtcacctcacaacaaaatgcactaagaaacgtaaagaataagaggaattaatacccaccattaaaggatgtccggccaacctattgtggaaatttatagaatagtatacaccacagttctgaatagtgatatcacataaaaatacatactagaggacctgccaagccatgagcagtgtttttgctttttgggggccagtccctggggtgtggagccgctagggtttgcacccatgaaacagaaaagccacaccctccaaggtgtggctttcattttgggactgctgcagggagggcagaggcattgctgagactgcctggcaacggctgatgccccaggtaggaccttttccatttcaaagtggtgttctaagtctgcgtccaacactgtgtaggaaaaaggttggtgcaaaaatattcctggtcatccacccattaaaatagttagatgaggctattgccttgatgacagctgtccacactcctcatgaaattaacccgtatgccggggcatttccaaatgtctgactcgtgaaattaacccatacgcaggggcctttccaaatgtctgaaaaggcagtggtgtcttttggggaaaatgttatgcatggaagcctgaccttttgcttagttgacagcaatcccttctgtattgccaatcaaggttcatttgagatgcagaggaatgagcttgagccttcctccttttccttccggttttattcttcctcttgggaacatccctccactccgcactgcttcctgcagctttgtagagctggatttggaacttcgggatttggtttctgagtctgtggaggcaccgacttctcctgtaagaaaatgaatgttgtggaaattctttggctacttaactaaaactcgtgactgtataagtttggctacaaataagtaagaaattaatcatctgctctgtttctgctaatttctggtgtcacttcagtaattctggtagcagccgttgaatctgtcagtctcttaggtaacttcctgtaaacgatttggaaataggatgttttcaacgttcttttgtcttttgctgaagtcaggatagattcaagacataatctcttgtaagatctaaatagagcaaatgtaaacaaaagtgcatttttgtattcttgttaattttagatgctttcctagcttacaaaaagttctatttttgggttaaaaatcaatcaactttctgatatttccccttctgcaatgttattgttcataagaaaacacgagctgaaaatggaaatctgcagttgtttcagttgtcttgaatttctttcagtggccacatcatttccacgttttccacatccgggaggaagcctggactgtgcagccttcgggcacccggcacagacactgtgctggcaggagcttcagacacgccaagtggatggatttggattgaacgcatatgaaacaggagacgggttctcatgtgagatcaaagctcctccaaagcctgttcaagctctaagcgattctcaaatgttaccatttattaaaggtaaactacacctgttgaaggccaagttcagggcagctgttgtgatctgtgtagttaatgtatttattaatgcttgacttttaaaatcctgggcataaatagtgcagagcctcgtatgtttgtcagttcatgccgagatgaaataaatcacgcagaaagtgccagtc

SEQ ID NO: 3016 - DNA, 459 bp, Homo Sapiens
cccgccaggcccagcgttagcccgcggccaggcagccgggaggagcggcgcgcgctcggacctctcccgccctgctcgttcgctctccagcttgggatggccggctacctgcgggtcgtgcgctcgctctgcagagcctcaggctcgcggccggcctgggcgccggcggccctgacagcccccacctcgcaagagcagccgcggcgccactatgccgacaaaaggatcaaggtggcgaagcccgtggtggagatggatggtgatgagatgacccgtattatctggcagttcatcaaggagaagctcattctgccccacgtggacatccagctaaagtattttgacctcgggctcccaaaccgtgaccagactgatgaccaggtcaccattgactctgcactggccacccagaagtacagtgtggttgtcaagtgtgccaccatcacccctgatgagggc

SEQ ID NO: 3017 - DNA, 373 bp, Homo Sapiens
tttttttgcggggaggcagcggtgatctttactgagtcagaagggagaccctggggaagtggggcagggcaggggtgggatggtggtggtgagaggccaggcagatgatcttgtctcgggagggaggaggcttctcagcagagatggatccccggcctggaggggagctggcagcaggccaggaggctccgcagaaggccgtgacggtggcggacggtgaccgcgcctggctcggcagggttctctctgcgggtgtgcacagcaaagcttcggcccgtggcgccggggtccgctcagctctacatccaccacgtgcatgtccgtgagctggtatcagcacgagcaccccaatcaccccatcgaagcccaggct

SEQ ID NO: 3018 - DNA, 310 bp, Homo Sapiens
tagcttggcacgagggtgatgcaaggacacagagagtaccagataggtagcagagaccttggcgcagggtgcttcagatgagcaagagaacccagtcgaaccagataccccaggtgggccggagggaccccagaccttcagagggctgccctggtgttctccacagtgcagtccctctgtattcccagagtgggatcggggctttcagccccaccctgatgcctgccctccaggatggctggtttagtctgggtccatgtcccagacccttatattctgctccatgacatgcttgtctataggtcttttc

SEQ ID NO: 3019 - DNA, 2771 bp, Homo Sapiens
  misc_feature (2658)..(2658): n is a, c, g, or t
  misc_feature (2660)..(2660): n is a, c, g, or t
  misc_feature (2753)..(2753): n is a, c, g, or t
gtactcgccacggcacccaggctgcgcgcacgcggtcccggtgtgcagctggagagcgagcggccaccgggagcccccggcacagcccgcgcccgccccgcaggagcccgcgaagatgccccggcgcagcctgcacgcggcggccgtgctcctgctggtgatcttaaaggaacagccttccagcccggccccagtgaacggttccaagtggacttattttggtcctgatggggagaatagctggtccaagaagtacccgtcgtgtgggggcctgctgcagtcccccatagacctgcacagtgacatcctccagtatgacgccagcctcacgcccctcgagttccaaggctacaatctgtctgccaacaagcagtttctcctgaccaacaatggccattcagtgaagctgaacctgccctcggacatgcacatccagggcctccagtctcgctacagtgccacgcagctgcacctgcactgggggaacccgaatgacccgcacggctctgagcacaccgtcagcggacagcacttcgccgccgagctgcacattgtccattataactcagacctttatcctgacgccagcactgccagcaacaagtcagaaggcctcgctgtcctggctgttctcattgagatgggctccttcaatccgtcctatgacaagatcttcagtcaccttcaacatgtaaagtacaaaggccaggaagcattcgtcccgggattcaacattgaagagctgcttccggagaggaccgctgaatattaccgctaccgggggtccctgaccacacccccttgcaaccccactgtgctctggacagttttccgaaaccccgtgcaaatttcccaggagcagctgctggctttggagacagccctgtactgcacacacatggacgacccttcccccagagaaatgatcaacaacttccggcaggtccagaagttcgatgagaggctggtatacacctccttctcccaagtgcaagtctgtactgcggcaggactgagtctgggcatcatcctctcactggccctggctggcattcttggcatctgtattgtggtggtggtgtccatttggcttttcagaaggaagagtatcaaaaaaggtgataacaagggagtcatttacaagccagccaccaagatggagactgaggcccacgcttgaggtccccggagctcccgggcacatccaggaaggaccttgctttggaccctacacacttcggctctctggacacttgcgacacctcaaggtgttctctgtagctcaatctgcaaacatgccaggcctcagggatcctctgctgggtgcctccttgccttgggaccatggccaccccagagccatccgatcgatggatgggtgcatctcagaccaagcagcaggaattcaaagctgcttgctgtaactgtgtgagattgtgaagtggtctgaattctggaatcacaaaccaagccatgctggtgggccattaatggttggaaaacactttcatcggggctttgccagagcgtgctttcaagtgtcctggaaagtctgctgcttctccaagctttcagacaagaatgtgcactctctgcttagtttgcttgggaaactcaacttctttcctctggagacggggcatctccctctgatttccttctgctatgacaaaacctttaatctgcaccttacaactcggggacaaatgggacaggaaggatcaagttgtagagagaaaaaagaaaacaagagatatacattgtgatatattagggacactttcacagtcctgtcttctggatcacagacactgcacagaccttagggaatggcaggttcaagttccacttcttggtggggatgagaagggagagagagctagagggacaaagagaatgagaagacatggatgatctgggagagtctcagtttggaatcagaattggaatcacattctgtttatcaagccataatgtaaggacagaataatacaatattaagtccaaatccaacctcctgtcagtggagcagttatgttttatactctacagattttacaaataatgaggctgttccttgaaaatgtgttgttgctgtgtcctggaggagacatgagttccgagatgacccaatctgcctttgaatctggaggaaataggcagaaacaaaatgactgtagaacttattctctgtaggccaaatttcatttcagccacttctgcaggatccctactgccaacctggaatggagacttttatctacttctctcttctctgaagatgtcaaatcgtggtttagatcaaatatatttcaagctataaaagcaggaggttatctgtgcagggggctggcatcatgtatttaggggcaagtaataatggaatgctactaagatactccatattcttccccgaatcaacacagacagtttctgacaggcgcaactcctccattttcctcccgcaggtgagaaccctgtggagatgagtcagtgccatgactgagaaggaaccgacccctagttgagagcaccttgcagttccccgagaactttctgattcacagtctcattttgacagcatgaaatgtcctcttgaagcatagctttttaaatatctttttccttctactcctccctctgactctaagaattctntnttctggaatcgcttgaacccaggaggcggaggttgcagtaagccaaggtcatgccactgcactctagcctgggtgacagagcgagactccatntcaaaaaaaaaaaaaaaa

SEQ ID NO: 3020 - DNA, 407 bp, Homo Sapiens
  misc_feature (401)..(401): n is a, c, g, or t
atccgggaagagataattaagagcttagcatccctcttagagtagaaggcagtacagataacaaagaagttgtgagtatattatctacattttagaaaattttctgactctagatccatagattctgttgtatttatttgccggacactcatttgattgatttgcaccttgaacactatactaggtcttttcagttacgttgcttgggttaagacactttgctaaaattacagcctgaatcctttctttagttgaagaaagggtatgtgtgtgcaagtgggtgtgtgtgtgccagtttttcttgtctcaggtagatactcccactgtgtataaatagatctacagacttttcatacttacctcccgtattctgtttctgtggtaaaaatatgaagtgtttnagttgt

SEQ ID NO: 3021 - DNA, 432 bp, Homo Sapiens
tttttttttttttttttgagagatcaggtgggggtcaaaagctaaagagatgcattcaaaaaaacaaatatttactctttagcagtttctctcttttaataaagagagttaaaagagaaagataagccattcctaatatctatgacattcagtgggacatcttactttaaccgctttgtaggtttatttaagataaatattgctgaaatataaaatggatgtgtctatgtctttctttatcttgagtaagaaaaataggctgaaaaaatcattgaagaaaatcgagacaaatggcaagcatgagaaaagaatggagcacaacaaagcctcggatattagacagtcaagaaagaaataagataagttacaaagaaaacatcattcaaaaaaaactacatttaaaagtaattggctctgatcaaaatacttgaa

SEQ ID NO: 3022 - DNA, 301 bp, Homo Sapiens
gcacgagcgcgtgtgggccgagccatgcctcctgcccacggccaccagcaagctgtcgggcgcagtggagcagtggctgagtgcagctgagcggctgtatgggccctacatgtggggcaggtacgacattgtcttcctgccaccctccttccccatcgtggccatggagaacccctgcctcaccttcatcatctcctccatcctggagagcgatgagttcctggtcatcgatgtcatccacgaggtggcccacagttggttcggcaacgctgtcaccaacgccacgtgggaagagatgtgg

SEQ ID NO: 3023 - DNA, 467 bp, Homo Sapiens
caagcacctccagaaagaaagcgggtttttgttcacatagcaggaagtgaatccctgtgtggtaatttatcttggaaacacgggtagattggcagaaaaacgggaacatgtaggtaccgcgatgttggtgcatgtccattactttgggataggctttctcagtctttcctcagatgatagttgagccagttttccagtggcaattctgagtgacttgcgcttgtcttatggtgtggtcaagggacgttcagaactacggaaaacttttactgaaacagcgaagcagagtataccggcatgagagggaagatgaacactcacctatgtaccactctttgacaataaatatagtatttctcaaatcagtctcaagactgatcctgtctcagaacagaccattgttctctcatttctctaatacgctgagaggaacactctgaataaaggctaagtggtggagcatgcaa

SEQ ID NO: 3024 - DNA, 157 bp, Homo Sapiens
catggggctacaggtaatgggcatcgcgctggccgtcctgggctggctgagcgtcatgctgtgctgcgcgctgcccatgtggcgcgtgacagccttcatcggcagcaacattgtcacctcgcagaccatctgggagggcctatggatgaactgcgtg

SEQ ID NO: 3025 - DNA, 519 bp, Homo Sapiens
tttttttttttttttttttttttgaagggaataaccattttttattttaataaatattgtcaaattgccatcataaaggttgtatcaatgtacatcccaacagtgtatgtggtccccaacttcccaaggactgtgggattttatagacagtctgttctcatcagagagattgtagaacctcgagactcttcatttaactctgtgaatgtctgcagttcatacatttctctggtggctaatacattaacattaacagcagctcgaaggtttgcccagaaaagcccacatttacgcctatccttgggccattccaagtatgcttttttttccaggagagctttcagtttatgatacctggtgggaatgcaatagaatggaatgggttccagtaagataagaattatgtgatcagaattttcatggaagagattgtgggtgggcaaagtagaattcataatggcaccactcattctggacaaagtggggggacaaaacaaagatggacttatagcttttctc

SEQ ID NO: 3026 - DNA, 417 bp, Homo Sapiens
ctagttggaagtctcttgaatacatacacagcaaggcaaaatgtgacccaatgctgtaaattcaaggtcaaagacaactttccattaactattgaaaatttaaacagcaagaatggatgtgttatatagtaaatatatttaataactgaataaacaagtggttttctttttttaatcaatgatgaaattatgatgaaaatagtcaatgaaagcagaaaccaactttactactagcattaaaagtctcttagaccagataagcaaagaataaactataatgtagtactcaagtaaactgaggtagtagaaagtattgaaaactttatccacccacctttctatttacattacttacaagagtttggttccatattagcctttcttacaagcaacactctatagtatgtacaaaggcaa

SEQ ID NO: 3027 - DNA, 260 bp, Homo Sapiens
  misc_feature (20)..(20): n is a, c, g, or t
  misc_feature (221)..(221): n is a, c, g, or t
  misc_feature (229)..(229): n is a, c, g, or t
  misc_feature (243)..(243): n is a, c, g, or t
gctggtcttctctcccgcgngcgctggggcccgcgctccgctgctgttgctccattcggcgcttttctggcggctggctcctctccgctgccggctgctcctcgaccaggcctccttctcaacctcagcccgcggcgccgacccttccggcaccctcccgccccgtctcgtactgtcgccgtcaccgccgcggctccggccctggccccgatggctctgtncaacgganactccaagctgganaatgctggaggagacct

SEQ ID NO: 3028 - DNA, 400 bp, Homo Sapiens
tttttttttttttttttgacaatagatactgtgactcttctacaacctttaattttggaaaaactcaaatgtgaaagttgtccctcaaacactctgttatcaagagcacagggccaaaaacagcaggttctttgaaacctccatttaaccggtaatacattcaggacatctaagtagctgtgctcgggtacaaccctgcagggaccaggctatgaacttaagtgaataacacaggcctgggaagcgaaaaaatatatgaactgctacagcagtactgtcctgggctaatgaaggctcagtatgaagagatctccaaaaattcttcaagagaagccaggaaaactggattaatacgtgaaaaattctgatctgtaaaaactaacaaagagtccaagatttt

SEQ ID NO: 3029 - DNA, 560 bp, Homo Sapiens
  misc_feature (527)..(527): n is a, c, g, or t
aagcttgcggccgcaccccagctacggttgtctatggacaggaagaggcaggccccagaaaactagaggctccactagaccaggagaagtcaaatggccaaaggcttctgtaaaatctgctgacacctaaacgttggcggtcatcatcattcatccttaaaagaactcctgtgtggtcgaaacataccatgtatctgggtgagagcaggcctggagagcagcttccggctccatcccacaatggaggctggtcacccattaatttgtactattaataaaggtggcgaacatttagggacacttttctgagtgtcaggtgctgcttgttcttacttaattctctcctggccccttccctgaagtcaggaaactgccttggcagataaataagtcgccccaaggccccggagtggaaagcagggtgctgaggttagcgctcacatctctctgatgccacaacagggccctgaaccaccagctctgctccctacgtgttcccgacctaaggctgggctctgacctggctnctctgggcctggccttggtgctttcacacaggt

SEQ ID NO: 3030 - DNA, 4839 bp, Homo Sapiens
gtgacagggcaccgagggaaggaggacgcgagggcagccaggccctagggagcagggagagtggctcgggctcagtcgcgtggccccaggaagaagaaattgtcgagacgaataacatgaggtcatatagaatcccacttttggtgatttcaagtcaagaaagtaaaagtaaaccattgctatctttcaccttaaatatcctgtgttttattgctcagaacatccagtttttctaatactcatgatgtcagaagggaaacctcctgacaaaaaaaggcctcgtagaagcttatcaatcagcaagaataagaaaaaagcatctaattctattatttcgtgttttaacaatgcaccacctgctaaacttgcctgccccgtttgcagtaaaatggtgcctagatatgacttaaaccggcaccttgatgaaatgtgtgctaacaatgacttcgttcaagtggatccagggcaggttggcttaataaattcaaatgtgtctatggtagatttaaccagtgttaccttagaagatgtaacacctaagaagtcaccaccaccaaagacaaatttaacccctggccaaagtgattcagcaaaaagggaagtaaagcagaagatcagtccctactttaaaagtaatgatgtggtgtgcaaaaatcaagatgagctgagaaatcgtagtgtgaaagtcatttgtttgggaagcctagcatctaaattgtccagaaaatacgtaaaggctaaaaaatcaatagataaggatgaagaatttgccggttctagtccacagagttccaaatccacagttgttaagagcctgattgataactcttcagaaattgaggacgaggatcaaattttggagaacagttctcaaaaagaaaacgtgtttaaatgtgattctctaaaggaagagtgcattcctgaacatatggtaagaggaagtaaaataatggaagccgaaagccaaaaggctacccgggaatgtgagaaatcagccctcacccctggattctcagataatgcgatcatgttattctcaccagatttcactcttaggaatacattaaagtctacttcagaagacagtcttgtaaagcaagagtgtatcaaagaagtggttgaaaaacgtgaggcatgtcattgtgaagaagtaaaaatgactgttgcttcagaagctaaaatacagctgtcagattcagaggcaaaatctcatagttctgcagatgatgcttctgcatggagtaacatccaagaggctcctctgcaggatgacagttgcttaaacaatgatatccctcacagcattcctttggagcaggggtcaagctgcaatggtcctggtcaaacaaccggtcatccttactaccttcggagtttccttgtggtgctgaaaaccgtacttgagaatgaagatgatatgttgctctttgatgagcaggagaagggaattgtaactaaattttatcagttatcagctactggtcagaagttatatgtaaggctctttcaacgtaaattaagctggattaagatgaccaaattagagtatgaagagattgccttagacttaacacctgtgattgaagaattgacgaatgcaggctttctacagacagaatctgagttgcaagaactctctgaagtgcttgaactcctttctgctcctgaactaaaatccctagccaagaccttccacttggtgaatcccaatggacagaaacagcagctggtggacgcctttctcaaattggccaaacagcgttcagtctgcacttggggcaagaataagcctggaattggtgcagtgattttaaaaagagccaaagccttggctggacagtcagtacgaatctgtaaaggccccagggctgtgttttcccgcatcttgctactgttttcgttgaccgactcaatggaagatgaagacgccgcttgtggaggtcagggacagctttcaacagtcctgttggtcaacctcggccgaatggagtttcctagttacaccatcaatcggaaaacccacatcttccaagacagagatgatcttatcagatatgcagcagccacgcacatgctgagtgacatttcttccgcaatggccaatgggaactgggaagaagctaaggagctcgctcagtgtgcaaaaagggattggaacagactgaaaaaccacccttctctgagatgccacgaagatttaccactcttcctgcggtgtttcactgttgggtggatttatacaaggattttgtctcggtttgtggaaatactgcagagacttcacatgtatgaggaagccgtcagagaacttgaaagccttttgtctcagagaatttattgtcctgacagcagaggccgatggtgggatcgactggcccttaatttacaccagcacttgaagcgcctggaaccgactatcaagtgcatcacagaggggctggcggatccggaagtcagaacgggacaccgcctttcactgtatcagcgagccgtgcgcctgcgagagtctccgagctgtaaaaagttcaagcacctcttccagcagctcccagaaatggctgtgcaagatgtgaaacacgtgaccatcacaggcaggctgtgcccacagcgtgggatgtgcaagtctgtgtttgtgatggaggccggggaggccgctgaccccaccacggtcctgtgctctgtggaggagctggcactggcccattacagacgcagcggttttgaccaggggattcatggcgaagggtccaccttcagcaccctgtatggcctcctcctgtgggacatcatcttcatggatgggattccggatgtcttcagaaacgcctgtcaggcattccccctggacttgtgcacagacagcttcttcacaagcagacgcccagcccttgaggccaggctgcagctgattcatgatgcccccgaggagagcctgcgggcctgggtggcagccacgtggcatgagcaggaaggcagagtggcttcccttgtcagctgggatcgcttcacgtctcttcagcaagctcaggatcttgtctcctgcctggggggccctgtgctcagtggtgtgtgcaggcacctggctgctgactttcgacactgtcgagggggcctccccgacctggtggtgtggaactcccagagccgtcactttaagctggtggaagttaaaggccccaatgatcgtctttcacataagcagatgatctggctggctgaactgcagaagctgggggctgaagtagaagtctgccatgtggttgcagttggagctaagagccaaagccttagctaaaagattccctacaggagaaaatggaaatgaggaggagagaaactccggtgtccccgaggtgtcggtgtggtgagggccgctggcgttgaagtacatcctgctctggcccagctccccatagcaggcctccagggggccactgcgctgttgccgcagcatcctgctcagtacgtcgacttcatcagccaggagggagagcttgtgaaaggctgtgatggagccacccaggctgatctgggcctcgggaacccagcggaagtagcacagtttccacagttttatgtgtgttccagagacacgtggcagaataacaccgtgcaggttggcgggtttggaaaaccattctctaaaatactgctccgtatcactgttctggctgtcggtttgctgagctggatctggctttggttttaatatcaatgaatttctccttggaagtaattcttggtcactgatgattccattctttaaggcagacggcattcctcttagtgtggagctgtagcttttctatacagaagagattttattatgttccggggattccctttttagaaagattgaaggatgcaatggcaaatataaactcaatactatgaaaaattaatggaatttcagcctcaaagaacattttcctcccttcctttgtgtccttattctaatcctcctcccctggaattacacttttttatgtgttgactctacctaggctgttactatcagcctgaatgggggcgggatgagagtacctcctatccactaatttgcttaaggataagttctaagacgggctagaaaaaacactagacctggtcgattctatcaagaacaatggcaaactgaacagaggcagtcaggaggccaaatgtctgattctttgttctgtacctttcagtagtctgcaaattttctaccaaaaaaaaatcccaagaatttatttgggaattattaaaaaggcaaacaatgaatgttattaggacaagaatatagcagtcaggaggccatgactacatcacagccaggcggcattccctgccacagtggcggcttgaatcatcaagaaatggataaatggggctttagtaaatcaggcttgcaggctcaaagctgcaatctgcccactctcaggtactgagactttgtgggcctcagacaccaggaagaaagttgggatacagtcatttgagttaaaaagggaatgacccctcagaaacccacattagcagtgttactcttggaactgcctttacttttaacgctctctgttctgaaaaagaggtgtttggttacgtgtgagccaacatcacgttttgttagctgtgatttacctttgtccgtttaaaagacttcacggagccattctgtatacaaggtgtgctctttccaatgtagaaggggttatggaaaagggtgcgatcctttgctgtaaactggagagaccagtcccaaacagaggggaattttaagcccttctcatcacccaattggatgtttttgcttatagcaaattcctgcaaaataaataaataaatatttgcaaaact

SEQ ID NO: 3031 - DNA, 462 bp, Homo Sapiens
ggcctgtcggggtctttggagcctcatctcagggcctcgcggccgctggcggccctgaacgccggttctgagtcccgccttgtgctgctgttggagcggccggcggccaggcaggaacgggcgcgggagccctgggaaaggcgcgtgtggaaacgcagcccctgagcccaagggccgtctccttgaggaccccacggcccacagaaagtggccggcggccaggtaggggatcttctccgctgaagagcacgggctcacctctgataactcgcccctgaatagcttttagctcattataataccaaaaaaaaaaaaaaaaacaaacaaaaaccacatccctggggagagattccagatgctaatgacacactccagcgcactagtgtgtggggtcacggtgcctgcgtgccctgaggacttcccaaaacgtgcttactagtaaggcccctgcctgggccgttc

SEQ ID NO: 3032 - DNA, 453 bp, Homo Sapiens
ttttttttttttcctggaaaatgacacttttattattcgttttaatttcccagtaacacatgaattcattctctttaaaatgttaaaaattggagatgtcaaagtctgttttgaacaatgcacagatcttggattttcataaatacacagaaacatgggttaccatagaaaatatatagcaggttcattttgctttgatgcatattttaagtctgccgtttaaataatgtaatgttcataacttaaaacaagaatgcagccttttcctaatggcaaaatatttttcagttggtagcctctttttctcttttttttgaagcttttaagggtagagatcaaaatagcctccctacctccaatacatttgtagagacagggactatttgtagaagagtccagaaggaacagtggctgggaaattgagggcatgagggagacttttcactgtacact

SEQ ID NO: 3033 - DNA, 383 bp, Homo Sapiens
ttttagaaaaacaagaattacagcagccaacctatgttgccctgagttacataaatagattcatgacagatgctgcccgccgagagcaggagtccctaaagaagaagattcagccgaagctctcgctgactctgtccagctcagtgtctcgagggaatgtgtccactcccccacgccacagcagtggaagccttactccccccgtgaccccacccatcaccccctcctcttcattccgcagcagcactccgacaggcagcgagtatgacgaggaggaggtggactatgaggagtcggacagcgatgagtcctggaccacagagagtgccatcagctccgaagccatcctcagctccatgtgcatgaatggaggggaagagaag

SEQ ID NO: 3034 - DNA, 460 bp, Homo Sapiens
ggaatagcagactggtgggaaccaaagaaacagaggcaatcggttgcaagacaacagacagttcagaggcagggacaacagatgggggtggccaagtgacaatcgatccaatcagtggcatggacgatcctggggtaacaactacccgcaacacagacaagaaccttactatccccagcaatatggacattatggttacaaccagcggcctccttacggttactactgatagaaatgttggcagcttttagtaaaagcatttactctgttaccatgagaaaagtttgggtgtcttctgttggtcatagttttacatctgattttacagaatggattattgattttttggaagttgagactttaaaaaaaatagatcttacttgcgaaatgcgatggttgctgggaatacctgaaactgtggattatattgcttgacttctacctcagaatcttctttgtt

SEQ ID NO: 3035 - DNA, 172 bp, Homo Sapiens
  misc_feature (32)..(32): n is a, c, g, or t
  misc_feature (53)..(53): n is a, c, g, or t
  misc_feature (143)..(143): n is a, c, g, or t
tgcaagtccagagagcagggaactaccttaantattctactcaaacttatgtntcaaagttccccaatttcccaagaagggagagatagaggccacaatccagggggccatcttttaaggtaccaataattttccagcccagnaggagtaatgtacacggtataagatttgg

SEQ ID NO: 3036 - DNA, 461 bp, Homo Sapiens
tctgcctggactcacggaaacccaactgagaacaaaattctggcccttgcttggtcaaagcaaacccatttcactgtcaggacccccggtcacacaggaaccacccgccaggggagcctgtgactgtcagttcctgtcccaggctttgcccggccgccccaggaacccaaccctctgggctgacctttctcctgcttctctccaggctctgcaggggacagggcaggtgctgcaggagcccctttgctggctttatctgctcccttgttctggacacagagccctgggaaaaagagggggtggaagacagaaaaggaaggtggaatgttctgttttggccaccaggaaatggggtggggtgggcatacacagagaggacccctctcttaatacagctgcttttctcggtgccaaccttcctccctcaagctcagatccttctcttatgcccttgattgtgc

SEQ ID NO: 3037 - DNA, 910 bp, Homo Sapiens
gggtgaggtcgacgggtatcgataagttttttgttttttattttttctgagatcgcgccactgcaccccagcctgggtgacggagcgagaccctgtttcaaaaaaataagaaataaaaagtgagtcttcatattcaaattagtatatgaggttaggcaacaattcttatatgggaccaggtatatttaatttgcctttctttgcagtcatcctagtaaatccttgtaaagggttatcttatatacaattttgtagtatattctaaatcccctttggcaaataaagctgaagttatctagtgtcagcatactgtgatttgtatattatataagacaagattgcatcattctgattaagttgcagcattttagttttatctgataggcctgtattgagtaatcagtagctatgtgcaaatattaagtcaacttaattaccagacccagaaggccagaggtaatcaaagagtactttcggaagatgaaatatttatgagttatggaaacaatgttttagaaatgtttttcttggtgtaatttaatgcagatttttacctcaattttgttaaaaaacttgataatttgatccctccatctatttaatatttaatattttcagactctagagtatttaaaatttaaacacaattataaaattaattataattcctacttatgttagctatgatttagggccaaaactaccctggttttgtcttgcaacttgaaacattgtgtattttaaactatataatttgggaacattattttatagactgtggataaccaaatataagatttgtgatttttaatgcttcatttgtgtaaaatcatttgtatattctatttatagtatgcattttctagctcattaaaagtacagaaaaacctcaaaaaaaaaaaaaaaaaaa

SEQ ID NO: 3038 - DNA, 487 bp, Homo Sapiens
  misc_feature (401)..(401): n is a, c, g, or t
  misc_feature (456)..(456): n is a, c, g, or t
  misc_feature (480)..(480): n is a, c, g, or t
aaaacatggtacattcaggagctgtgaatatagctctaggtgtgctcctgaatcagttcatggtagattatgctgaacaacagtgagatgttattggaggtgtggatgagggagtttgttgttgcagtccttctttgcaccttattttaaagaataaatgaaacatttttctggttacttttttaaaaatttaaaatggaagggaagaataggggcagggcattattaggctatttctgatgcttcagtgttataaattcaacatagaggctgacaacctaaattcatggtgtaacacagctcttttccttttccttttttttttttttttggtatctgttcaatgaaaataaggtatgacccaagtttttacctagtctgactaggaagtattccacttncaagggtctggaaggtagggtcttttacccttaaaaaacaaccaaccaaacaaancttttcacacgggttggttagggnggttggg

SEQ ID NO: 3039 - DNA, 429 bp, Homo Sapiens
  misc_feature (399)..(399): n is a, c, g, or t
  misc_feature (419)..(419): n is a, c, g, or t
ttttttttttttttttttttcccaacacaaaactggtcatttattttttttgttgtcattgttattaggaagcaaaaaaatgtacagttacaaaaatcattttccaaacagaggttaaatatgagctgaaaagtgtaaaaaaggaagaggaacatcactttacaaatcattaaattaaacaaataaacaaacagaacccaaagaaccaaccccccatgctgagttctttccttgggccacttttgcaaaataaaaccagaaaatgaattgggccctggaggtgggggccctggggaggggcgggacctgggaaccaaaaacaggcaggagggggctgctggggcatggaccctggctttctgccccgtgtgcctggtggtttctggtacctggtcatcntacctggtggctctacccangctgggggtc

SEQ ID NO: 3040 - DNA, 2096 bp, Homo Sapiens
agtctcatattatacaactggaatatgagttcaataaactcatgtttattttaggtgctacaacaggcattcttaatagtattttatatttacttgtgtttatcttgtagctcacgtcccctttaccccaaagtgagtaaagtgctgtagaatctaggatttggtcatatcacaattattgataattttcaacgatacaaatgaacatttccaatacacaatgccaagaacagaagtgttaaagggaagggatggcagagcagtgggtaaggtcacaggcagaagtaagaggcgaggccaaggaaggtttcagctgggacctggggaaagtggggtgggactttgcaagttgagaggacagcagactccaaagctcggaggaaagagggcaggggtctggggaatacgagacagcctgtgtcactgggcagtgcagcctggggtggtcaggaaggggcctgactaggaagttcattctaatgatgacagagacacagcattttgggcagaaatatcccatgttcaatttctgtctaggatgatccttctggtatgaagcacaggttaggggaaataatgggggtatggaaactgtcaagaggctgctgcccctggccagtagaaagagagtcaaggccagcccaggacaggaacaacagggagggaaagaaagtgaagaccctgaggagagagaggtgagaggtcagaggcagtagctgatggatgggggcgagggtgggaggaaggcccagggacagtgttagagaggccaatgtgtgtctgtccagcccctggcccctgggactcaggctacgcaccttcatgccctcccctgcagctgcatgcattgagattggtcaacggatgctcgctgttctcttgggtccctaagctagaatgaagcaaccttggggcaactcatggctgtgtccagctcctccaagggagcagaagaggaaccaacaggcagagaggagaagaccggaaagccagagagtgatcgggagagagaaacgcaggggctatttgtccctgacacagatgctgagttctgccagttcctcatgggtttctctcactggcaaccaaaggagtcttgactaaattaaataccacgctggctctggcgagagcggccagggagatggtggtgctatcatcaaaagaagcatcccaggaggaagaaaaaaagtttggaagcacatcgtgtcaacatatcccagtaaatgcatacagcaggcacttctacctaagcatatgaaccagatttcttattcatttttcatgtattctctgttgggttttgtattaaaatattttccaaaattgtaaaacacaaatcttatttaagaagtgccagaaaactttcaaggatattataatttgttttgcacttctagaaataaattgctttaaaaaaatcaataaattctcagtattactgttactagaactcgctgaatagaattatccagctgaacacaattacgatgcttatctagtcaacagtcagagacctgagcctctggggcaaggctacttggcagtacatgttgctcttataccactccttggggacgccgaggggaaggtggtggcaggagacaggacacatgggcagggccacgccataacagagaacaggagaagttgaggggaggcaagagaggaggcaagtgagcatggtcttcctcactggggaagaaactcgtaggctgcctggagcaaccatcagaggctctctggaagtcctgccgtttggcgccatcatggaaatttctggatgaagaaaggccacatttcaaaacctgctgcagatctggctgtcccctgcatgagctccctctgccagcaaggccttgcagccagtgccaagtctcaaccagagggagccacagtattcactggctcagtgctatgttcaaattcctccatgtgcctacagtggaatttcaatcaaaatcagcttatccttctctttcctttgcaatctgagtgtggtgccagccatctctcaaccccacagcaatggagtatctggagcgcaaggaggggttacagcttcttaatttcttatttcttaaaaaaaaaaaaaa

SEQ ID NO: 3041 - DNA, 650 bp, Homo Sapiens
atttctatgaattctaaaaaatattgttttctatgaaattactagtgcccagctgtagaatctaccttaggtagatgatccctagacatacgttggttttgagggctattcagccattccattttactctctatttaaaggccgtgagcaagcttgtcatgagcaaatatgtcaggggagtcaatttctgaccaatcaagtacactaaattagaatatttttaaagtatgtaacattcccagtttcagccacaatttagccaagaataagataaaaacttgaataagaagtaagtagcataaatcagtatttaacctaaaattacatatttgaaacagaagatattatgttatgctcagtaaataattaagagatggcattgtgtaagaaggagccctagactgaaagtcaagacatctgaatttcaggctggaaaactatcagtatgatctcagcctcagatctcttgtctgtaaaatggaagaactggattaggcagtttgtaagattcctcctaactttcacagtcgatgacaagattgtctttttatctgatattttgaagggtattttgctttgaagtaagttttaattaggcaatatattttaggggcatcttcttctaatctctgacagtgttcttaaaatta

SEQ ID NO: 3042 - DNA, 685 bp, Homo Sapiens
aataaccctcactaaagagcattggaatcagctgccggtaaaatgtagcttggccaaggtctgttatgttccactgaaatagtcttaacagagaatttttgcattcccacccaaaatccctctcagccactcaaatgcctatcttctccagtctaccaagttacattgtcccacccaacattacagttcttgaacatgttatttctccacttactggtttaagttgattatagtcactggataagtattataatagagctacttagctgtggttataatacccttctgttaacaatatgcaggcaaattaatggcctattctaacattattcaacccaccaaagacctccacaccatcgttaccttgaaaccgattatggatcatgcccacatggatccaagctacttggcgcatcgaggtaaggggtgaagggtctgtgctagattaaaaggcacggggtggcgaatgtggcagagaagttgtttgtggggagaccttgcttttaacaggcttctggaaaagctagagaaaagtggttggccgctttccccctttccctccccttcaagcccgcttgagaattggccttattattagagctgctataaaacagtttcttaatgttagagaaccacggtactaagcttcttggttctcattccaaggaggatgggcagtctctac

SEQ ID NO: 3043 - DNA, 599 bp, Homo Sapiens
gggtcgaggtcgacgggtatcgataagttttttttttttttttttttaaaggagcaatgacatttcctagaagttactctaagaatttccctagagggtcgggtatcatctcagccagatctttctcatccttcaaggccctgtttggtacagcttgctaggaagctgttccagactgcagcagccctctctggggtctctctaccacttcccaggcactcagaacttgtgcctcagtagactgttttgtggcactgtcccattctctgattctccatgtgagctggttttatcccatccagcatggctgtgaaatcctaaaggttcaaaccccagccactcttcacctatatttcccccaaatggctagcacgggaaagggcccaaagtaggtgctcagtgctgatgagagagtagaatttaaataccccaggaagcattgtgagttactacggaggccatgaaatgctgccacctccccaagctgattaaagagtgatactaggaaaataggtagggaagggctaatcagaaatgcctctggttcagaagatgctgagttttaaagtccagagagccaaagaaaaaaaaaaaaaaaa

SEQ ID NO: 3044 - DNA, 1077 bp, Homo Sapiens
gggttaatagctcttacttaaaaaaacagatacgaagaatgtcttgatttggtgtgctcatttaccataatgtcatgaggggaattagatttcacaactttaaaaggaatatatttttattttattttgaaaaactgagtcatataggaattttcttatacttcaaggcatcatggaaacatttttttcctgtttgggtattgtggaatttaaacgttcaaataaataaatggcataactaagtgttccaaatttttttacaatgtctttgaccctattcaaacactttaggtatttactgaccgtctgatgtgtaagatgtggaataaaactggaatcaattaattatttcactgtgttatcagcgcaagatcaaccatctgggtttcttaaagacacccgaaggattgaattttgtttcagtattgataatggcatagtctctatgtgctacatggaattacatcatttatccctccagtgccctatatgttgataagtatgtcagtttgacttagtatacatatatacagagatttcattacatttacctaataaatacaaaatacatttcgagtgttactgatctcctatgttacatgagcctcctgtaatcattgtgcattgatgttccaatgttttattgtttgtatgaattttaatttgaaaacaaggaaacaatccaaaagcagaaaaaatagcttttcttaaaattttcagtgctacattttccctctgaggtccatagagatttgaatgtataggagattatccgaaaacagctattttgattaaaaaatatatctcccaggattcaaccaacttaatgatgaagtactattgtctactgctttatacataaaagggaactttttatctgcttgtaaagggatttttatgtgtatttctgcataatcagatgacttctattgtgttttctactgatgaaattctctgtaaaatgtctttttcttacattatccaacaggcataaagaataacagtaaagacttttgtgtttgtaatactacctcttttatccctgcactactgttttattgcaaaaattctatattg

SEQ ID NO: 3045 - DNA, 342 bp, Homo Sapiens
  misc_feature (259)..(259): n is a, c, g, or t
accaagaggaagatgggaatacctctggccgctccgggccctccctgtcgctgaagcccctccttcctccgctggccgggtctgcaccgagcaaccctgcagatccagtgggccatggaaaattggattctactcacgaacctggcctggagggcgggggtgggatgggggcgggttaccgggaaggggcgcgagtgcgtgctgtttagccctgtagggagacatgatttccagaagtctttaggaacccagaggccgncgcaagagtcacggaatccgatttcaacctgataatttctaagggactggccacgttcttttattatatggctattgcttcgt

SEQ ID NO: 3046 - DNA, 754 bp, Homo Sapiens
gaagttgtggatttcagttttaacaaatgctattaaagtggagaagcacactctggtcttggaattccatttgaggatttagaagtgtcatgtttataactattcagttgtgtttgttgctggcttgttgtaaagcaataaaatttttttggtctttttgtaagtgagtgtgctgctgtaagaaatctcccatgtgcataacaaattctgaatattttttgaggctaaagaagaccggggtgacaagcagatactgctgtgtaatggttacactaaccaaaagacaccagccactcagagttctatactgtaaagcgcagataacatttgtgtgttataccttgattggggaattaaaagtcatttaactgaagatgttgagaaacctgggctctggttttagtataccggaattacttttttccaattttagaaaatcaagcaggttagagaaaatagagatgaattaggggacactgtcttatggattcatttataagaagagaaccagccatatacacttggggagatttgccacatcttaaacttgaataatagtatgagtaatgcttaagggagtttaatagagaaggaaagctttggcagtgttttgagaacttaagtggctaaagagatgagacaaacatgcaggtcgctactggcatagtttcataattgtgtactcggaaattaaagtttgcttgtttcttggtctggattaaaaaaaaaaaaaaaaaaaaaaaaaaaaaaaaag

SEQ ID NO: 3047 - DNA, 655 bp, Homo Sapiens
  misc_feature (418)..(418): n is a, c, g, or t
  misc_feature (539)..(539): n is a, c, g, or t
tggcgctgcggcgggagatgctgtcgggccgcggcggcgcttggcagccaggagctctgcattgaaggcactggggtgaggcttactgcccggcaggctggtgggtaaagtgaatgccgaagacagaagatttggatgatacaccactgactttctttgtttggaatacacgttatgaaccctttctggagcatgtctacaagctctgtacgcaaacgatctgaaggtgaagagaagacattaacaggggacgtgaaaaccagtcctccacgaactgcaccaaagaaacagctgccttctattcccaaaaatgctttgcccataactaagcctacatctcctgccccagcagcacagtcaacaaatggcacgcatgcgtcctatggacccttctacctggaatactctcttcttgcanaatttaccttggttgtgaagcagaagctaccaggcgtctatgtgcagccatcttatcgctctgcattaatgtggtttggagtaatattcatacggcatggactttaccaagatggcgtatntaagtttacagtttacatccctgataactatccagatggtgactgtccacgctttggtgttcgatattcctgtctttcacccgctagttgatcccacctcaggtgagctggatgtg

SEQ ID NO: 3048 - DNA, 637 bp, Homo Sapiens
cgtgcacaaaagagagctgaggggcgggggcgctgcggcacagctgggtttgagcaactgaactggaaacaagatgcaggaccccaacgcagacactgaatggaatgacatcttacgcaaaaagggtatcttaccccccaaggaaagtctgaaagaattggaagaggaggcagaagaggagcagcgcatcctccagcagtcagtggtgaaaacatatgaagatatgactttggaagagctggaggatcatgaagacgagtttaatgaggaggatgaacgtgctattgaaatgtacagacggcggagactggctgagtggaaagcaactaaactgaagaataaattcggagaagttttggagatctcagggaaggattatgttcaagaagttaccaaagctggcgagggcttgtgggtcatcttgcacctttacaaacaaggaattcccctctgtgccctgataaatcagcacctcagtggacttgccaggaagtttcctgatgtcaaatttatcaaagccatttcaacaacctgcatacccaattatcctgataggaatctgcccacgatatttgtttacctggaaggagatatcaaggctcagtttattggtcctctggtgtttggcggatgaact

SEQ ID NO: 3049 - DNA, 273 bp, Homo Sapiens
  misc_feature (92)..(92): n is a, c, g, or t
  misc_feature (160)..(160): n is a, c, g, or t
  misc_feature (241)..(241): n is a, c, g, or t
  misc_feature (246)..(246): n is a, c, g, or t
  misc_feature (262)..(262): n is a, c, g, or t
  misc_feature (269)..(269): n is a, c, g, or t
ttttttttttttgtatagaaaaatactttttattttgtcattgaaaaaccattttaaaataatatatcgtgtagaataaaaaattccatgantatatacatgtaaattatacatatatgtgaatttaattttgttaaaaggtaattggcatctgcaattncatgcagtctaagtgaaacccataaagaaatgtgtatgaaatagggaaaggcaacaaaaggctcataacattttaaaattnggaantcagtttcaaaacccntcatganctat

SEQ ID NO: 3050 - DNA, 746 bp, Homo Sapiens
tttttttttttttttttttttttttttttttttttttttttttttttttttgggtgaaaatcatatatttactatgttgaaagaaataatacaaaaaagagaggaaaataaaagcaaccctaaaggtcactaaagaagtcataccaacctcatcttgctttgtttcatctattcatgcaacagcagtactattactccacctggacacagttaaactcatcttccttttcaaaagggatccaattttttcaaaaacctttgaagcaaaggatttgctttattaaagattatcttctgttaggcaacactggcaccccttgtttgcagaagatgattacgtggtggttaaacactggttgtaaaggaatgtgcctcaaaaaaacaggaaggaaatcaataccagatctcttcatttaaaaagctaatggatggaacccattactattgattttcaattagtatgatgccctatagttttgttttcagtagtaaaggtatacagtttacgatttaaccttaaaaagaaataaaagacttatgctcaagtcatttggccaaaagatcaacaggctgctctttgagggccccagtttaagctaataaggaaagctagagtctgtaaacatgttttccattcttttttcctcctgtaccaatagtgcttcctaggctcctcataaatcttctagaagaggaataaagccacttatacaaactttgcagttataaacaccctgacttttgat

SEQ ID NO: 3051 - DNA, 446 bp, Homo Sapiens
  misc_feature (47)..(47): n is a, c, g, or t
  misc_feature (107)..(107): n is a, c, g, or t
  misc_feature (369)..(369): n is a, c, g, or t
  misc_feature (375)..(375): n is a, c, g, or t
agcagacgagcctgctggtgctggtcccggcggtgttggagccgcanttgagctgtggaaagtgaagaaggcattgaagatgactattttttggagaggcctgatgnccgaatttcagtttggcacttacagcgaatctgagaggaaaaccgaggagtacgatactcaggccatgaagtacttgtcatacctgctgtaccctctctgtgtcgggggtgctgtctattcactcctgaatatcaaatataagagctggtactcctgggttaatcaacagctttcgtcaacggggtctatggcctttggtttcctctttcatgcttgccccagctctttgtggaactacaagttgaagtcagtgggcacatntgcccngggaaggcctttcacctacaagggttttcaacaccttcattggatgacgtcttttggccttcatccatcac

SEQ ID NO: 3052 - DNA, 1414 bp, Homo Sapiens
gagggcccgtgccagaacctgaccatgctggcactctgattttggatttctagtctctagaactgtgaataagtacgtttctattgcgtaagccacccagtctatggtattttattatggcagcctgagctgactaatataggcttctagattggaaggggaaggaagtaaagagagagaattgatagggataaagaagaggcatgaagagacttggggtatctgctactgaagacatcagctctctatgacaaaacagcacagcatgtttggagtaagagaaagctgaagtctcaacaaacaaatagattcttaatgttctataccaccggacaaactgcagcccttttatacatatggagtactttctgggccagtcctgtggccccttccaaatgtatggtgttgaaacgtagtaagtttatgtctttaaggtctgcccctcccttcttgcattatatcataaactcttctcttttttttttttttgagacggagtcccgctctgtcacgcaggctgccaggctggcgtacagtggcgcaatctcagctcgctgcaacctccacctcctgggttcaagcgattttcttgcctctgcctcctgagtagctgggattactggcacacaccaccatgcacagggagatatgagacatcaatcaatatatgtaagatgtacatcagtttcgtctggaaagatgggacaacatgaagcagggagggggctccctggtgacagttccttgttcaaaatgccaagaacctggatgactcatagtcaagaccctccaccagtaacatatattggcgagccagccaggagaccactacaggaaacactccatttattccacctgacttcccacttggctgcatcctcaaccattgaaatgaatttgaccctgataatctaaggaggaaacatttgatattcttttgcaataatacttggccccagtattgtttggaatctggagtttgctgttgaatgggaaagcgggatgacgttgcatgtatccaggctttggtgctgctgtcctaagaagggtcaggcctggtcagcatatggtgctctcctttggtgctatttggctccagtgtccttggagtctgaggaggtttggcctttaaaaatcaaactgccaccggaactgctttaaaaatgtttggttcacagccttcactggattacctattggagcaaacaaagtgtaaccatgtaaaacctgtgagcttgtattgatatctcatggctagagttccaaggtaaaagctattggatcttcgtttgtgtgtgtgtatacatgtctagatgtgtttatttgtatgtacacttattgttatatgttgtgtcaaccaaatcagcttataaataaaaaagcactcataaatcaaaaaaaaaaaaaaaaaaaa

SEQ ID NO: 3053 - DNA, 1267 bp, Homo Sapiens
gcatgtgcaacctcaaggacatccccaacctgacggccctggtgcgcctggaggagctggagctgtcgggcaaccggctggacctgatccgcccgggctccttccagggtctcaccagcctgcgcaagctgtggctcatgcacgcccaggtagccaccatcgagcgcaacgccttcgacgacctcaagtcgctggaggagctcaacctgtcccacaacaacctgatgtcgctgccccacgacctcttcacgcccctgcaccgcctcgagcgcgtgcacctcaaccacaacccctggcattgcaactgcgacgtgctctggctgagctggtggctcaaggagacggtgcccagcaacacgacgtgctgcgcccgctgtcatgcgcccgccggcctcaaggggcgctacattggggagctggaccagtcgcatttcacctgctatgcgcccgtcatcgtggagccgcccacggacctcaacgtcaccgagggcatggctgccgagctcaaatgccgcacgggcacctccatgacctccgtcaactggctgacgcccaacggcaccctcatgacccacggctcctaccgcgtgcgcatctccgtcctgcatgacggcacgcttaacttcaccaacgtcaccgtgcaggacacgggccagtacacgtgcatggtgacgaactcagccggcaacaccaccgcctcggccacgctcaacgtctcggccgtggaccccgtggcggccgggggcaccggcagcggcgggggcggccctgggggcagtggtggtgttggagggggcagtggcggctacacctacttcaccacggtgaccgtggagaccctggagacgcagcccggagaggaggccctgcagccgcgggggacggagaaggaaccgccagggcccacgacagacggtgtctggggtgggggccggcctggggacgcggccggccctgcctcgtcttctaccacggcacccgccccgcgctcctcgcggcccacggagaaggcgttcacggtgcccatcacggatgtgacggagaacgccctcaaggacctggacgacgtcatgaagaccaccaaaatcatcatcggctgcttcgtggccatcacgttcatggccgcggtgatgctcgtggccttctacaagctgcgcaagcagcaccagctccacaagcaccacgggcccacgcgcaccgtggagatcatcaacgtggaggacgagctgcccgccgcctcggccgtgtccgtggccgccgcggccgc

SEQ ID NO: 3054 - DNA, 596 bp, Homo Sapiens
ttgaatttaggtgacactatagaagagctatgacgtcgcatgcacgcgtacgtaagcttggatcctctagagcggccgcctactactactaaattcgcggccgcgtcgactttttttttttttcaatagtctactgtttttatttgtggaagggttggtcttataggaactattctgccattagcagaagtggaaactcagatttccatattttagaaagtattctaaaggagtgttgagaatggatctgaaatgagactagggatagagaaaccagtcaggatatatagcagccacccacggaaaaggtaatgacagttcacagaacagcagcaatcaagtgcaatgaaagtttgtatttgcaagctccagactcttaaattccaactctgcagtaaaatagctaaaaacagtctgaactaaaatatcaagagtttttggatagagatgtaggttgtggtgagaggggaggcaatgatcttgagtggtattttcctatgaagtgtgagaaggggtcgacgcggccgcgaatttagtagtagtagtcgacccgggaattccggaccggtacctgcaggcgtaccagctatccctat

SEQ ID NO: 3055 - DNA, 283 bp, Homo Sapiens
ttttttttttttttttttttttttttttttagttgccaaatagcatttatttgagtacaaaatcctggcaggcaaaagcacttgcagacccgactctctgagaacttacaaaaagtgaaaagctcttagttcattttgagtcagaacaataaggaaattatgaaatctaagatgtgcaggtttacttaaaagtgataatggtttatattaactgtggcccacacagggtctctctaatctaatggaaacaggacagtcactggaaataaggactaatcaatgg

SEQ ID NO: 3056 - DNA, 445 bp, Homo Sapiens
  misc_feature (56)..(56): n is a, c, g, or t
tttttttttgaatactccatttaggaaagtgcttaatcaaagaaaattagccaatnaataaagaagaaatgctaggaaaactattattttgcaactctaatgaaatagtgtatctagccaatgattattaatcactgttaaaatgatttggtgaacttgatggagaagtttatgatgaaggaatcaggcataacacctgaactcactaattaattttagcatcattaaagtggggaactaaacatataattatatgcctatcattgtgacaaaataggaagtacacagtaccacccaaaaaatatttttgcctaaaatactgaatcaaaatctaatcgagtctctatatctagcgaattacttacaggaaacatgagagacagagaaactccaaatttcacgtgttttttcataggtcttttcaaacgtattgttcgtaagtaac

SEQ ID NO: 3057 - DNA, 441 bp, Homo Sapiens
  misc_feature (67)..(67): n is a, c, g, or t
ctacaatcactgtatggaatcggtcctggcagctgaacataggaggtcactggaacaagtgatagtncagattggctttcaaacatcctcctggcttgagttttatcagctacaatgtgggtcctcttttgaagccttaattcacaacagcagctttttgggggtggggctgggcgggtgttgtcattgttctttcccttcctgtaagtgtcgctagttgctgcctcgtatctcaggtttttctctgtttttgagaaatggacagttttttgaccaggatgtgacttcatgtttcctatggtgacttctaaaaccagcacagaatgatatgactcaacacagaccgacttggttatggggatgatgagccgcacagacctcactagttgtgcacaaataatgtgctatgatggggtgtaaagtgaaggcagaagagggtca

SEQ ID NO: 3058 - DNA, 3563 bp, Homo Sapiens
atcgagcttcagattgtttactatttaagatgtacttttacaaaggaacaaagaagggaaaaggtatttttgtttttgttgtttggtctgttatcatcaataacctgttcatatgccaattcagagaggtggactccaggttcaggagggagaagagcaaagccgcttcctctctgtgctttgaaacttcacaccctcacggtggcagctgtgtatggaccagtgccctccgcagacagctcacaaaaccagttgaggtgcactaaagggacatgaggtagaatggatgcttccatcacagtaccatcattcagaataactcttccaatttctgctttcagacatgctgcaggtcctcatctgaactgttgggttcgtttttttttttttttttcctgctccaagaaagtgacttcaaaaataactgatcaggatagattattttattttactttttaacactccttctccccttttcccactgaaccaaaaagaaatcccatccctaaaacctgccttctccttttatgcaaaactgaaaatggcaatacattattatagccataatggtatagatagtgattgcgtttggctatgtgttgttttctttttttttaaattatgaatatgtgtaaaatctgaggtaacttgctaacgtgaatggtcatataactttaaagatatatttataattatttaatgacatttggacccttgaaacatttcttagtgtattgatatgttgacttcggtctctaaagtgctctttattaaataacaaatttcttcagtggtctagagccatatctgaaatattgctaagcaatttcagttcatccaggcacaatgtgattttaaaaatacttccatctccaatatttagatatagattgttttgtgatgtatgaggaatgtatgttagtcttccagatctttgaatgcctctaacacagctttgccttctaaagcggtaattagggatttaaaaaacaacctttagccctttatcagcatgaaatgcttgagtgatgtggttttctaatttctttggggtaattatgactcttgtcatattaaaaagacaagcacaagtaaatcattgaactacagaaaaatgttctgtggtttcatagttaagcaaaactctaaatcgccaggcttcatagcaaagacatagtcagctaaaagccgcacatgtggatagagggttcaattatgagacacctagtacaggagagcaaaattgcaccagagattcttaaccaaccagccttaccaaacaacacaacaggggaaccccaatctgccttacccaaggccccactggcagctttccacagaatttgcatttagaggagcagaatgacatcactgtcctttgggagtaggtcctctgaaaaggcagcaggttccagcaggtagctgagctgagaggacatatggcccacggggacctacagacagcctttgacatttgtatttcttacaatggagggccaaggagggcaaggggctgtggagtttggtgtctactagtgtgtatgaatttgagctagagtccttctgtggcatgcactttgaccactcctggcagtcacatggcagatttccaagtgcaaatccttaatccaaacaaggatcatctaatgacaccaccaggccaatccctgctctcctccccgaaaagtcagggtcccttcattggaatcctccacccacccaagcagaatttagcagagatttgccttcaaaccctaacggcccccttgttctctggtccttctcaaacccacctttgtaggccacccagcattgcaggacagcgtgtggggcagctggacctgtgcttcctgcctgggagtctcccttggaattcatcctgactccttctaataaaaatggatgggaaagcaaaacactttgccttctaaaggccgtataccaagtatgcttagataaataagccacttttctattacttaagtaagaaggaagtagtaattgatactatttattgtttgtgtgtggtagcttgaagcacaccactgtccatttatttgtaagtgtaaaatatgtgtgtttgtttcagcagcacttaaaaaagccagtgtctggttacacatttcaattttaattaattgacataaaaatgctaccgccagtgccagctgcatcctatttaattaaaaaggtactatatttgtacattattttttaatgttaaaagggcttttttaagtttacagtacacataccgagtgactttagggatgcttttgtgttgaaatgttactatagtggctgcaggcagcaacccagaaacactttagaagctttttttccttgggaaaaattcaagcacttcttccctccaccctcactccaaccaccccaatgggggtaattcacatttcttagaacaaattctgcccttttttggtctagggattaaaattttgtttttctttctttctttttttttttttttcactgaacccttaatttgcactgggtcatgtgtttgatttgtgatttcaagaccaaagcaaagtcttactactactgtggaaccatgtactagttcctgggaattaaaatagcgtggttctctttgtagcacaaacattgctggaatttgcagtcttttcaatgcagccacatttttatccatttcagttgtctcacaaattttaacccatatcagagttccagaacaggtaccacagctttggttttagattagtggaataacattcagcccagaactgagaaactcaacagattaactatcgtttgctctttagacggtctcactgcctctcacttgccagagccctttcaaaatgagcagagaagtccacaccattagggaccatctgtgataaattcagaagggaggagatgtgtgtacagctttaaggattccctcaattccgaggaaagggactggcccagaatccaggttaatacatggaaacacgaagcattagcaaaagtaataattatacctatggtatttgaaagaacaataataaaagacacttcttccaaaccttgaatttgttgtttttagaaaacgaatgcatttaaaaatattttctatgtgagaattttttagatgtgtgtttacttcatgtttacaaataactgtttgctttttaatgcagtactttgaaatatatcagccaaaaccataacttacaataatttcttaggtattctgaataaaattccatttcttttggatatgctttaccattcttaggtttctgtggaacaaaaatatttgtagcattttgtgtaaatacaagctttcatttttattttttccaattgctattgcccaagaattgctttccatgcacatattgtaaaaattccgctttgtgccacaggtcatgattgtggatgagtttactcttaacttcaaagggactatttgtattgtatgttgcaactgtaaattgaattatttggcatttttctcatgattgtaatattaatttgaagtttgaatttaattttcaataaaatggcttttttggttttgaaaaaaaaaaaaa

SEQ ID NO: 3059 - DNA, 400 bp, Homo Sapiens
tttttttttttttttttaaagagttggagtagggaaggtttaatagtaaaataaacgtggctatattttaacataagatgtaaaatgtgtataggtgttttaagattttaaaaagttaccttaggttctactgcctgtggtagatggaattctaagatggcccccaaggtctcccactaccacctgccgtgaacatgccttgcattaatataatttctggaactgggactcagagggattttatttatttattttatttttatttcttgagatggagtttcactcttgttgcccaggctggagtgcaatggcgtgatctcgcctcactgcaacctccgcctcccgggttcaagcaattctcctgtctcagcctctcaaattgttgggattacaggcatga

SEQ ID NO: 3060 - DNA, 1814 bp, Homo Sapiens
agcctgtggagtacctcaacaaccccatcatcacccagttcttccccaccctgctgctgtggtgcttctcggccctccttcccaccatcgtctactactcagccttctttgaagcccactggacacgctctggggagaacaggacaaccatgcacaagtgctacactttcctcatcttcatggtgctgctcctaccctcgctgggactgagcagcctggacctcttcttccgctggctctttgataagaaattcttggctgaggcagctattcggtttgagtgtgtgttcctgcccgacaacggcgccttcttcgtgaactacgtcattgcctcagcctttatcggcaacgccatggacctgctgcgcatcccaggcctgctcatgtacatgatccggctctgcctggcgcgctcggccgccgagaggcgcaacgtgaagcggcatcaggcctacgagttccagtttggcgcagcctacgcctggatgatgtgcgtcttcacggtggtcatgacctacagtatcacctgccccatcatcgtgcccttcgggctcatgtacatgctgctgaagcacctggtagacaggtacaatctctactacgcctacctgccggccaagctggacaagaagatccactcgggggctgtgaaccaggtggtggccgcgcccatcctctgcctcttctggctgctcttcttttccaccatgcgcacggggttcctagctcccacgtctatgttcacatttgtggtcctggtcatcaccatcgtcatctgtctctgccacgtctgctttggacacttcaaatacctcagtgcccacaactacaagattgagcacacggagacagatactgtggaccccagaagcaatggacggccccccactgctgctgctgtccccaaatctgcgaaatacatcgctcaggtgctgcaggactcagaggtggacggggatggggatggggctcctgggagctcaggggatgagcccccatcatcctcatcccaagatgaggagttgctgatgccacccgacgccctcacggacacagacttccagtcttgcgaggacagcctcatagagaatgagattcaccagtaaggggagggaggggccctggaggccacatcctgccccaccccacccccactcccacggacactaaaacgctaataatttattagatctaaagccccttcctccccagcccctgctttcattaaggtatttaaacttgggggtttcactgctctcccccatgatggagggagggagccccccaacctcagtgaggagagccccgagccggccccggggcaaagaggggtgcagagggagttcccccagatcagtaccccccacccctccccagctagtagcatgaccaggagagggttaatgagagccaagaggagtacctggtgcacctggtgccggtggctggagacctggggggcaggtggatctggggctgttcccccccctccgttttttccaccccacagttcctcctgggatctggccctccagggaagtggagcctccagcccctaggggatgcatgaggggggagggggtgctgagtgggaggaagagtcaggctcacagctggggtggcctgggggtgggggtgggcaaggctgacactggaaaatgggtttttgcactgttttttttttggtttttttgttcttttttgttttttttcctttaaaataaaaacaaagaaaagctcaaaaaaaaaaaaaaaaaaaaaaaaaaaaaaaaaaaaaaaaaaaaaaaaaaaaaaaaaaaaaaaaaaaaaaaaag

SEQ ID NO: 3061 - DNA, 635 bp, Homo Sapiens
tgaagaaaaaggcgtagataaagattttgagtcttcttcaatgaaaatctcgaaactagaagtgactgaaatagtgaaaccatcaccaaagcgcaaaatggaacctgatactgaaaaaatggataggacccctgaaaaggacaaatttctttaagtgcgccagccaaaaaaatcaaactcaacagagaaactgggaagaaaattggaagtacagaaaatatatcaaacacaaaagaaccctctgaaaaattggagtcaacatctagcaaagttaaacaagaaaaagtcaaaggaaaggtcagacgaaaagtgactggaactgaaggatccagctcaactctggtggattacaccagtacgagctcaactggaggcagtcctgtgcggaaatctgaagaaaaaacagatacaaagcgaactgtgattaaaacgatggaagaatataataatgacaataccgcgccagcttgagatgttatcattatggatcaggttcctcaatccaaatggggataaagatgactttgaatctgaagaagaagatgtaaattcccacagcctatttcagtggtggaaaacctgctgtgttattaaaaatgttagtccaagccatcaaattttgcaagtttcctgag

SEQ ID NO: 3062 - DNA, 416 bp, Homo Sapiens
tttttttttttttttttcattcaacactggctaggaatttattggctaacaaaatacaagtgatttcctggtccccaatccagattctccacctcttcttcacttctgactgatggaatgcataagaactaagatcttgagatgttatttgagggcagccttgcttgggtgtggtctatcatagctcctctgactaccgccgttgctacctggctgcaaatgattgttgtcaaggatagagggtccttcagaattcctgggagatcagaatcagtctctgaggtgtgggccagttgtcatggtgattattctgttgtagcatcactttatgaactaaattaaaaaaatcttcagtcacatctgttcagtaggagccatttcctttggagtcaggacacgcgagaagggcttcaaag

SEQ ID NO: 3063 - DNA, 1975 bp, Homo Sapiens
cttctttatactgcagtgatattgggaagcttgtgggctgtgccatcatccatgtcaatggagacagcccagaggaagtggtccgtgccacacgactggcttttgaataccaacgccagttccgcaaggatgtgattattgatctgttgtgctacaggcagtggggccacaatgagctggatgagccattctacaccaaccccatcatgtacaaaatcatcagagctcgaaagagcattccagacacatatgcagagcacctcattgctggcggactcatgacgcaggaggaggtgtctgaaataaaatcctcctactatgccaagttgaatgatcacttaaataacatggcccactacaggccccctgccctgaacctgcaggcccactggcagggcctggctcagccagaagcgcaaatcactacctggagtacaggtgtgcccctcgacctcctgcggtttgttggcatgaagtctgtagaggtgccaagagagctgcagatgcacagtcacctgctgaagacacatgttcagtccagaatggagaagatgatggacggaatcaagctagactgggccaccgcggaagctcttgccttgggttctttacttgctcaaggttttaatgttcgtctaagtggccaagatgttggtcgtggaactttcagtcagaggcatgcaatggtggtttgccaggagacggatgacacctacatccccctgaaccatatggacccaaatcagaaggggtttctagaggtcagcaacagccccctgtcagaagaggccgtcctgggattcgaatatgggatgagcattgagagcccaaagttactgcccctgtgggaggcacagtttggcgatttcttcaatggtgcccagatcatctttgacacattcatctctggaggagaggccaagtggctcctacaaagcggcattgtcatcctccttccacatggctacgatggggctgggccagaccactcatcctgtcgaatagagcgtttcctgcagatgtgtgacagtgcggaagagggggtggacggagacactgtgaacatgtttgtggttcacccaacaactcctgcacagtatttccacttgcttaggagacagatggtccggaacttcagaaaaccactcattgttgcttcccctaagatgttactcaggctcccggcagccgtgtcaactcttcaagaaatggcaccaggaacaacatttaacccggtcattggtgattcatctgtggatccaaaaaaggttaagaccctcgtgttctgctccggcaaacatttctactccctggtgaaacaaagagaatctctgggggccaagaagcatgactttgccatcatccgagtagaggaactctgccccttcccgttggattctttacagcaagagatgagcaaatacaaacatgttaaagatcatatttggagtcaggaggaacctcagaacatgggtccgtggtcgtttgtttctccaaggtttgaaaagcagctggcctgcaagctccgtctggtgggccggccccctttgccagtacccgctgtaggaattggcacagttcacttgcaccagcatgaagatatcctcgccaagaccttcgcttgatgatgacttttgaagaaacactatttctctttaagaaaatggccattaaggccgggtggggtggcacatgcctgtaatcccagcactttgggaggccaaggctggtggatcacctgaggtcaggagttcgagaccagcctggccaacacggtgaaaccccgcctctactaaaaatacaaaaaatagccgggtgtggtggtgggcacctgtgatcccagcttcctgggaggctgaggcaagagaatcgcttgaatctgggaggcggaggttgcagtgagccaggatcacaccattgctgtccagcctgggtgacagagcaagactgcgtttcagaaaaaaaaaaaaaaaaa

SEQ ID NO: 3064 - DNA, 274 bp, Homo Sapiens
  misc_feature (17)..(17): n is a, c, g, or t
  misc_feature (19)..(19): n is a, c, g, or t
  misc_feature (31)..(31): n is a, c, g, or t
  misc_feature (73)..(73): n is a, c, g, or t
  misc_feature (77)..(77): n is a, c, g, or t
  misc_feature (124)..(124): n is a, c, g, or t
  misc_feature (131)..(131): n is a, c, g, or t
  misc_feature (204)..(204): n is a, c, g, or t
  misc_feature (257)..(257): n is a, c, g, or t
ttttttgggctcagatntntttattgaaaantgaggggaaggtgattagtggggaaaggcaggggaggaaagntttnccacctggccttggacagtacatcaaaaggcggtcagaaggatgctntttatantctttattgctatgtcttacagggctgttggtctgccccccctgctgattcccccgacagtcccgtttcggcntgtagcctagttcacacagcagccaccttgtagagctggactacatggggccntgtcctgaaggaaactt

SEQ ID NO: 3065 - DNA, 184 bp, Homo Sapiens
aggaagctagggttagaggcaaccgtgagctagaacccgaacgtggtcggttggagcaatatgtccctccgagcacattgggaacctgagtatctgatgaaagggtaccacagaacccagataccagcatatcaatcaagactggacactggtaacagtatgactaaatatactcggaggctcg

SEQ ID NO: 3066 - DNA, 567 bp, Homo Sapiens
ttaaaggagtacctatgccagatcgaaggcctaagatgattaagacactatgagtgccttcaagtggttggggacgttcatgatcgtggtacagacaaataggctttcacatcattcttttatgtaatcatacaacagatatttgcacctacatgtgcagagcactgtgataggcctcagtgacacagaataatacggcaaagaccccacccgataagccccctcccaccacccaccagtacagtagggggtggttaaatggagtgttcctggaatatgaagtgggggcaggcattaggggtggcacagggacaagtgtttatctgatcagttatgtactgtttataataagtaaatcagcagagggggaataatacttagaacctatagagagtaaatctgacaagatgaaatgctgatgaaaatatggaggaaatgaaactctcatgggttatgcagggaatctaagtcagtgctgtgttgtagatgtaggtgtaccctattgattcatatgttgaatcctaacccacaaagcaattggatacgggcgcacggggacccgagctc

SEQ ID NO: 3067 - DNA, 2857 bp, Homo Sapiens
cctcaaccaaatgcaattttttgtgtgtgtttgaaagctaatttgagaaaatttcataggttacatttcctgcagcctatctttatccacagaaagtgttttcttttttttaaatcaagacttttaaaactggatttcctcccatcactgttttttgaaggtcctccaagtccgtgttaaggtaaatatctgttttcttcctgatgtcacagcctgagcatactctgtgcattaggaagacctgagtgcatttcccaccattgtcctttccacattatgttgtagctggctggctgtcaggcgactacaagactgagggtcttgtgccttatagatctttgtatcccccatggctgacacatagtaggtactcagtaaatggttttataatgaatcagtgaacattttgcttctatagaagtgtaccttctttgtttctatattatgaaacctctttattagaatttgtgattgattctgacagtgtatagatttaccttatattgtctttattttccatgagctactaagtcattagagatactctgaagcatagttagtttaggaaatcacttcatattgattgtattagaattatcttggaattgaagatatatccctagagcaggggaccccaacccccaggccatgggccacacagcaggaagaggtgagtggtgggccattgaggagcttcatctgtatttatggctacttcccatcactcgaattaccacctgaactccacctcttgtcagctcagtggcagcattagattctcatagaagcacaaatcctattgtgaactctgcatgcaagggatctaggctatgcgctccttatgagaatctaatgcctgatgacctgaggtggaacagtttcatcctgaaaccacccttcaccctgcagtctgtggaaaaattgtcttccacaaaactggtccctggtgccaaaaatgttggggaccgctgctctagagagaggtcatgatatcataccaaccaaatggaaatgacaaatgttttatgtcaagtgttaattgcagaaataaatcttttttttttttttttggtagaaaacaaagaggcatactctgatttttatactctgtttttgcaggtgctcttttctttgaatggagatttgatgagcaagtggttaggatgcagggagagctactatgggtgatattttccttgtttaggagctgtgagttaaaattgtatcctttctggtttatctaaggaaagtcaaatcttgacagaaaacatttttccttggaaggtcaactctcagacattgtattttggtttccctcagtcctcataacttccttcttgctgaacatattttattctcttttcagagaaggaaaataaaaaggattctaaaagtttgatgcattggaaaaatttccttgaggcatttagcaacacatagaaaatgggctttgattcttttccaaaacttttagccatagggtcttttatagacagggatagtaaaatgaaaattgagaaatataagatgaaaaggaatggtaaaaatatcttttagggggcttttaattggtgatctgaaatcttgggagaagctgttcttttcaggcctgaggtgctcttgactgtcgcctgcgcactgtgtaccccgagcaacattctaagggtgtgctttcgccttggctaactcctttgacctcattcttcatatagtagtctaggaaaaagttgcaggtaatttaaactgtctagtggtacatagtaactgaatttctattcctatgagaaatgagaattatttatttgccatcaacacattttatactttgcatctccaaatttattgcagcgagacttgtccattgtgaaagttagagaacattatgtttgtatcatttctttcataaaacctcaagagcatttttaagcccttttcatcagacccagtgaaaactaaggatagatgtttaaaaactggaggtctcctgataaggagaacacaatccaccattgtcatttaagtaataagacaggaaattgaccttgacgctttcttgttaaatagatttaacaggaacatctgcacatcttttttccttgtgcactatttgtttaattgcagtggattaatacagcaagagtgccacattataactaggcaattatccattcttcaagacttagttattgtcacactaattgatcgtttaaggcataagatggtctagcattaggaacatgtgaagctaatctgctcaaaaagatcaacaaattaatattgttgctgatatttgcataattggctgcaattatttaatgtttaattgggttgatcaaatgagattcagcaattcacaagtgcattaatataaacagaactggtggcacttaaaatgataatgattaacttatattgcatgttctcttcctttcacttttttcagtgtctacatttcagaccgagtttgtcagcctttttgaaaacacatcagtagaaaccaagattttaaaatgaagtgtcaagacgaaggcaaaacctgagcagttcctaaaaagatttgctgttagaaattttctttgtggcagtcatttattaaggattcaactcgtgatacaccaaaagaagagttgacttcagagatgtgttccatgctctctagcacaggaatgaataaatttataacacctgctttagcctttgttttcaaaagcacaaaggaaaagtgaaagggaaagagaaacaagtgaccgagaagtcttgttaaggaatcaggttttttctacctggtaaacattctctattcttttctcaaaagattgttgtaagaaaaaatgtaagacaaaaaaaaaaaaaaaaa

SEQ ID NO: 3068 - DNA, 353 bp, Homo Sapiens
tttttttttttttgacaaacaaatgaaagattcaatgttggttttcttcagggcatggcagaatgacaagttgagagtgatatctagtggctgccatcgcgattgcaaagggctgcctgagtgccctttctttgcaggtaatgggacctctccatctgcttcttcgtttctactttcatgctgcttgctggtaacagattggatgtgtgttctagcttactcagattgtaactaaaatttctgtaaaaaggggttaagggatgggatgatgggagattcatccaaatttaaaaggtcttgctctagccatcaatttgtggtaggtgacctttaaggtatcaataacaaaatgt

SEQ ID NO: 3069 - DNA, 385 bp, Homo Sapiens
taagacatatcagctccagagatgagtcctggagccttgaattttgtttaacaaaataattgtgggtttctctctgtaataacaacgctggaaaggccgagaacctcttttatgctcatgtcttgcatttattgagatgactgtttctcatgcctttatgttccttcatgtaagtaaagtggacctttgtgctcaaaaacaaaactataaaacaaaaaacaaaactcgagggggggcccggtacccaattcgccctatagtgagtggtattacaattcactggccgtcgttttacaacgtcgtgactgggaaaaccctggcgttacccaacttaatcgccttgcagcacatccccctttcgccagctggcgtaatagcgaagagg

SEQ ID NO: 3070 - DNA, 687 bp, Homo Sapiens
  misc_feature (36)..(36): n is a, c, g, or t
tcggctaggtacgaggctgggtggtgcaagcttatnggagggctatcttgccttacggctccaagccgctttttacggcgtttttcagctccgccattcacttcgctgtgaagatggcgtcgggcagcgggacaaaaaacttggactttcgccgaaagtgggacaaagatgaatatgagaaactcgccgagaagaggctcacggaagagagagaaaagaaagatggaaaaccagtgcagcctgtcaagcgagagcttttacggcatagggactacaaggtggacttggaatccaagcttgggaagacaattgtcattaccaagacaacccctcaatctgagatgggaggatattactgcaatgtctgtgactgtgtggtgaaggactccatcaactttctggatcacattaatggaaagaaacatcagagaaacctgggcatgtctatgcgtgtggaacgttccaccctggatcaggtgaagaaacgttttgaggtcaacaagaagaagatggaagagaagcagaaggattatgattttgaggaaaggatgaaggagctcagagaagaggaggaaaaggccaaagcgtacaagaaagagaaacagaaggagaagaaaaggagggctgaggaggacttgacatttgaggaggacgatgagatgggcagctgtgatggggcttctctgg

SEQ ID NO: 3071 - DNA, 470 bp, Homo Sapiens
agggtattccttatggcataatttattgcatttctgactgaaatcaaaattctgatttgatggcaattgaattttcattttacaatagataaatgcttgtgttacctaaagcacttagcacacagttaaattatatttacatcctagacccaaataaataggattgtgtgtatatttgggatatctattgaagaaaaaaagaaaaccccttaaagataatgtacatgcttcatgtcatgtctttaaaataatttaatcaactttattgtcttagtatttagactctggataactctacaataatgaggaaattcttaagaataacaaaatcactgtaccttcctctcaattttgctgtgaacctgaaatggctttaaattaatactcttattttttatttaatttaattacataaattaaaccttaccatgaccaaattgtgttaggaaggcctgctatctacagcacag

SEQ ID NO: 3072 - DNA, 346 bp, Homo Sapiens
cgtttttctttttttttttttcttttttttttttttttttttttttaaaaaataaaaacaaggctgtgaaggcatcagggaacttaacgcactaaattctaatcactgattttgtttgacccctgtactagcaattgcagtctgaatgtccatttttagttctttatttcctgatcctggcaatatctggtacacattaaatgttcaacaaatgtttgctgaatgaataaattaatgaacaaataaaaccagtttgattccacatgttggaactttgtaataagtaatttgttacttaaaactatctttaatatcatgccccctctaaaaaagaaagaaaactagt

SEQ ID NO: 3073 - DNA, 446 bp, Homo Sapiens
ttttttttttttttttttttttttttgcttaaaactatcatcattttatttatctcacaattctgtaaatcagctggaataactggtatggctcttctgggctaggctggctcagctggggctagaggtcttggaaaacctcactcccaattctgacaattggcaggctacttggtctaaggggcctcagcaaggctggctcaccactgctccatgtggtggctcctcacccccgagtagggcaatttgagattcttcaggtttgcaaagagcagcaagagagggtaagcttcaaggcaggctttgcacacttctcaagcttcttattgattctctttgctaatttccattggccaaagaaagtcacgtggccaagttcaaagtcaagtagtagacaaagagacgctacttgggatgggaggaatctgtggctactttgcattgta

SEQ ID NO: 3074 - DNA, 489 bp, Homo Sapiens
cggccgccaacttttatttttatttttaattgtattaatctgcatctagataatgactttgtgaagggtgtgtgttgtgtgcaaaacttaaggtattggttgagagttaaatacattatttttataatatgttgggtatagtctagttactaatgattttttttaagtacttttataaaaagttcatttttaaaattgtttgtttttaaaagccaatatacgttgcagaattaggaacagtatttatatttatttacacaagacattgtgccatagcatcctagtaaaacaccttcatgaatgagtaatgttatctcccagaattacattaaaattatttctaaaaagtagcaaagtcattaccttttgcttttaatgacccacacctcaccagctcctggtcttttcttcactgttgcccttattttgaggcaatttttcttaaaatatgacttttatgcaccacatttagtagaggcagtgacatca

SEQ ID NO: 3075 - DNA, 503 bp, Homo Sapiens
  misc_feature (463)..(463): n is a, c, g, or t
tttaaaaattggtcaaaacaaggtctgggagtatgtttgtgtgtctttccagctttatcctgtagcgtgtctttgttctgtgttttagtgtcccatttagggagtgatgttttaagggtttttgtgtacttggattaagtaattagaggtgagtggggggaatgggattattgaggcaatgatttttttcttcatgggctctgatagttgcattgattgttctgtattctaattgctatatttgtgtttgcataggtgaagagcaaactgggtgcgttatcttgatttttaaaaagtaataaatcctatgagttcccagtattaacacttgcccagttctgggatccctcacaccccattgggctggagcgcatttcaaggcacccaatcgaagccagggtccatctctggaggctgctggaaagggaggtgttgagggctttaggggaaattgggagccccntgtttgccccacggaaaggggaaaggattaaggggaggtt

SEQ ID NO: 3076 - DNA, 5547 bp, Homo Sapiens
aagttttggagcgccggacaagctgaggtccgcgactcgtcgctaagattccccaaaactgagatttcaagaaaattcaccctttccgctttctttggcgcccttcaaccgtgaaggaaatgaaggttgagaacctggaacccgcttccaaagaccaagccctttctctgtgcctcacaacagtcttgcgctgtagctgtttttattacccctattttactactggggaggagatttgaggtcctgaaagtgaagtgacttgctggacgtcacttagcagaggagatggcgaaacctggattagaggcgatgccttctaactcccagcgtggacttgcctcctttcctgggggtgactgaatgcccagccagggacgcgacgtctctggccagcagaaatacggcctcctccccgccgactgggcaaagggggaccttgcggccaaggagggattcgcaggcgggccgggggtgggagcgggggccggagccggagccttggcccgcccccgggcggcgctgtgattggccggccgctccggcgggcgtcgcgattggccgtcctgcagccgttgagatttgaactcggtatttgtggctttgcccgcgcgttgccagactcagaggcggccctttgcctctgcctgccggggattggccggattctccgccgacttgaaaactgccttgctaattggtgcgtgttgtgcacgcgtgttttttccttttcatttcagcctgactgccggaatcagagccgcgggtgagatccccagccctgtgagcctgtaggagtagaatggctccccaaatgtatgagttccatctgccattatccccagaggagttgttgaaaagtggaggggtgaatcagtatgttgtgcaagaggtactgtccatcaaacatcttccaccacagcttagagcttttcaggctgcctttcgagctcaggggcccctggctatgctgcagcactttgatactatctacagcattttgcatcactttcgaagtatagatcctggcctcaaagaagatactctggaattcctgataaaagtggtatcccgccactcccaggagcttccagctatcctggatgatacaactttgagtggatcagatagaaacgcccatctaaatgccctcaaaatgaactgttatgctctgatacgtctcctggaatcctttgagaccatggccagccagacaaaccttgtggacctggaccttggtgggaagggtaagaaagctcggaccaaggcagcccatggctttgactgggaagaagagaggcaaccaattcttcagcttttaacacagctacttcagttggacatccgtcacctgtggaaccactcaataattgaagaagaatttgtcagtttggttactggctgttgctaccgccttctggagaatcccaccattaatcaccagaagaaccgccccactcgggaagccataacacacctgcttggtgtagccttgacccgttataaccatatgctcagtgctacagtgaagatcatccagatgctgcagcactttgaacacctggcacctgtactggttgcagccgtgagtctatgggcaactgactatggaatgaagagcatagtgggagagattgtaagagagattggacaaaagtgtccccaagagctgagtcgagacccttcagggacaaagggctttgcagcattcctgacagaactagcagaacgtgtcccagctatcctgatgtccagcatgtgcattttgctagatcacctggatggagaaaattacatgatgcgtaatgctgtgctggcagccatggcggagatggtgctgcaggttctcagtggcgatcaactggaagcagcagcccgagacaccagagaccagttcttggatactttacaagcccatggccatgatgtcaactcctttgtgcggagccgtgttttgcagctcttcacccgaattgtccagcagaaggctctccccctgacacgtttccaggcagtggtggctttagctgtgggacgtctggcagacaagtcagtgctagtatgtaaaaatgccatccagctgctggccagttttctagccaataatcctttctcctgcaagcttagtgatgctgaccttgccggaccactgcagaaggagacccagaaattacaagagatgagggcccagaggcgaactgcagcagcttctgcagtgctggacccagaggaggagtgggaagccatgctgccagagttgaagtctaccctgcagcagcttctacagcttccccagggagaggaggagattcctgagcaaattgccaatacagagacaactgaagatgtgaaaggacgcatctatcaactgcttgccaaagctagttacaaaaaggccatcattctcactcgagaagccacaggccacttccaggagtccgaacccttcagtcatatagacccagaggagtcagaggagaccaggctcttgaatatattaggacttatcttcaaaggcccagcagcttccacacaagaaaagaatccccgggagtctacaggaaacatggtcacaggacagactgtctgtaaaaataaacccaatatgtcggatcctgaggaatccaggggaaatgatgaactagtgaagcaggagatgctggtacagtatctgcaggatgcctacagcttctcccggaagattacagaggccattggcatcatcagcaagatgatgtatgaaaacacaactacagtggtgcaggaggtgattgaattctttgtgatggtcttccaatttggggtaccccaggccctgtttggggtgcgccgtatgctgcctctcatctggtctaaggagcctggtgtccgggaagccgtgcttaatgcctaccgccaactctacctcaaccccaaaggggactctgccagagccaaggcccaggctttgattcagaatctctctctgctgctagtggatgcctcggttgggaccattcagtgtcttgaggaaattctctgtgagtttgtgcagaaggatgagttgaaaccagcagtgacccagctgctgtgggagcgggccaccgagaaggtcgcctgctgtcctctggagcgctgttcctctgtcatgcttcttggcatgatggcacgaggaaagccagaaattgtgggaagcaatttagacacactggtgagcatagggctggatgagaagtttccacaggactacaggctggcccagcaggtgtgccatgccattgccaacatctcggacaggagaaagccttctctgggcaaacgtcacccccccttccggctgcctcaggaacacaggttgtttgagcgactgcgggagacagtcacaaaaggctttgtccacccagacccactctggatcccattcaaagaggtggcagtgaccctcatttaccaactggcagagggccccgaagtgatctgtgcccagatattgcagggctgtgcaaaacaggccctggagaagctagaagagaagagaaccagtcaggaggacccgaaggagtcccccgcaatgctccccactttcctgttgatgaacctgctgtccctggctggggatgtggctctgcagcagctggtccacttggagcaggcagtgagtggagagctctgccggcgccgagttctccgggaagaacaggagcacaagaccaaagatcccaaggagaagaatacgagctctgagaccaccatggaggaggagctggggctggttggggcaacagcagatgacacagaggcagaactaatccgtggcatctgcgagatggaactgttggatggcaaacagacactggctgcctttgttccactcttgcttaaagtctgtaacaacccaggcctctatagcaacccagacctctctgcagctgcttcacttgcccttggcaagttctgcatgatcagtgccactttctgcgactcccagcttcgtcttctgttcaccatcctggaaaagtctccacttcccattgtccggtctaacctcatggttgccactggggatctggccatccgctttcccaatctggtggacccctggactcctcatctgtatgctcgcctccgggaccctgctcagcaagtgcggaaaacagcggggctggtgatgacccacctgatcctcaaggacatggtgaaggtgaaggggcaggtcagcgagatggcggtgctgctcatcgaccccgagcctcagattgctgccctggccaagaacttcttcaatgagctctcccacaagggcaacgcaatctataatctccttccagatatcatcagccgcctgtcagaccccgagctgggggtggaggaagagcctttccacaccatcatgaaacagctcctctcctacatcaccaaggacaagcagacagagagcctggtggaaaagctgtgtcagcggttccgcacatccctaactgagcggcagcagcgagacctggcctactgtgtgtcacagctgcccctcacagagcgaggcctccgtaagatgcttgacaattttgactgttttggagacaaactgtcagatgagtccatcttcagtgcttttttgtcagttgtaggcaagctgcgacgtggggccaagcctgagggcaaggctataatagatgaatttgagcagaagcttcgggcctgtcataccagaggtttggatggaatcaaggagcttgagattggccaagcaggtagccagagagcgccatcagccaagaaaccatccactggttctaggtaccagcctctggcttctacagcctcagacaatgactttgtcacaccagagccccgccgtactacccgtcggcatccaaacacccagcagcgagcttccaaaaagaaacccaaagttgtcttctcaagtgatgagtccagtgaggaagatctttcagcagagatgacagaagacgagacacccaagaaaacaactcccattctcagagcatcggctcgcaggcacagatcctaggaagtctgttcctgtcctccctgtgcagggtatcctgtagggtgacctggaattcgaattctgtttcccttgtaaaatatttgtctgtctcttttttttaaaaaaaaaaaaggccgggcactgtggctcacgcctgtaatcccagcactttgcgataccaaggcgggtggataacctgaggtagggagttcgagaccagcctgaccaacatggagaaaccccatctctactaaaaataaaaaattagccgggcgtattggcgtgcgcctgtaatcccagctactcaagaggctgaggcaggagaatcgcctgaacccagaggcggaggttgtagtgagccgaaatcacaccattgcactccagcttgggcaacaatagcgaacctccatctcaaattaaaaaaaaaatgcctacacgctctttaaaatgcaaggctttctcttaaattagcctaactgaactgcgttgagctgcttcaactttggaatatatgtttgccaatctccttgttttctaatgaataaatgtttttatatactttt

SEQ ID NO: 3077 - DNA, 124 bp, Homo Sapiens
tggaacaaatccacttcctctctgtgtagtgcctggcactactggcacctttgtcattcaaataggcacaatctcctgctcccaggataggaaactgtcttgtccattccgtaccatttaccca

SEQ ID NO: 3078 - DNA, 5147 bp, Homo Sapiens
aggcagcagcagagggagagctcggggcttggaggggaaacagcggaagacctaagattatcgggagggcagcagaggcagagaacgaggacaggacccttggccgtcttcttccagggaacgagaggtcacagcctcgctctccgcttatgcttctggcgccccagcttaaagccgaggctgcggctgacaaagggctcgcgccggtgccgccgcccttctcatccgggcattcgggtccctgcgagaaggagggggaaggacagagggggaggggaaggagccggaggggcgcacacttggagctgaagccctctccagggctccgggccggtgccccaacggacagaggtcgaggaggacccgcagaggtggcagcggccgggggcaggaggatggtgcagaaggagagtcaagcgacgttggaggagcgggagagcgagctcagctccaaccctgccgcctctgcgggggcatcgctggagccgccggcagctccggcacccggagaagacaaccccgccggggctgggggagcggcggtggccggggctgcaggaggggctcggcggttcctctgcggtgtggtggaaggattttatggaagaccttgggttatggaacagagaaaagaactctttagaaggctccagaaatgggaattaaatacatacttgtatgccccaaaagatgactacaaacataggatgttttggcgagagatgtattcagtggaggaagctgagcaacttatgactctcatctctgctgcacgagaatatgagatagagttcatctatgcgatctcacctggattggatatcactttttctaaccccaaggaagtatccacattgaaacgtaaattggaccaggtttctcagtttgggtgcagatcatttgctttgctttttgatgatatagaccataatatgtgtgcagcagacaaagaggtattcagttcttttgctcatgcccaagtctccatcacaaatgaaatctatcagtacctaggagagccagaaactttcctcttctgtcccacagaatactgtggcactttctgttatccaaatgtgtctcagtctccatatttaaggactgtgggtgaaaagcttctacctggaattgaagtgctttggacaggtcccaaagttgtttctaaagaaattccagtagagtccatcgaagaggtttctaagattattaagagagctccagtaatctgggataacattcatgctaatgattatgatcagaagagactgtttctgggcccgtacaaaggaagatccacagaactcatcccacggttaaaaggagtcctcactaatccaaattgtgaatttgaagccaactacgttgctatccacacccttgccacctggtacaaatcaaacatgaatggagtgagaaaagatgtagtgatgactgacagtgaagatagtactgtgtccatccagataaaattagaaaatgaaggcagtgatgaagatattgaaactgatgtactctatagtccacagatggctctaaagctagcattaacagaatggttgcaagagtttggtgtgcctcatcaatacagcagtaggcaagttgcacacagtggagctaaagcaagtgtagttgatgggactcctttagttgcagcaccctctttaaatgccacaaccgtagtaacaacagtttatcaggagcccattatgagccagggagcagccttgagtggtgagcctactactctgaccaaggaagaagaaaagaaacagcctgatgaagaacccatggacatggtggtggaaaaacaagaagaaacggaccacaagaatgacaatcaaatactgagtgaaattgttgaagcgaaaatggcagaggaattgaaaccaatggacactgataaagagagcatagctgaatcaaaatccccagagatgtccatgcaagaagattgtattagtgacattgcccccatgcaaactgatgaacagacaaacaaggagcagtttgtgccaggtccaaatgaaaagcctttgtacactgcggaaccagtgaccctggaggatttgcagttacttgctgatctattctaccttccttacgagcatggacccaaaggagcacagatgttacgggaatttcaatggcttcgagcaaatagtagtgttgtcagtgtcaattgcaaaggaaaagactctgaaaaaattgaagaatggcggtcacgagcagccaagtttgaagagatgtgtggactagtgatgggaatgttcactcggctctccaattgtgccaacaggacaattctttatgacatgtactcctatgtttgggatatcaagagtataatgtctatggtgaagtcttttgtacagtggttagggtgtcgtagtcattcttcagcacaattcttaattggagaccaagaaccctgggcctttagaggtggtctagcaggagagttccagcgtttgctgccaattgatggggcaaatgatctcttttttcagccacctccactgactcctacctccaaagtttatactatcagaccttattttcctaaggatgaggcatccgtgtacaagatttgcagagaaatgtatgacgatggagtgggtttaccctttcaaagtcagcctgatcttattggagacaagttagtaggagggctgctttccctcagcctggattactgctttgtcctagaagatgaagatggcatatgtggttatgccttgggcactgtagatgtgaccccctttattaaaaaatgtaaaatttcctggatccccttcatgcaggagaagtataccaagccaaatggtgacaaggaactctctgaggctgagaaaataatgttgagtttccatgaagaacaggaagtactgccagaaactttccttgctaatttcccttctctgataaagatggacattcacaaaaaagtaactgacccaagtgtggccaaaagcatgatggcttgcctcctgtcttcactgaaggctaatggctcccggggagctttctgtgaagtgagaccagatgataaaagaattctggaattttacagcaagttaggatgttttgaaattgcaaaaatggaaggatttccaaaggatgtggttatacttggtcggagcctgtgacatttgttgacactgtgaactgtccaaaagtctcttaactgcaccttgtgaatggtagttgaggtcttcatacagttcagcctctagaatggtaacaaatcagccaattggattcgaaacaaagaagactatgtaaaactcacccatcacactttgagactactcactggttggaagaatatagtattgcagcaaatcctgtatgaaagagagatgtgggcttcctttttgagtcttgtgttaggtgctgagaccttttacatgggcttatacagggagagagtcttcaataaatgtagtcagcactattttctgcatccagtgtggttgcgtttctcacctgagagtaatcaagataacatctgtcatcttccttggtttattgagtgaaatgcctctcagtcttaggggacatggcagagatgaaagaaagaaagagtgggtttcagaagtgtcagggtggagtgattccaagtgggatggttgtggcattagtttaagctgaataaataatttcaatttggggcagttattctgctttttgtaaagccgtggccaattgtctcctgtaatgactgttggttcaggcatgttgtactttgtagggacaaatgtgcatttgtttgtggcaaaagcctacaattgacaaacttgtaaatttctttgtatataaactagctgtaacctgactatcctttgtgtttactgtttttgtaaatttttttcctctataaatgaaagggtgttggttcagaatggcactttgaataatgtaaaccagtgaaaagtggattttctttacttttgtctttgggtttggggttgtttttgttctttttgaagttttattatttttaaagtgcctcccacctaggcgtaggccatgaccatttggggtacgagagcctaattttgtaggacttaatctgttgaaaagtgcagttacttctggaaattaacctcaatattaggtcagcatgtgaaatgttggatttgacatgtcaggtagggttcagggactgattggtcccatttgccctcaggtcagttgtttaatctcaagacctgttactactgattttattaaatcagagtctttaattcttgcatgtttgtatctaatttctgaacgaatgagcacactttaaccagttatttacagttacctttttcctttaaccggattgtgaaagcttcatgtattttaatttagattctgtgtttttaagggttctgagcatgaagctggcagatagtcggcaggactcattttttcatcatggctggctgatttctccatagattgataacagtattttgttatcttgcttctctgtagttttgcatcagctgtttaactttgagctgagtgaggggagaggggtaaagagaaagaaacttaagttttctttcacagaactccaccattgtgggctttgagagagccctaaagcattgtacctagtggtacctagtgacttccaaccaaagcctttgagtatgcactaaataggtgagaagaaaggagagaaggtttttaggttagaaacctttaaccgatagaaggatatggtatgttgtaaagctggaaccaagtttgcatttttgagggcttgagatgaagggaagactcttaccagatagtaagacagctgagttttcctcagttttctcgtcttaacactagtggacaattctagcattttgtttggaggatttcagagttaacctcatggaattcaggattttttagcaagtttgcttttggttttatcttggcttttagtaatcatgttggctggtctggtcacaggtgactgtgaaacagatgcccctggtcttgctttcatcactctaggatcatgaagtgctatgctatttcctggttatgaatattaaggttggaattacatttttattgattgtttggatcagagctcagttcctgtagaaaacgaactgtaaaagaccatgcaagaggcaaaataaaacttgaagtgg

SEQ ID NO: 3079 - DNA, 5983 bp, Homo Sapiens
gtgtgggactgccgctctgcgcggcgagaggtggcctgggaatggccgggccgggggtgggccggagccgctgtggcggcggcggcggctgggggcggtgagcgcggcgtggggctgcccctccccggaggcggcgggggcggccggggccgcgccgcaccgcaccgcgcgggcggccatggagcgagcctagggcccgacaggaactgtggaaggtgcatcagtgaagaaatggaccaatgtgtataatcatggaatctccttgctaaccatcaccaccagctctccttaatacatgagcaagagtgggtcaggggagaaggaaaagaggtcaacatgaagctaaagcagcgagtcgtgctgttagcaattctccttgtcatttttatcttcaccaaagttttcctgattgacaacttagatacatcagctgccaaccgggaggaccagagggcctttcaccgaatgatgactggcttgcgggtggagctggcacccaagctggaccataccttgcagtctccctgggagattgcagcccagtgggtggttccccgggaagtgtaccctgaagagacaccagagctgggggcagtcatgcatgccatggccaccaagaaaatcattaaagctgatgtgggttataaagggacacagctgaaagccttactgatacttgaaggaggccagaaagttgttttcaaacctaagcggtatagccgagaccatgtggtggaaggggaaccgtatgctggttatgatagacacaatgcagaggtagcagcctttcacttggacaggattctgggtttccaccgagcccccttggtagttggcagatttgttaatcttcggacagagatcaaacctgtcgccacagagcagctgttgagcaccttcctaactgtaggaaacaatacttgtttttatgggaagtgctattactgccgagaaacagaaccagcttgtgctgatggagacataatggagggatctgtcacactttggcttccagatgtgtggcctctgcagaagcaccgtcacccatggggcaggacttaccgagaaggcaaattggccaggtgggagtatgatgagagctactgtgatgctgtgaagaaaacgtccccttatgactctggcccgcgcctcttggacatcattgacacagctgtctttgattacctgattggcaatgctgaccgccatcactatgagagctttcaagatgatgaaggcgctagtatgctcatccttcttgataatgccaaaagctttgggaacccctcgctggatgaaagaagcattcttgcccctctctatcagtgttgcatcattcgggtgtccacctggaacagactgaactacctaaagaatggtgtgctaaagtctgccttaaaatctgccatggcccatgaccccatctccccagtgctctctgatcctcatctggacgccgtggaccagcggctcctgagtgtcctggccaccgtgaagcagtgcaccgaccagtttgggatggacacagtactggtggaagacaggatgcctctctcacacttgtaattctcgacacaaaataagtgaaacttctttttacaaagatagagaaacagcacaatcaattccaaatggtatgagatggattggaagtggccagcagcaagttctggtgacaggacagggtggccttggatgtctttggtattttctgtagtagaaactaaagcaaagaccacaagtttcagagcatggagacattcctgctgaatcgccttctcacctcctcggcaattgctcattctagggttgggcatcatagttggtcagtcttaattcccatgccaaaggacaaacaggtgtgacatttggatagatgaatactgggattggctctggagcatgtgttttgagttgaaccttgcagtcctttctctacgcccgtggattttgtggaaacactttgcaatctctttgtctttttttttttaccagaactagttacattggaatgcttactgtcctacagagtggcagcaaataaaaccttgcattccatcaagccaaaatagcacactctgttagaggagatacatgtttaagatagaattggagggaaggacaaaaacagaaaaatgtttgggcttttaagccattgggtagtattgttttgatgatcttagaggagggaagaagagagagagacccaatggtagaaccagaatcagggagatgactgaactactgaaaaacaggttcccttgtatttaggatcttaaggtgtataaaaagcaaacatgactttgcacctaagtaaattctgcattctcatagttgtgtcccaattaaccaaaaagttgtctctagagaaaataatattacaatctaagcatgattctctgtggagactaattttttccccttttgccaaaagcagtccttcccaaattaacaaagcaaactgaaataataccttgaataacaggttgcctgtggtctctgtcatcctcgtctctcttctgaaatgaatttccacctctgcctttaaggcatttttgtcactgaagctgctgttcccaagagataggcaacctttttgtccctttctcataagaaagggacactcctacaggtgagagtgtataccttactctctcagataagtggctggacttatcttgtgatttggggccatggaagattggaaacaaagattttaagccttcttcttttttgcttttttcttttttttttgagaccaagtctcactctgttgcccaggctggagtgcagtggcacgatcttggctcactgcaacctccgtctcccaggttcaagcgattctcttgcctcagcctccagagtagctgggattacaggcgcccgccatcgtgcccagctaatttttatatttttagtggagacagggtttcgggtttcaccatgttggccaggttgatcttggactcctgaccccaggtgatccacctgcctcagccttccaaagtgctgggattacaggcatgagccaccgtggccggccaagattttaagccttctgagccttgaaattgaggaggttaaaaggaagagccttaagattttgatttatgtcaaatcctaattctatcattcagtcttgtttggagttctgaacccatgatgttgtattatgcttctttctcctcttagcactctcaaatttcaggtttgtaaaacacagtttttgttttgtgttctggcaaagtgatctcaacatgtaagtagttgcagtaaaacacaggggcaaaggaagacaggcctgatgtgcccactcatctatggactcagagctgtgtgctttgctcctgcatcttgttgaggtgctgttccagctttgcatttctgtcaagtagaggcgaatatataaacagtgtggttgaatacatttaatgccagccattggaaactagttttaggcaaccactctcaaaaacagctttagaatttatgcccagttttcttgcattgaaagataactgagtaataacctgtaactatttttaaatggcatgaaattaggaaacttttgtacattttatatacattttgagatgaacagaacaatgggctgagttataaaaagcgtgtattgaatttaagaagacagactagcacaaaacacagaattcgtgttaaccaaaggaggcattgatttcagttttaaggctactcagtgttgtgtgtccagggaaattcacagctcagtatgagaataccttggttagtgctcacccacaagcttccaggagccagctgggaggagacaataggaagagatgtcagctctgctctccctgtaaatgttagttgaactaagttatggatttgtggtctttcaaatacatgacgcctttagtatgccacactgaaatgaataagaagtcttctgaaactgggaacttcataacattgaaggcagaagattctgctaaggaaaaaagcaggcaggaaagaaaatgtctcatcctttcttgaaagcatttgcagaaaatatatcatttcattttattcccatctgttttcaaactcgtgatcttaaaaggcattctgatgataaatttagaattttcatctataaaatttagaactctaatccataaagttagaattgagctaatagagtggtatgacatggcactaaaaatataaatttttgttgtaagtcaggattggagtaagctggaaaagtatgtttaggcaaatcttggagaaaaccaaccataaacttacagctctaaaattcagaaagccctaaaatttcaaacactgtttgaaagaagaggtgggggccgggtgccgtggctcatgcctgtcatcccagcatttgggaggctgaggcaggcagatcacctgaggccaggagttcgagaccagcctggctggctagcatggtgagaccgtctctactaaaaatgcaaaaattaacagggcacggtggcatgcgcctgtagtcccagctactcgggaggctgaggcaggagaatcacttgaatccaggaggcgaaggttgcagtgagctgagattgtgctgctgcactccagcctgggagacagagcgagactctgtcttaaaaaaaaaaaaaggaggtgaatttttttttaagttttgtaacactgtcctactttatttattagaatctaaggctgttacaatcaagtcgttgcagggtttggatcagctgtaagttaggtatgcctaccaaacatccaaaggtagacgtggagacattttaatactacaaaactaggaaaatcagaactcatggccatttcctgccctcctccaacttgttaaaacatgtttattctaaagttcgaatggataaatttgagtataaaggttttgttataaaactgttctttagtgtaaggctgcattgtgggtttgggggaaatgtaaataattttctgtgtaaaacaaattcataggatctgatttgctcagagtattattcaagaatgtattaataaggcattgccccctgtttgcactcagggttaatatgtcaaatgaaatttaagaaggaaatggaagaattcaggtacattaattgcatattattttgggaaagatgagtcctatacgtggcaatttttcaatgtcatctgaagccagcattatcttccaaagaaatcgatcttttttttctaaaaaaaaaaaatgcttttgccttcccttcccttcccatccgccatatttcttcagcctttcttctcgatcacccgtgtattctttgaccagtaaatgaccacacctcaatgatggtaaaacagcatcatcagtaagctatcttatatgcctcatcctgtgagtttgagcttcaggaaacatgagtaaaagtatatgtaatgtatatagtcgtatatgtattctagcaagaaaaacatatttattttgacaaaggggaacactgactttctgaaggattcagaaagaaccttagtgaaaggttctcagtctctgagagtggaccctaattaacataaagaccattcatcagcgaataactactgagcaactctagtgtgccagcacaggccagacatactagtgagccaggcacatctggccttgggaaactcatcctacaggggaaggccagtttttttcccttcaattcctcaagtctgggtggtgacaaggtaggggctaggtactggactaccacaggtttttaggaactaaggtgtttctcataaacacaaaatgttgggtgaaactgggaacaactactcagaagctcatttatttgcttaaatggaaagtgtgggagccactaccctctcttttgatctgccaaggatttcctctcagagctgttgcacagacagagattgtacttggtaagataccaaacaagacagatatggatctaaatttctaatgtgttctatgggtttcaattctgaaaaaagaaaatgaataaagattttaataaat

SEQ ID NO: 3080 - DNA, 533 bp, Homo Sapiens
ccagactcacgatagtctttcagaacagcagtttaatggccattctgccaaccaggcattctttcagcatggattcataattgacccaacgatgaacctgatcaaaaagttcagtaccatctgatcctgctgctctcattagttcatcttctccaccaggatgatactccatataagggctgacattataaacgaaacctcttatgcatatccaacaatcatcttttttgtcgtgtttcttaagttcttcttcagttacttcaattaacctgccttttaatcccgttagatcctttccacttttggtcagtcgaatccaatccataaggcttctgccctgttttaaaggtaccttgctacgccccccggaggcgacacgctgctgcgacctgggggccgggaaagactgggaagggacgttcagcatcttcaaaccccggccccgggccctgcccggggatcgccgccagacgggacagcacctccagctccggctctgtggccgggcagaggccaagccccgacccacttcc

SEQ ID NO: 3081 - DNA, 508 bp, Homo Sapiens
ttttttttttttggtttgttgagttcaaagctgcggggtgggggagtcttccctggcattcaacaaccctggggttgcatttctctttaaagggctatttaggaaaacacaaggaacggattttaaaaagaagacagaaagaaatccagctcccagcttgcagcagcactgagaggttgtacattctaaaggacctggtcatttacagcaaagcctatggagggataattcccatttcagccgcatccaccttaacaaatgtggttcccactgctggcttcttagaactgtacagcaaagcctgtggggggataattcccatttcagccgcatccaccttaaacgtggatcccactgctggcgtcttagaactggagcggtgtctgctaaccagcctgctggaccctctgtctataggtaccgggtggtgacctgcaaatccagccttggagaatgaccgtccgaatctgcagcctgacacctcgccacctcggctttgaaaatggca

SEQ ID NO: 3082 - DNA, 1500 bp, Homo Sapiens
cggagggtggggagcggaaagcaggacgcacggctcccgcggcccgctggctgcccttcccgccagcgcaggtgtgggacgggcggcggactaggcacagagctgcgggagcaggcacagggagtgtggagcctggcggcgggacggcgggatccggtgggagccggagtcccgccgaggggggctggaggtggaggggcccggcgaggccgcgatgaagccgagcggcgaggaccaggcggcgctggcggccggcccctgggaggagtgcttccaggcggccgtgcagctggcgctgcgggcaggacagatcatcagaaaagcccttactgaggaaaaacgtgtctcaacaaaaacatcagctgcagatcttgtgacagaaacagatcaccttgtggaagatttaattatttctgagttgcgagagaggtttccttcacacaggttcattgcagaagaggccgcggcttctggggccaagtgtgtgctcacccacagcccgacgtggatcatcgaccccatcgacggcacctgcaattttgtgcacagattcccgactgtggcggttagcattggatttgctgttcgacaagagcttgaattcggagtgatttaccactgcacagaggagcggctgtacacgggccggcggggtcggggcgccttctgcaatggccagcggctccgggtctccggggagacagatctctcaaaggccttggttctgacagaaattggccccaaacgtgaccctgcgaccctgaagctgttcctgagtaacatggagcggctgctgcatgccaaggcgcatggggtccgagtgattggaagctccacattggcactctgccacctggcctcaggggccgcggatgcctattaccagtttggcctgcactgctgggatctggcggctgccacagtcatcatcagagaagcaggcggcatcgtgatagacacttcgggtggacccctcgacctcatggcttgcagagtggttgcggccagcacccgggagatggcgatgctcatagctcaggccttacagacgattaactatgggcgggatgatgagaagtgactgcggctgaggcaaagctgctcccaaggcctccctgggctgctgtgggctcctggggaggtggccctcgtggcccacgctccatgccagtggctcacgctctgctcctggctaccccagagggagttgtcacgctacagtgagtggctggccttttaaatcgacgtctctctcaccaggatttggtgtttagctgtttctctctttaatctcacgtagcctttttcaggttagtacgtgttcttctgtcagggccaaaactcaaatctcctgtgaaatacgtattgataatccaatcttgatttttccccccagaatataaatctcaggtaataaggctttagaactgctgataaagcggatcgttctcaggccctccccccggagtacttcagaatgcaataaatcaaaataatggc

SEQ ID NO: 3083 - DNA, 318 bp, Homo Sapiens
agaagatggtggccaggaagaacacggaaggggccctggaccttctgaagaagctgcacagctgccagaatgtccatccagctactacagacaaccaggattggagttgctgttaatggggtccgcaagcactgctcagacaaggaggtggtgtccttggccaaagtccttatcaaaaactggaagcggctgctagactcccctggacccccaaaaggagaaaaaggagaggaaagagaaaaggcaaagaagaaggaaaaagggcttgagtgttcagactggaagccagaagcaggcctttctccaccaagggaaaaa

SEQ ID NO: 3084 - DNA, 566 bp, Homo Sapiens
  misc_feature (160)..(160): n is a, c, g, or t
agtactctacaggatcttaaacggagctggactgatcagaatggctgatgcagtcatcagccgcttcctcctgtgctgtgaggctgtgaggagtatgacacaccacctggttcaagtttctgtggcttaaggaagtgtgaagatatgatccagtccaggnctaggctcagccacctgtctcctgtccagaaaaaaggtgaagattaagaagctttcagaatgattctatggattaaaatcatacaaatggtggctgttctgagaatcagtctgggtattgatttccttttccagtgactggctccaggccatgtctaatgaccagctcgattccctgtgcagttcagagagcaagtgaacccaaccaacaatgtcgtcatctaagccctgaccctagccagggactcccatgctgctgttggctccatctctccacactgcctctttcttttcaactttttggccttcctttctttaaagctattctcacattgcttttatttcctcctccttcacctccaaccactgtcagcagcactctggagttttcaaatgtcacattagcc

SEQ ID NO: 3085 - DNA, 866 bp, Homo Sapiens
gggacgggagaaaacttaggctaggtcgaggcctggtgttagacgccaggacatggtggcgagaccgtgcggggtgggggacgtgtcgcgcggcgggtggcctcggtcggtaccctgggcgcggagcagctgcctcattagtattcgtacccacgaggcggcgcagcgggccctcggggacagcgagcgtcgcggcatggcttatcactcgggctacggagcccacggctccaagcacagggcccgggcagccccggatccccctcccctcttcgatgacacaagcggtggttattccagccagcccgggggatacccagccacaggagcagacgtggccttcagtgtcaaccacttgcttggggacccaatggccaatgtggctatggcctatggcagctccatcgctcccatgggaaggacatggtgcacaaggagctgcaccgttttgtgtctgtgagcaaactcaagtatttttttgctgtggacacagcctacgtggccaagaagctagggctgcgtggtcttcccctacacacaccagaactggggaagtgcagtacagtcgtgatgctcctctgccccccccgggaagacctcaacgcccctgacctctatatccccacgatggccttcattacttacgtgctcctggctgggatggcacttgggcattcagaaagaggttctccccgggagggtgctgggcctgtgttgcaagcacagcgctggtgtgggtggtgatggaggtggctggccctgctcctgggcctctacctgggcacgtgcgcagttgacctgagcacctttcactggctggctaaaggggttacaataccgtgggaatgacctccagggtggcacgg

SEQ ID NO: 3086 - DNA, 502 bp, Homo Sapiens
gcggccgctttgcgggtagtgggactgtggccttgcgctatgccctgtgcttccgtgggacgtgtctaggaacgggtgggctttctgcgggaggcgggggtcgggcagggctgctggtctggagtgcttgtgctctcttggtagcttttgtgtggcaatggatagggagctggtccaggaaaagcgtctgtggaagaagaggagggtggacgcaccttctccaaggcacctgtagaagtcactggaactcccgtgaggcctcctgttgaccttaggccctgcgggagggagggcaccttccacctttcccccagctgaaggtctggtaccagacgcaggaaggttccaggccaacacagcgctccttcacacagtccatgccctgtgccaaactctcttccagccctggcgcgacaagatgtggttggggccccagatctcctggagggcgagagggacagaccagagggacggctagtaaaaaaaaagaaattggccttca

SEQ ID NO: 3087 - DNA, 2061 bp, Homo Sapiens
gaattcggcacgaggttagcaataaggctggagaaggaaaagccggcgcgcccgcggcccgcgcgatttcccgccgagcccgcgtccccggcggcgggcgggctccgggggcgcccgggccgcggcggcgcggcggcgcgagctgcgcctccgggccggtgaatcatcccggcagacaccaagagccgcggcagcagagaggagcgctgaaacatggctgaagcggccacgggctttctggagcagctcaagtcctgcatagtttggtcttggacgtatctgtggaccgtgtggttcttcatcgtgctattcctggtctacatcctgcgggtgcctttgaaaatcaacgacaacttgagcacagtgagcatgtttttgaacacattaacaccgaagttctacgtggccctaacaggcacttcctcactaatatcagggcttattttgatatttgaatggtggtattttcgcaaatacggaacttcattcattgaacaagtctcagtaagccacttgcgcccccttctgggakgggttgacaacaactcttccaacaattctaattccagtaacggggactcagattccaataggcaaagtgtctcagaatgcaaagtatggcgaaatccactaaatttatttaggggtgctgaatacaatcggtatacttgggtgacaggacgagagcctcttacttactatgacatgaatctctctgcccaagaccaccagacattctttacttgtgactcggaccatctgcgtcccgcagatgcaataatgcagaaagcctggagagagagaaacccccaagctaggatttctgcagctcatgaagccttggagataaatgagtgtgcaactgcttatattctcttggctgaagaggaagcaacaaccattgctgaagcagaaaaattatttaagcaggccctgaaggctggagatggctgttaccgacgctctcagcagctacaacatcatggatcccagtatgaagcccaacatagacgagacaccaatgtcttggtgtacatcaaaagaaggctagcaatgtgtgccagaagactcgggaggaccagggaagcagtgaaaatgatgagagatttaatgaaggagttcccccttctgagtatgttcaatatccatgaaaaccttttagaagcccttctggaactacaagcatatgctgatgttcaggcagtcttagcaaagtatgatgatataagcttaccaaagtcagcaacaatatgctacacagctgctttgctcaaagcaagagctgtctctgacaaattctctcctgaggctgcatctcggcgggggctgagcacagcagagatgaatgcagtagaggccattcatagagctgtggaattcaatcctcatgtgccaaaatacctactagaaatgaaaagcttaatcctacccccagaacatatcctgaagagaggagacagtgaagcaatagcatatgcattctttcatcttgcacactggaagagagtggaaggggctttgaatcttttgcattgtacgtgggaaggcacttttcggatgatcccttatcccttggaaaaggggcacctattttatccttacccaatctgtacagaaacagcagaccgagagctgcttccatctttccatgaagtctcagtttacccaaagaaggagcttcccttctttattctctttactgctggattatgttccttcacagccatgctggccctcctgacacatcagttcccggaacttatgggggtcttcgcaaaagctttcctcagcactttgtttgcccccttaaactttgtcatggagaaagtggagagcatcctcccatccagtctgtggcaccagctaacacggatctgagagaagccctgtcctccactcacctcacccgccgctgccaccatctcctctgtgccaactccttgtggaccgcaagaaagcatgactttgaaaaagggaagccattccgagattttaaaatgttcatggactattccatattaaaagctgtttttgttgttgtacaaaaaaaaaaaaaaaaaa

SEQ ID NO: 3088 - DNA, 347 bp, Homo Sapiens
  misc_feature (2)..(2): n is a, c, g, or t
  misc_feature (297)..(297): n is a, c, g, or t
  misc_feature (311)..(311): n is a, c, g, or t
tnagtcttcaggatatcacaccacgtcttttcaaaaactaaagagaattcaaaaagggctgatggtaggctttgaacatggggttggctgtttccagtaaaactggaattcctgtcgttactgtttccttatcaaagaaggggcaagctcttttgccttttaggcagacatagcaaacgctttataattggcatagacataaaggataaaaggaaaataaccgtctgccgatggtccgtacttcttaaaaaacataggtaatagaaaatatacacaagtcagaatgtgaaatttaantaattggttggacnggaaatttcaaaccaggctctttcccatttttaagg

SEQ ID NO: 3089 - DNA, 470 bp, Homo Sapiens
tcgaccgccccttggcttctgcactgatggtgggtggatgagtaatgcatccaggaagcctggaggcctgtggtttccgcacccgctgccacccccgcccctagcgtggacatttatcctctagcgctcaggccctgcgccatcgccgcagatccagcgcccagagagacaccagagaacccaccatggccccctttgagcccctggcttctggcatcctgttgttgctgtggctgatagcccccagcagggcctgcacctgtgtcccaccccacccacagacggccttctgcaattccgacctcgtcatcagggccaagttcgtggggacaccagaagtcaaccagaccaccttataccagcgttatgagatcaagatgaccaagatgtataaagggttccaagccttaggggatgccgctgacatccggttcgtctacaaccccgccatggagaatgtctgcggatac

SEQ ID NO: 3090 - DNA, 1560 bp, Homo Sapiens
tctagtaaaaatgcatttttatagagatgttgggaaaggcttcttgaaattacacgtgggacttttaatagataggcgctttgaccagctaagcaacagggctcccctcgtgtgggacttttagaatgtagcaaccactgacacgcagggaaggattatgcgatcaggtgagaaggtggccgaccctgactggctggaagcagatgcattctggtagttgattggtccacaggtagcgtgacgcttgtcacgtcctcagcctcccagcattcaatcgtagcctttcggacagctcgaagcccttctgtggagagctcgaagccttctgtggagaactcaaagccgtccgtggagccccagacgagccaaagcccaccttctcctcagcctgagctgtcttgaagatgagtaagagtgggtttgggagctatggcagcatttctgctgctgatggagcgagtggaggcagtgaccaactgtgtgagagagatgcaactcctgctattaagacccaaagacctaaggtccgaattcaggacgttgtaccgtgtaacgtgaaccagcttctcagctctactgtgtttgaccctgtgttcaaggttaggggaattatagtttcccaggtctccatcgtgggggtaatcagaggggcagagaaggcttcaaatcacatttgttacaaaattgatgatatgaccgcgaaaccaatcgaggcccgacagtggtttggtagagagaaagtcaagcaggtgactccattgtcagtcggagtatatgtcaaagtgtttggtatcctcaaatgtcccacgggaacaaagagccttgaggtattgaaaattcatgtcctagaggacatgaacgagttcaccgtgcatattctggaaacggtcaatgcacacatgatgctggataaagcccgtcgtgataccactgtagaaagtgtgcctgtgtctccatcagaagtgaatgatgctggggataacgatgagagtcaccgcaatttcatccaggacgaagtgctgcgtttgattcatgagtgtcctcatcaggaagggaagagcatccatgagctccgggctcagctctgcgaccttagcgtcaaggccatcaaggaagcgattgattatctgaccgttgagggccacatctatcccactgtggatcgggagcattttaagtctgctgattgaggcagggaaaacatcctttcatttttcgaagacccttgcatccagctgtgagtaattttgacctgttgactttttaggagtaggactaaaaaaaaaaatctcaagtggcattctttgtcaactcgctgcttttctaactgctttgaacttttcggattttctgtatttgaagctcagagagagacggtgatggataaattgacaactctgtaggatttactagcaagctaatggaaacatgattttcggggaagaaaaactacagaaaatgtagaaatttattatttaattgtgttggagcttctttttccaaaagaaaaactagttgcagtcagggagccagcgaaaagacaaaaaaaaaaaaaaaaaa

SEQ ID NO: 3091 - DNA, 114 bp, Homo Sapiens
ttctttctgtacataaaagtgacttaataaacagtgaatttcatacaggtaaaccctattataccctcagttctaaccattggcctatctcttgcgttttgttctaatgagatc

SEQ ID NO: 3092 - DNA, 423 bp, Homo Sapiens
gcggcacgctgggtggatcgcaaatctggggcagcacgtggcagcagggttcaggggcactggtggcctggaaaggtggcaggggtgggcagtgtgtagagtgggcctctggagtccggctgcctgggttcaagtccaggctcccctactcggggcacaggggtgctgctctgggcccgtttcctctctggcaaaatggtgattgtgatgattaagttatatccatttgagagatgaggaaactgatacccccaaagccatctggggcttggggcttaaatctgggccccagtgagcatgggcttaaccactgcccttggtatcacccgagtgacccacagcgttcttaggacagagccaggcccacagttggtgagcgctgctgtgggtgcaggtggacgcagggctgggagagggagtggg

SEQ ID NO: 3093 - DNA, 265 bp, Homo Sapiens
  misc_feature (80)..(80): n is a, c, g, or t
  misc_feature (207)..(207): n is a, c, g, or t
gacactagaggaagtcgtgctacccccgcggagttgtcgtgtgttctggattcattccggcaccaccatgacaaaggtcntctttaggatgctcgctgacgtcggacccacggctgccgtacaaagtactcagtgttcctgaaagtacacctttcacagcagtcttaaagtttgcagcagaagaatttaaagttcctgctgccccangtgcctttattaccaatgctggaataggaataaatcctgcccagactgctggaaatgt

SEQ ID NO: 3094 - DNA, 480 bp, Homo Sapiens
  misc_feature (378)..(378): n is a, c, g, or t
  misc_feature (478)..(478): n is a, c, g, or t
ttttaaaaacagtgcattaagtgacatacctagggtatatggtgagattttaaaaacataaagccttgcaaattacccataacggctacatggagtgacaacagcaaccgtgaacacagaattaagtttaaagcaaaactccctcttagaacctgttaacccactgtagacagaactggtcttgacggtttcctccctcccagagagtgattcggccctgaggggctccaagacacccacccgaggataaagccagggagctgggcaccgaggaagaggctggggtccaagggcgcacagctgcaccttctgcgggacacctgagaagaaaggggtgccgagggcgctttggggacggggcagctggcgccaacagcncaggcgcgggtcgactcctcacctcgggactgggacgcggcggctcctccccgccctccggccgcggcgactccagcagcggggagccacggcctcgcgnca

SEQ ID NO: 3095 - DNA, 377 bp, Homo Sapiens
ttttttttttaaagcctcagtagaagagtgcagagttacactgtcctgtttggggtgcccccctcccccttccgacctaagtgctgccaaggcttgtcagctctcagtccctgccactgtcattttcatcctcccacagcgtcataccactttctgttttttcaaacccatcacataagtgctggagcttggtaacgtttttagtggcttaatgttctcttttagaaattccagcacttctgtcacatatcaaataatacattcttcaaatacacacataataataatacattcttcaaataaatctcaagacatccaaagccagggaacctataagccaaaagctgagatctaaggcaggaccaggccccaatcaa

SEQ ID NO: 3096 - DNA, 481 bp, Homo Sapiens
tttttttttctagtcaaatgaagtgttgagagtggagaaggaacaaagaaatctatgattggttgtgatcaattagttgtaaacaccactgcaattacatgtttctttttatcctcatcaaactagagtatgcaagtcaagcataatttcccatagaagaaacctttttacctttccttcagtatggaaaggtgaatggtcgagactttagtaacatcactaagttactattttaccatcttgccaagtaaaggtaagttagctgatgaacgtctgtccaatcaacacagcttcaagtgtatcacagggcagtatgaatgaagggatggtgttggagaagaattcaaaggaaagaaagggggaaatagctctcttatagggcagggggcaaaacctagctgggatgagggatttttgtgtttttttcacttgagtgaaaatacatgagttttaaaagccacagtgatggagggaagtgaga

SEQ ID NO: 3097 - DNA, 393 bp, Homo Sapiens
tttggttctgtttctttgcttgccaaatagctatatgataaacgagttgactctctagggagatcccaccaggaagagagcattctgtgcagatgcccagtgtaccaaattatgacacccattgcaactacctggtttataacacacacatttcttgtccacatactgttctccctgcctagggtggcttcaccactcctctctgcttcagtaacttctatccttcaaggccagcttaagttctgcctcctccacttatccttctgatcatatctacctaggcgcttcttcttcttagctatgacagaagattttttctctaatcttgtttggtcgttaggaatataagaggacacacttccttttatgctgatgtcaaaactccctcatctg

SEQ ID NO: 3098 - DNA, 385 bp, Homo Sapiens
  misc_feature (81)..(81): n is a, c, g, or t
acggatagcggatctgcggtggatgcagccattgcagccctgttgtgtgtggggctcatgaatgcccacagcatgggcatngggggtggcctcttcctcaccatctacaacagcaccacacgaaaagctgaggtcatcaacgcccgcgaggtggcccccaggctggcctttgccaccatgttcaacagctcggagcagtcccagaagggggggctgtcggtggcggtgcctggggagatccgaggctatgagctggcacaccagcggcatgggcggctgccctgggctcgcctcttccagcccagcatccagctggcccgccagggcttccccgtgggcaagggcttggcggcagccctggaagacaagcagatccgctatccgt

SEQ ID NO: 3099 - DNA, 447 bp, Homo Sapiens
gctgatccgcttaaggtggaagaatgcaggctgcacctagtgaatgaaactcaagacatcgtgacgtgccaatgtactcacttgacgtccttctccatattgatgtcacctttttgtcccctctacaatcttccccgttgtaaaatggatcacctatgtgggactgggtatctccattggaagtctcattttatgcctgatcatcgaggctttgttttggaagcagattaaaaaaagccaaacctctcacacacgtcgtatttgcatggtgaacatagccctgtccctcttgattgctgatgtctggtttattgttggtgccacagtggacaccacggtgaacccttctggagtctgcacagttgctgtgttctttacacacttcttctacctctctttgttcttctggatgctcatgcttggattcctgctgtgctaagcggatca

SEQ ID NO: 3100 - DNA, 377 bp, Homo Sapiens
tttgacgtttactggtttattgtaaagggtattgattgcaaaggataccaatgaagaagcgtagagagaggcacggggaggggccggcgcttccatgtcctcgctagttgccgccctctgggaacctccaggtgttcccctgtccagaagttccctgagcctcagtcctcttgggattttacggaagcttcctgatgtcagcattcctgcccccagggcttaggtgggacctctcctggaagggtcagccaggaacggtggaggaaaaccagcgtctaccagaatgccagacagcttcttaggagtggaagcaatggtcccagtttgcagtgtcttgtatggacgtgatccataccaacttggtttccagaaggcac

SEQ ID NO: 3101 - DNA, 630 bp, Homo Sapiens
  misc_feature (340)..(340): n is a, c, g, or t
  misc_feature (595)..(595): n is a, c, g, or t
gaagttataaaagcttgtttttctttattagaatacttttttcaattctgatttgtcacaatttagattctttttctaagaataagcagaaatttacaaaatttaatttttatttatacattcatccgttcaatacacatttcaagaaagctgtattgcaccctttcagtggtagttacaggacaaagaaacaaaataatccaagagagagaccaacaaatgtatatttataacacagagtaataaacacaaataaatgtggagttatttaagcatgtaagatggtacatgctctaccaggtatgggggcttctctaagacacaagatcagattaaagtncttgaaagataatcctggggttagtcaagcaggtagaagtgtgaagagcactttctgagcggaatctccatgtgccagtctagttcaagagactggatagagattagcaatttggagaatgcaatattaagaaatggcaaaggtgagcctacagagattccaaagttgctagtgaggtttgtgtttgagaaagtggactcggcgccacgcaaagagggattaatagaaaggagacgagtaggaaatccaggcttngtgtgcagcagtgtggcaaattggggagcatggat

SEQ ID NO: 3102 - DNA, 643 bp, Homo Sapiens
cctcggaagatgttccggcacacggacagccctctttcccatcctactgcagacgttatctggatgaatcggatgaggtgatcctgaacgacctggaggtgctgttgcgagcataatcgcttcctcccccgcaggccagatctggatcgacccaggccccctcgatggccctgacctccaggccagccactcagagctccaggtgcccacccctggctagagccggtcctactgatacacctctggtaccaaaggctcagaatgttctccttcaactcccaccatgaattcttacgttcaataagttcatgatccacaccttctccaagagattcacgcagcgcgaactggcaagctcctgcgaggtcacgatggccctttcatcatcaggcagctgtgcctcctgctgactgcggagaacatcttccactcacatggcatgacatcctgctgcgcggaggaggcacctcatagttcgcctcgatccatggtccactgccctcagacatccatcctgctgacctccacgagagctcttccagctgaggaaccaggctgaaggacctgcagacctggagagccgaacctgtctgctgcctgtcccgctcctggtgcccaagccagtccccaccggtgtccctcg

SEQ ID NO: 3103 - DNA, 295 bp, Homo Sapiens
ttttttttttttttttttttggcttcaaaaatttattatttattattaaaaatctcaaacaaacacagacatatggggataccagcattcccctcctggataccaggcagcttcagccctggcaggcacgatagaagaaaatacttgttacacatcctcatcaactttcaaagggatcctgagccgtaaatggaggaaacgcaaacggagtaagcacaggtaaaagatctccccaggagctgacacgggcacaacgatacaaatccctgtggaaacagatgctggcgtgggctgc

SEQ ID NO: 3104 - DNA, 319 bp, Homo Sapiens
tttttttttcacacagcaaatgaatgagcccgaggcagaacagcagtaagactccacctcccaccgctgcgatgaggatgacagtcaagtccacagtccttggggtaagtgtcaccgagaagagcaggtctagctgcttgccgctcgtggggctgcagttagagatgttgacccagaagctgtgatggtggaagcttggcttggggagcacatcctcgtccaggctgaagatctcctcagcccgggtccgctgctcctggatgatcatgaatgcgcgccctgtctggcagaccacgccgctccgctccttaaagaaagt

SEQ ID NO: 3105 - DNA, 453 bp, Homo Sapiens
caaggagagcacaaggaactttattaatgactttcttaatggttaaatgctgtttaccaagtgacccagaggcagcgtggtttagtggtttcaacagcatggtcccgagagtctgacaaacctcagttcaaatccttcttttgtcttcacttagtttttcttcctgagatttagtttcttcatcgttaacaatgaggatattaatatgtttcacacagttgttatgaagaatgcatatattagaatgcctgtagtctcagctactcaggaggctaaggtggggaggtcgctcaagcccaggaattcaaagctgcaatgcattatgattacagctgttaatagccactgcacttcagcctgggcaatgtagtaagatcccatctctggctcggagggtcctacgcccacggagtctcgctgattgctagcacagcagtctgagatcaaactgca

SEQ ID NO: 3106 - DNA, 425 bp, Homo Sapiens
tttttttttttgttccaaaagatcttttattttacaatttgtttatttaaatcaggagctcaaaactgtacacacacagtgattgatagataatgtctttttaataggttcctttttttcccctcagttttgtaatttatttgttgaagaaacagatcatttggcctataacatttcccagagtctggatttcgctggccagcaattttaaattaaagcttttatggtcaataaatcacatttcctgtccctctgtgctatcattggatccaacccccaaatcatatgcaataagtttagtgttattctcttcagatgcaagaaacaaagattccctcaggatacctctagcaggaagttttattgtaaagatacacatgggatgggattaaaggatataggaacctcaaatgttgagttaactt

SEQ ID NO: 3107 - DNA, 466 bp, Homo Sapiens
taaaaattaggctaagtacgaggctcggtgttaatcaggccgaggggagcccagtcgacttagagcgaccgagcgggccgacgacgccgccatgaaccccgaatatgactacctgtttaagctggtttatgattggcgactcaggcgtgggcaagtcatgcctgctcctgcggtttgctgatgacacgtacacagagagctacatcagcaccatcggggtggacttcaagatccgaaccatcgagctggatggcaaaactatcaaacttcagatctgggacacagcgggccaggaacggttccggaccatcacttccagctactaccggggggctcatggcatcatcgtggtgtatgacgtcactgaccaggaatcctacgccaacgtgaagccagtggactgcagtgagattgacctgctatgccatgcgagaacgtcaataagctcctggtgggcaacaagcag

SEQ ID NO: 3108 - DNA, 425 bp, Homo Sapiens
  misc_feature (157)..(157): n is a, c, g, or t
  misc_feature (256)..(256): n is a, c, g, or t
  misc_feature (305)..(305): n is a, c, g, or t
  misc_feature (319)..(319): n is a, c, g, or t
  misc_feature (352)..(352): n is a, c, g, or t
  misc_feature (368)..(368): n is a, c, g, or t
  misc_feature (370)..(370): n is a, c, g, or t
  misc_feature (395)..(395): n is a, c, g, or t
  misc_feature (410)..(410): n is a, c, g, or t
ttcgtggctctctgtgtaactggtttttacttggttacatgccaccaggaactgctgattattttaaagtcctactaccctgcagctcactactttaccttgatttggaagatcatggaatatctatttgaatcctggatgtatttttctcacagtnttcttgcttcctgaaatttcctctggtgttgagggaaagctgagagaatgaaggctctaaatccccagtggaagcatgatatggcgaagagaagctggntgctgaattgttctctctgatggctctatgggagtggatagcactgagncttcattgctgggntttagcggttgctgctgtttcggatcagcatgncacaaggcccttcgantngctcccctttgataagggacccttncatcggtcacagggntacacagattttttt

SEQ ID NO: 3109 - DNA, 513 bp, Homo Sapiens
gcggccgccagacagacccccgacagcctaactcggcgtccgtatcgccgtcggggcggctgaagtcggagctttctgtggagcttgttaggcagaggcacctcgactgtggcttttggaccacacttcggattcacccgggcagatgattaaaaatgccggtttcgggacccgccctattcccatggaattagtctggagcttgggccccggagtctgcatgtctaataagcgtccctggggttaccaaggcaccccaaagtttaaaagtcactcggtgttggaggatttttagacagacgcgatactacaagtactgctaatgacctattttaaaatgacccagataatcgcagtgtgactttatagccactggtcaatgtggatatgtgcaaactagggaagctcctgatcttgggtagagaggaagcaactttgtcattgatttgagaattcaagtaggactcctttgactaagtgttcaatactatagaatctttacacacttgtgaa

SEQ ID NO: 3110 - DNA, 464 bp, Homo Sapiens
ttgtgttttgacgttatcgagtagtgtatagcggtttcggcgtgagtgttatggttgattttgtagttgtgatgttcaaggtttacgcgttagtgtacattagtatagatgtagatgtctgaaactggctgcaataagtttaaattcaggaaaataattctgatgtgctattcatttataatcctcattttttactatctcatgtatcccagagattttaatagtcctgtttttagaaagacatgaaaatagatgcaatgatatccactgtgttttgcatttttctagccatcggaaaatgtgcattatgtgcatattaagaaaggctacaaggtaattagtaaggctgataatcactacattgtgaagaaactagaatatcactttttttttttataaaaggacaatttagaactgtgcagggacaatattcgtaacagaactatttaaacacccatgcaaaa

SEQ ID NO: 3111 - DNA, 515 bp, Homo Sapiens
agctggctcagggcgtccgctaggctcggacgacctgctgagcctcccaaaccgcttccataaggctttgctttccaacttcagctacagtgttagctaagtttggaaagaaggaaaaaagaaaatccctgggccccttttcttttgttctttgccaaagtcgtcgttgtagtctttttgcccaaggctgttgtgtttttagaggtgctatctccagttccttgcactcctgttaacaagcacctcagcgagagcagcagcagcgatagcagccgcagaagagccagcggggtcgcctagtgtcatgaccagggcgggagatcacaaccgccagagaggatgctgtggatccttggccgactacctgacctctgaaaattccttctctaccttggtcattctctctctacttggggagatcggatgtggcactttgcggtgtctgtgtttctggtagagctctatggaaacagcctccttttgacagcagtctacgggctggtggtggagggtct

SEQ ID NO: 3112 - DNA, 749 bp, Homo Sapiens
tgctggtggccagtggagaggcgctggccgcacttcccgtcggggagagagtgtaatatggcgaagacctacgattacctgttcaagctgctgctgatcggggactcgggggtggggaagacctgtgtcctgttccgcttctccgaggacgccttcaactccacttttatctccaccataggaattgactttaaaattaggaccatagagctcgatggcaagagaattaaactgcagatatgggacacagccggtcaggaacggtttcggacgatcacaacggcctactacaggggtgcaatgggcatcatgctggtctacgacatcaccaacgagaagtccttcgacaacatccggaactggattcgcaacattgaggagcacgcctctgcagacgtcgaaaaagatgatactcgggaacaagtgtgatgtgaatgacaagagacaagtttccaaggaacggggagaaaagctggccctcgactatggaatcaagttcatggagaccagcgcgaaggccacatcaatgtggaaaatgcatttttcactctcgccagagatatcaaagcaaaaatggacaaaaaattggaaggcaacagcccccaggggagcaaccagggagtcaaatcacaccggaccagcagaagaggagccagcttttccgatgtgttcttctggtgaggaacacggcttatctgagcctcgcttcagcccagtgatgtgctgtctggtgagcctatcaacggggc

SEQ ID NO: 3113 - DNA, 549 bp, Homo Sapiens
ttttttttttaaattttagatgatgttttgcaaatttattgcatgatatccagcattttatctggcaactctagccataatgtacttctaaaaaagtatcacttaaggagaattttaatgactcagataaattttcatataaatttctttccatattttgaaaataaggctattcttgcttttccattttattttttaatagacatggtctcaatacgttgcccaggctggtctctaactcctagcttcaatcaatcctcctgacttgtcttccctaagtgctgggattacaggtgtgagccactgtgcctggtctcacttttccaattctaaagaatgtgtctgtgtaagccttcccctcaacaacttagtgaaaggtgaaaaaaaggtttggaaataaaagcatctgatgtttgaaaaagtactttgtgaagtaaatgcactaagagttatctgtgtattactgcaaacaggtgaacatagtaaaaacaaatgaacttactgcaagtagctcaacatagtaaagacaatagaaatgtttggctttac

SEQ ID NO: 3114 - DNA, 946 bp, Homo Sapiens
gaaggagtcaaatcagtactgtaagctggatgcctaatgatttcccatgggaactcttgcagaattgcccttgtctgatgagaggaatgagcgagaacattgtcatggtggaggaggactctctggtgaagctttcccaggcatttttctgctaaagctttgactttgtccaaacactcataataagcagatattatcatttgttggctttccagaaactcaacaagcaaaatgccttgagcatcccaaaaaactattgccatgacctttactcttgaccagtctgcttttcctttcactggaccacttggccactttgacctcttagtacccttttttttttttttttgagacaatatctggctctcttgcccaggctagagtgcaatgatgcggtcttgtctcactgcaggctcaacctccctggtagctgggactacaggcacgcgccactgtgcccagctaaattgctttgattgtgctttgtcttcgggattgtactggtaaagccatgtttcagttcctattgcagttcttcgaataagtgcttcaggatcttgatcgtacttgtctagactttctatccaaagctctgctcttgtctacagctgatctgggtgcaagggttttaacagccattgagtggaaagcttgctcaactttaatttttcagtcagaattttgtaagctgaaccagttgaaatgaccacagtgttggctattgtttctgctcttgtcagtcctcttgaatcggcagaaacaagatgaatttttttccccgtaaattgatgtggagggcatgatgttcaacatcatctcaacccttcctgaaacaatttatccagctggtcatcatggttcatgcctataatcctaccactttgggaggttgaggctggcagatgactggagcctaggagtttaagaccagcctgggcgatatggc

SEQ ID NO: 3115 - DNA, 375 bp, Homo Sapiens
gttataatatccaaggcacattacatttagctattcacccatttcaagtaattgtcagatagttttgattcatccccagaaggttttatttccacaacagacaaacagagaattcagtagtttcttgttactaacatttctgggctaatatctaactttttgcatgaattaatatgcactatactctcacctccacaatcattccatagcaaatgtgtgtcttctggatgatgtggaagagagagcccagcaagcactatgggcctggctttgcaaaatctaaaacaggccaaagggatattaaatttcttatttggtgtgggttgggctgggcagtaatttgttctcacttacagtggtctgtcgtatgtgtca

SEQ ID NO: 3116 - DNA, 369 bp, Homo Sapiens
  misc_feature (203)..(203): n is a, c, g, or t
aaactttaaaatatactgaaaacataagggactaagcttgttgtggtcacctataatgtgccagataccatgctgggtgctagagctaccaaagggggaaaagtattctcatagaacaaaaaatttcagaaaggtgcatattaaagtgctttgtaaactaaagcatgatacaaatgtcaatgggctacatatttatgaatgantgaatggatgaatgaatattaagtgcctcttacataccagctattttgggtactgtaaaatacaagattaattctcctatgtaataagaggaaagtttatcctctatactattcagatgtaaggaatggtatattgcttaattttaaaccatccagactttactgg

SEQ ID NO: 3117 - DNA, 495 bp, Homo Sapiens
ctcaggtggatcgccgcggcccctcctcccagagcggcagccttttcccgcgcgtgctgccttcgccgctcgggccgcccgggggaaaacatggcgtctgccctggagcagttcgtgaacagtgtccgacagctctcagctcaagggcaaatgacacagctttgtgaactgatcaacaagagtggggaactccttgcgaagaacttatcccatctggacactgtgctcggggctctggatgtacaagaacactccttgggcgtccttgctgttttgtttgtgaagttttctatgcccagtgttcctgacttcgaaacgctattctcacaggttcagctcttcatcagcacttgtaatggggagcacattcgatatgcaacagacacttttgctgggctttgccatcagctaacaaatgcacttgtggaaagaaaacagcccctgcgaggaattggcatcctttagcaagccattgacaagatgcagatgaataca

SEQ ID NO: 3118 - DNA, 563 bp, Homo Sapiens
  misc_feature (330)..(330): n is a, c, g, or t
caggcaaggggcagtgcaaaaatttaaaaataaaaaataacgtttttaagctattattatatgacatgtgttaattcatttaaatctcctaacaatcctatgatgtggtaaatactattattttcattcctgtttcattgatgaggaaagaccttgtctaggagaggtaaggcaatttgcctggggtcacagaaataagaaatgaaagagctggcattgaagctaagcagcctgactctagggctcatagtcagaaatgcgatctctctggaaatgatataattatagcactgcatttattcccaccaccaacaccatcattgtcatctncgctggcgtcaccaaccttgtctacagttaggctagaggggcggctaggtctatgaagcacaccagtggtgatgagacaaagagacaaaaacttgactaagtaagactgacaggaataagggcttcaagggaagaagtcaccaaggaagctggtccccggaagagaataatgtgcagcggaatggatgaactaaatggaggcctgcaactgtgaacgtgaaaaaatatcagct

SEQ ID NO: 3119 - DNA, 305 bp, Homo Sapiens
gttgtccccccagtgctctgtgtcagtggggaatctctccacaaggtgaatatgtgggggatggcatgggctgcagtgggtgggccagaatttgagaactagcagataacgtcacatacgtgccccatccccatcacttcagccagcatcagatctgctgtccaggatagctatacattacttgtggttaaatgtatttgtcttaatacattaagttaaatctatttgtacttgtggttaactgtcttagagtaagttccttcacaagttaatttcgagcgcttaagttaatgatatttctttcc

SEQ ID NO: 3120 - DNA, 272 bp, Homo Sapiens
aaaagtggagaaaatgacaaagatggaggagactgtctcagcaggtagagcgtgtgtaccccgtcaaaggaggcgaggagatgcagcacagcaaagagccgctcagcaaaaacaaataccacacgggcactggccccaacgaccttgaaggttctgcccttgaaatccgatgcggctacaacgtaagaccccttcccgagagtgggctttgctagaagcaagaagggagtgatccaagagcactgggatcctaaaggaatcaaggtcgccac

SEQ ID NO: 3121 - DNA, 209 bp, Homo Sapiens
gccaagaggcaaccacaccactggcagatgaaggcagggctccaaagacaaaccagaaagtaaaaaatcttggtctggtctgctctggtttggcttcaaacattgggttttctcttctgttgatgagacaggtgttgattccaaataacgtcagagatctgctccattcaacacagcctgaggcacgaccagaggcagaactgcctaaa

SEQ ID NO: 3122 - DNA, 481 bp, Homo Sapiens
  misc_feature (204)..(204): n is a, c, g, or t
  misc_feature (233)..(233): n is a, c, g, or t
  misc_feature (317)..(317): n is a, c, g, or t
  misc_feature (323)..(323): n is a, c, g, or t
  misc_feature (372)..(373): n is a, c, g, or t
  misc_feature (388)..(389): n is a, c, g, or t
  misc_feature (413)..(413): n is a, c, g, or t
aaggtattttctccctagcttctcattacagtatttctaattgcttcacactttacagttttaatacaaagtacaagctctacttttataacgtgtactacaagtttctttaaaagtattgttgtatttcagctgaactcttgtatctgcagtcttttgttatttctgcaggctacacccttaatttgcagaggccattttgtngtttgtttgatgctgaagctgttgttaanatgccccatactccaaggcagattgtctgtataatacgctatagcttttcaccatgtggtgtttaccagctgttactctgtatnttaaanagccagagatttcttctgtctaaactgtttctatagcattttctaaacnnaaaaaatggttgttnntctttgccttgtaataagattgtnaatccattttcctgcttgtgttcttagtgggcatgattgtgagtgtgtgtgcgggtgctcacacgcga

SEQ ID NO: 3123 - DNA, 567 bp, Homo Sapiens
ttgaatttaggtgacactatagaagagctatgacgtcgcatgcacgcgtacgtaagcttggatcctctagagcggccgcctactactactaaattcgcggacgcgtcgactttttttttttttgagaatttaaaatcatatttattgttttgcaaacaataacttagacatttcttaatattttaaaaaccccaacacaaagtaataaatttggcttcttttccccacaaaaatgggaaatacctttcagtaaaggaaattttaaattatttttacacaccagttggttgttggaatttatagctctttaacatatgacatcagcaaaaataattagcattaactgattaatacataaaacaatttacaatcatatggtaagcaggaaacaaaaaccgatcagaaaacaccgttttatagtaattttcaaacagataaattattacagtatactttatccccaacatctctgagcccattaatagagtacttctatacatataaagatgtcgacgcgggcgcgaatttagttataatagtcgacccgggaatttcggaccggttacc

SEQ ID NO: 3124 - DNA, 471 bp, Homo Sapiens
cgacacaaaagccaactgtatttctatacaccagcaatgaacaagtagaaaccaaaaatcagaaaaacaataccatttacaacagctccaagaaaatagttacaaatctaagaaaatatgtacaagatctgtatgctaaaactataaaatgctgaagaaagaaactaaacatgcaaataaatggagagacacgtcatgttcacggattaaaaggcgatcataaatatgttaattctccccaaacttatctatagatttaatgcaattctaatcaaaatcccagcaggacttttgtagctaagctaatcctaaaatttaaatggaaaggtaacactgatacaatagtcaaaataattttaaaagaaaaataaaattggaagaattatattaccagattttaatacttattacaaagctatagtcatcttgacttatgtggtattggcaaaaggagagatgtacagatcaatg

SEQ ID NO: 3125 - DNA, 482 bp, Homo Sapiens
tcttgagacagggcttcactttgtcacccaggctggagtgcaatggcacaatcacagctcactgcagccttgaacccctgggctcaagcaatcctccaactgcagcctccccaagtagctaggactacaggtgacatcacagttggctactttaaattattttatttctttttttttttatagagacaaggtctcactatgttgctcaggctggaaaatattagagattttttaaaaatgcacttaccccatctggactgttgaccccagaaatgagggtatgcagtagtcagcagctgccaatgtgtatggtgggcgagcagcagaatcgtcccagtaaatgtccttcttcatcttgggtaagctcatgtgcatttcgtccacagctaaaagagagacctaaaatcattgttatattgttagaataactcagatgtaaattaaataaaaaggagaagtttttttgggcagatgagagttag

SEQ ID NO: 3126 - DNA, 564 bp, Homo Sapiens
  misc_feature (29)..(29): n is a, c, g, or t
ctccttgcggctccatcattcaggcctgntcatctctcacctggactgctgtgaccttcattcattcccaggagaagtccagaaatggcttcagacatacctggatctgtgacgttgcccgttgcccccatggcggccaccggacaggtgaggatggcgggggccatgcctgcccgtggaggaaagcggcgttccggaatggacttcgatgatgaagatggtgaaggccccagtaaattttcaagagagaatcatagtgaaatcgaaaggcgcagacggaacaagatgactcagtacatcacggagctctccgacatggtccccacatgcagcgcactggctcggaagccagacaagctcaccatcctccgcatggccgtctcgcacatgaagtccatgaggggtacagggaacaagtccaccgatggcgcgtacaagccttccttcctcacagagcaggaactgaagcatctcatccttgaagcagctgatggatttctgtttgtggtggctgctgagacagggcgagtgatttatgtgtctgactccgtcacccctgttctg

SEQ ID NO: 3127 - DNA, 4546 bp, Homo Sapiens
gtcagggccagggccagagagccggagagaggagccccgaccgagagcccaggtgagcccacccttcctccccagcccagccccagcccagcccagcttggcccagtctccataacaacatctcctggagcccgcagagagatcccagccctgcccaatcccttcaccaccacaagcccctgcctatctcggggacccccaagaactgggagacttgtggctggaaggcagagacccccctcccccagcccagaccctccctcacatatccagaaaggcacacactgtggggaggtagatacccagccagagaaaggtcccacttctgagggaggtacaggaactgtcacaccctcctggaaacggacacacgacatggggggacagacacggagggtggggcactcagacacaccaatgcacactcactcggggaagcatgacatgggatcagacagcctcaccctgagatctgtacagacacagatagatggactgaccggccatgaactctggccggcatacccctgcctgcttcagccgaggcttggtaccactgctgggggaaggtggcatgcgtgcatcccacgggcagcatggagggagccacgactccccaaaaatcctgtcgctaagagacggtgccagtgctgccaagaagtgtgaaaacaggggaggtggggagggatgtgaggcttgtcacagttagagctcctgccaggagcctgaaggagctttcagcagagccctggtcctgcctcccagcccaccaccactccttttccatcagctagccagaaggggaatgggggtagggagtggatagggatagccagcaggggactttccaacctgtctcctgcccactgcagactccacttctgagacccatcctcttcagaactccagaggcctctccaccccctgccccacccccttgccctagtttagctccctcgtgccaagactgagtgcagcgctggcacaacaccagtcgggaaatagcagaaggtgctgaggcggcagaaagtgtagatcaatcgatggcctaggagccaagactgccaggaacatccccaccccaatccttcagccctctccagccccatccacgcatacctaggccagcagcacagggcttctgagcaggagtgggaggctcaggtcctctgccctcccctgctcagaactctggtgaagctgaggaagcaggaggtccgtgaggccccagggtctagggaaggaggttaaggggtggggcccagggaccctagaggatagacccctctgctggcaggtgttccctttccagagtccaggccacctgctctgtccccacagtgacatgtcggaccctgagatgggatgggtgcctgagcccccaaccatgacgctgggggcctctcgggtggagctgcgggtgtcctgccatggcctcctggaccgggacacactcaccaaaccccacccctgcgtgctgctcaagctctactctgatgagcagtgggtggaggtagagcgcacagaggtgcttcgctcctgttccagccctgtcttctcccgggtgctggcccttgagtatttttttgaggagaagcagcccctgcagttccacgtgttcgatgccgaggacggagccaccagcccccgaaatgataccttcctcggctctacggagtgcaccttgggccagattgtgtcacaaaccaaggtcactaagccattattgctgaagaatgggaagactgcgggcaagtccaccatcacggtaggcaagatcacctgtactcacccttggtccaggtattcaatgcccctgcatggacacctatggtgacatcatgcccaggaccacccccacctaagggaaaggggatggggtggcccttgtggtaaggttaggggagtcctgccacttgtatcccccttgcagatcgtggccgaggaggtatcaggcacaaacgactatgtgcaactcaccttcagagcctacaagctggacaacaaggttggaaccccagagtccaggcccccaactcccctgtcactcctaggcctcccactcaagacagatcccaggagcccaggcctgctctcttcccagtggagcccatcccccaccctccttgcagctctcaccaacctcaagggccctttctcctgtatcttcaggatctgttcagcaagtctgaccctttcatggaaatctataagaccaacgaggaccaaagtgatcagctggtctggagaactgaggttggtgcctggggctatggggatgaagggagggagagtaaagtaagaaaacacagacaggagctgaccagccacctggtgcctctccaaggtggtgaagaacaacctgaaccccagctgggagccgttccgcctgtccctgcattccctatgcagctgtgatgttcaccgacctctcaagttcctggtgtatgactatgactccagtgggaagcatgacttcatcggcgagttcaccagcactttccaggagatgcaggaagggacggcaaaccctgggcaggaggtgccacaaataccccacccccagaatcccacccagatccctgggagaatcctgagggtgatgctgaagagaccaccataggtgataggaagtggagagggtggaaagcacctgggctcagctgaaggacggaaccatgggggtcttgctctgggaggctctgctggaagggagaaagaggggtcacctgatggacttgtgaccctgagcttgtggggtggggtctagatgcagtgggactgtatcaaccccaagtatcgggacaagaagaagaattacaagagctcagggacggtagtgctggcccagtgcacggtaaatttcacttcctgcttcaagccttgccccagcccctgcccctaccacactctcaggttcaacccttcccttgtttcaaagaccagtttctctgcttctgggaactggaaaccacccccaactgcaacccaaaaaaactctggctcccccatgttccccacagaagccctacccaagctccctcctcaaaggaccaccccatcccctcgccttacccctctccctacctccaggtggagaaggtgcacaccttcctggattacatcatgggtggctgccagatcagcttcacggtggccattgacttcactgcctccaatggggacccgaggagcagccagtccctgcactgcctcagtccccgacagcccaaccactacctgcaggccctgcgtgcagtgggaggcatctgccaggactatgacaggtaggagagagtggggcgggagggaacaggcagggaggccttgcccaacggattccacagctttttcttctccccagtgataagcggttcccagcttttggctttggggctcgaatcccccccaacttcgaggtgtcccatgactttgctatcaactttgacccggaaaatcctgaatgtgaaggtaaaaggggagattttcacctgccccgcctccccgcagacacactccacacaggagcacagactccactccccagggcccagcttcctgtcccttccacccatcccaggcctgtctttatcaggtgaggcttccagggccgaggcccagcatctgcacccaactctccctgccaagggaccatccaactctcccactgcttaatgaaggaactcgaggggagggcagtcctcagacctggaagcatttccttgctttaaggagtgtcaggagggggccctgctcatttctgccagcttcacaacttctcttcactcacagagatctcaggggtcatcgcctcctaccgtcgttgcctgccccagatccagctctacggccccaccaatgtggcccccatcatcaaccgtgtggctgagccggcccagcgggagcagagcaccggccaagccacgaagtactcggtgctgctggtgctcactgacggtgtggtgagcgacatggctgagactcgcactgctatcgtgcgtgcctcccgcctgcccatgtccatcatcatcgtaggcgtgggcaatgctgacttctctgacatgcggctgctggatggcgacgacggccccttgcgctgcccccgaggggtgcctgcagcccgagacattgtccagttcgtgcccttccgagacttcaaggatgctgccccctctgcactcgccaagtgtgtcctggctgaggtgccacggcaggtggtggagtactacgccagccagggcatcagccctgggctcccaggccctgcacactggctacgactcccagccctagcccgtgactgcctccctccggaccgacactccctcagcctctcagtgcctgtcctgaccctcgtgactccagtgaccaatgcctccacctcttggaccaggtgtgccccctgggttctggacgtgagtggtgggtcctgctcctatctctccaaaccccatacccttcaatgctgtggcccctcagtgacttccttgggtgatcctgactttctagccattaataaagagaactgctcctagcaaaaaaaaaa

SEQ ID NO: 3128 - DNA, 537 bp, Homo Sapiens
  misc_feature (96)..(96): n is a, c, g, or t
  misc_feature (263)..(263): n is a, c, g, or t
  misc_feature (327)..(327): n is a, c, g, or t
  misc_feature (360)..(360): n is a, c, g, or t
  misc_feature (397)..(397): n is a, c, g, or t
  misc_feature (418)..(418): n is a, c, g, or t
  misc_feature (428)..(428): n is a, c, g, or t
  misc_feature (467)..(467): n is a, c, g, or t
  misc_feature (482)..(482): n is a, c, g, or t
  misc_feature (489)..(489): n is a, c, g, or t
  misc_feature (495)..(495): n is a, c, g, or t
  misc_feature (530)..(530): n is a, c, g, or t
gtaagggcaaaataatacccctttctctatgtatctctgtatgcacacgcactatatatatatatatatatatatatatatatatatatatacatncatgtaatcaccacttctcgatgtctatttcaaatcaaggctcctgagtagggggtgaagtgagccagcttgcacctcaggctaacacataggactttgctcagccatgtcccctgggatacaggggcacaccaggaccaagtggcagacctgtgggctttcagctncgggggccagggcatgcctgccaccccctgacaaaaacaggttccacagtgctacccttgcttnctgccccttgaggtgggccaggctggcttcctngctatgcagggatctctggttccccagggagaccttngggggccaggcaggttaaggnttcaggggtnataggggagagcattactttgttcactgttttgcacccncgggccttgggagtnccctttncaggtnggtagggctttcagccacaccacccagacctaggnttttttg

SEQ ID NO: 3129 - DNA, 519 bp, Homo Sapiens
tttttttttttttttttattgctgctttacattctataaattatagatctgtttaggtgaacgagggttttttattattattatgtatttattttttgagactgggtcttgctatgttgctcacattggccttggactcaagagatccactagcttgagcagctgggactacaggcccacgaccacgcccagtatcgttgttttttaaataacaagactcctctcggttgctgaggctcttaggaccaccaaccattcctaacttaatgaatatcgattcaatctgctagtctctagctggatgcaggtccgccgaaatgggaaggaggaaggaatgcagcgtaactggaccggcctggatggctgttgtaatgcgtcacggaagagccagaagagcgtctcttcctgaggccaatgtgttcaaccaagcgggaaactccccgggtagagtgaaatccgaagttgctatgctacaagataacctgggccgtgcgccgagagctgagagccctcgtgccg

SEQ ID NO: 3130 - DNA, 5009 bp, Homo Sapiens
gggggagcaaaagatcacaggctgacactcccagcagggtagatcctgggaatctgatctcctggcctcccccacatcctcccccctccacttcctggagcagcgacctgcccccttcccgcctgcacttccctccacttccagggccgggcttctcctcacaccagccagacagcctaccctccgcccaggggaagcggctgcctccgccaggccgcttccaggaagccccgggccaggccccagcattgttcaggccctggggccagcaccccagccagccgaacaccatgaagtccagcggccctgtggagaggctgctcagagccctggggaggagggacagcagccgggccgcaagcaggcctaggaaagctgagcctcatagcttccgggagaaggttttccggaagaaacctccagtctgtgcagtatgtaaggtgaccatcgatgggacaggcgtttcgtgcagagtctgcaaggtggcgacgcacagaaaatgtgaagcaaaggtgacttcagcctgtcaggccttgcctcccgtggagttgcggcgaaacacggccccagtcaggcgcatagagcacctgggatccaccaaatctctgaaccactcaaagcagcgcagcactctgcccaggagcttcagcctggacccgctcatggagcggcgctgggacttagacctcacctacgtgacggagcgcatcttggccgccgccttccccgcgcggcccgatgaacagcggcaccggggccacctgcgcgagctggcccatgtgctgcaatccaagcaccgggacaagtacctgctcttcaacctttcagagaaaaggcatgacctgacccgcttaaaccccaaggttcaagacttcggctggcctgagctgcatgctccacccctggacaagctgtgctccatctgcaaagccatggagacatggctcagtgctgacccacagcacgtggtcgtactatactgcaagggaaacaagggcaagcttggggtcatcgtttctgcctacatgcactacagcaagatctctgcaggggcggaccaggcactggccactcttaccatgcggaaattctgcgaggacaaggtggccacagaactgcagccctcccagcgtcgatatatcagctacttcagtgggctgctatctggctccatcagaatgaacagcagccctctcttcctgcactatgtgctcatccccatgctgccagcctttgaacctggcacaggcttccagcccttccttaaaatctaccagtccatgcagcttgtctacacatctggagtctatcacattgcaggccctggtccccagcagctttgcatcagcctggagccagccctcctcctcaaaggcgatgtcatggtaacatgttatcacaagggtggccggggcacagaccggaccctcgtgttccgagtccagttccacacctgcaccatccacggaccacagctcactttccccaaggaccagcttgacgaggcctggactgatgagaggttccccttccaagcctccgtggagtttgtcttctcctccagccccgagaagatcaaaggcagcactccacggaacgacccctcggtctctgtcgactacaacaccactgagccagccgtgcgctgggactcctatgagaacttcaaccagcaccacgaggacagtgtggatggctccttgacccacacccggggtcccctggatggcagtccttatgcccaggtgcagcggcctccccggcagacccccccggcaccctctccagagcctccaccaccccccatgctctctgtcagcagcgactcaggccattcctccacgctgaccacagagccggctgctgagtcccctggccggccgccccctacagctgctgaacggcaggagctggatcgcctcctaggaggctgcggagtggccagtgggggccggggagctgggcgcgagacggccatcctagatgacgaagagcagcccactgtgggcggaggcccccacctcggagtgtatccaggccataggcctggcctcagccgccactgctcctgccgccagggctaccgggagccctgcggggttcccaatgggggctactaccggccagagggaaccctggagaggaggcgactggcctacgggggctatgagggatccccccagggctacgccgaggcctcgatggagaagaggcgcctctgccgatcgctgtcagaggggctatacccctacccacctgagatggggaaaccagccactggggactttggctaccgcgccccaggctaccgggaggtggtcatcctggaggaccctgggctgcctgccctatacccatgcccagcctgcgaggagaagctggcgctgcctacagcagccttgtatggactgcggctggagagggaggctggagaagggtgggcaagtgaggctggcaagcctctcctgcacccagtgcggcctgggcacccgctgcctctgctcttgcctgcctgtgggcatcaccatgccccgatgcctgactacagctgcctgaagccacccaaggcaggcgaggaagggcacgagggctgctcctacaccatgtgccccgaaggcaggtatgggcatccagggtaccctgccctggtgacatacagctatggaggagcagttcccagttactgcccagcatatggccgtgtgcctcatagctgtggctctccaggagagggcagagggtatcccagccctggtgcccactccccacgggctggctccatttccccgggcagcccgccctatccacaatctaggaagctgagctacgagatccctacggaggagggaggggacaggtacccattgcctgggcacctggcctcagcaggacctttggcatctgcagagtcgctggagccggtgtcctggagggagggccccagtgggcacagcacactgcctcggtctccccgagatgccccatgcagtgcttcgtcagagttgtctggtccctccacgcccctgcacaccagcagtccagtccagggcaaggaaagcacccggcgacaggacaccaggtcccccacctcagcgcccactcagagactgagtcctggcgaggccttgccccctgtttcccaggcaggcaccggaaaggcccctgagctgccgtcgggaagtgggcctgagcctctggcccctagcccagtctctccgaccttccctcccagctcgcccagtgactggcctcaggaaaggagtccagggggccactcagatggcgccagtcctcggagccctgtgcccaccacacttcctggcctccgccacgccccctggcaaggccctcgaggcccccccgacagcccagatgggtctcccctcactcctgtgccttcccagatgccctggcttgtggccagcccagagccgcctcagagctcacctacacctgctttccccctggctgcctcctatgacaccaatggccttagccagcccccacttcctgagaaacgccacctgcccgggccggggcaacagccaggaccctggggcccagagcaggcatcatcgccagccagaggcatcagtcaccatgtcaccttcgcacctctgctctcagataatgtcccccaaaccccagagcctcctacacaagagagccaaagcaatgtcaagtttgtccaggatacatccaagttctggtacaagccacacctgtcccgtgaccaagccattgccctgctgaaggacaaggaccctggggccttcctgatcagggacagtcattcattccaaggagcttatgggctggccctcaaggtggccacaccgccacccagtgcccagccctggaaaggggaccccgtggaacagctggtccgccatttcctcatcgagactgggcccaaaggggtgaagatcaagggctgccccagtgagccctactttggcagcctgtccgccttggtctcccagcactccatctcccccatctccctgccctgctgcctgcgcattctcagcaaagatcctctggaagagaccccagaggctccagtgcccaccaacatgagcacagcggcagacctcctgcgtcagggtgctgcctgcagcgtgctctacttgacctcagtggagacagagtcactgacgggcccccaagctgtggcccgggccagctctgcagctctgagctgtagcccccgcccgacaccagctgttgtccacttcaaggtgtcagcccagggcattacactgacggacaaccaaaggaagctcttctttcgccgccattatccagtgaacagcatcaccttctccagcactgaccctcaagaccggagatggaccaacccagacgggaccacctccaagatctttggtttcgtggccaagaagccgggaagcccctgggagaatgtgtgtcacctctttgcagagcttgacccagatcagcctgctggcgccattgtcaccttcatcaccaaagttctactgggccagagaaaatgaaggaaggccacaagctcagagcccacatcaacactgcccccctcccagcaccccacagccctcacatcccctggcctggacccaggagacccaggagaaagcaccctcccttaggaatgaggagtgggcatcaggcctgggacactgctctccttccccgcccccagcctgctaagttaagtggacaggcccacaagatgaccttgcatgtgagcagatggcagagatgggtgtgtgaggggtgaggaggcatcagcagttgagccccgaaggagatcaggcagccccacctgcaggagaacgtcagccctccaggggatcagcccctgccagttccacccagctgcaggtgccagcacggcagggatgggagaggggtggggagcgagtcactgcctcctctgagcagagattcagagtaggatcacatgaataggggaaaaaagagagtctatttttgtctaataataaagaatttctataaacttt

SEQ ID NO: 3131 - DNA, 5113 bp, Homo Sapiens
gctggcggagagcggcctgcgggcgatcgggccgagcctcgctcaaggagcacccccggggcaccctcctgtccgatggcagcccggccctgtccaggaatgtcggtatgacggtctctcagaaagggggtccccagccaacaccgagcccggctggccctgggacgcaactcggaccaatcacaggagagatggatgaagccgattctgcgtttttaaaatttaagcagacagctgatgactctctgtcccttacatctccaaacaccgagtccatttttgtagaagatccctacaccgcctcgctgaggagtgagattgagtcagacggccacgagtttgaagctgagtcctggagcctcgccgtggatgcagcctacgccaagaagcaaaagagggaggtggtgaaaagacaagatgtcctttatgagctgatgcagacagaggtgcaccacgtgcggacgctcaagatcatgctgaaggtgtactccagggccctgcaggaggagctgcagttcagcagcaaggccattggccgcctcttcccatgcgctgacgacctgctggagacgcacagccacttcctcgctcggctcaaggagcgccgccaggagtccctggaggagggcagtgaccggaattatgtcatccagaaaatcggcgacctcctggttcagcagttttcaggtgaaaatggggagagaatgaaagaaaagtacggtgtgttttgtagtggccacaatgaagctgttagtcattacaagttgctgcttcagcaaaacaagaaatttcaaaacttgatcaagaaaattggcaacttctccatcgtgcggcggcttggcgtgcaggagtgcattctcctggttacacaacgcataaccaaatacccagtgctggtggagcgcatcatccagaacacggaagctggcactgaggactatgaagacctgacccaggccttgaacctcatcaaagatatcatctcacaagtggacgccaaggtcagtgagtgtgagaagggccagcgcctcagggagatcgcagggaagatggacctgaagtcttccagcaaactcaagaacgggctcaccttccgcaaggaagacatgcttcagcggcagctccacctggagggcatgctatgctggaagaccacatcagggcgcttgaaagatatcctggctatcctgctgaccgacgtacttttgctgctacaagaaaaagatcagaaatacgtctttgcttctgtggactcaaagccacccgtcatctcgttacaaaagctcatcgtgagggaagtggccaacgaggagaaagcgatgtttctgatcagcgcctccttgcaagggccggagatgtatgaaatctacacgagctccaaagaggacaggaacgcctggatggcccacatccaaagggctgtggagagctgccctgacgaggaggaggggcccttcagcctgcccgaagaggaaaggaaggtggtcgaggcccgcgccacgagactccgggactttcaagagcggttgagcatgaaagaccagctgatcgcacagagcctcctagagaaacagcagatctacctggagatggccgagatgggcggcctcgaagacctgccccagccccgaggcctattccgtggaggggacccatccgagaccctgcagggggagctaattctcaagtcggccatgagcgagatcgagggcatccagagcctgatctgcaggcggctgggcagcgccaacggccaggcggaagacggaggcagctccacaggcccgcccaggagggctgagaccttcgcgggctacgactgcacaaacagccccaccaagaatggcagtttcaagaagaaagtcagcagcactgaccccaggccccgagactggcgaggccccccaaacagcccggacttgaagctcagtgacagtgacattcctgggagctctgaggaatcgccgcaggtggtggaggcgccaggcacggaatccgatccccgtctgcccaccgtcctggagtcggagcttgtccagcggatccagacactgtcccagctgctcctgaaccttcaggcggtaatcgcccaccaggacagctatgtggagacgcagcgggctgccatccaggagcgggagaagcagttccggctgcagtcgacgcgtgggaacctgctgctggagcaggagcggcaacgcaacttcgagaagcagcgggaggagcgcgcggccctggagaagctgcagagccagctgcggcacgagcagcagcgctgggagcgcgagcgccagtggcagcaccaggagctggagcgtgcgggcgcgcggctgcaggagcgcgagggcgaggcgcggcagctacgcgagcggctggagcaggagcgggccgagctggagcgccagcgccaggcctaccagcacgacctggagcggctgcgcgaggcccagcgtgccgtggagcgcgagcgggagcgcctggagctgctgcgccgcctcaagaagcagaacaccgcgccaggcgcgctgccgcccgacacactggccgaggcccagcccccaagccaccctcccagcttcaacggggaagggctggagggccctcgggtgagcatgctgccatccggcgtggggccagagtacgcagagcgccccgaggtggctcgccgggacagcgcccccaccgagagccggctggccaagagcgatgtgcccatccagctgctcagcgccaccaaccagttccagaggcaggcggccgtgcagcagcagatccccaccaagctggcggcctccaccaagggtggcaaggacaagggcggcaagagcaggggctctcagcgctgggagagctcagcgtccttcgacctgaagcagcagctgctgctcaacaagctcatggggaaagatgagagcacctcacggaaccgccgctcgctgagccctatcctgcccggcagacacagtcctgcgcccccaccagaccctggcttccccgccccgagcccaccgccagctgacagcccctccgagggcttctctctcaaggccgggggcacagccctcctgcccggccccccagctccctcgccactgccggccacaccactcagcgccaaggaggacgccagcaaagaagacgtcatcttcttctaaaagggccgtgactcaaggaaagtttttaatggaaagttgagccagaactaaaccagggagctgtctgaaatcatagcaccccatccgggtggcggggagatcaactccgagctgtttttccgaggcagtgaggaacggtgccggctctgcacggagctgaggacaggacagaccttgctttgagaaggagctgccggccggggccacgctccacagccgccgcgcgacagtggagccaagggttagggcaccaggaggggccaggtggcgtcggcagcatctgtccccagaatcaggcagaatccacttcccaaacagagccccacgcaggttcaccatgaacctcagggtcagggaatgagccaggcacgggggcatgggcagagagggccacggggcagggcccactgagggaacatcagtggccctccagtcaggttctgtgggtttggaagcccatcgtgaaaggggctgacctttgcccctttttacttggcattggttttgaaaccagctgtttcccaaactctgcttcccaagggcaaccgttgctgttcacacgctcagcctgtctgggggagcgggcctctagcttcagccagggcgggtacacaccctgggcacagggtcctcagcccccgggaaatgagctcccagggctggcgtcccaccttccaggtgggggctggcacatcacagactgtcgagagcgccatgtcccagggcatgcagaggttgcacctagagacgttgcagcaagtggacaagtggccgctgtgcgggcccctcgcttgtagtgagctgttgcagcttacggtccgttccctggaggggtggaggaaggaggtgttgggcagcatcaaaggtgctgggacatcccagggtggtgagatccatccacgatccagctccggtggagaaagggcccatgtcaagccttgttctgcaccccaagcattggtggtaggactgggtcctggctgatcgtccttgttcccagtggggtacatgtgagcccctgccagggccaagtccttctcccgaacccagggtcctgggaactgcagatcccggggggattcagcccttctcccactgtgctggcagaggcactcctgtgacgctgaatacagtgaacagggacattcccgccactcggggacagatgggcacaagggaggggaaactccatcaggaagtgctcccctgggcagaggcgcccactgggtgctgtgggctcaggagggggcggggcaggagctggtgccaaccgggaaccagagccccacagccatacagcccattggtgacaaggtcctgagaacacagtggccaggtgtccccaggctcctggcccctccgacgacctcaactctgcccagcccggtccctggccatcagcgacgctgtccgccccccgtcagatcccatgtgtgccatgtttatcatcagtgttttgtatttttgtactgagtatcggagcactttacagaagctgactgtacattcctgttctgttgtgaagagaacattcccagaccctggcaccctcctgagccggcgtgtgccggtccagccctccgagatgccacaattccttggatgggggagaagttcaaggaatttctgctcggccacgcggtgggaaccccgcgtccccgccatgtggcagaggggtctcagtcgtgctaggcatcgggcggcagcgccgacagcccttccctcgccagtgcccctcggccactcctgggttggagcccgattttatttgtaaagttgacagtcgagcaaatgttcctattttcgtgggatctgcacacgtctttgtcagttgtggtcatgatcttagtcacctgctaattatttttacaatgattacaacatttcctcactgcgggatatttctgacccgctttagaacttaagacctgattctagcaataaacgtgtccgagatg

SEQ ID NO: 3132 - DNA, 460 bp, Homo Sapiens
ttttttttttttttttttataaagaaaacagatttattttggcttatgagtccaaaggctgaggagtccaagatcagggagcccatctgatgagggcctcatgctgcttcaactcatggtggaaagcagatggtgaactgaggagggcaaagagaacagaacacaagaagcatcctcacttcataacaacccactcttgtgagaattcatccattcctgcaagagcgaatccattccagaactaactgagcctcatgagaaagcctttaatccatctcaatgacctaatcacctcttaaaggcaccacctaccaacacaatcaaactggggactcaggcctcagcatgagtttttgggtgaggacaaaccatatccaaaccataggcagggaagtttaaaaaagcgagtgggcggatctccagttgggaaacgaaaatttttagacctttacctttaatg

SEQ ID NO: 3133 - DNA, 153 bp, Homo Sapiens
gggaggcccgcctggccccgctccggctttccagtccggcctcattccgggcttccgcttcggcttcgctccggttctccggtccagtttcattcgtctcctccgctccggcggcatcgttaggtttgaggagaaacgcaggcgctcacgtgg

SEQ ID NO: 3134 - DNA, 272 bp, Homo Sapiens
  misc_feature (217)..(217): n is a, c, g, or t
  misc_feature (240)..(240): n is a, c, g, or t
gaatctttttatcttagatgtaggcagccatgaacaatctattttgagccactttagggagaaaactttgtatttttaaaacttgcataaaagttatgcaagtggtttttataaattggaataatacctcagttttgaggttatgcacactaaattaaatgtgacataaattaatttgtacaaaaagaactctttataaggtggctcattgtagganatcctgtgccttcccctttgagncacaagtgttgcatgaacaacagtttgctata

SEQ ID NO: 3135 - DNA, 1904 bp, Homo Sapiens
acttcctgaatcctgcttcctgcttcccagaggccgggatccggagccgcccgaagccggtgccgcagccccctgcgcccccggtgcccccgacatgtccttccgcaaagtggtccggcagagcaaattccggcatgtgttcgggcagccggtcaagaacgaccagtgctatgaggacattcgcgtgtcccgtgttacctgggacagcaccttctgcgccgtcaaccccaagttcctggcggtgattgtggaggccagtggagggggtgcctttctggtgctccccctaagcaagacgggccgcattgacaaggcctacccgacggtgtgtgggcacacgggacctgtcctggacatcgactggtgtcctcacaacgacgaagtcatagccagcggctcggaggactgcacggtcatggtgtggcagatcccagagaacgggctgacctccccgctgacagagccggtggtggtactggaggggcacaccaagcgagtgggcatcatcgcctggcaccccacggcccgaaacgtgctgctcagtgcaggctgcgacaacgtggtactcatctggaatgtgggcacagcggaggagctgtaccgcctggacagcctgcaccctgacctcatctacaatgtcagctggaaccacaatggcagcctgttttgctcagcatgcaaggacaagagcgtgcgcatcatcgacccccgtcggggcaccctggtggcagagcgggagaaggctcatgagggggcccggcccatgcgggccatcttcctggcagatggcaaggtgttcaccacaggcttcagccgaatgagcgagcggcagctggcgctctgggacccagaaaacctcgaggaacccatggccctgcaggaactggactcgagcaacggggccctgctgcccttctacgaccccgacaccagtgtggtctacgtctgcggcaagggtgactccagcatccggtactttgagatcacagaggagcctccctacatccacttcctgaacacgttcaccagcaaggagccgcagcggggtatgggcagcatgcccaagcggggcctggaggtcagcaagtgcgagatcgcccggttctacaaactgcatgagcgcaagtgtgagcccatcgtcatgactgtgccaagaaagtcggacctcttccaggatgatctgtaccccgacacagccgggcccgaggcagccctggaggctgaggagtgggtgagcgggcgggatgccgacccgatcctcatctcactgcgaggaggcctacgtgcccagcaagcagcgggacctgaagatcagccggcgcaacgtgttgtctgacagccggcccgccatggccccgggctcctcccacctaggggcccccgcctgcaccaccactgctgctgatgccacccccagcggcagcctggccagagccggggaggctgggaagctggaggaggtgatgcaggagctgcgggccctgagggcgttggtcaaggagcagggcgaccgcatctgccgcctggaggagcagttgggccgcatggagaacggggatgcgtagggccacagccacacgccaccttcatctcctccgccgcccccttcccactcagcttctgccagcgggtcgcaccgggctagctggctgcccagagcctctgaggcagcgcaggggtcagttcccacccccacccgtcccaggcccaggccgaagccagcgcccagctttcctcactgttcctgtggaggatgtctacgcccaggcgagctcctcgacctctgagggaccatctccccgaccactgcccagccctctgctccctccccagaggaggcgggagggtgggctctatattttcattccaaataaaattctctttctaaaaaaaaaaaaaaaaaa

SEQ ID NO: 3136 - DNA, 605 bp, Homo Sapiens
taaaaataaatatttattgccatttgaagctttatgtacacctttaaaagcacatgtacaaatgtgggaaattacaaaaatcaacctaaaaccctttttctcaaagtatacataaatgtacatccaagatcagtggtgctaccatcattagaataaaaaataagtctgtctggacataaacaagcaatcattttaagtgtcattcagatattctcctttatatttaaaactccaaaaaatactaagaggcccaatatatccagaaaattgtgttttcactttaccctaacttatgaatagtggtatacaaatatatttccatctttttgtccagccagcaaatgagagtctgtacccgaccatttcacaaaagaccaatgttggtcagagacaggtgggaggagggcagtacactgaccgagaagtaagtcccaaatggcaattgttccagaagtcaagattgctgctgcacagtgatctttcacgtcaccttccaggaacctgccaacctgccctggaggaagacagtacagcatcacacccacgctgagagtcgtccttagggtaaatcacaaagagctgaaacacagggctttcgcaacgac

SEQ ID NO: 3137 - DNA, 412 bp, Homo Sapiens
  misc_feature (13)..(14): n is a, c, g, or t
  misc_feature (27)..(27): n is a, c, g, or t
  misc_feature (31)..(31): n is a, c, g, or t
  misc_feature (241)..(241): n is a, c, g, or t
gcagacacctaanntatacgtcgaagntgtntaaaaagttgttttttttttttaatggaaaatatccaagaagcagcccaggagtatctgacatggtggaatggaatcagttagaaagcgaagaaatcactaaaaaaagttacttctttttttccccaccagttataatcttcaaccttactagtttataacagtttaatgtcctatagaaggatcctccactaaagttataattttaagnatagtcatatagagagatccctaatcccctgggtaatctagatactaaaggtggggaagaacagtcatattgacattctttaatccaaaaccactgtttggaaattagtaaggatatttttcaggcattcccaaaaacatgttattagcacgttggagctggaaaacgttt

SEQ ID NO: 3138 - DNA, 314 bp, Homo Sapiens
gtcgacgaaaagaccacttcttagttgagtctggaaaaatgaaccttttctttctaccaaccggcaccgaaattcagagtatcctggacacagctgagagactactcagggagagccactgcagtcacaccccacctccacttaggtctccctacactcactctaatcttctaaatcgtttaatcagacatggcgctgctctgaggcttcaggactttcaggctgttttttttccccgggcttaaagtctttctctgctgctgactcacatgttaattattgctttgcataaagtagaattagcagtgctcctg

SEQ ID NO: 3139 - DNA, 289 bp, Homo Sapiens
ccttcagtcgaatgcaggcacaaatcttttcccccatcccaccgtccttcactcccaccacctgcactttctgtaccttcgggtgtgtgtgaaagaagtcctcgagctctgcggggtatatgtcctcactaccccggatgatcatattcttagatcgcgtcacgaacttgctgaatccctgctcattcattgtggcgacatctcctgttcaataccactcgctctgatcccttgcttcctctgtctttatgaggttaccccagttgcctactatgacgcattcccctcg

SEQ ID NO: 3140 - DNA, 301 bp, Homo Sapiens
  misc_feature (83)..(84): n is a, c, g, or t
  misc_feature (280)..(280): n is a, c, g, or t
taataatagaataaagggttgagtaacttagaactgaaaatgatctcttttaaaaagaaattaaatcagacaccacatggtgnncctttggatctcactgtgcagaattagcagtgtataaccatcttctctttcatcttgttccaattctctcctctttcctttccattctgctttaagctcacgtgtcagggcagactttaccagagtgtcagacattacctaaaacacatacgttagccatgctgctgggtatgggaggaaattcccacaccctggnttatttggcctccttttaagc

SEQ ID NO: 3141 - DNA, 232 bp, Homo Sapiens
tttttttttttttttttttttttttttttaaatgttttaggactttaatgttctttacatattcaacataaaatactgacaatagataaacaataggggaaagacttttcagcaaagtatcactctcgtagtcataccttacaaaaaaaacatagagaacaaaggatagggtaatttaacagaaatgtttagtttaatggcctaattgaaaaacaaccaacccatcaacttt

SEQ ID NO: 3142 - DNA, 477 bp, Homo Sapiens
ttaggtgacactatagaagagctatgacgtcgcatgcacgcgtacgtaagcttggatcctctagagcggccgcctactactactaaattcgcggccgcgtcgaccgtagctgcagctttggaggagtaagcggcgtggtagcgaaggtcgccgaacccgcctggctagccggcgagttgagtggcgactcttttgaaacagatggtcaccatgtttagatattagcagtcccgtatgtgcatgtctgcatttgaaaatggaagagggaaacaacaatgaagaggtaattcacttgaacaactttcactgccatcggggacaagactttgtaattttcttctggaaaacccagattatccaaagagagaagacggaatcattataaatcccagtagcagtctgctggccagccaagatgagacaaagttgccctaaataaagacttttttgactattcttaaattgactccctcttga

SEQ ID NO: 3143 - DNA, 1746 bp, Homo Sapiens
gaacgatgcacaatgccagatgagccattggtaagagctccagataaaggcacagattccccatcaccccctcctctcgaagagacttcaaatggaggaagaatgctccatgagtccctgaggcatgcagtacccattacaaggatgcagagcagtgaagacactgaggcaggcccagcctacagtgatgaggactatgaagaagacatcattgagcccaggaccttaaatgagatcaccacggtgacagacaaaactagcccttggtctagtgtcatatcagacacaagtgaggtcatcagccctcagcctgacgaggtgcagagggaaggcccctcttgtccttctccagggcctttctgcagagaggagcttatggtcaaaagtagctttctctccagcccagaaagggctgtcaacccccacctgcctaggcagggttctcctagccaaagtcttgttgcttgtgagtgtgaggcctctaaggccagggttggtggcgagtctgcctcagccaaccctcagcccatcccatgcccaacactctcaggagctcaacagagcagcacgtttgttggatggagctcaccacagacagatcagaacaaggagcccaagtcagaggccccagctgagaatgaagctgccaccagtgagctcggtgactctgctgatagcttcaagaagttgccgctaaatctagcctcccagagcagaagggaaaaccataagggaccacccatcgactcctctgacatcaggcagaggcaggtgacaactggatcagagacgtccacaaagcagagcctcctgctcccagggcccattgtggtgcccaacttctttttgcctccccagcagttggaggcttccctgcggatgctttcactctcagcaactttgccaccagcagccacaacagatcaggacaagagcgaagccaccaggggagctctctcccaaaggccttgtcgccccagacctaactcgctccccctcaacctgcctgaggaagaaactctcaggattgcacggatattttcttctcagtactcccagaaagactgacgcagcctgaggggctggggggaaggagacacctgcccaccctccgtcagctttgtccagcttgcaggaggcaccaggtctggctccttcagggctgtcacagtcctgaaaccaccacttgcctaggccacggatgcctcaagagacccggtcagcccagactggaggagtgccccaaaccagtccagtgtccacttgccagaatttcagctccttttttctgtggtgaggcaaaggctagaaataaaatggaatccgcgcccaagtgggacccaagcaggcatctttcggtggagaaacgccccccagtgtccttgacacagctgactgctggcatgagcccaccctctgcctgaagatgcaggaccatttttgccttaaaagttggggaggagggacatgtagattgtgtgcattgtgcatagtcaaggaaatcctagggccacctccagttcatttgtgtgggaacaaggatattttatagatacaaattatttttatgctgtgttgaattaatcaattaggagaggaaggggaaatcacttccttcaaactttttatctgattgtctaaaattctaaccatgcttttaacttattatttttacccagctctgaaggtcattgttcttgcctgtgtttgaataaaatcatattggtgttgtaaaaaaaaaaaaaa

SEQ ID NO: 3144 - DNA, 412 bp, Homo Sapiens
  misc_feature (335)..(335): n is a, c, g, or t
  misc_feature (340)..(340): n is a, c, g, or t
  misc_feature (402)..(402): n is a, c, g, or t
ctcggcctcccaaagtgctgggattacgggtgtgagccactgcgcccagctatccagtattttatttaaaagttgtcactagggtgttcactattgtgaatttataatcttaaaagttggggatgctaaaagtaccagactaaaatactacgaggttttctcatcttttaattccattttgttagaaaaaaataatcacaaccggggttcttttacctttccccagccatctagactgctttactgcaatgttgggaagattgcatacaataaaaactgtagctagttgattgggatttggggaaaattgaatcaagcatttgcattcatccagnatggntctttaaactgctgactgtggggggtgcccacagggatggaggcactggtgggcatggggtngggagggatt

SEQ ID NO: 3145 - DNA, 576 bp, Homo Sapiens
  misc_feature (285)..(285): n is a, c, g, or t
  misc_feature (393)..(393): n is a, c, g, or t
gtcggctgagggtcaaacaaggtgctcctgacgtctggcaggagctgccgaaaaggtggctgatgcaatctccccgaggagccacattaatttttaaaaaggcagctgttttcaaagcaaaacgtttaataatttttttttgggaaccccagtgtaccagaattcaaatgggaaaagtgagagggagtgtttaaacaaaggcatccccaagtcccttcccagttggtcctgaacaatggaggaggtcaaaccttcttttccacagcatgatggtataaatcaggnaagtcctggaaatctattccacaccctaaaatacccaaacccattaaaagcacagatataggctcttacaaacatttactaaataagcaaaagcatacaaaatatgtncccgtcggcaatttttcccataccatggactcaaatggttaaaagtccttatcatcccagactaatgccaccttttcaattcccaataattccttccgtaacatgcatcattgctccaagaatctctcaattacattcaaacccgagtcttcagacccttggccctctgggacctccagagcc

SEQ ID NO: 3146 - DNA, 461 bp, Homo Sapiens
ttttttttttttttttttggggtaatggaaatgacaaaaatgggctgtctttatttttggaaaaaaaaagaaaaagaaaaaaccaaaactcaaccaaataggtgatagcaacattattttcaaacacattgattgaaaattctagtccagataacagaataggagtggtacttgtggtctccagatatattccactgtcagacaaaaatacttttcttcattgaagtacgcattatgtaacactgtgtatcagatgaccttagccatagagttggtctttagagcttcttcttttggtcaacaaagccatccattgcatgaaggatgcccaaatagtcagctataagcagtcctgtcttgaggggcaaaaagcttttaagaaacatcatgaagtataacaacttttgcatatacaagtacattttttcttgtagaatagcttctactattttttcaactgg

SEQ ID NO: 3147 - DNA, 722 bp, Homo Sapiens
acagtcttgtcggctgggtttaatcggccagggctgcgcggcgttgcggcgccccgctgcctctttccggctgtgaccctcctcgccgccgccgcttggctgcgtcctccgactccccgcgccgccgagaccaggctcccgctccggttgcggccgcaccgccctccgcggccgccccctggggatccagcgagcgcggtcgtccttggtggaaggaaccatgaactggcatctccccctcttcctcttggcctctgtgacgctgccttccatctgctcccacttcaatcctctgtctctcgaggaactaggctccaacacggggatccaggttttcaatcagattgtgaagtcgaggcctcatgacaacatcgtgatctctccccatgggattgcgtcggtcctggggatgcttcagctgggggcggacggcaggaccaagaagcagctcgccatggtgatgagatacggcgtaaatggagttggtaaaatattaaagaagatcaacaaggccatcgtctccaagaagaataaagacattgtgacagtggctaacgccgtgtttgttaagaatgcctctgaaattgaagtgccttttgttacaaggaacaaagatgtgttccagtgtgaggtccggaatgtgaactttgaggatccagcctctgcctgtgattccatcatgcatgggttaaaatgaaccgggtttgttgcatctgtgcccg

SEQ ID NO: 3148 - DNA, 2855 bp, Homo Sapiens
cgcccgggcaggtcggagacggaggaaaggtggcagccagattacttagagaggcacagaggagagagatcggggtgagtcgccatggggactcccagggcccagcacccgccgcctccccagctgctgttcctaattctgctgagctgtccctggatccagggtctgcccctgaaggaggaggagatattgccagagcctggaagtgagacccccacggtggcctctgaggccctggctgaactgcttcatggggccctgctgaggaggggcccagagatgggctacctgccagggcctccccttgggcctgagggaggagaggaggagacgacgaccaccatcatcaccacgacaactgttaccactacggtgaccagcccagttctgtgtaataacaacatctccgagggcgaagggtatgtggagtctccagatctggggagccccgtcagccgcaccctggggctcctggactgcacttacagcatccatgtctaccctggctacggcattgagatccaggtgcagacgctgaacctgtcacaggaagaggagctcctggtgctggctggtgggggatccccaggcctggccccccgactcctggccaactcatccatgcttggagaaggacaagtccttcggagcccaaccaaccggctgcttctgcacttccagagcccacgggtcccaaggggcggtggcttcaggatccactatcaggcctacctcctgagctgtggcttccctccccggccggcccatggggacgtgagtgtgacggacctgcaccctgggggcactgccacctttcactgtgattcgggctaccagctgcagggagaggagaccctcatctgcctcaatggcacccggccatcctggaacggtgaaacccccagctgcatggcatcctgtggtggcaccatccacaatgccaccctgggccgcatcgtgtccccagagcctgggggagccgtagggcccaacctcacctgccgttgggtcattgaagcagctgaggggcgccggctgcacctgcactttgaaagggtctcgctggatgaggacaatgaccggctgatggtgcgctcagggggcagccccctatcccccgtgatctatgattcggacatggacgatgtccccgagcggggtctcatcagtgacgcccagtccctctacgtggagctgctgtcagagacacctgccaatcccctgctgttaagccttcgatttgaagcctttgaggaggatcgctgcttcgcccccttcctggcacatggaaatgtcactaccacggaccctgagtatcgcccaggggcactggcaaccttctcgtgcctcccaggatatgccctggagccccctgggccccccaatgccatcgaatgtgtggatcccacagaaccccactggaacgacacagagccggcctgcaaagccatgtgtggaggggagctgtcggaaccagctggcgtggtcctctctcccgactggccccagagctatagcccgggccaagactgcgtgtggggcgtgcacgtccaggaagagaagcgcatcttgctccaagttgagatattgaatgtgcgggaaggggacatgctgacgctgttcgacggggacggtcccagcgcccgagtcttggcccagctgcggggacctcagccgcgccgccgccttctctcctctgggcccgacctcacactgcagtttcaggcaccgcccgggcccccaaatccaggcctgggccagggcttcgtattgcacttcaaagaggtcccgaggaacgacacgtgccccgagctgccacctccggagtggggctggagaacggcatcccacggggacctgatccggggcacggtgctcacctaccagtgcgagcctggctacgagctgctaggctccgacattctcacttgccagtgggacctgtcttggagcgccgcgccgcccgcctgccaaaagatcatgacttgtgctgaccctggcgagattgccaacgggcaccgcaccgcctcggacgccggcttccccgttggctcccacgtccagtaccgctgcctgccagggtacagcctcgagggggcagccatgctcacctgctacagccgggacacaggcacacccaagtggagcgatagggtccccaaatgcgccttgaagtacgagccgtgcctgaacccgggggttcccgagaatggctaccagacgctgtacaagcaccactaccaggcgggcgagtctctgcgcttcttctgctatgagggctttgagcttatcggcgaggtcaccatcacctgtgtgcccggccacccctcccagtggaccagccagcccccactctgcaaagttgcctatgaggagctcctggacaaccgaaaactggaagtgacccagaccacagatccatcacggcagctggaaggggggaacctggccctggccatcctgctgcctctaggcttggtcattgtcctcggcagtggcgtttacatctactacaccaagcttcagggaaagtcccttttcggcttctcgggctcccactcctacagccccatcaccgtggagtcggacttcagcaacccgctgtatgaagctggggatacgcgggagtatgaagtttccatctgaaccccaagactacagctgcaggacccaggacgcccctcccctcctcattcgggcagagggaaatacgggacccggtctctgcctcctggctgccctcctccctggctgtgtaaatagtctccctatcccacgagggggctttgatggccctggagatcctacagtaaataaaccagcatcctgccgcccaaaaaaaaaaaaaaaaaaaa

SEQ ID NO: 3149 - DNA, 330 bp, Homo Sapiens
  misc_feature (18)..(18): n is a, c, g, or t
  misc_feature (22)..(22): n is a, c, g, or t
  misc_feature (153)..(153): n is a, c, g, or t
  misc_feature (303)..(303): n is a, c, g, or t
ggcagggtttggtttggntgtnttcagatttccttgtcttgaggtcctcacaattactctacagctcagaacaccaactgctgaggctgccttgggaagaggatgatcctaaacaaagctctgctgctgggggccctcgctctgaccaccgtnatgagcccctgtggaggtgaagacattgtggctgaccacgttgcctcttgtggtgtaacttgtaccagttttacggtccctctggccagtacacccatgaatttaatggagatgaggagttctacgtggacctggagaggaaggagactncctggcggttggcctgagttcagcaaa

SEQ ID NO: 3150 - DNA, 495 bp, Homo Sapiens
ggcccaactagaaccaagtggtcaaaaaaataaatacacaatttaaaacaatggacagctaagcttgtcatgacagacagtgggaatttcattccatgatgcttcatttttgcattaaatactgaagatgactcagtgcataattgctttgtggtccatgagacgctttcgtgaaggcactcctatctgaaggacaggctgggtgaacacctagcactgtcacttgagacatcttggctggtcaccaaggtgagccggcatactgtctccatcaccctctggtgagtctttcccctcaccgggtgggaggagaaggccatccctatgggtcgtggagccactctctcctcaccacggtgggctgccctccccttcctcacttgctagtccccgcttggtggccgatgcctgccctccttgctgtcactttgggaaagagatcctcctgaggcacgtgtcatgttttattcttgagtgaattatctgaccatcacg

SEQ ID NO: 3151 - DNA, 424 bp, Homo Sapiens
tttttttgtgcaggaaatgaaccgaaacgtcgatgagattaagctacatagatgaagaatcataatgtactcaacttctggaggatttgtaatttttgagggaagtcagaaaaaatcaagctactctcaaagtaaaagatttcaacctttcccccactttaagcttccaggcattaaaacttggtttaaggtgactttatttattgtgcaataaactgtatatgaaagaaaaagcatgaatgcttgaattaatccagaacctcaatagtgtgtaagtccaagtgcccccactaacacactagggatgactaacagaggatcgattattttttcatttgcacccccaacaataaaagtatacaaattcctttgtaactgctgggtttatgtttttagatgaagcaaccagagtatatcaagtctt

SEQ ID NO: 3152 - DNA, 521 bp, Homo Sapiens
ttttttttttttttttatgaaaacagcaatcagaaattttatttcttaaaacaacaacaacagcaacagtaaaaagctgaattggttagcataacaactaggtaaatataaaagctaaaaaagacagtcaattggagtttggaagcattgattgttacttttattattatcctctcccaaactgataagtcttacatagatttaggcttcaaaaacactcttgcattgcccagtttgattcccaacacaaatgatatcatcacggtatggcgttgctactaccaaagtccatttactcgagacagaaatgagtcaagtagtcctttaaatgtgggtgaaactgatccttgatttattaatctgctccagtgaccatttatagcaacagtgacccagcagtacctacagcccagcacccattcaagccccaagttgtctcatttagttttacagcattaggttttagactggtaaataccttgctccatcttgacaaatcacttttctgctccttagcctaa

SEQ ID NO: 3153 - DNA, 288 bp, Homo Sapiens
  misc_feature (265)..(265): n is a, c, g, or t
ttgactttcctaggagtttaagaacagtgaaagttagctttgcaccttcaaatgatcttgaatgagggaaaaatcagtttgattccaaggatatttcttgccttacatggtcttttctttgacagtctgtacacctttattattaggttttgaattatttatgtaccagatattatagttttaaacattttaatattctctgatctttagaattatttatgttcaaattttagttgggaactttgtttcctacttaagctcaggnctttttaccctctgaattgagtg

SEQ ID NO: 3154 - DNA, 7296 bp, Homo Sapiens
gaggttcgctacccaccgatcctgcactgtgccttccttggggcccaaggcctcttcctggactgcctctgctggagcacccttgcctacctggtgcctggcccccctggctccctgatggtgggcgggctgactgagtctttcatcatgacacagaactggctggaggagctggtggggcgactgcgctggggccctgcccctctgctgaccccccgggggatctgggaggctgaggtgacccgggcctttggggccctggtctggatccgtggtgaccagcatgcaggggacctactgcagctgcccccagcggtccaggagctgctgctgagcctggtgcgggatgctgcgggcaaggaagacatcatcgagtggctcagccgcttcggcatctctgactcccactccgatccggaggttctaatctgccctccccagcagcagaaggaagccccagccatggtgtccgtgggagagagtcctggaccctttgtggacatggggaccctccagaacaggggcccagaaaattcaaagagattatctagcctgggagccactgggtccctgatcacagcccagagcacaccgcaggaggcagcaaaccagctggtacgggtcggttccaacaaccaagatggtatggacagtgctcaagaggaagggacagtgcaagccaccagcagccaggactccacgaaccacacacaagccttgttgaagcaaaggcaggtccagaagatagaagataaactcctcttccaacctccagtatcagccctgggtgtgtgcccaccctggaaggcctggaccccggggccagcctttgggccattgtggccgggggctattgctgcaaccttctggaggatcaatgagctgcattctctacatctggcctggctcctgtcccaggcgtgcttcaatttccccttctggcagagacctctgggccccattcagttgaagctgccagggcagaatcctttgcccttaaatctggagtggaagcagaaggagctggctcctctgcctagtgcagaaagcccagctggtagaccagatggggggctgggaggagaagcagccctgcagaattgcccaaggccagagatttccccaaaagttacgagtttattggtggtccctgggagctcagatgtaaaagacaaagttagctcggatctcccacagatagggccacccttgacctctacaccccaactacaggctggaggtgagccgggggatcaagggagtatgcagttagattttaagggactggaagagggacccgctccagtgctgccaacagggcaagggaagcccgtggctcaaggggggctgacagatcagtcagtacctggagctcaaacagtgcctgaaactctcaaagtgcccatggctgcagcagtgcccaaagctgaaaatccctccagaactcaagtgccatctgcagctcccaaactgcctacatctcgaatgatgctggcagtgcacacagagcctgcagctcccgaagtgcctttggctccaacaaagccaacagctcaactgatggccacagctcaaaaaacagttgtgaatcaaccagtgttggtagctcaagtggaacccacaactccaaaaactccccaggctcagaagatgcctgtagcaaaaacatcacctgcaggtcccaaaacacccaaagctcaagccgggcctgcagctacagtttccaaagcacctgcagcttccaaagcacctgcagctcccaaagtacctgtgacccccagagtctccagagctcccaaaacacctgcagctcagaaggtgcccacggatgcagggccaaccttggatgtagccagacttctgagtgaggtccagcctacatcaagggctagtgtctccttactgaagggccaggggcaggctggaaggcagggtccccagtccagtggcaccttggccctcagcagtaagcaccagtttcagatggaggggctcctgggggcttgggagggggccccaaggcagccacctcgccacctgcaagcgaacagcacagtgaccagcttccagaggtaccacgaggccctgaatacacccttcgagctgaacctgtcaggggaacctggaaaccaggggttgcggcgagtggtcatcgatggcagcagtgtggccatggtgcatggcctgcagcacttcttctcctgccgaggaattgccatggcagtgcagtttttctggaaccggggacaccgagaggtcactgtgtttgtacccacctggcagctgaagaagaaccggagggtgagagagagccactttctgacgaagctacactcgctcaagatgctttcaatcacaccctcccagcttgagaatggcaagaagatcaccacctacgattataggttcatggtaaagctggcagaggagacagatggcatcattgtcaccaatgagcagattcacatcctgatgaatagttccaagaaactgatggtcaaagatcgcttgctgcctttcacctttgcggggaatctcttcatggtgcctgatgaccccctgggccgtgatggccccaccttggatgagtttctgaagaagccaaacaggttggacactgacattggcaacttcctgaaggtgtggaagacccttcctcccagctcagccagtgtcactgagctgagtgatgacgctgactctgggcccctggagagtctgccgaatatggaagaagtcagggaagagaaggaggagaggcaggatgaggagcagagacaggggcagggcacacagaaggcggctgaggaggacgaccttgactcttcgctggcgtcagtgttcagggtggagtgcccgtccctttcggaggagatcctgcggtgcctcagcctccatgatccccctgatggggccctggacatcgacctcctgccaggggcagcttctccctacctgggcatcccctgggatggaaaggctccctgccagcaggttcttgcccacctggcccagctcaccatccccagcaacttcaccgcactctccttcttcatgggcttcatggactcccacagggatgccatccctgactatgaagccctagtgggccccctgcacagcctcctcaagcagaagcctgactggcagtgggaccaggagcatgaggaggccttcctggccctgaagcgagccctggtgtctgccctctgcctgatggcccccaactcccagctgcccttccgcctggaggtgaccgtgagccacgtggccctgacggccatcctccatcaggagcactcagggaggaagcaccccatagcctatacctcaaaacccctcctccctgatgaggagagccagggcccccagtcagggggtgacagcccctatgctgtggcctgggccctcaagcatttttcccgctgcattggagacaccccggtggtcctggacctttcctatgcctcccggaccactgcggaccctgaggtgcgggagggccgcagggtttccaaagcttggttgatccgatggtccctcttggttcaggacaaaggcaagagggccctggaattggccctcctccagggcctgctgggggagaaccgcctgctcacccccgcggcctccatgcctcgcttcttccaggttctgccgcctttctctgacctgtccacgttcgtctgcatccacatgtcgggctactgcttctaccgtgaggatgagtggtgtgctggctttggtctctatgttctatcgcccaccagcccccctgtctccctttccttctcctgctccccttacacgccaacctatgcccacctggcagccgtggcctgcggcctggagcgctttggccagtccccactcccagtggttttcctcactcactgcaactggatcttcagcctcctgtgggagctcctgcccctctggagggctcggggcttcctctcctctgatggggctccactccctcacccaagcctgctctcctacattatatccctcacctctggcctctcatcccttccgtttatctaccgaacctcctaccggggctctctgtttgctgtgacagtggacaccctggccaagcagggtgcccaggggggtgggcagtggtggagtttgccaaaggatgtgccagcccctacagtgagtccccatgccatgggcaagaggcccaatttgctggcattacagctgagtgacagcaccctggccgacatcattgccaggctgcaggctgggcagaaactgtctggctcctcaccgtttagttctgcctttaactcactcagcctcgacaaggagagtggcctgcttatgttcaagggagataagaagcccagggtctgggtagtcccgacgcaactccggagggatctgattttctctgtgcatgacattcccttgggggcccaccagaggcccgaagagacctacaagaagttgcgtttgctggggtggtggcctgggatgcaggagcatgtgaaagattactgcaggagctgcttgttctgcatcccccgaaatctcataggcagcgagttgaaggttattgagtccccatggcccctcaggtcgaccgccccctggtcgaacctgcagatcgaggtggtgggcccggtcaccataagtgaggagggccataagcatgtacttattgtggctgacccaaacaccaggtgggtggaggcattccccctgaagccctacacacacacggctgtggcccaggtgctgcttcagcatgtgtttgcaaggtggggtgttcctgtgaggctggaggcagcccaggggccccagtttgcccggcacgtccttgtgagctgtgggctggccctgggagcccaggtggcctccctgagtcgggacctccagttcccctgcctgacgagctcaggggcctactgggaattcaagagggccctcaaggagttcatcttcctgcatgggaagaagtgggcggcctccctgcctttgctgcacctggccttcagggcctcctccactgatgccacaccgttcaaggtcctgaccgggggtgagtcaaggctcacggagcccctgtggtgggagatgagcagcgcaaacattgaagggctcaagatggacgtcttcctgctacagctggtgggggagctgctggagctccactggagggtggctgacaaggcgagtgaaaaggccgagaacaggcgtttcaagcgggagagccaggagaaggagtggaatgtgggtgaccaggtccttttgctgtccctccccaggaatggcagcagtgccaaatgggtgggtcccttctatatcggggaccggctgagcctgtcactctataggatatggggcttcccaaccccagagaagctggggtgcatctatcccagcagtctgatgaaggcctttgccaagagtggcaccccgctgtccttcaaggtcttggagcagtgagcgggagcagcgggggtgccccctgccccagggccgtgggtttctgctgctaggcctccccctgtcccagcagtgctctcagtccactgggggccctcagttgtgccttttgtagagaacttgcttcataaagctttgctgaattgccttgaactagggaccagcatccccatggaaacatccccagtttggggtacttggagaatttgccaaaggctgtcagatatgggtccctggcagttttacactgggaaatagagtgctcctctaggctataccaggctcagtgtcttctccccaagtatcctctttccccttcacatgtaggtgtgtggtggtgtgcacacacactcacgaaagaatctatcttggccatgaaactgtggctgttgaccttggaattggaaccacagtcctttcccatacagaaaccccaaatgtgggctcctccctccaacctgttcttttggggaccctttgcccttagagctgtcacagatgacataagcctgggcaggctgtggggaggccgctgcctcctagcctcacggtcagctttctcaagccaggtgtggcctgcacagctgtcagggcagggctggccatcctcccaggcctcaagggcagtgtcttggagtgggaggatggccagccacaagccaccagcttgtcagcatgggaagggcaagggggaaatgggttggcctacctcatttgactccagccaatggagacaattcctgacccctgctttgatggtgttgaccccacaggaatcaaggatcttgatgccaagtgtggcatctctacctgaagagctgcttctgttagacccaggggccccggcctctgttttaagggggcagggcgtctgcaacaggagtggcacacggtgaagtgctggcatggctctacctcccaacccctcccaaccccatcccaaagcctacagtcctctgctccttctacctccactgtatcctgcatcccagaccctacagattgtgtgattgcttcatctgtatcaccccccgagtcctgtggacctgccttctgtgtagagcaaaacccaggctccctcacagccattctttgcagagatcacccttgcagtgagtgtgagttccttccaggtgtgtgcgcgtacactcaccctctgaattgctgccgctgccaaggaagtgggctccaggtgaaggccagtgccacgtcactctggctggccttcttagtagtttcatttctccggaagctgagccagtctcctggtctagcccaggttgccagaacgcttggcattgcagagtgctagagccagtggagaacttgccaacttgattgttttacagcagaggaaagaggatcacagagggaaagtgattcacccaaagtcacacagcaagttcatggctgagctgagaccaggattaagcttcctgactcccagttcaccatgaaaagggttctggcaacaggttcaagctggagaatccttcaaaatgctacacccacattctctccaactcttcatctccctgatcttccagacaaactacctggatgttgcccttaaaccatttctagctgttaaccctatccagaaaaatgattgagtgatagctgagaagtggaaagtgtgggatttttggcaggtgctctctttcctccgccccccgcgccatcctttctcttcctcctctctgtaatggtatgtccagcctcactctccctccctggtgctgtatgcgttccccctgttagctacatttgtgatcacatacccttcttttaagtgaatttttttcatttgatttgtcaataaacgaatcaaactgg

SEQ ID NO: 3155 - DNA, 402 bp, Homo Sapiens
tttttaggttgaataagatgccctgtttattgatagatcttagtggttatcaatgatggaagcatcgcagggtgatgtctaggtcctatggactcctgaggctgagtgatctcaaactgctccaattcacttcctatgacagcctgcatcctacccactctctccagtagaagatggggtagggtaagggtctttcctggatacaaaggtggcccagaagtggtcataatactctcccctccatttcccttcttctcagacctgtgcagtggaggagcatctgaataggtatgggctcttgggatcttcaaggtgagcatgttagaatctggggtctggaggccactttcatgggaggtgagaactgctggtcatttccaggcatctccaactccagcacgc

SEQ ID NO: 3156 - DNA, 373 bp, Homo Sapiens
gagtcaaggtcttgctatgtttcccaggctgttctcaaactcctgggctcaagcgatcctcccaccttggcttcccaaagtcctgggattaaaggcgtgacgatcacacctggcctaacagaatatttaaaaatggccactcaccaatcaaagtctcaaatcgaaaatgtaatggatgtgagaaaattactatgcttgtcataattagaaccatgttattctcatttagactcaatggatccaatccagataagaaaactgtcttaactcataatataggttccttggggaggtagattaagtctttgacttgattatttccttatccaacctttatcctactggcctgaaaagggttagctgccttctcagc

SEQ ID NO: 3157 - DNA, 424 bp, Homo Sapiens
ttttttttagctcagtgacacatgattctccccagcttgtggattcctcccaccccaactgcatcccaccttacttcttgccggaactatcagtctcctccctgaggaggaggaggaggagaggaggtacaggcccctactctgatcccagggtatttagttttcctctaccctgagcagagggcaggcaggacctttccatttaagcttctgttgaccctaaggattgggcagccaggagtgggagagaagtggactctctctcctcctccaggacccaccggggaggaggacccgcttatcctctggcctggtctcagcagcctgatcctggcaggtcacagggcttctggattagctggttttacaccccaggggcatcagaaattacctggcacctcacacatgtagacataaggagcct

SEQ ID NO: 3158 - DNA, 485 bp, Homo Sapiens
tttttttttttataagggtggtagggggagcggatattaatatttttcccagcttcaatgaggtcttatttatacacaaaaaaactgcacataactaatgtacgctatttgtgaatttgtgggacaaaaaggtaaaaatctttaaatacaaactttcccaggatagcataagaaactaaagtatataagagatcttgtaaaagctcagtacacatatgatcctgaaaattactttaatgaatttacataactatcttagctattaaaccgttaatgcctagagaggagaaaatatgttgattattcttcattattttattctgttaatctagtagagtaatatgccaccaaagagaactcagtaaatactttctgatgggaactagataaagggacagtcatttcaacacagattcctgtgacttaaagtaacaatattattattaataatggaacagaagttattctaggagataggtaagaaa

SEQ ID NO: 3159 - DNA, 369 bp, Homo Sapiens
tttttttttttttttttttttttttttttttttttttttttttttttggccagcttccccaacaggttgagaaaccatttttttttaaaaactgcctgctcccagagtcaataaataacttttattacaagaagtacaggagaaaaacagtaggccaacgggagtggttccattttaacaaacactgagtcaagtcaggggtctgatgaagccctaacatttgccaaagctgtgagcctctttaagctgtgcaggccctggatgggacgggtaaattggaggagttttggggcccaggcaagatgtatcccatttaagggcactaagtgtcataggccccaaaggctgcctggggctggggccaaagct

SEQ ID NO: 3160 - DNA, 509 bp, Homo Sapiens
cttttgagacagggtctcgctctgtcacccaggctggagtgcagtggtgtgatcttggctctacaacctccgcctcctgcgctcaagcaatccccccacctcagcctcttgagtagccaggactacaggcatgccccaccacacccagctaatttttgtatttttgtagagacagggcttcgtcatgttgcccaggctggtcttgaactcctgagctcaagcaatgtgcccgcctcggcctcccaaagtgctacgatcacaggcgagaggcaccgcacccagcccatggtttcctaacactgcctcactttgatcttgtgtgaaattgtgactcagtgctgagctttagacccagataaatgttgagggggaatacagaagagaattgacctttctgaacagctcaacctagtttctaaaggcaagattttactccagcgacatgtactggtgaccatgatgtcactctgtgagctggcctcaccagtaacccaaacacaacgctgagg

SEQ ID NO: 3161 - DNA, 448 bp, Homo Sapiens
tttttttctgcaacaaactgtaagactcttatcgcaaatggaaagtgggtttcttttaaagatgaacaacaagagacgagcacagacaggatcacatgaaacgttactttctgcttcaggttaaaggactcctcctcacccacgcttatcaaatcctccaccatctttaacattgaagaaggatctcctaaatttatattatcagccaacaactcaatcatcttctgatttgctacaccgattagttgtcctggctttgtgcttttaattacattttcaagagcttcttcccagcctcttaatagagggtgcagggagcagattcctgattttgataaatatatagcaattttcatctcagcagattccgtatcatcattattgataaccataaatggcagcagacatacaaccacctgatttgacaactgatcattttcactcagta

SEQ ID NO: 3162 - DNA, 375 bp, Homo Sapiens
agcggccgccctttttttttttttttttctattttaaaagattttattagaggaaataatctagtagataactttcttacttccacaaaaacaaagtttctcaaggatacaaaccaatggatttatctgtgaactcggtcccagaatagaaactagcaaaaagtcagtacagtactcaaaaaatacttttgtggtatgaaaaaagggcaggtgcagatgtagaactgtaccatcttcagtttctgttcacaattgttttaaaacaattctcatctatccagtctgctctcccacgcctcagatgagggaagccaatggtcaatgctctgtgatagcccaagttggatccaatctaggtaatccctgtccacctta

SEQ ID NO: 3163 - DNA, 417 bp, Homo Sapiens
tttttagtggcttaatacaactgttttatttatttttccacaattctgctatttgggcactggggagaaaagctcatctctgttccatgtggtgtcagctgcggcagcttgagtagggctggaaaatccacttccaagactgtctcagtcacatgcctggcaggctggtgctgactggccagtaggagcacagctagggctgttggccaggggccttagttttcttccgtttggtctctccaggtggcttggttagactcttcacagtgtggtagtttcagagtagttggatatcttacatggtgctgtgacaaggaaatgtaaattccttggcaggagagccaggatctcaggagagtccctgggaccctctgctccccttctcagtccaaccctgggaagatagttggtggatgt

SEQ ID NO: 3164 - DNA, 479 bp, Homo Sapiens
  misc_feature (311)..(311): n is a, c, g, or t
tctatcagggtccaagcctcggcatgtgctggcttgtttggctttattttagaaaccaaccaacatgtttcattagcactgacacagcaggggccccctgctgccacctgacaatccagcgtcacttacactgcacccacgcaggccacaccttcaatggccacggcacgctagcccagagttagccacacagaaacacacttctcaccgcacaaaactcccttttgaaaaaaccaagcaatcgtcaggtcggaggagaatcactagccccccacagcgagaggggacaaagcttggtggccgaggcccangtccttgtggcccctcccggtggggtgaaggtgcccgggactcctcggggttgcatggctacagccggggcgctgccagggcctcctctgcggctgagagatggaagggatccttcccgacgcccgcaggtgggggcgagccaccgggaaccgggcctgtcaccagca

SEQ ID NO: 3165 - DNA, 604 bp, Homo Sapiens
cggccgccattgtccggagttcggcgagtcgggtggtcctttggctggagtgcctctctggtctggggatcacctcaggcgctgtccttcactgggcgatccagcatggaccccgaggacgaaggggtagcgggagtgatgtctgtggggccgccggcggcccggcttcaggtaacaataacaacaataacgacggcggcgggctccgggcaagcgtctcccgcgcagactgaccctttcacctcgcggcgcgatgagagcggcaccgctgttaatgcccttgacacgtggggaaactcagacgcgggtcggggcgtggtgaccgtcctggccggtcagagagggggccgggattccaaccaggcgcctgccccccgaatgcgcatgctccacgcggctctgtcctccccagggctggggtcggtcattcccgagagaatcgagcaggcccatctcctgcgttcggctccgccccgccgacacccttgcccattccaggaaggtctgtcctcgtgttgactgataacagtaattgtagcgttggccgggtgcccagatggcaagatcatcgaatagagatgtttaacgcgtggagtcagcggac

SEQ ID NO: 3166 - DNA, 224 bp, Homo Sapiens
ggcatagtcattttctgtatcttttcacctcacagttcatgaacatttcccatgtcattatagcacttttgtsttatataattgctgcattaatgttatagctgtattgatgtaataccagagttgttacgtttgggttatatgcaagtttatttcttagaaataaaactttgatggacttttaaaaaaaaaaaaaaaaaaaaaaaaaaaaaaaaaaaaactcg

SEQ ID NO: 3167 - DNA, 408 bp, Homo Sapiens
tttttttttgtatctttagtagagatgggtttcaagcaatattcctgccttggactccttaagtactgggatttcaggtgtgagccactgctcctagctggaaaaacagtgcttttaaatttttatttattgattgtattttctcaggagaaacaagaggttggactagcaaaatagaccctgagggcccatcatccccagactctcggttcctataaagaataactgtagtaccctttgctttccccgcccctccacaagaacacactggtgcaccacccttctctactccacgtctagaggaacagatctgatctatctcaatccagcagaatacatgtttaacatttattacaacaaagaacagacctagagggaatttgggataagaatgagggccagagagtt

SEQ ID NO: 3168 - DNA, 452 bp, Homo Sapiens
aaatcatcgatcgagtttaatacattgtaaagaaggaaaactacattggcgtatttaagacaaacactttttctctatcctcactacccactggacggtcctccttggtccaaaaaaaacctaacaatctcaagacacatcggcagctacccctcccgggtccaacctttcagatcctcccattacactgttaaaacatgtaactcaatccatccgcgaagaaaaccaaaccaacagaaaaggaagctgaagacatggacatcgcaagccacgcggtaatgcatacttggcacagagtagccaatatagaagacgtgtgcctcacacggttcactttgttcatcaataaaagaatataaaaatcttgttcacccagtggtaagtgtattaaaatagatctgtatcatacagcacagtttctcccggagtcgtgagaatgacaggagggaccg

SEQ ID NO: 3169 - DNA, 434 bp, Homo Sapiens
tttttttttgagacagagtcttgctctgtcacccaggctggagtgctgtggctggatctcagctcactgcaagctccgcctcccaggttcacaccattctcctgcctcagcctcccgagtagctgggactacaggcacccgccaccacgcccggctaattttttgtatttttagtggaaacagggtttcaccgtgttagccaggatggtcttgatctcctgacctcatgatccgcctgcctcggtctcccaaagtgctggattacaggcgtgacgcctcgcccagcccctaatcttggattcttaagcccaggctctttgtagcttattctccagtatgctttcctccaagcttccagttctgggcttccttaatatgcaattccaaatgtctggattttcagctagagatggggagctcttaactttctggct

SEQ ID NO: 3170 - DNA, 1065 bp, Homo Sapiens
aggcaagtttgcagtcagtgataagatggcattcacaattcattttatgaaagcaagcaacggttagatgtaaaaaactgcttaagtgagaaatgtaatattggcatgtcccattttgcgaagctgaaaaatgattttgtcaacacgcataaatctgcacactttatatactgcatgttattaaaaaattccatcagtaaattattacgaattttgcaaagttaggcttacatttatactgttgctggtgtatgtgtaagtagatatggaatgaatgttttcaagtttagtaggtaacatcctccaacaatggacagcggcttgtgaaaattccaaagacattttgatagctcaaccacattattcacattataggtagatgatcttattatatgttccttccctttctctgtcacaaatagggtgatcacgattgagtgctaggaatactgcaacggtcttaatttcagagttatagcagatctgctaacccacgacactggccagtgctttagctcttcaggtaaaaaatatctttttaatacataggaagagccaggtcccgtgcctcaaggattctaggccattggatatcatgtatcaattgccagttctgaatttgagcgtgcagtatacaccaatgtaatgtgtagctgagacataagactactaaagtcccccttactccttgtttttgtctttctttctggctggaaggaattaacatgcaaccagactaattgttttctactagattattctgtcaactctccgatggtactgcagttaagcagcctctctactgtggctctctgtgcggtttcacaggtcccatagatgttatgtaagacagtcactatagagcaaacaggcgtagacagagagaagcaacttaaagggtctgggtgaataaaacctgggatagcagaattcagactgtgagggtaccaaagggtcaccggcacaggagcggagattgaagccataaggttgaaggaatagcttggaggcgagagattctaaacatgtaattgagagggaataaagggaaaggaaataaagacg

SEQ ID NO: 3171 - DNA, 580 bp, Homo Sapiens
tgcagatttccttgctcacctctttggtcattctgtaacttttcctgtgcccttaaatagcacactgtgtagggaaacctaccctcgtactgctttacttcgtttagattcttactctgttcctctgtggctactctcccatcttaaaaacgatccaagtggtccttttcctcctccctgccccctaccccacacatctcgttttccagtgcgacagcaagttcagcgtctccaggacttggctctgctctcactccttgaacccttaaaagaaaaagctgggtttgagctatttgcctttgagtcatggagacacaaaaggtatttagggtacagatctagaagaagagagagaacacctagatccaactgacccaggagatctcgggctggcctctagtccttctccctcaatcttaaagctacagtgatgtggcaagtggtatttagctgttgtggtttttctgctctttctggtcatgttgattctgttctttcgatactccagccccccagggagtgagtttctctgtctgtgctgggtttgatatctatgttcaaatcttattaaattgccttc

SEQ ID NO: 3172 - DNA, 338 bp, Homo Sapiens
ggttcggatatctagcaggtttgcctctcaatccataaacctgggtctctagtgaactgctattccagtctctaattccactgggctggaaattacagattggttgttactggactccaggaggctcccaaagtctcacagaaatccaggagacttaaatgatccaagggcaggaaagaaggctgctcatcccagcctagcagcggatttgctcctcagtcttcagtgtctaagctcagagcagttcctgcaagtctacctccaggcaagggaatctaccgaggtggggcacccctgggggctgtgcctctctaaggcacaccaggtaccctcttcct

SEQ ID NO: 3173 - DNA, 300 bp, Homo Sapiens
ttttttttttttttttttttttaaaggttcaaaaaacctttattattccatttaatatggtattcatttttttaatttgtctttggtaaaaaaaattgcaaatacaaagtaacaatgaaagagataacactggaacaaagagctctattatatatgatttttttgttaattacataacaagttaaagcatagcttcctttaaaatacagaaaatctttcatctttaagaatttgattacccttaatataaataaatttaaagttttcacatagtaaaatgccataagttctgagaatatt

SEQ ID NO: 3174 - DNA, 642 bp, Homo Sapiens
gattttttacattttttttttttaatttcatgagaggctttgcagtgttccaaatgacaatttactatttctgtttcctttgtgtataaacggattggactcttctgaccatttgaccatttattccttggaatatggttattgaccttatatatttcatatttgtaatagatttatatacatatatataagcttgtaaacgtttatcagctattttcctcctctattactgtcccttttttacatttcattgggcaaaactattttatttttatatattcatacctattcaatttgtctctgatgatatcctttatttcacaatagtcagaagtttatcttccttccacagctggaataaatatgctattccaattttttttttaacatggaactctgcgacccatctgaatgggattgcagctgtgtgggaggaagcagttctaattttctgaactgatagccaggtggatacccagctaccccaactacatgtcttcagcagcacatcctctcaccattgtcatgttgcttctggtttgtaatattaaagtctttaagagtttaagtaatttccaaaactttttcttgttcccttgaatcacttctcattttctaacctaaaattgtatgtagataatt

SEQ ID NO: 3175 - DNA, 299 bp, Homo Sapiens
tttttttttttttttttttttttttttttttttttttttttttttttttttttgaagagatgggaagactttactactagatcaattgggtaacaaagtaatgtggctgctagaaacattaattcagtgtgaggccgtatgaatggagtagaatcctggaaaggagaggtgaaggttcagctttactcccaacaaggttcatttccaagagtcctactttcagaggggcgttgttgagctggtaagaagcaaacagagaagagattccacatggtgagaacccagaatcctgtcctgca

SEQ ID NO: 3176 - DNA, 550 bp, Homo Sapiens
tttttctaattaaagattttattaacacttaagattaatataaagtaatactatatattgtatcacaatgcaatataaaagttaataaaatcattgttttgttaatatttaccataaaagttatatttatctttgaagcactaagatcaatacctagggacaccattctactctgtgggattgcaggtcaaagattaaatacaaatttatttaaataaaggccctttaatagcatagaaacaatatatattcatacaataaaatgtaagctgaaaaatgcacggaacaaaatatgtgtgctgtgaccacagacgcgttctgaaaaatacgtgcgctgtgattgcagacgcgttctgaaaaatacgtgtaccataatcacagacgcgttcgcaaaaatacatgcactgtgatcgcagcacgtgcgccgagaccgcagacgcgttctgaaaaacacgtgcgccgtgatggcagacgttctgaaaaatacatgcgctatgaccatagatgcattctgaaaaacacatgcaccatgaccgcagatgcgttctga

SEQ ID NO: 3177 - DNA, 612 bp, Homo Sapiens
  misc_feature (609)..(609): n is a, c, g, or t
ttttttggggtattttttaatagtacatctccgtgaacatattatatcacttctgggactacatatttttgagagcagaggccatatcttacatacagtagataccaaataaattttaacaccgaacatttacatagaactatgttctagcaattttttaaagcagatgaggaaactgaagactagggaggttcaggttacacagatggtttgtggtagagcccagatctgaaccttgcctgttgggccccaagggacccaaagttcaggctctatcccagaccgctctgttaggttgcatggagaatgcgatgcattgtgcaaagattaactgtgattgtgtctactacaggagaaataaggagcagcttagcttgctaaaaagtgaacacatttaattggtttaaacttgcattcattatgcaaactttgcttgaaatatttcatttgacaattctagtaaattaatacctattcttagtctagatagtgcataacaaattactgacgacaaatcctaagtgcgttaaagtaaaattttaagaccaaaagcacatgaatgcactcagttatgataatgtgagatgatacagtattttctttttgctntca

SEQ ID NO: 3178 - DNA, 430 bp, Homo Sapiens
  misc_feature (392)..(392): n is a, c, g, or t
  misc_feature (398)..(398): n is a, c, g, or t
cattcttttagttacttaaaaatgtacaattaacttgctttgactatagtcactcccgaccagagaaaaaccctgtagacattagtcactcctcattctgtctcaaaccctctccctgaccctcagccctaggtagcaactacctagtgcgatcaatcccatatgcatagattaccatattgtggacatttcctataagcggaattgcacaataggggagctgttatgactgacataacacgtagcacaatattttcaagattcgtccacattgtaggcttacccacagggggaaaccattttttcgggggcttttagtaacaccggtgttttctccttccttacgtccttctttccttccttccttcgttcgccggattccttcctgcggnctggtncttctttccttccctccttcctcctatttctc

SEQ ID NO: 3179 - DNA, 299 bp, Homo Sapiens
  misc_feature (17)..(17): n is a, c, g, or t
  misc_feature (47)..(47): n is a, c, g, or t
  misc_feature (180)..(180): n is a, c, g, or t
  misc_feature (196)..(196): n is a, c, g, or t
  misc_feature (225)..(225): n is a, c, g, or t
ggaaggggagggaaagntgggaggaatgggaagcagctgttctggtngcttccactctgaggtgtgggaacggggagcctctggggggcacctgtttccccagtgactcagagagagcaagactgcaggaacggaggggtcctgcagggtgtccaccaagaagtcacagagcccgttctncgccccacaccatctngagcaggggcttctcttctgagtgaactnaggaaggtgcttagatggtgagggctcttagaaaccaagccccatgagcagcagtgggaagaccttcgggccat

SEQ ID NO: 3180 - DNA, 459 bp, Homo Sapiens
  misc_feature (316)..(316): n is a, c, g, or t
  misc_feature (327)..(327): n is a, c, g, or t
agaagctgaaagacttcttgagttcttggcctggaactgggactaggacagtgtcacttctgctaagttcttttggtcagagcaaatcacaaggctttacccagattcaagggatgagaaacagactacatgtcttgatgaggggaaccacaaagagcttgtggccatttttcacctatcacaaataattttggatgggtatttatttggataaaggtatttccctcttccccctttctctctgtctcatggggcctcactctgccaagttggaaggcactaagacattgtcctggccctcagggtctaggggaanaggtgttgggncaggaagtgagtctctccatgggctggacccactgtagtaggagtcctccttgtctgcactgctggtatggggttaggccaggtaggacattcccgaggggcttttgaaaccaagagtcctggggaaaggga

SEQ ID NO: 3181 - DNA, 626 bp, Homo Sapiens
ttgaatttaggtgacactatagaagagctatgacgtcgcatgcacgcgtacgtaagcttggatcctctagagcggccgcctactactactaaattcgcggccgcgtcgacgtttggacaggcttcacatttcttccacaaaaccattctcctcctcttttaacctcgtctagacaaaaatggaaggtctatgccaccgcaatttaaaatcagaagagtcaggatttgttaaaaataagggggatttgagaatcacatttctgcatgaagattttaggaagggactgaaaccaacaacaattgagaatttctcttcacctgatttaaccactagcacaaaaaagtccacctaaatctttacaccaaaatctcatcaaaataacaaaactgtggctcacgcctataatcccagcactttgagaggccaagacgggcagatcacctgaggtcgagtttgagaccagcatggccaacatgttgaaaccctgtctctattaaatatataaaaattagctgggtgtggtggcagatgccttcttgggaggctgagacatgagaattgcttgaacctgggagggggagggtgcagtaagcttagaacacttcacttggcttcaagctgggcga

SEQ ID NO: 3182 - DNA, 401 bp, Homo Sapiens
tttttttttaacgctattttatttttgagatgaagtcttgctatgttgcccaagctggtcttgaactcctgagctcacgtgatctacccaccttggcctctcaaagtgctgggattacaggcgtgagccactgtgcccaacttaaaaaacaggttttgaaagcaagtttgataaagcaatttattacaattttctcttcttcaacaagctattatttcagctctaactctggtcatatacttgtttttggatctctgcttctttttctggcaacatattcaagaatttaaatattcactaggctttatggagcagtaaattcggaataatgtttaaacaaatactcctaaaatatttttcaacaaatgtttgtaaatggatgttgaaagtaagcctgtttt

SEQ ID NO: 3183 - DNA, 465 bp, Homo Sapiens
  misc_feature (129)..(129): n is a, c, g, or t
  misc_feature (368)..(368): n is a, c, g, or t
  misc_feature (417)..(417): n is a, c, g, or t
  misc_feature (426)..(426): n is a, c, g, or t
  misc_feature (462)..(462): n is a, c, g, or t
gtgacctgacttaggtgttaacaggttcctctgaggtgtgtggggaacagactgaggggtttcaggggacatctgttctcaccacaaattgccccccaaccagccccagacatgaacagtctcccgggngctccctctagccttctcgtatatcccagccctgcctcatgtcacaatttgtaatgatgtgtttggcttggtgacattttatggccatctgtctccctatcccctataatgtggtttgccgaaagcaaagcccagggactgtctcggccatctgtgtctccagggatcacccctcactgggcatggagtatgtgtccagttaacgcttgctggagtgaatgaatgaatactccatcctnttgccggggagaatttacggcacttttaggcattattccaagggctctngacaagttnctggcattaaaaaggggctttatttgtttttctttnctt

SEQ ID NO: 3184 - DNA, 498 bp, Homo Sapiens
tttttttttttttttttttgagatgaagtgtctcactctgttgcccaggctggagggcagtggagcaattctcaaggagttctcctgtctcagcctcctaagtagctgggattacagacacctgccaccacatccagctaatttttgtatttttagtagagacagggtttcgccatgtttgccaggctggtctccaactcctgacctcaagtgatccgcccgcctcagccttccgaagtgctagcgtcacaggttttagccatggcgtctggccattatctgtatattaatcaagaaatctaggtatttcactttacactatgcctggatagagaatttgagataaaacagactttaggaagtggtatttctactcccaaatgtgaaaaccataccaaaaaaccagtctcacagttacaaataactagtatgtactaagaatttactaaatattcactcaacccgattcattcatttattaatttatagataagaaaa

SEQ ID NO: 3185 - DNA, 429 bp, Homo Sapiens
tttttttttcacattttaaatgtttaggttcatcaggaagtggtcttactgtaaacgcactttccaaagacacatgatcatcttggaatgaaacctggcaatagcgcatatcttttacagatgttggtacttgcacatcaggaagcagaccctgtagcaagtgttctttgttaatctcaggagtccaattaactttaattttttctgctaaagctgatgttatattgatttctctttctccttcatcatacatttgaaaaataagattatgcataatatcacccgctatccaattaacctcatcctgatgtttgatctgaattgccttttgtccttctacactgaatatttgtagtcttgcaacatggctactgggaagcaacttaatagtcttctccacaggtgccacatctttacaactaggtattt

SEQ ID NO: 3186 - DNA, 604 bp, Homo Sapiens
  misc_feature (511)..(511): n is a, c, g, or t
gcggcagcggcagcggcctcgggcggggccggccggacggacaggcggacagaaggcgccaggggcgcgcgtcccgcccgggccggccatggagggcgcctccttcggcgcgggccgcgcaggggccgccctggaccccgtgagctttgcgcggcggccccagaccctgctccgggtcgcgtcctgggtgttctccatcgccgtcttcgggcccatcgtcaacgagggctacgtgaacaccgacagcggccccgagctgcgctgcgtgttcaacgggaacgcgggcgcctgccgcttcggcgtcgcgctgggcctcggagccttcctcgcctgcgccgccttcctgctgctcgatgtgcgcttccagcaaatcagcagcgtccgcgaccgccggcgcgcggtgttgctggaccttggcttctcaggactctggtccttcctgtggttcgtgggcttctgcttcctcaccaatcagtggcagcgcacggcgctagggccggccacgacgcangcgggggacgccggaccggccgccattcgccttagcttcttcttcatccttagctgggttgcgctcaccaggaaggcccttgcacggttacag

SEQ ID NO: 3187 - DNA, 444 bp, Homo Sapiens
aatgaataagtatttccgtcaagaaaaaggaaacaacaaaataaaaccaacccaagtaaagaacagccactgcgcctgaccaatatatttccatattatcagtttataatattcccacaagcttcctaaagtagaaatcatttgcagtgagcagtttgccccaaaagcctgaaccgctgggaactcgtcctccaccttccccatgtggggcacttggacgcacgcctgtaagggctgcacatgccatttgccattttgaaagtagatggtcagatgacagcatataaacacatttttcttactagaaagtgtcagctgggcatggtaactttcccctataatcccaacactttgggaggccaggggggagggatcatttgagcccaggagttcaggaccagccacaggcaacatgacgagatccccatctctacaaaaaaaaaa

SEQ ID NO: 3188 - DNA, 513 bp, Homo Sapiens
gaatgatgtttccttttattgacatatttgtttcctggtattgcagttatgtaaaggttaagtaggattttatatgccaatcatccgtggttgatgtagtgaaaaaggtctggactgttaacattctcctaggaacctggaaataaagaaaatatgataactttttaaaggttaaatttagaattaaaaccctaatggagcaacatttagatatataaatataactttaaaagtctgaatacttttccaattgcaagatttgactattaattttatggaatgagagttttagtcagaaagaaggggcagagggtatcagtaatgaaaatagaaaaagaaaagacagatattaaaagtgactgtccaagttctgtgcaagagtaaagtaacatttgtccctaacacagagatggatgtagagagttgtatcagtgtgcatcgagtattctgaccatatggtgagccttcactaggtgcaatggatgcatcagattatagccagtaatatctttc

SEQ ID NO: 3189 - DNA, 527 bp, Homo Sapiens
  misc_feature (11)..(11): n is a, c, g, or t
  misc_feature (20)..(20): n is a, c, g, or t
aatgtctctcncatacctgnaacacaaaaaacaaaaacaaaaaaccatacacacacacacacacacacaaatcagcatcataagggaatgtagccttccaacagagatgatgctgttcgtatgttaatctcagagacagtatttcaagagagtggcaggtctgttcctggtaaaattttaaccattaggattgcagataaatgtttgaattctgctcctctctcatcaatccaggacagtatttgaagtgtgagggctttgtgtatagttgtttatccattaccacatttttgtattttaatagtctacaggctatataaaagaacatggctttttgactgataaaagtgattacagatgttggctcaagttcagggccaccatcatatacctaacaagagttcatgattctttaggtaatgtcaaaacattttgtatttttccatcttaagctttataacattttgtgagtaagacaaatgttatttaaaattcttgttgtcagtccagcaattgaggctttcata

SEQ ID NO: 3190 - DNA, 345 bp, Homo Sapiens
tttttttttttttttttttttttttttttttttttaaaaactttggcatttttattcagacacgtataaaaacaaaacaaaaaacttcagggatacaacagacgttttcccttagttccccatccaaggggacagaggggggcagctgaagctggatcttttttctgtcctacctggaagcttctcactggtggatgaaaatggcttctaaaaggggatcttggggatccttgtgaatttgccctcggataaggagtgaagatcatttacggcacatgtggattatggtttacacaaagatgtccagttatttttccttttgactacccccaccaccacttcctg

SEQ ID NO: 3191 - DNA, 607 bp, Homo Sapiens
tttttttttttttttttttttttttttttctagttcacagaaagaccatttttaatatgaaaagagaaaaacaatttgaaggccccacaatttgttgggtaacaacataatttcaagtaaagggaatgggattaaaacatcttgatttcacaaagccattcagaggaggcttcgacaaacgcaaagcgacccaaaccctggagggtcacatcccggttgttacaaaccttgggggggcggccccgtttttgcggccgggacagcgcaacggcagcaggggccgcaggggacccgcaaattggcacgccgttccccatccccgcagcgcgtttgcaccggagactctgcggggattgtagccggagggcgggccgggctccgaggcgctgctcaggcattggggtttgtcctcatgagctccacgtcggcgtgcaccatctccctcaccagctcatcgaaagcgacccggggcttccagttcagcttctgtttcgctttgggcagtcgccctgcagaaagtccacttcagttgggccgtagtacttgagaatcacagtcacgtgaactttgccggtcttttacatctgcccacttcattttcatcttt

SEQ ID NO: 3192 - DNA, 409 bp, Homo Sapiens
cagcacattgggaggccaaggcaggcagatcacgaggttaggagttcgagaccagcctggccaacatggtgaaaccctgtctctactgaaaatacaaaaattagctgggcgtggtggtgggtacctgtaatcccagctacttgggatgctgaggcaggagaattgcttgaacccaggaggcagaggttgcagtgagccgatatcatgccattgcactccgactctgggcaacagagcaagactctgtctcgggggaaacaaaaaaaaagtgtgctttgtcaagagaagcaccagcagacctctaagaactgctctctaaggctgcggtacgaattatctactattgcaggtgccttattggtagagggctctgaagagccaaaactgtatatgcaacacttgtaagata

SEQ ID NO: 3193 - DNA, 620 bp, Homo Sapiens
  misc_feature (514)..(514): n is a, c, g, or t
agcggccgccctttttttttttttttttgcaaaaataatcaggcacactttttattttacatcttaatcaacattacaaatacaaaaggaaaaaagtcagaaacaactcatcacagaggaaaaaaacatcattcagaagagattaatctgaacttcaacattctttgtgctcattttaaaattattaaaacaggaattcaaaaggacaagcaaataaaaaccaagtattttattaattaaaattgagaccctaaaccaactaagactatacaacttaaaaataagctgtcttcatcctagaaaagtttgatttgccatcttataatgaatatgcaggaacttactaatgggtaagtaaacaaattttcttttacaaacaagttattttgagttatagggatcctcctggtgactagatttttttttaatgactaaaaatgcctatttagatagtcaacctatccgtaaagttggacactaaatgacatagtgaacatttaaagttgaaactctntgtctaccaaatattttcctaaaactgtttttaagcatatacattaacttaaaaggtcaactcttaattgtctatagccaaagagagctttggtaccaataaattc

SEQ ID NO: 3194 - DNA, 428 bp, Homo Sapiens
tttttttaagaggttatttttatggtagtaattttatttcaaagagcaacgcagggaaatactaagatgaagccttaatacccaacagagttgtgctatgatacatattatttcactaaatcactgatacagtatcacataatatgccaatcactttaaaatcccctcccccccattgccattaatttactataggtcacttaatttgaattggtattaatttagtaacgcaatgtaaacatttaaacttaaatttttttcttgttatctatttcagcctgaaaatgaaatcccaagactttaaacatttatgagcatgaggaggaagcatcacagaagaattgtctcaaaacaacatttttagattagattagagatgcaatattcatagatatataaaatatgtagaaatgtcttttctaaatagt

SEQ ID NO: 3195 - DNA, 560 bp, Homo Sapiens
tttttttttttttttttaaggctggggtaaatttcaggaaagccaaagttacaggcaaaattgtaaatcaatagatggaggttacactttggttctggcctaaaaaggcaggatatcttgaaataagggcttatagtcataggtagattcaaagatttttctcatttgcaatgggttaagagaagcttcgtttaaattttggggacagcagaagagaatattagctcaggattgtagatgtgatccctccaagcccctgagaaagaaattttcaacaaagaacagtggtcagacttcagtcttcagttcccccttctctgaggtctaggtgccagcagatccattcagtaggggtccaggtttcccagtggcaactttctggccggacaggtcaggagcccagctaaaaaggtgagtgggccatcagcctatacaggcaacgagagtgtcaaccgccagattactacttccagttacgaaaaaacggtcctctggaagcgacgttctctgtgcgccacgtaacacgctgcaggaaaggtacactggggggtatcacgtga

SEQ ID NO: 3196 - DNA, 947 bp, Homo Sapiens
gcattttgtttgaaaacacaatcagctctgacagttagacatgcacacagacgccatagctggattggaaacattgatgttttaaaaatttattttttttggaaatagttgcacaaatgctgcaatttagctttaaggttctatagatttttaactagtccaacacagtcagaaacattgttttgaatcctctgtaaaccaaggcattaatcttaataaaccaggatccatttaggtaccacttgatataaaaaggatatccataatgaatattttatactgcatcctttacattagccactaaatacgttattgcttgatgaagacctttcacagaatcctatggattgcagcatttcacttggctacttcatacccatgccttaaagaggggcagtttctcaaaagcagaaacatgccgccagttctcaagttttcctcctaactccatttgaatgtaagggcagctggcccccaatgtggggaggtccgaacattttctgaattcccattttcttgttcgcggctaaatgacagtttctgtcattacttagattccgatctttcccaaaggtgttgatttacaaagaggccagctaatagcagaaatcatgaccctgaaagagagatgaaattcaagctgtgagccaggcaggagctcagtatggcaaaggttcttgagaatcagccatttggtacaaaaaagatttttaaagcttttatgttataccatggagccatagaaaggctatggattgtttaagaactattttaaagtgttccagacccaaaaagggaaaataaaaaaataggaatatttgtacccaacagctagaaggattgcaaggtagatttttgttttaaaatggagagaagtggacagataaggccatttaatatatcaaagatcagttgacatctctagggaatgatgaaacagcagctat

SEQ ID NO: 3197 - DNA, 493 bp, Homo Sapiens
tttatccttactgaagaaccaatttgcatccctgttgagaatacagggcttgtggccagtaataactctcccttttaggattcctgtctttccccattttttttctatccccagttgccatcacagcgtaacggtgcagggaggtatatgagggttgctaagggaaagcagaggtgcccctcactcaaacctacattcagaaaaaaatttccttcattattgattggatgtcttaaatgcaaagacttacacagaaactgggaagggaggacctatttcagacaaggattcaccatggaatttttatgaatatccttataaaataggacttgggatgcagatggattatttctttaagtcttgcaacttcagaaaagcctgagacacataccccctcctactatatatagtgattataaatagtatatttacctgcagaaaatttaacactgtgccctaatgcaagagaaatctgtggtataacaatgtactc

SEQ ID NO: 3198 - DNA, 502 bp, Homo Sapiens
ataacagcgtcagagagaaagaactgactgaaacgtttgagatgaagaaagttctcctcctgatcacagccatcttggcagtggctgttggtttcccagtctctcaagaccaggaacgagaaaaaagaagtatcagtgacagcgatgaattagcttcagggttttttgtgttcccttacccatatccatttcgcccacttccaccaattccatttccaagatttccatggtttagacgtaattttcctattccaatacctgaatctgcccctacaactccccttcctagcgaaaagtaaacaagaaggaaaagtcacgataaacctggtcacctgaaattgaaattgagccacttccttgaagaatcaaaattcctgttaataaaagaaaaacaaatgtaattgaaatagcacacagcattctctagtcaatatctttagtgatcttctttaataaacatgaaagcaaagattttggtttcttaatttccacaaaaaaaaaa

SEQ ID NO: 3199 - DNA, 526 bp, Homo Sapiens
  misc_feature (341)..(341): n is a, c, g, or t
  misc_feature (395)..(395): n is a, c, g, or t
gctcttaaccacgtttattgagaggggccgggggaaggggatggacggtcctccccgcggcgggtatttcagccctcgcgggtgggcagcgtcttgtcctcaggtgtagatgctccagtctcggctcagccaaacactgtcagggcccccagcagggccttcagggcattcacggccccacggcctggggacccagctcagccacacacttctgggagccctctatgaggtggttcacggggatgcccaggctgctcagcaggagcttcagcgggttgagggtgccgagggggttggccagggtcccggccccgggctccggcgccgactccagcgcagancaggcttgggcacaggctttggcggagccactaagaaaagcagcagcggactgngaacaagggccacgcagagccccaggaaggggccgagctttcatggcgccggggctcggggcgcgccgggaacctgcggctgcccgggcaaaggcaagaggcttctttataccggttcttggccctcgtgc

SEQ ID NO: 3200 - DNA, 2366 bp, Homo Sapiens
ccggcggcaggagccgccaccatggagttccgccaggaggagtttcggaagctagcgggtcgtgctctcgggaagctgcaccgccttctggagaagcggcaggaaggcgcggagacgctggagctgagtgcggatgggcgcccggtgaccacgcagacccgggacccgccggtggtggactgcacctgcttcggcctccctcgccgctacattatcgccatcatgagtggtctgggcttctgcatcagctttggcatccgctgcaacctgggcgtggccatcgtctccatggtcaataacagcacgacccaccgcgggggccacgtggtggtgcagaaagcccagttcagctgggatccagagactgtcggcctcatacacggctcctttttctggggctacattgtcactcagattccaggaggatttatctgtcaaaaatttgcagccaacagagttttcggctttgctattgtggcaacatccactctaaacatgctgatcccctcagctgcccgcgtccactatggctgtgtcatcttcgtgaggatcctgcaggggttggtagagggggtcacataccccgcctgccatgggatctggagcaaatgggccccacccttagaacggagtcgcctggcgacgacagccttttgtggttcctatgctggggcggtggtcgcgatgcccctcgccggggtccttgtgcagtactcaggatggagctctgttttctacgtctacggcagcttcgggatcttctggtacctgttctggctgctcgtctcctacgagtcccccgcgctgcaccccagcatctcggaggaggagcgcaagtacatcgaggacgccatcggagagagcgcgaaactcatgaaccccctcacgaagtttagcactccctggcggcgcttcttcacgtctatgccagtctatgccatcatcgtggccaacttctgccgcagctggacgttctacctgctgctcatctcccagcccgcctacttcgaagaagtgttcggcttcgagatcagcaaggtaggcctggtgtccgcgctgccccacctggtcatgaccatcatcgtgcccatcggcggccagatcgcggacttcctgcggagccgccgcatcatgtccaccaccaacgtgcgcaagttgatgaactgcggaggcttcggcatggaagccacgctgctgttggtggtcggctactcgcactccaagggcgtggccatctccttcctggtcctagccgtgggcttcagcggcttcgccatctctgggttcaacgtgaaccacctggacatagccccgcgctacgccagcatcctcatgggcatctccaacggcgtgggcacactgtcgggcatggtgtgccccatcatcgtgggggccatgactaagcacaagactcgggaggagtggcagtacgtgttcctaattgcctccctggtgcactatggaggtgtcatcttctacggggtctttgcttctggagagaagcagccgtgggcagagcctgaggagatgagcgaggagaagtgtggcttcgttggccatgaccagctggctggcagtgacgacagcgaaatggaggatgaggctgagcccccgggggcaccccctgcacccccgccctcctatggggccacacacagcacatttcagccccccaggcccccaccccctgtccgggactactgaccatgtgcctcccactgaatggcagtttccaggacctccattccactcatctctggcctgagtgacagtgtcaaggaaccctgctcctctctgtcctgcctcaggcctaagaagcactctcccttgttcccagtgctgtcaaatcctctttccttcccaattgcctctcaggggtagtgaagctgcagactgacagtttcaaggatacccaaattcccctaaaggttccctctccacccgttctgcctcagtggtttcaaatctctcctttcagggctttatttgaatggacagttcgacctcttactctctcttgtggttttgaggcacccacaccccccgctttcctttatctccagggactctcaggctaacctttgagatcactcagctcccatctcctttcagaaaaattcaaggtcctcctctagaagtttcaaatctctcccaactctgttctgcatcttccagattggtttaaccaattactcgtccccgccattccagggattgattctcaccagcgtttctgatggaaaatggcggtttcaagtccccgattccgtgcccacttcacatctcccctaccagcagattctgcgaaagcaccaaatttctcaagaccctcttctccctagcttagcataatgtctggggaaaca

SEQ ID NO: 3201 - DNA, 498 bp, Homo Sapiens
tcttgctgttgagaagtcagcgttctaactgttgttacttcataggcccagctgtgagatacagtaagttcaagatgtcagaggccaggccgccccccctgctcgggcagcacacaacgcacatcctgaaggaggtcctgagatacgatgacagggccatcggggagctgctcagcgctggagtggtggaccaacatgaaactcactgacaaaggaaaagggctcttcctcataacctcgatccgaatacactggcaaaggcaacactttgcttggacccttctccccagttctgataccactaagaagaagatttagagtaactccagatttcttacatggcatctccagaatggctctggtattaatgaatctagtgccttttaaatgtatcccacgttttgttccctaccatcttttttttcagatgatgatttcattatggatttgtgggatttttaaaaataaagatttaatttttttcctggaaaaaaaaaa

SEQ ID NO: 3202 - DNA, 756 bp, Homo Sapiens
tacttgaacactcacttcaatttaggtgcatattttctaaatgcacctctctctctcttctgaaagagagaacatttcatcagaaaacgaacggggtcttttgcctatctgatggtctcacaccttcacaacagctacaaatccttggaccagccagggacagaccaactccagggttctctgacaacagaagtcctggaaaggctctgcactcaaaacaaacccctacaccaccccaagggagggggattgtttcaggttcggggagacgctaaaagaaattgaacctaaactcttcatcaggcatgtccagagtggctttggctctccatatagagcgaggcctgcagaccctttggctcttctttctggtggctccatctacaggttgcacctgggctgaataagcagcagctctgagagcccgcagggcctcacgccattcggcttccatctgagccctatagtctccaaacaaggagtgcatcagctgcctcttccggggcaagggcgttcttttagctgcgcagggttcggattgctccaatagcctgctctttctgtttcggggtgggtttctagcctcttgaggcccagctccagttgctccacacaccaagccaattcctgggccaactgttgtgcccgtggattccacccttcccgaccgaagcccgcccttgcctgggcctcagcgcttaggggaacttcttctggggcgagattctctgaggccttctcgctccattgccacag

SEQ ID NO: 3203 - DNA, 567 bp, Homo Sapiens
tagttgttaatagagtggttggcttttaaggttcagagactgtggcttggcacctgcgcccaggctttgtgggcctttgccccttagaaagtagctgtaggcaaagatttgtgattttccaattacagtctcagctctagttttagtatctctaattctttggttcccttctcttccctgaaatatattagcacctgccagccaggccctcattttgcccagccagtgtgggcagatcccaccgtggagacatctgtagtgtgtatgtccttgtaacactctgttttcagggactacaacctttttccttctgtgaccagccccggattcaggctgtactaataccaggtatattgtggaatttagtataaaggccaatctgtcctgaaaaaaaaaacaaaaaaaactcgagggggggcccggtacccaattcgccctatagtgagtcgtattacaattcactggccgtcgttttacaacgtcgtgactgggaaaaccctggcgttacccaacttaatcgccttgcagcacatccccctttcgccagctggcgtaattccgaagagg

SEQ ID NO: 3204 - DNA, 395 bp, Homo Sapiens
cgggcggatcacgaggtcaggagatcaagaccatcccggctaaaacggtgaaaccccgtctctactaaaaatacaaaaaattagccgggcgtagtgacgggcgcctgtagtcccagctacttgggaggctgaggcaggagaatggcgtgaacccgggaggcggacttgcagtgagccgagatcccgccactgcactactagcctgggcgacagagcgagactccgtcactaaaaaaaaaaaaaaaaaaaagatggaaagttcgatgtgactgcagtatgagattaaagccacaactagttgtttatactggggactctaggccaccaagtattagcacacatacttatgttttctctactaatctggtccaggtcctcatggaccacaggacaaa

SEQ ID NO: 3205 - DNA, 649 bp, Homo Sapiens
aggccctgaactatttaaggatccaggtgttgcaaggcggtaagtttgcagccagtgtccatgaggtcggggctgggactagattagggtagatctaagcctgggcttgggagtgcagctagcgcagaaagatctgaggaactagagcaaaaagccatgcggatggattatggtcgtcagaggctcccgtagtcttcagcggcgctggcttccgcaggctccgccctctcttgcccacccggaaacagcctcgccccgcctacgcgggacccaaccgcggcgaccggacgtgcactcctccagtagcggctgcacgtcgtgccaatggcccgctatgaggaggtgagcgtgtccggcttcgaggagttccaccgggccgtggaacagcacaatggcaagaccattttcgcctactttacgggttctaaggacgccggggggaaaagctggtgccccgactgcgtgcaggctgaaccagtcgtacgagaggggctgaagcacattagtgaaggatgtgtgttcatctactgccaagtaggagaaaagccttattggaaagatccaaataatgacttcagaaaaaacttgaaagtaacagcagtgcctacactacttaagtatggaacacctcaaaaactggtagaatctg

SEQ ID NO: 3206 - DNA, 572 bp, Homo Sapiens
  misc_feature (488)..(488): n is a, c, g, or t
aaccggcgcaacgagaagcctaggcgttgatgggagctgtctggagcaggggtccccagcccccaggccgcagactgatactagtccatgacctgttgggaactgggctacacagcaggaggatctctaccaccagtcctatgaatgcgtttgtgtcctcttcgcctcagtcccagacttcaaggagttctactctgaatccaacatcaatcatgagggcctagagtgtctgaggctgctcaatgagataattgctgattttgatgagctgctctccaagcccaagttcagtggggtggagaagatcaagaccatcggcagcacctacatggcagccacaggttaaatgccacctctggacaggatgcacaacaggatgctgaacggagctgcagccaccttggcactatggtggaatttgccgtggcctggggtctaagctggacgtcatcaacaagcattcattcaacaacttccgcctgcgagtngggttgaaccatggacccgtagtagctggagttattggggccagaagccgcaatatgcatttgggcaacacagtgaacgtggcc

SEQ ID NO: 3207 - DNA, 271 bp, Homo Sapiens
  misc_feature (9)..(9): n is a, c, g, or t
  misc_feature (138)..(138): n is a, c, g, or t
  misc_feature (168)..(168): n is a, c, g, or t
ttttttttntgttaaccattaacatcatgcgtgttattcaagaagaataatattcagaagagttataatcctaagaaagttatcccacccttacagtaaaaaggggggaagtgggtacccacttatgacaatgtacgnataaattccacttttactatttctgaatanaagctgcaattggcttctttgatagagccatttcttaaaacttttgctaataaggctatgtgaactgtgttcagaaactttgacaacatgcacactcactcct

SEQ ID NO: 3208 - DNA, 706 bp, Homo Sapiens
cggcagattcgaagctagggcggggcccgcgggctgaggcagcggctgtggcggcgacgcgtgggcgtgaggtggctggcggccgcgccctggttgggtccccactgctctcgggggcgccatggacgaggccgtgggcgacctgaagcaggcgcttccctgtgtggccgagtcgccaacggtccacgtggaggtgcatcagcgcggcagcagcactgcaaagaaagaagacataaacctgagtgttagaaagctactcaacagacataatattgtgtttggtgattacacatggactgagtttgatgaaccttttttgaccagaaatgtgcagtctgtgtctattattgacacagaattaaaggttaaagactcacagcccatcgatttgagtgcatgcactgttgcacttcacattttccagctgaatgaagatggccccagcagtgaaaatctggaggaagagacagaaaacataattgcagcaaatcactgggttctacctgcagctgaattccatgggctttgggaacagcttggtatacgatgtggaagtcaaatcccatctcctcgattatgtgatgacaacttttactgttttcagacaaggaacgtcaacagcaacctcatcatctgggaaccgggtggtgctgtccaggtcctctggcctggaaacctcctgggtaaagggttagccggaatgaca

SEQ ID NO: 3209 - DNA, 572 bp, Homo Sapiens
agggaagaaaactgagacctagaaaggtgaagcggttgtcccaaaggcttccagctgctcccagtactcaagaacttggagcacacttggggaaatgctcactgttgtattcccgttcctcactatccaggaggcctgaactctcaaactccgaatctgatttccactctcccaggaaggcttcggaaatcactgtggattgtcaatacaggagtccatactgactgaatccctaattttggcctgtattcttctccctctgtgaaccatcttcttagaagtcactgaaccaagagtgccagaaaaccatcccaagactcacacagagttgttcttccatagtggatgttttggccactggacatcagaaccacattttgggtttgaagaatcttctacatgtgatgatccagtaaatgatttcatagtccaccaaacggtcacggttcacacttggagacacccaatgcaggtctctgctggctgagtgcactggcttgtggctggaggtgagtgctcaggaccacagagggataaagaacctctataactcaacaacaacaaaaaaaaaa

SEQ ID NO: 3210 - DNA, 436 bp, Homo Sapiens
  misc_feature (359)..(359): n is a, c, g, or t
ggtgtgccatcacagcaaaggtagggtgtggccagtcctgggagaagctaagggttatgacctccagatccttactggtccagtcctcattccctccaccccatctccacttctgattcatgctgcccctccttggtggccacaatttagccatgtcatctggtggtgaccagctccaccaagcccctttctgagcccttcctcttgactaccaggatcaccagaatctaataagttagcctttctctattgcattccagattagggttagggtagggaggactgggtgttctgaggcagcctagaaagtcattctcctttgtgaagaaggctcctgccccctccgtctcctcctcttnagtgggaggatggaaaacaactgcctgcactgcccttgtccccggatcctgccgaacatctggggcatcaggaagct

SEQ ID NO: 3211 - DNA, 611 bp, Homo Sapiens
  misc_feature (606)..(606): n is a, c, g, or t
atttggccctcgaggccaagaattcggcacgaggtttaagaagcaaaagatagttctgcaaattcaaagatacagtatcccttcaaaacaaataggagttcagggaagagaaacatccttcaaaggacagtgttgttttgaccgggagatctagagagtgctcacaattagggcctggcatttggaatcacaggatttatcatcacagaaacaactgttttaagattagttccatcactctcatcctgtatttttataataaacacaagagtgcataccagaattgaatataccatatgggattggagaatgacacatgtggaagaaatcatatagctggagactacttttgtgctttacaaaactgtgaaggattgcggtcacctggaacaggtcttcaatctatgttagcactatgtggctcagcctctgataccccttgaattatatatcaacctgtaaacatgtgcctgtaacttacttccaaaaacaaaatcatacttattagaagaacattctgattttatagaaaaaaaatagagcaaggagaatataacatgttttgaaagtcatgtgttttctttctcaatgagggaaaaacaattntatta

SEQ ID NO: 3212 - DNA, 578 bp, Homo Sapiens
ctggctcataataataaaagcttctacttacatagcattactttgttccaggcaattttctaagtgtgttatatatattaactcactccatcttcacaaccactctgaatagaagctgttgttatctgtgttttgcaggtggaaaatgaagcacagagaagttcagtgatggacctcagatactaccagcagaaagcagaagagctaggatttcaacttaggatgtctggatccacagtctgcactcctacccactatgctacactgcctctaactatgaggaagcaagggcatttttttttttctggtgactaaaaagataagagttcaagtatgtggctcctgataatctaacttatacagcctggaaaaattgatagttactatatccagactgtctcattcaattaacagtttctcaagtaatcttctagttactgtcgtattttatctgtatcaacttagcaaaccaagtccaaaacattttatatgtgtctatctttcctgctgttcatattattgagttagccaaataaattcaattttttttctactgtttgtttctcacaaaaaaaaaa

SEQ ID NO: 3213 - DNA, 582 bp, Homo Sapiens
ttgaatttaggtgacactatagaagagctatgacgtcgcatgcacgcgtacgtaagcttggatcctctagagcggccgcctactactactaaattcgcggccgcgtcgacttttttttttttttttttgagatggagtcttgctctgttgccgggctggagtgcagtggcacaatctcggatcactgcaacctccgcctccaggttcaagcaattctcctgcctcagcctcccaagtagatgggactacaggcgcaccaccaccacgcccaggtaatttttgtatttttagtagagacaaggtttcaccatgttggccggcatggtctagatctcttgaccttatgatctgcccacctcagcctcccaaagtgctgggattacggtcatgagccaccgtgcccggcccagtgttgctaactcttatcagtaccacctctaaactctgatgttgtgattaaaggaagagattccgcaggcagacttactaggtttaaatttcagctctatcagttatcaatcattatgagttggtcacaatccttaaattctcttggtggcattttttcttatcaataataca

SEQ ID NO: 3214 - DNA, 541 bp, Homo Sapiens
  misc_feature (517)..(517): n is a, c, g, or t
tagcttcaacacagcagaaatttatttcccacccaggtaaggggaccctgaggtaggcagtgacttctgtcggcagcgagctaggcccctctcaccaggctgccctaccgtgctcagtgctgcctcatggtgcaaagtggttgctgagctccagtcatcacttcagccagcagaaggaggaaggagaaggagaaagacgtgaccccaccatctagggcatttgctctccgaccccccagctaggcattgtgtgttttattaataaggaaaagaagagaacagttagcggaggcctcccgctgtccaccaggatgaactttggcaggccggacaggactctgggcttcccagttaatggagtgttgaactgggtggggatctaggggttctttaagtctcactctgtacttctcagaaggggaaactgatacccaagtcagtggctgagctgtggcccaggctcggcctctgcctgctgtcccagaagctctgtcctggcaccagctactggtgaaangcagagcttgcaagccctcgtgcc

SEQ ID NO: 3215 - DNA, 462 bp, Homo Sapiens
aggatcccgaacgcgtcaaatcgaagatacaggtgtagaatggtttcacagcatgcccaacctcatgaggcttgtggggtcagagcttgtgcagatgccagtcttctgccttccagtcttatagttgttacgctatagccttctgcagtggatggtaacgtggccaaaataagcctttggttttggagtattcgtaaaatgaaagtggtgccatctaccttaatgctgggggaatatatttcaacttgaactacaagtcttcattgctgaatgatatcttaaacaaaaaaaaggtatttggcctgaatattttcacagtggttctgtttgaaatgtaaaattccaatttctaaatgtaataccaagatttatcctaaattaacaataagcagggtttctaatagctttccatatatgtctgggtgtataatctccgatttggacgcgtccgggtaccgagct

SEQ ID NO: 3216 - DNA, 424 bp, Homo Sapiens
gctttcacacattgttgatagaaatgtgaattgatagactctttatgtaggtcattttatcagcctttactaaatgttaagccattctacttctaggaatctgccctacgaaaatgtttgtagaaatgtacaaaaatctcttacatgggtattcatttgtagtgtataaagtagttaaaaaaattacaaataacccaaatgattatcaatagaagattggttaaatcacaatatattagaggattctggggagatggcagagtacggcagcaccaggaatctatctccctacctcaacaacaattgcattggcagaatctatctgatgtaactattttggaactctggagtctattcaactcttgcagcttctacagtaggggtgtccagtgttttggcttccctgagtcacattggaagaaga

SEQ ID NO: 3217 - DNA, 510 bp, Homo Sapiens
gaggaacccttgcgaacgtagcaatcggatgaacgatcttggaaacatctctcgggactcctgggctgtgtacttgaaatagttctggggatgggccaggacatcaaacagagccttgataagtttcttatccttaagtatttcctgatggttctcagatgcatagagcctgccatctcgaactatgtcttcaatgagttcctggtagtcctcatcatatgtcacgtatgggacctggaaccctctagcgctgttcccttcattggacttgaactgaatccacagcttctttgacctggaggtgaaggcgatggggcgttcgtaggtctggcaggtttcatatgttgtcacagaattggatgaagaggttttccgcatcaccagatagtccccacagtcgtcctctatgggcaggaagatctcagggaccacgatcaggatgcggcgcttgggttgcccaggacgggatagtccaaggaaggggcctggtggtgctccacttgcagttct

SEQ ID NO: 3218 - DNA, 604 bp, Homo Sapiens
  misc_feature (414)..(414): n is a, c, g, or t
tttttttttttttttttgcagtttaatgtttaatgcccaattatctcaatacaaggaggcttacatggtgctcataaagacacgaccaggcgaaaccaggccggcaggaaatgacccgcatgagtcccagcacggggaccatgttctctcggttccagctcaccctcgaaaagtgccacaggcaaggttcttcagctcacccaggagccagcaggctggccaggcgtgtggccaccatggtcactgaggatcctcgtgggagaatagggttctgggacctcaggatacaatcacaagaaccagaaagctgcttccaaacaaccccagaaggttttcacttcacatgcgctaagccacacaacacctggatgctggggcacccaaaccctttccctaaaactctgaacactgcanaatggaggttgagaacacttggggagggagaacaaagtcagaaccatcctaaagccagtttttcaagcttgaccacctccctcttcctccctgaaggcacaccagccgatcccattactgtggaaaagggacaccctctggtctattctaacacctttaatgggaaaggagttaggagcatgtccctggc

SEQ ID NO: 3219 - DNA, 396 bp, Homo Sapiens
agcggccgcccttttttttttttttttttttttttttttggagtatatgttcagttagggtttattttggtatctgtcatagaaaacccccaaaaccagcagcttacacaaggtagaagttgagattggttctccccttctctctcccatttaagtaagtttgtgctgatatctggctctgccatcatcagggaaccaggctcctgtcatccctaaaggacggcactcgtctgtacacgtggcagtatggctgccagggctccagccatcacacccacattccaggaaataggaagggggaagaaagggtgtatttgtcttttaagaatccttctagaagtgtcatgtaacatttccacatacatttcactggccagaccttaactataagggcag

SEQ ID NO: 3220 - DNA, 525 bp, Homo Sapiens
gaaagaggggaagcaagcacacaccctgtggccagtcacggctgcccgctttccacacctgacctcttcagttcatcagtggggttcaccagcatcacccccatttttcatggggagaaactcagaagtggagagaacgtctgaggctacatagccagtacaaagtaggttttctgcttgaaaaacctgtttctatttctttttaaaaaatcatactgcataacagaatagtaaaaacaaaatgcgtgttaagacttacagggaaacagttgccgtttcattttaagtgagacttgctactctttttcatcgtctcttgaaagactgacagaaggaaaatatgacttatcagaaatctgttgtctgcatgcatggacctagtgttttcatcagctcccttcagcatcttgggacctctctaatcctgcctaatttgggactttttctgcaggattgtaatgtaaaatagttctttagctcttggagatttttaataatacgagttattaaaaaccaaaaaaaaaa

SEQ ID NO: 3221 - DNA, 337 bp, Homo Sapiens
ggtcgacagatgatagatagatagatgatagatacactagatagatgatagatagatagatagatagatagatagatagatagatagatagatagatagagatttattgcaaataattggtttacataattttgggccccagatggttaagtgctaaatttgtagggtaggctatcaggaagtgcaggctggaaacatgcaggagctgtccctgaagtccacaagtggaatttcttcttcatcatggaaacctcagttttgttcatacacctaaatacttcagtatgtctttcctaaaataaaaggcatccatttacctaaccagaaaaaaaaaaag

SEQ ID NO: 3222 - DNA, 462 bp, Homo Sapiens
  misc_feature (51)..(51): n is a, c, g, or t
  misc_feature (278)..(278): n is a, c, g, or t
  misc_feature (344)..(344): n is a, c, g, or t
agggggtttgggacgaccagggtcgcaccacgaggtttcgactaacacctngaaagactagctctggcttcagaagaacgacaaaagccggtttctcagtgagggaggggcctccgaagcccgcgagaccttaaaatgaacctgccttccagctgcaagtgataccccacccccatctgggaggtaacccgacccctagggagtcacacagtccccagggaaacttcatgggggccctgtccgggagtgacccgcccccgcccccgcgacgcgtctgngtcatcctctgttaagccgactacaagaaagaagtacccaagagaagcaaaacacacacccgaaangaatccaagtctccccgcaaaaagaagattcaccccttaagcatttgccggaaagaagaatcttacaattttatttttccgggggaaatccgttgggccccaagattaatcttgttta

SEQ ID NO: 3223 - DNA, 530 bp, Homo Sapiens
taaataaaatattgtagtcattaatggtgtgtttgaattgaagagataccaggagatagaggtgaagtgcagtacttttattctttaagaatatagtctttagccaggtgcagtggtgtgtgcctgtagtctcagctatttgagaggctgaggtgagaggatcacttgagttcaggagttcaagaccagcctgggcaacatagcaagtccctggctcaaaaaaaaaaaagtttcccattcatattaactccatcttttaaaaatgtcatgattacaaagtgaaaagatttggctttcttagaggctcaatcacagaggtgaaagtgaccttggaaatcatatactctatccccatgttacacagattagaaaaactgaggttatggcactgacttaggcacccccagcaaggcaacccagggactacaactggcaatcccaactcctgggctagggctttttctacctttttttgcattggcctcttaaagaggcaatgaatactaattcctggcatcagaaaaaaaaaa

SEQ ID NO: 3224 - DNA, 442 bp, Homo Sapiens
  misc_feature (78)..(78): n is a, c, g, or t
atccatgactgctcaaaacttaaaagtcctttgggggtcaaatggcatacggcagtcacctatgtgaacagctgcttntttgtggccgtgctggtgattctgatcggatgttacatagccatatccaggtacatccacaaatccagcaggcaattcataagtcagtcaagccgaaagcgaaaacataaccagagcatcagggttgttgtggctgtgttttttacctgctttctaccatatcacttgtgcagaattccttttacttttagtcacttagacaggcttttagatgaatctgcacaaaaaatcctatattactgcaaagaaattacacttttcttgtctgcgtgtaatgtttgcctggatccaataatttactttttccatgtgtaggtccattttcaagaaggctgttccaaaaaaatccaaatatcagaaccag

SEQ ID NO: 3225 - DNA, 597 bp, Homo Sapiens
ttgaatttaggtgacactatagaagagctatgacgtcgcatgcacgcgtacgtaagcttggatcctctagagcggccgcctactactactaaattcgcggccgcgtcgacctcttctctttaaacgcttctacggcctgtgcatttcccttcagatattatccaaactcatcgtcgtgaccttcaaaaccttgtggtctggcctctgttggcctccctgacctcccctcccaattctttctctgcccccggactccagtatcacagtctgtctctcagccacaatttattttgcccctagagtttgctgtgcttataacacttctttttcccatatgtcattcatttctcaagtctaagagtagcagttaccatcttagacgaccgttcccttacccctcccttagtcttgggttaagtcccagaatccttgaatttgccgttcctgatacataaatatgtaatttcttgtgtggcctgagactctctctctaaactaagggctttacaaaagcagagaccacatcattaactcagcacttaacccagagcctcacacacagcaggcaatcaataaaaatttgttgactgatcaaac

SEQ ID NO: 3226 - DNA, 355 bp, Homo Sapiens
  misc_feature (17)..(17): n is a, c, g, or t
  misc_feature (22)..(22): n is a, c, g, or t
  misc_feature (305)..(305): n is a, c, g, or t
  misc_feature (332)..(332): n is a, c, g, or t
gtcctccccctcccctngaagntttgtcccagccccctacccactgggacctctgtttgtagtcagagtttgtttggctacttcctttgcaacccccacccccaacctttttctgcatggtagatgaaaaattgaaagtacctctgattggtccctttccacaaccaatgaggctggtcatgggccaagtcttcatttgcataggagtataactttgtaacttcacttcagccttttcccaatcaatcagagatttgcatagggtgtaactttgaaacttgcttcagcctctgataggtcccctncctcaaccaatcagactgattgtgggnactacttcatttacaagggtgta

SEQ ID NO: 3227 - DNA, 488 bp, Homo Sapiens
  misc_feature (155)..(155): n is a, c, g, or t
  misc_feature (178)..(178): n is a, c, g, or t
  misc_feature (387)..(387): n is a, c, g, or t
cggcagagcgcgctggtgctgatgcaggatggctgagcgcgcaggagcccgggaggtctgagccgggcgaggctcgctccctgcgcatcgcctcctccgcccgccgcgtggtcgcgggcaggtgggccggggggcgctgggcaggggcggggcanggccagggcaggccggtctgcanccggaggggccggagcggaaaaccctgccaccttcccgggctcggagcgggcggggctgctcagccggccgggctcgcgatgacctgctgagaagcgtcgtcggaggctgcaggaggcggcctagctgtgggcggtgcagctcgcggcctcctccctcgtcgttcccggcccctggcccccacccatccccgtgcgggctgcctaccgncggccgagatggcggatgcagcccgatgcatgatcaaagtgatgtgccggttcctgcccctcaacgaagcggagatcctccgggggacaaattcattctta

SEQ ID NO: 3228 - DNA, 371 bp, Homo Sapiens
  misc_feature (294)..(294): n is a, c, g, or t
  misc_feature (355)..(355): n is a, c, g, or t
  misc_feature (368)..(368): n is a, c, g, or t
gaaagccctggcagatacaaagttcctcagtatttaaggagaaggatctcttccatgtccccttgacatgactgtggctattgccaaacctcagcttgagaacatcatataatactgagagcggaagatttttttaaagagatatggtagtttaaataggtttgtttaaagaactcttgggaaatttcttaacaaattgtaattgtttttataaaccttcctacagagttgtgtaccattcatcatcaccatcatttaatatctgtaagtgcccaggaaggtacaaggtgctantacagccgtttaaacaccccctccctggcaactgttttaaaaatttggaattaggtttttngccatccaaccantgc

SEQ ID NO: 3229 - DNA, 553 bp, Homo Sapiens
ggcacgaggctgcacgcctgcgacgactgtggtcgccgctttgcctacccctcactgctggccagccaccggcgcgtgcactcgggcgagcggccctatgcctgcgacctttgctccaagcgttttgctcagtggagccacctggcccagcaccagctgctgcacacgggggagaagcctttcccctgcctcgagtgtggccggtgcttccgccagaggtggtctctggctgtccacaagtgtagccccaaggccccaaactgtagccctagatctgctatcgggggctccagtcagaggggcaacgcccattagaaggggaaggactgcctacgttcatttcattttatggagggtcccagaaaagggaaggaggagccccaggtcatacagggcagagtcagaactaaacccgggtctcctgctgcacagagctgaactttgtatcttgcaatgcgctggctgcctccctgtgcgtgtctggaacagtcccattaggagaggtgacgtcatttgcttaaagttttccaagctaccctatcctaaaatagtt

SEQ ID NO: 3230 - DNA, 452 bp, Homo Sapiens
  misc_feature (3)..(3): n is a, c, g, or t
  misc_feature (378)..(378): n is a, c, g, or t
  misc_feature (381)..(381): n is a, c, g, or t
  misc_feature (435)..(435): n is a, c, g, or t
gangaaatcagacgcaccggcctttattattatatatgctacatctgttgagtatttttaaaataccaataagaggacttgtttatttcataaaccacttcttccctctctttcaaagaaaatacattattaccatacttttacattagtctgagaatttttgctaaatatgattaagtattccaaaatataatggcgtcattattcttgacttttttagagaatatacatcttaagactgtattagttctcagagcaaggcatcatctactcccctgcacctgagagtctggccccagattccagatgtgcggacagcccatgaccgaggtgcacacagtgcctcttgaataggaaggtcagccagtgaggcggcanatnaacttgcaggatggacttatatcttaccatctcttcctgctaccaaaataaaanaataaattgaaagacaa

SEQ ID NO: 3231 - DNA, 474 bp, Homo Sapiens
ggacagcatttcatttttttatgtaactgtagaaagccttgatcaagataaaaatagggatgacttatcagaaactgaagaattttcttaggaaagcaaagtttactgaaggataccttcattccagccatgatgagcatctgtcttctcaggcaatcatgatgaagctccagggacagtataacccatctctcccactcatccctgagccttggtcctggactgaatgtggttagaggttgtggaaataaaaaaaagaaccaaaataagaacacctcttcataaaagccaagctcagagactggtcctcttttgcttaggtacaacaggagcaggaaggatcaacattcttgaaagcataccttctattcatttggcttttttgacttggggcgccagtgtagagctgagcactccactgccctttctccactcacaaatgtctgcataggtacacgtccggcacttccaagc

SEQ ID NO: 3232 - DNA, 1733 bp, Homo Sapiens
ggccttctccaggcagttccttctagacctggggacctgtgcccgaggaccttagactgatgggtgcccagctctgctttgaggccatacagaaggggtttcaccatgttagccaggttggtcgcgatctcctgacctcgtgatccacccgcctcggcctcccaaagtgctgggattacaggcgtgagccaccgcacccggccttgaggacctggtctttcagcaccagctattggggttgtgcatctctggacctaccctcccagacgccaaggcgccccgagaggcacttcgcttccatgccgaggccaagggcgcacaggtgcgtctggacacgcgtggctgcatcgcgcacaggcgcaccacgttccacgacggcatcgtgttcagccagcggccggtgcgcctgggcgagcgtgtggcgctgcgagtgctgcgggaggagagcggctggtgcggcggcctccgcgtgggcttcacgcgcctggaccccgcgtgcgtgtccgtgcccagcctgccgcccttcctgtgccccgacctggaggagcagagcccgacgtgggcggccgtgctgcctgagggctgcgcgctcactggggacttggtccgcttctgggtggaccgccgcggctgcctcttcgccaaggtcaacgccggctgccggctcctgctgcgtgagggcgtgcccgtcggcgccccgctctgggccgtgatggacgtgtatgggaccactaaggccatcgagctgctggatcccacagccagccggctcccaacacccatgccatgggacctcagcaacaaggctgtgcctgagcccaaaggctttgggccaaaagatttggctctgcctactggaaacctaaaagcaacctggcatctctgccttcgagagcatttgcctactctccacaccaggagaggagtgtgccatctgcttctatcacgctgccaacacccgccttgtgccctgcggccacacatacttctgcagatactgtgcctggcgggtcttcagcgatacggccaagtgccctgtgtgccgctggcagatagaggcggtagcccctgcgcagggccctcctgctctgagggttgaggaaggctcatgaaaggaggcttcccagtatgagtggcagcccgggcctagatctgagtctggcccctgcagagaggaaggaggcgcagccctaccttctttctggggaagagtcagaaaggctgattagcaagaggtgcggcagagagaggaaggcagggaggtgctgtctgctgcctccacctgttccccaacaggatagcaaggaaaaacccctctttctgtccatgccagaactatccttctgatggggtgctttgtttagagatggggtggcccaatccccaatcagttttacatctgagggagttcaggtatctgttgtgactggtgaagccctgtacctcctgggtattgaagaacctggacttgaagcaggaggtatctgcaaggaatgtataaagttccacatggaagctgggttgcctcccacaagtccccagtagagtggatctgtagttacccgccctgcctccctttcagggtggtcatgaggtcccagagagaccatgcatctgaagatgatttaaaacatgaaagtgtattgttgtcactgtggtaatttccttgccagtttctgagatatcaaaataaagtttgtgtttcctgaaaaaaaaaaaaaaaaaaaaaaaaa

SEQ ID NO: 3233 - DNA, 578 bp, Homo Sapiens
cacaagaaagtgctgcttacattgttgttttgtgttatttagtgatttgttcagcgctcatctcttccaccagactgcgcttcctgaggacagggaccttaaagcacctcacatagggtgcgcgtctggtacactgtcgccgagtaccagacaaccagtgtctcacacgggggaagacgatgaagacagcaatggcatccttgggaagatgggcaggagaccccatgacacctggcacctgggcctaagctgggaggccagcggcgtccccaggagaccacggcccaggctgggagcttgaccggccagacgcccgtgggtgggcctgggccctcccgcctgggagcctccagtgtggcgcctggctctgggtgggtaacaggagctacaggccagcaatgcccttcctgtcctcggcctggctcaaggactgggtgcagagggcatcagcgatgccaggcctagaatgtgcctcaccccgacagtggccagcacggactgtgggctacagagttgcttcagcctgagcactcagcctgaatttggacataacatcaactgaattaagctcagaagta

SEQ ID NO: 3234 - DNA, 1035 bp, Homo Sapiens
ggcgacgagtcagtatttcgacttcgcgcagggcggcggcccgcagtacagcaccctcctggaggacgggactttggtctggttattccccgctgctgtgacagcgcccatgacagcagctggtccccactggcacccaggaagtatttatccaatgactcaatgaatctgccgccggatcgcccgggactgctttcactttctgtcagtccagaagtggagaccactcccccggcccttgcatctgggcttccttgtgccctgccttggacagttggctgcagtggaagtgacgctgtgactgccctgtgcccaagcttaagaggccttgcctgcatctgctccatcttatgggaccctgcctggtgaaggacccaaggctggcctgctggaggaggagatataaggagaagagtcacagtgccccatccaacaggtagctgccctccaggggcagagaagcccagccatggtcaggagagccacccagctgaggcccacctccaccaggattgccacccagctgaaccccacctcagccgggagagccacccagctgagccccatctggccaggagagccatccagctgagccccacctctgccaggattgccacccagctgagccccgccttggccaggagagccacccagctgagccccgccttggccagaagagccacccagctgagccccgccttggccagaagagccacccagctgagcaccgccttggccagaagaggcacccagctgagccccgcctggccaggagagctgcccagctgatccccgcctgcagaatcacaagtgaaataaatgattgttgctttgagtcagaggtcagcggaccttttctgtaaaaagccacatagtaaatatctttggctttgtgagccacaccatgtctgtcacattagtgaaccctgctattgtattgcaagatgagccgtggacaatgtgtcatccagtgggcttggctgtgtgccaataaaactttatttttttggacactgaaaaaaaaaaaaaaaaaaa

SEQ ID NO: 3235 - DNA, 981 bp, Homo Sapiens
cgctttgctgctgctgagagttacctgaggcacttgttaaaaattcagcctcccaggtccctcccctcggagaggctgattcactgggtctgggaaggagcctggggattttaatttttcacaagtgccccagatgattctcatcaccaagcaaattttggaaatgctgttcaacagcgcccttaaattggaaacatctttgcagctcgttttattgaaattcataatcaggggtgtcctctagctcccacggtctccagagcagcaaggccggctatggagctgccgtcgtgtgaccacagtgtgatgtctcagaagggctctgggtgggctgagcatctgggctgtgccctggctctgcttttcaccctggacaaagtcgctgtggacttcaatttcttcacctctaaaatgggggacttggaccaggtagattgctgagctcactaccaggttcaaagttcaatgacaaactcagtttactgaggtttgagagaacatccctccaggggagcctgggagctgctctcccagtctaagcatgtagatatcatcgtttgccttttgtgtgtgtgtgtcccttatttgataaaaagatgttttgagttgttttttttttaagcactcacttgtaattttagtttttaaacccaagtccctctaactttgcctttgataccaaacaattcaaaagttggatctgagtttggagaaagatatttccaacctaagtgggtattattttgaaaccagatttttaatttaatagcctatatttgtagtctgttggataggtgtttccaaagtgtgtcttctcaagtgaaaacgcaactctaggtttcaagtactccttttctccgatcctgtggtacttgaatatccaaaaaccctgcactttgaacaatcagctgttgctatctggaactaaacagaactatgagtaaaattgcctggatactttaaaaaaaaaaaaaaaaaaaa

SEQ ID NO: 3236 - DNA, 425 bp, Homo Sapiens
  misc_feature (342)..(342): n is a, c, g, or t
ttttttttttttttttttttttttttttttttttttttaggaattaaaattttttatttaaatatttaaatctctcttggcacaccaggatttgggggggctctgaggggagacctgctggggttaggccactagcctggcctcactcttcccttcctgggtgccccagggcaaccggagggagcccctgtcactcccgtgctcccacctcccacccaccagggggactcagcctttgtttaacacaccaggctcaggatagggcaaacactaggtaagagggagttgccataatcacccccagtttgggggcgggcaaacaggcaaagcggtggccaccantgaaagggaaacccacggtggggttggtcctctggccgcagctcaactttggcaatgcgcaaacccccgccagcccatcccat

SEQ ID NO: 3237 - DNA, 200 bp, Homo Sapiens
  misc_feature (88)..(88): n is a, c, g, or t
tttttttttttttttttttttttgcaacaacacacttggaccctctgggctggggtttgactgacctcaagctgaaataaggggaccnataccagctgtgataacccatgggagagcctaggcaggaccagtggggcccaaatcttgctgctcttgcacttttaggcactgcccttgcagactcacctttctccacctgc

SEQ ID NO: 3238 - DNA, 1410 bp, Homo Sapiens
gagctagctttgcaatatggcggccgaggcggacggaccgcttaaacggctgctcgtgccgattcttttacctgagaaatgctacgaccaacttttcgttcagtgggacttgcttcacgtcccctgcctcaagattctcctcagcaaaggcctggggctgggcattgtggctggctcacttctagtaaagctgccccaggtgtttaaaatccggggagccaagagtgctgaagggttgagtctccagtctgtaatgctggagctagtggcattgactgggaccatggtctacagcatcactaacaacttcccattcagctcttggggtgaagccttattcctgatgctccagacgatcaccatctgcttcctggtcatgcactacagaggacagactgtgaaaggtgtcgctttcctcgcttgctacggcctggtcctgctggtgcttctctcacctctgacgcccttgactgtagtcaccctgctccaggcctccaatgtgcctgctgtggtggtggggaggcttctccaggcagccaccaactaccacaacgggtacacaggccagctctcagccatcacagtcttcctgctgtttgggggctccctggcccgaatcttcacttccattcaggaaaccggagatcccctgatggctgggacctttgtggtctcctctctctgcaacggcctcatcgccgcccagctgctcttctactggaatgcaaagcctccccacaagcagaaaaaggcgcagtagagccagctactggagtcattccgtttccactcattcacccaacctcagggttctccccatctgagccagcctgctggtgtgacttactcatcctccattcctctgcacttgcagactttctgagccagggttttcttttagtggaaacaaatggttgatggatccagatccttagaaaaggagaggatgggggtagagtctcccaagccaaaattttgacatttgagtgctttcgtaagccctgtacatgtactattaattcagtcattcagccaagcctcctcctctagcagcaatttccagctgtttaacactatcctgggcaaatgttttaccctgtcctccagcctccctgcttcccttctggccctggaagactgagtctggacggcagagtggagggactgggaggctgtggctgcctccctccctcagcccggctgggactgtctcccggaccccagtgctggggtgggggaagggggacggagaatgactcaggcagggccccagggtggggtgaggaggttcctgctctggcaggtctaggcggaagggagtggagatggggctggttgctgctgcagtgaggggaacagatgggacaataaagactggagactcagttgaataatgcaaaaaaaaaaaaa

SEQ ID NO: 3239 - DNA, 331 bp, Homo Sapiens
  misc_feature (289)..(289): n is a, c, g, or t
  misc_feature (295)..(295): n is a, c, g, or t
  misc_feature (311)..(311): n is a, c, g, or t
  misc_feature (326)..(326): n is a, c, g, or t
aaaaggtgacaagatgggagataattgggtgactattagaaaccaatgttaactacaagaattcaaagtccaggtgtagcccagaacgaggtttcttccatttggtgcctcccctgtcttctggggcctcagagtctgtccttgtcccctctgttgtccacttgtgacagcagacggggagagagaggtagtggagggtcacaaggggtctcaagggccagaccttcaagtgggcaaacatcatttcttgccctctttccatttgcccagaattttccactgggcccantgttantaccagggagagattnggggtaggggcaggntgagg

SEQ ID NO: 3240 - DNA, 466 bp, Homo Sapiens
ccgctgctgtgagcccgggagccggagtgctagcggcagagacattgttcttgccggctccctacggtgccgtgtgtgcgtgagagaagaccagtctttcctctagcatttgacattgtgcagcaaagaaatggttatggagaagcccagtccgctgcttgtagggcgggagtttgtgaggcaatattatactttgctgaataaagctccggaatatttacacaggttttatggcaggaattcttcctatgttcatggtggagtagatgctagtggaaagccccaggaagctgtttatggccaaaatgatatacaccacaaagtattatctctgaacttcagtgaatgtcatactaaaattcgtcatgtggatgctcatgcaaccttgagtgatggagtagttgtccaggtcatgggtttgctgtctaacagtggacaaccagaaagaaagtttatgcaaaccttt

SEQ ID NO: 3241 - DNA, 6722 bp, Homo Sapiens
ggcacggggacatcaggatatcctgagtgtgtctgcagatggtggcatcgtgatgggctattctagtggcgtcaccaatgggctgaatgatgccagcgactccatctacacgaaaggcaccccggagattgctttctggggaagcaatgctggggtgaaaacaacacggctagaagctcattctgaaatggggagcactgaaattttggaaaaggagaccccagaaaatctcagtaatggtaccagcagcaatgtggaagcagccaaaaggttggccaaacgcctttatcagctggacagattcaaaagatcagatgttgcaaaacaccttggcaagaacaacgaatttagcaaactagttgcagaagaatatctgaagttttttgattttacaggaatgacgctggatcagtcactcaggtatttctttaaagcattctctcttgtgggagaaactcaagaacgagagagagttttaatacacttctccaatagatatttttattgtaacccagataccattgcttcacaagatggagtccattgccttacctgtgcaataatgcttcttaataccgatctacatggccacgtgaatattggaaagaagatgacctgtcaggagttcattgcaaatctgcaaggggtaaatgagggtgttgatttctccaaggatctgctgaaagctctgtacaactcaatcaagaatgagaagcttgaatgggcagtagatgatgaagagaaaaaaaagtctccctcagaaagtactgaggagaaagctaacggaacacatccaaagaccatcagtcgtattggaagtactactaacccatttttggacattcctcatgatccaaatgctgctgtgtacaaaagtggattcttggctcggaaaattcatgcagatatggatggaaagaagactccaagaggaaaacgaggatggaaaaccttttatgctgtactgaagggaacagttctttacttgcaaaaggatgaatacaagccagaaaaggccttgtctgaagaggacttgaaaaacgctgtgagtgtgcaccacgcattggcatccaaggccacggactatgagaagaaaccaaacgtgtttaaacttaaaactgccgactggagggtcttgctttttcaaactcagagcccagaggaaatgcaagggtggataaacaaaatcaattgtgtggcagctgtattttctgcaccaccatttccagcagcaatcggctctcagaagaagtttagccgcccacttctgcctgccactacaacaaaactgtctcaggaggagcaactgaagtcacatgaaagtaagctgaagcagatcaccaccgagctggccgagcaccgctcatatccccccgacaagaaggtcaaagccaaggacgtcgatgagtacaaactgaaagaccactatctggagtttgagaaaacccgctatgaaatgtatgtcagcattctcaaggaaggaggcaaagagctactgagtaacgatgaaagcgaggctgcaggactgaagaagtcgcactcgagtccttcgctgaacccggatacttctccaatcactgccaaagtcaagcgtaacgtgtcagagaggaaggatcaccgacctgaaacaccaagcattaagcaaaaagttacttagagtccatctgcggccaggaagtgctggtcatggagcaaaatagggtttttcaagatctttctggtaatccgtgaatatatttaaaaaaaaaaaagtctgtgacaaaacggtgcattagtaattttttctattgtatatttttgttagtttctgtacagattgtctttgctcttgatttcttttgctttgatgatttttgcaacttgatagctaatgcaccttttctgtgaggaggaggggatcgtgatttcagaatgaattatgtatcccttctcttttggttttctcttgtttgcagtctgctcagttgttttatgtattctcatatcaactgttaaacttttttttaaggttaaagaatttaatccattgtgaaacacttaactggacaaactgtagttttagtaaattctagctggagttaatatacgcctttatatgtgaaatcttgcccagtcacagaggtagaattgagcactcacagatgctccagtaagaatcacagtgctgggaatctagttgctccaatatgaggcagcttcatgtgcagcttagcacttgttgttgagatcggaccctgctggaagcagggaaaagaagcgtgaagatcgtaggattgagaacttagggaagcacattagcttgcttgaagtgctgattccatttcagccaagcaagggaaagaggaagtggagtcattttgcctttgaaggctgaggaaagattgatacccagttaattttgtttgctaaaggatgggggcaataatcggcccttgaggagctgcagcagtaggcatgtgctcagtctgcaggaattgttacctcactcccacagggtctagactagaaatccatcatctctatcgttgatatccttccatccaggaatagatttttcttactctacatatgtgtgtgtgcgtgcgtgtgtgtgcgtgtgtgggcatggggttgtgtcctggttgtgatattgaggtcttccttcctaacaaattaatactaaaatgaaacagcttttcttgtgtccttaagacaaaataaggaaggaaaacgtagctgcagttgtccacgatggatattggttctttaaaatatatctgaaagtagtagtcagaatgaattatggttggaaaactgaggaatcttctggttgcaggtgcaaagtgactttgtttattcttgtctcagtctccttgatagccacttcactctgctactactcaactttctcctaaaaatacttcatctattttcagtcctttctttctgtctactcaaaatggttctattaactttgcagtcatgagcttgttccagttacagtccctttgaagttcagggtgataaacagaatattcttctgtagaggaagagaaaggagtgaaagtttagcccactgagacctagagctttgtgatttcctaaccttgaaactctgtaatccctaaagttaaaatctccgcaagtggcacaacttcagaactaatagtatcactttgatttttctttttcctcccttagaaagtttctctagttctatagtttatttgttgaaggtactatgaccaaagaatcagctgctctacaggaatagcatggttccagtgaattagagaaaacctgctgtaaagccatggtagtgtctaagtggtatgttattatgatgtactagcatttatttacagaattatttattaacgtttacttccttcccctctgtaaatgtccatgactattgcccagagaaggcttacccctctctagggttgcagttgctttctttgtaataagtattttgccacacctgtaaaaaaaaaaaacctcacttttaactctctgccttgtttgggtaaaggcagtaactaagtttatgtttcagaactgcaaaacaaacaggatagttaccaatatggcccatgtgtcagattgatttttgtagcctctcactgaatccaacatatccacaagcaagttatctgtctttctacctgataatctaaattatcaggatatttgttttctgcctaaatgtttatactaagccgaggggagagaggtacctagaccatgtcatctacgagcttcagtaactaaagaaaaaggaacttccctgagtggcttgaatgtgtttgcccacagtctatatctatgtatatagaatgtctgtatgtattttacttatttaatatacattgaatggtaccttgctacagtatttctgacatttagagtagtgttgaaatactcggctagcatcagcaccactatagcactgtccgtgtcatatgagtcactaatattaactccagggacttctggataggctaatagatcattggatacgaagggctcttttgaagcttcagtataccatgtttgcatagtttatctttaaaaacaactttaaaggttcttttgtgagccaggatctcagactgccgtagcatgatgctgtccatctttagcgcatgggctgagaacacctcttccctgaggcttctgaaggttgctgtctgtcatgagtgcatgaaggaggccaagagtttatgctatgggaggaaccagtcactgatttgcctagattctgagagtctggcccatagccaaccacattttcctttgggataatttatttcctgtggcatctagccagaagaaattgaggatgtttcctttcacagctgctccaagcctgttgcccaattcacggtacaagggagcaccccttccctttcctctgaaggtacgccacccacctccgtcgcccacctcagcgcccaggagccttgggacttccttccatatgataaatcattcttcttcacgtcaatacacttcatattaatttctagtacagaaaatcttgacagctatcagaatgccttggtcatagtgttgttgcaaaattgaccatacaggtggcccatgtataaaatctgaattttaggggtttgtccccacctcgcatgctggcttttacagggaggtgtctgggattcctcattagcaatcaaaacttaattactgggatgcagagtccttactttatcgccagcccgtaggcatttctgaagtgcacttttttgaaacatcattttgctaactctcagcagtgtctaattaaactgagcaatacttttgtgaattttaattaatctcagcaaaaccatgatgggagagagtcctctgatggaaatgtagtccctggattatgtgtaacctttttattgctcttagatgcagaggatagaaagcattttttggtgcagtggtcttgtggcaaacacaagaccctctatgcgtctccaactgttatcctaatctagaaaatgaggactggcccctgggcaaaagtgacatgaggaatttactctggaagaggaaaatctgggtggctttccaaggctaagataggtttgtatttcaccctgtggccaagctacagaacttctgagattgtggaagaatttttgcaaccagcagggaaagaggcctcttactgcctaaacacaaagttacactgagcttttctactgtcctttgcctattgctccctctatcatgtaaagatctgggaaggatgagaggcagggcctgcttgtcatgagctgcactcttttctttttaactaatcattgacaattggaagaaaattgacgttaaagaagtttctccattgtcttactaacaaaaccttttgggtttcattaattgtccttgaaattgagttcctttggcatttttccttgcagtcatcagttaagcatgttgcatcctgaattcacagaagtttagctttgcaggtttgaatctctgtaatttaactcccgtggacttggtcgagttttcagcaggttgggagccacctctcttcatttcagcagtgagtcatcccttgacttttcaaatgacagaattttttccaattgtaaaattagcactgtaaaacaaagaaccaaagtggcatcctaagagttgttaaacctgaagtctagtttatgaggaattgtccaagttggagtttaaatagtatctgcttttgtctcaaagcatctaagttattctgacagaaaatggtaagtcagctttgcaggcagatgcgcctctgggcctcctaccttgctccacagctttctggccatcttgtctcccaggccatgccactgctctgccacatgtcagcaaatttctttccaccagtcttatagcatcttacatgatcaaatcatcacagaataaccccgtgatagattattgatagcaatagagaggggcggctttgtcactgatttttctctcagattccttttccatctctcatccataaaggaaggactgaaatccaaaggcattctccttttgtacctacagtatccagaacccacgtgggcagccttctgcttatgacaataattggcccattgcatgcagagagaatgtcttcatagagagaatgtcattaaatacttgaatctgcatgacagtttgacttgaatgcaacagcaggaaaattttgcaagttacataattgtatatacagtaggttttcttaagtctcttcggttcatcctttgtaatttgtgtgtgtatctgtagtattgcaggcttttggagactattcttacaggcagtatgtcagtcatcaaagaaaatgctgtcacctgccattgttgtatttgtgggtatttatagttgtatgtatgtaaatgcatcagtgtgtagattgcatatcagtgtatggtacatgtacatcaaaattatttttgtccttaatcagtgtgatatgaaaagcaagtacaacctcataggactgattatataatgaagttgttgagagtatatatagtggtattgttttattaaacttaaactcaaataatattttgattaaaatttttaataagactttatgctagaaaattctttgagctttgaatcaccagggcaaaaatgactttcaactaaccttgtgaatcttttgcagtgtactgtgtgcaataccaagggcatagctccctgtaatttgggaaatacagaaagaaaagaaaaaaaaaaaaaaaaaa

SEQ ID NO: 3242 - DNA, 434 bp, Homo Sapiens
ttttttttttttttgggagtgatgtattcttttattgaagcaagtatgtccagtcacaccaaaactgacgtcctgcattatggtacagcttcatactcagagttcatctcaaataccaaaacatcaaatcagggtatgtatcaaattgggaaaataaagtagcagacagacactgtttcaagtaggtactagaactgatcacccgtgaagtgcacgtggatgtgtacagaaaccgttctaaggctgtattccaaatatatattctcaagttttaagcctttctcatctcaaagacataaacaaagcaatatgtactatcaatatacaatctgtactagctagaacctcagaaagtgcaaacacactgtgacaatacagtggaactattcctgctccacccaggaccagaggcatgggcagcgggcccagggctg

SEQ ID NO: 3243 - DNA, 330 bp, Homo Sapiens
tttttttttttttttttgctttcggtgaattaaaatgtatttggtgccagtggtgctgaacatagaataaaaaacagaaaaagggcccagacagggacatccaggctggaggttggagtggagcacagtcagatgtattcacttttctagcatgggtttcaaagtgcgtaaggggagaaaacgcatcatggattgtgctgtgcatcctggacaccgtgcgaggtgctcatagctgtgatcttgtctcccacaactctcttgggtgacagacatccactgtccacattttatagacaaggagaaagggaagtcaaatgtctcctcgtgccg

SEQ ID NO: 3244 - DNA, 441 bp, Homo Sapiens
tttttttcaggcagactattgctgcttcaatttttttattttttatttttgctgttcatatctactctgcatgcatagaaggaatcgatacctgaaatttcctaaaggtcttttactcagtccccacaaaaaagctctgatgtggtgtgtgtaaaggggtaggagtgggagaatgaagtgggtagagacggacacaaagaaatgtcaaaatacaggacactgaaggtttggagccggggccagtggcagcagccaaagttacaaatatcgggaaggtctgagagtttacagtgcagagcatgtcctgtgctatcatatgcggatgacaaaatagccgaatacacaaatctttccacgcttgtgctgaaagatgtaaccatcaagcgccaggcggttgccatgggaacccggggctgtggggagtcggccagaattcttgat

SEQ ID NO: 3245 - DNA, 438 bp, Homo Sapiens
ctccacgcagcacaaaggacactcgccggcaaactttcctcgcttctgacccgggccgagccgggaactcagcgccagctctgttcctggcggggctgaggcttccctcacattccaggccacctggcaaacgtcctgaggctgccactccttctgggctcaaggctcacgggctgaggtctgtccccgcgtggagctcaaggctcacgggctgaggtctgtccccgcgtggagctcaaggctcacgggctgaggtctgtccccgcgtggagctcaaggctcacgggctgaggtctgtccccgcgtggagctcaaggctcacgggctgaggtctgtccccgcgtggaccgccgagagttcggtagatccttcccaaggctctgacttcaatactttcagtgccttgtcaattataccccttgcccctttctcttacca

SEQ ID NO: 3246 - DNA, 464 bp, Homo Sapiens
  misc_feature (434)..(434): n is a, c, g, or t
ctgtaatgcaaaataaatatatacaattcaagattcttttctcttctaaaaaggtacagatagtgtgagctgaacatcagtaggaaaattatttcagaatctggatgtataataaataaacattattgtatatcatgttttcaaagttctaagagaccgggaagccacaaaacatagagttagatgggtaaaaaatgattgtgaaaagtactgggaaatatgattgtatgaaatttgaaaaaaaaaattcacaatccctaaattgatctcaaatcttggagggacatgaagcattatagaaccatgtctctgttttgcaaccaaaaagttattccattttaagtatcctgtacatttctgtttgcttctgtaaacttgcaaaagaagtggtgagagattgctgatgtgtggggacttgactgagcagacaacanggatgtttctttttctcggcgggttcagtg

SEQ ID NO: 3247 - DNA, 463 bp, Homo Sapiens
  misc_feature (437)..(437): n is a, c, g, or t
tttttaacacattcccatcacctgagcataaatgccagctcccatccacagcccgaagtgcccagcacggccctgccctctgccctggtctatggtctcccctcttaaatgccagcaccatccacagcccacagtgcccagcacggccctgccctctgccctgccctctgctgtggcctaaggtctctccccggtgccgttcccttcctgacggacaggcctctgtctgttcctcaaaccacacaggctcaggcctcactccaggcctttgcgcttctgtgccctctgcctagggtgcctttcccgggctctgcatcctcctctcaacccactgagctccagcctgctggtcgcccctcaggtggatgaacacacggtgtcctctcgccccaccagcttttgcacaggctcttctctgtgccagacaaacaccctantcgggtttactctctaaataccattc

SEQ ID NO: 3248 - DNA, 600 bp, Homo Sapiens
  misc_feature (403)..(403): n is a, c, g, or t
acatctatgtgacactatagaagagctatgacgtcgcatgcacgcgtacgtaagcttggatcctctagagcggcgcctactactactaaattcgcggccgcgtcgacgtagtcgtgccgggttagatgcagggacagagcacggaggagtcggtggaggctgctgccctcaagtttcctgaacttgaaggggtttagaatgtgccacggtggcgtgaaaattattttgagcagaaggcatttgaattcctgaaatttcttgtctgctgaaaagcagagcttcccaaaagatctcaaaagaactcagttgtcataaatcccttcttgggaaggaactaggaaagattgacttgggccaggcgcagtggtccacgcctgtaattccagcactttgggaggcctangcaagtggatcatctgagcccaggagttggagaccagcccgggcaacatggtgagatcctctctctattaaaaaaaaaaaaaaaaaagtcgacgcggccgcgaatttagtagtagtcgacccgggaattccggaccggtacctgcaggcgtaccagctttccctatagtgagtcgtattagagcttggcgtaatcat

SEQ ID NO: 3249 - DNA, 535 bp, Homo Sapiens
  misc_feature (97)..(97): n is a, c, g, or t
  misc_feature (322)..(322): n is a, c, g, or t
tttttttttttttttttacaatttaaacaagaggattcactggtttgaaaaaaaggtttgaaaatcaggaaagctaaacaaaagtcattttacatantggagaaactgagacccatatgtgtaaatggcttcccaaggtcacagtggtgtcagtggcagagctggtactgtaccaggctgcctggatcatagactgatgtttttgccaagaccagccgaaatgttcctctcaggaggtggcaggtgggggtggagtgccaggaaggcactgtccaaagaagtgggttaaggtcacagcctcccggctcccaaggaccccctngagaacagttgctttggaaaggtcactcagatgtgaaccagaggcttgaggttttggagtggaaaggggcagggtaaggaagaatagagtaggaggagggcgggggacagggattcatcctccaggttcctcacacccccactgggagcagcgcccccaccccaagcacctgatttcaaagtctcccctccactgaagggaggggcaaaggga

SEQ ID NO: 3250 - DNA, 551 bp, Homo Sapiens
ggcacgaggcgagcgggaagcgccgggcgagcccactgtgcggccgtcgtgggggaagcgaaggttcctgattccacctacctcctaagtgaaggcttccgtccctggagaggaggcggcgccctgtatcggccttcgtcctccgcgggtgtgctagcgttgggacggtcctttgttgccgcgaggggtaggagtgggcgtggcggagccagctccgttcggaacactcccgggccgacccgactcgctcatcctgcaggagctgcggcgccaagatgagtggagaggagaacccagccagcaagcccacgccggtgcaggacgtacagggcgacgggcgctggatgtccctgcaccatcggttcgtggctgacagcaaagataaggaacccgaagtcgtcttcatcggggactccttggtccagctcatgcaccagtgcgagatctggcgcgagctcttctctcctctgcatgcacttaactttggcattggtggtgacggcacacagcatgtactgtggcgggtggagaatggggagctggaacacatc

SEQ ID NO: 3251 - DNA, 189 bp, Homo Sapiens
  misc_feature (27)..(27): n is a, c, g, or t
gcgggattgaattcgtgacgtgtcganttcgggacgtggagcagcttccaaaatgtagatacactccttgtttggtggatatgagtcaggataatttggcgaagcaaaatgacatccattgctggttcgaacccaaatgccacactgggttgcaggaatatgcttgattccaatattttgtccattacg

SEQ ID NO: 3252 - DNA, 3531 bp, Homo Sapiens
aaaaacttattagagctttctcaacctgcagccctcatctccgccggcgagtagggccaggtgttgggagctcccacgtgggacaagatggtgtcttcggcgcagatgggcttcaacctgcaggctctcctggagcagctcagccaggatgagttgagcaagttcaagtatctgatcacgaccttctccctggcacacgagctccagaagatcccccacaaggaggtagacaaggctgatgggaagcaactggtagaaatcctcaccacccattgtgacagctactgggtggagatggcgagcctccaggtctttgaaaagatgcaccgaatggatctgtctgagagagcaaaggatgaagtcagagaagcagctttgaaatcctttaataaaaggaaacctctatcattagggataacacggaaagaacgaccacctctagacgtggacgaaatgctggagcgcttcaaaacagaagcacaagcgtttacagaaacgaaaggaaatgtcatctgcctgggtaaagaagtctttaaaggaaaaaagccagacaaagacaataggtgcaggtatatattgaagacgaagttccgggagatgtggaagagctggcctggagatagcaaagaggtccaggttatggctgagagatacaagatgctgatcccattcagcaaccccagggtgcttcccgggcccttctcatacacggtggtgctgtatggtcctgcaggccttgggaaaaccacgctggcccagaaactaatgctagactgggcagaggacaacctcatccacaaattcaaatatgcgttctacctcagctgcagggagctcagccgcctgggcccgtgcagttttgcagagctggtcttcagggactggcctgaattgcaggatgacattccacacatcctagcccaagcacggaaaatcttgttcgtgattgacggctttgatgagctgggagccgcacctggggcgctgatcgaggacatctgcggggactgggagaagaagaagccggtgcccgtcctcctggggagtttgctgaacagggtgatgttacccaaggccgccctgctggtcaccacgcggcccagggccctgagggacctccggatcctggcggaggagccgatctacataagggtggagggcttcctggaggaggacaggagggcctatttcctgagacactttggagacgaggaccaagccatgcgtgcctttgagctaatgaggagcaacgcggccctgttccagctgggctcggcccccgcggtgtgctggatcgtgtgcacgactctgaagctgcagatggagaagggggaggacccggtccccacctgcctcacccgcacggggctgttcctgcgtttcctctgcagccggttcccgcagggcgcacagctgcggggcgcgctgcggacgctgagcctcctggccgcgcagggcctgtgggcgcagacgtccgtgcttcaccgagaggatctggaaaggctcggggtgcaggagtccgacctccgtctgttcctggacggagacatcctccgccaggacagagtctccaaaggctgctactccttcatccacctcagcttccagcagtttctcactgccctgttctacaccctggagaaggaggaggaagaggatagggacggccacacctgggacattggggacgtacagaagctgctttccggagtagaaagactcaggaaccccgacctgatccaagcaggctactactcctttggcctcgctaacgagaagagagccaaggagttggaggccacttttggctgccggatgtcaccggacatcaaacaggaattgctgcgatgcgacataagttgtaagggtggacattcaacggtgacagacctgcaggagctcctcggctgtctgtacgagtctcaggaggaggagctggtgaaggaggtgatggctcagttcaaagaaatatccctgcacttaaatgcagtagacgttgtgccatcttcattctgcgtcaagcactgtcgaaacctgcagaaaatgtcactgcaggtaataaaggagaatctcccggagaatgtcactgcgtctgaatcagacgccgaggttgagagatcccaggatgatcagcacatgcttcctttctggacggacctttgttccatatttggatcaaataaggatctgatgggtctagcaatcaatgatagctttctcagtgcctccctagtaaggatcctgtgtgaacaaatagcctctgacacctgtcatctccagagagtggtgttcaaaaacatttccccagctgatgctcatcggaacctctgcctagctcttcgaggtcacaagactgtaacgtatctgacccttcaaggcaatgaccaggatgatatgtttcccgcattgtgtgaggtcttgagacatccagaatgtaacctgcgatatctcgggttggtgtcttgttccgctaccactcagcagtgggctgatctctccttggcccttgaagtcaaccagtccctgacgtgcgtaaacctctccgacaatgagcttctggatgagggtgctaagttgctgtacacaactttgagacaccccaagtgctttctgcagaggttgtcgttggaaaactgtcaccttacagaagccaattgcaaggaccttgctgctgtgttggttgtcagccgggagctgacacacctgtgcttggccaagaaccccattgggaatacaggggtgaagtttctgtgtgagggcttgaggtaccccgagtgtaaactgcagaccttggtgctttggaactgcgacataactagcgatggctgctgcgatctcacaaagcttctccaagaaaaatcaagcctgttgtgtttggatctggggctgaatcacataggagttaagggaatgaagttcctgtgtgaggctttgaggaaaccactgtgcaacttgagatgtctgtggttgtggggatgttccatccctccgttcagttgtgaagacctctgctctgccctcagctgcaaccagagcctcgtcactctggacctgggtcagaatcccttggggtctagtggagtgaagatgctgtttgaaaccttgacatgttccagtggcaccctccggacactcaggttgaaaatagatgactttaatgatgaactcaataagctgctggaagaaatagaagaaaaaaacccacaactgattattgatactgagaaacatcatccctgggcagaaaggccttcttctcatgacttcatgatctgaatccccccgagtcattcattctccatgaagtcatcgattttccaggtgttggtgaactgcctgtgactcctctcctccccggcccctacccctcagggataatgagttcattgctgggctagatgttttagccatgattctgcctctgttttatacctgcacacatccttatctttgttacatatgaaatatctgtatcacgggtatattgagagaaataaaggtgagagcattcacaaaaaaaaaaaaaaaaaa

SEQ ID NO: 3253 - DNA, 671 bp, Homo Sapiens
  misc_feature (531)..(531): n is a, c, g, or t
gttgtcgcgggtgttttacagcactgagctccaatacaactctttcacttttatggctaacacaactaggtatctccagggccacatcacacaaattcggccaaggtcaaagtctgagtgaggtccggcctcagtcctaggtgcaacatctgtcttagctcctggagtccctgaccctctctctcaagcggagaagaggaggaggtctcagctgtccaggctcatgagtagagcagtgcccctcttgatccaatgatcaggtgtcatggccccagaccgcaggtcaatgccgatgacaaaggaggctcggtctgagctgcctgcccggttgggatagtaatagcaggggcaggagtacatgcccttggcgctcttcttgcggctctctgcaggccggaagtggatcgtgggcatgaggcagacaagctgcatgggctctgcctccaccaagcaggagttcttccggtcccagccagcaccttccaggtacaggcccctgacccagacaccatccttggggggatacactangttgctgtcatccacagtggaaacgataaactccccagagaggctgtccactgaaacgttgtttggcgagctgaagactgcagcacagcagtgaggaagccagtgggaaacgtgaaaccagacaaccagaagatcacagg

SEQ ID NO: 3254 - DNA, 1228 bp, Homo Sapiens
acatatgtactaggtctgtgcccgggtgttacgtcagtcgcggggggctagagccaggtttatagtatcctcgtccgtcgtctgtcacttgcaacgagccgtgggtcaccacgttcttcgccttcgtgctaccccttctcctacagtgactgccaggaactgctaaaccaggttagaccagctgctttcctggagaaccaccctacccatagcagccccctggataccatctattaccatcgggagctcctttgctattctctggatggacttcgtgtagatctgctgactgatcacttcctgccatgggcttcgagaagatcgagagccccgtctagagcagctatttcctgataccagcacccctctgaccattccgtttcgcaggcaagaggatattcttcttaagcagtagagtacacccaggggagactccatctagctttgtcttcaatggctttctggacttcatcctccgacctgatgatccccgggcccaaaccctccgtcgcctcttcgtctttaagctgattcccatgttgaaccccgatggtgtggtccggggacactaccgcacagactcacgtggagtgaatctgacaccgtcagtacctgaagcctgatgccgtcctgcaccctggccatctatggggccaaagctgtgcttctctaccaccatgtgcactctcgtctgaaactcccagagttcctctgagcaccagccagttctgtctccctcctgatgctcctgtttcttgacctgtgagaaagccaacaatctccaaaatgaagctcaggtgtggggcactcagctgaccaggcattaacgcttgaacctggaaacaaacatgaccagcagaacagaactccaccagttgtggcgtatgccaacacggcttgcggggtttagaggtaatgcccgtagtatcaattccccccaaaagagatggggtgttacatattgtgcctgcatggaatttttcccaagggggggggtcttatattgggaaacagcgttctttataaggtagcccacggtagaaaagttactacaggcagcttttaataaatacccctcatacagcggggtacctagaaaattcttcccgcagagctaactaaagagggggcataacgacatgacacatcacaataatagaaacaacagataactgcgtgtcctccctcctcttctccttctctctcctctcctctctactcgttatgt

SEQ ID NO: 3255 - DNA, 472 bp, Homo Sapiens
tttggaaataaagcatttttaattcagcccccggagggcctgcccaacgccccgggcaggtctctaagcaccaaacacgtgagaattgttcccctcagccccagagcctcccccgcatgggaaccccttcctccttttcactgggcccagcctggaccccacacccccactcacacccacaaccagctccccacactttgtttcaataaataaccccaaaaacaaagctcggggcaggggacctggtctagcactgagctccaaacaggcagaggggactttgtgccaaacgccagaactcccaagggtagaagattgaaatcagggtcaaaatacgcacgagaagtcagagacggcttctgagctgggagcgggtcccttcaggctagggttgaacgtcgtcccctgggtgctggccccagagtcaccaagtgctgtcgccggggactccagcagcctctggaagaggctg

SEQ ID NO: 3256 - DNA, 636 bp, Homo Sapiens
aacagcacgttgcgggaaagaggaagagagagtgtgagtgtgtgtgtgtgttttttctattgaacacctgtagagtgtgtgtgtgtgttttctatcgaacacctatagagagagtgtgtgtgttttctattgaacatctatatagagagagtgtgtgagtgtgtgttttctattgaacacctattcagagacctggactgaattttctgagtctgaaataaaagatgcagagctatcatctcttaaaaggaggggctgtagctgtagctcaacagttaggccccacttgaagggagaggcagaattgtactcacccagattggaaaatgaaagccagatgggtagaggtgccctcagttagcacctgtcccatctcgggccctccaactcctcccagtcccactccagtgcagccagctggctccaaggtagaaacccatgagcactcagggagcagtgtgccttcagctgcagcagaagcagcccggaggataaaatgagaaccagctgcacacgggccctttaactcccaagccccacccctgggcttggcctgccttgcccttgccgggaagtgatccccaaggcagggtgagagtccccatctgaggcgtttgttgcagctactgcacttct

SEQ ID NO: 3257 - DNA, 221 bp, Homo Sapiens
  misc_feature (49)..(49): n is a, c, g, or t
  misc_feature (65)..(65): n is a, c, g, or t
  misc_feature (131)..(131): n is a, c, g, or t
  misc_feature (198)..(198): n is a, c, g, or t
  misc_feature (218)..(218): n is a, c, g, or t
acggtagtgggtagcgggtctcgggttgcgggttgcaggttgcaagccnagcccgcaggcaactnccttcccggcgccatgttcggctccagtcgtggaggcgtgcgcggcgggcaggaccagttcaactnggaggacgtgaagactgacaagcagcgggagaactacctgggcaactcgctgatggtgccagtagcncttggcagaagggccgcganctc

SEQ ID NO: 3258 - DNA, 506 bp, Homo Sapiens
ctgcggaagccccgctggctaggtgtctgcgcgcacccccggccgccgccaagagtggcacagctggggaaggagtgaacatccagaggaatcgcggggcggggtggggggaggccaggagaacaggtggcgcagggaagcagaaacgtagttgcgctggacagctggagtcgggcagggtcggggccagcggcgaggggacaagaagggccgattcgagaggaagcgcacctgagggagcacagcgaaggccgggacgcagggagctggatggagagcgagcctgggcggcgaaaggttgccgaggcgggggctgggcgcctgggaacaaagttgaaaatgcaactgcaagctccccggtgaaacaaataccgccttcaaccttcgtattctgtggtgactcatctcgcacgtgacccccctccctcttcaaggtgtgttgaccgactacagtttaagcctgtcgtcccacaaaaggcccgggagggccggggtcccaggaaggg

SEQ ID NO: 3259 - DNA, 471 bp, Homo Sapiens
tttgtaaactttgtctcataatctttccaggctttgtcaaatggcttcttgagatctcctttgactccctttaggtctccttttaacaaagaatccaaggtgaagatcacattgtggctcaaaccctggagcagatttttcagcagtgtggacagttcctttgtaagagtagaaaacttgacaaacgcggtgccaaggtcggggttgtctcgacttaaaaaattactcccaaacttatcaagaacttgtgcatagttttcttcattttgtacatgatcttgaccagaattatatattgcttttacagacttcttcactttctgaagggctgttctatcttggtctagagcctcctccagcagcgtgacggtgttcctgcagttgtgcagccgcgtggtgaagctggacgtggtgggcgagttgtagtcctcggtggtctcggcgatgaactccgagacagagatctggtcc

SEQ ID NO: 3260 - DNA, 700 bp, Homo Sapiens
  misc_feature (58)..(58): n is a, c, g, or t
  misc_feature (124)..(124): n is a, c, g, or t
  misc_feature (135)..(135): n is a, c, g, or t
  misc_feature (162)..(162): n is a, c, g, or t
  misc_feature (177)..(177): n is a, c, g, or t
  misc_feature (182)..(182): n is a, c, g, or t
  misc_feature (195)..(195): n is a, c, g, or t
  misc_feature (199)..(199): n is a, c, g, or t
  misc_feature (232)..(232): n is a, c, g, or t
  misc_feature (235)..(235): n is a, c, g, or t
  misc_feature (240)..(240): n is a, c, g, or t
  misc_feature (255)..(255): n is a, c, g, or t
  misc_feature (284)..(284): n is a, c, g, or t
  misc_feature (306)..(306): n is a, c, g, or t
  misc_feature (322)..(323): n is a, c, g, or t
  misc_feature (336)..(336): n is a, c, g, or t
  misc_feature (353)..(353): n is a, c, g, or t
  misc_feature (359)..(359): n is a, c, g, or t
  misc_feature (361)..(361): n is a, c, g, or t
  misc_feature (386)..(386): n is a, c, g, or t
  misc_feature (397)..(397): n is a, c, g, or t
  misc_feature (401)..(401): n is a, c, g, or t
  misc_feature (404)..(404): n is a, c, g, or t
  misc_feature (409)..(411): n is a, c, g, or t
  misc_feature (416)..(416): n is a, c, g, or t
  misc_feature (418)..(418): n is a, c, g, or t
  misc_feature (427)..(428): n is a, c, g, or t
  misc_feature (437)..(437): n is a, c, g, or t
  misc_feature (448)..(448): n is a, c, g, or t
  misc_feature (454)..(454): n is a, c, g, or t
  misc_feature (479)..(479): n is a, c, g, or t
  misc_feature (481)..(481): n is a, c, g, or t
  misc_feature (485)..(485): n is a, c, g, or t
  misc_feature (492)..(492): n is a, c, g, or t
  misc_feature (494)..(494): n is a, c, g, or t
  misc_feature (496)..(496): n is a, c, g, or t
  misc_feature (500)..(500): n is a, c, g, or t
  misc_feature (512)..(512): n is a, c, g, or t
  misc_feature (516)..(516): n is a, c, g, or t
  misc_feature (518)..(518): n is a, c, g, or t
  misc_feature (524)..(525): n is a, c, g, or t
  misc_feature (545)..(548): n is a, c, g, or t
  misc_feature (554)..(554): n is a, c, g, or t
  misc_feature (571)..(571): n is a, c, g, or t
  misc_feature (573)..(573): n is a, c, g, or t
  misc_feature (576)..(576): n is a, c, g, or t
  misc_feature (580)..(581): n is a, c, g, or t
  misc_feature (585)..(585): n is a, c, g, or t
  misc_feature (588)..(588): n is a, c, g, or t
  misc_feature (590)..(590): n is a, c, g, or t
  misc_feature (593)..(593): n is a, c, g, or t
  misc_feature (596)..(597): n is a, c, g, or t
  misc_feature (603)..(603): n is a, c, g, or t
  misc_feature (607)..(607): n is a, c, g, or t
  misc_feature (609)..(609): n is a, c, g, or t
  misc_feature (614)..(615): n is a, c, g, or t
  misc_feature (618)..(621): n is a, c, g, or t
  misc_feature (625)..(627): n is a, c, g, or t
  misc_feature (647)..(648): n is a, c, g, or t
  misc_feature (650)..(651): n is a, c, g, or t
  misc_feature (653)..(653): n is a, c, g, or t
  misc_feature (655)..(656): n is a, c, g, or t
  misc_feature (659)..(659): n is a, c, g, or t
  misc_feature (664)..(664): n is a, c, g, or t
  misc_feature (673)..(673): n is a, c, g, or t
  misc_feature (675)..(675): n is a, c, g, or t
  misc_feature (683)..(683): n is a, c, g, or t
  misc_feature (690)..(691): n is a, c, g, or t
  misc_feature (693)..(693): n is a, c, g, or t
  misc_feature (699)..(700): n is a, c, g, or t
ctgttgccctgctcctgttcaaagagtagcatggccagctgggttcgggagccgaggncctcaagcacgctctggaggcagcggtggtacaggtcctcactgagcctcgcgctgcacgtctggnaccggtagcgntgcagcagcgccggctccaccgcccgnagaacatgcagactngagangtggaggaacagntcgnacacatccaggtgtagaagcaggcctcgctggntgnctggngatcaaagcggccantgtcacgggccagttctggggggccaggnccttgtggtggtgtcacagctnggtggaaggtttgggnnatcaatggtaaanaaggtccttcagccctnagaatngnatgcatgcccgcagcgggctcaagnttaggtcaagngttnagnaaccnnntcttngnccttacagnnggaacactntttttcagccnggtgcnttcttgggtaaagttgttccatgangngttnttggtgnangnttgnttccttttcttncaananttgtanncattgtaacccttttttccnnnntaaagncttttccaaccttcttncncantggnncctnggnanttnttnntgaaancttnanttcgnncannnntttnnnctttttctttttcattccanntnntngnngtntctgngttttcctnantttcaccnaggttcnntntttcann

SEQ ID NO: 3261 - DNA, 428 bp, Homo Sapiens
cctcccagaatgcatttggcttttaattttgcttatggtttctttagctctacaaaaagaatgttgacttcatgcatttaaatctgccagtattttcctttgtggcttctgggttttgtgctagacttggaaagttccgggggtcctttactgctggtctgtgggtgctgcaggtcctgccttgccctgcccagagcacgttcctcttcccttcctgtgggtcaaggtagcccccaggccagttctgaagccagtgaggctggactggtcctgacctcttcccgcctgtgtgcgaagctcttccgtcttccgtctcggggtgaaggtggggtgaactgtgacagaatcgcatgctggggcttgacatctagatgacgcgtccttgcctccttccagaaatgcctttggtgctgcagtggctctgctga

SEQ ID NO: 3262 - DNA, 426 bp, Homo Sapiens
tttttttttggataaacagactttattatattttaaaattatatacagtaattattattatacattcattcataaattctatataagtaaacatacattctaatcacagtgtttgaattccatttttctcaaaacacacacacacacacacacacacacacacacacacacacacgaaaagcctgtaacgtttgaaagcctaaaatgtaggagttcctccacgtactcacttcatagttcagatggatcttaccagattattagcaacaagaattcagtgcctatatcacagttaaaattatagttaaaatatttaatagagggacacccaccctcaatgcgggtgggcaccatccaattggtcaggggtatggataaaacaaaaatgcgtaggaaagctcactctctcctggacctaagacaccc

SEQ ID NO: 3263 - DNA, 698 bp, Homo Sapiens
gacgaggaggatgcgggcgggctgggggccgagccccccgggggcgccccgttcgccccctgcaagcgcgcccgcttcgaggacttctgcccggactcgtccccggacgcgtccaacatctcaaacttgatctccatctttggctccggcttctcggggctggtgagccgacagccggactcctcggagcagccgccgccgctcaacgggcagctgtgcgccaagcaggcgctcgccagcctcggcgcctggactcgagccattgtcgccttctagggacccccgagggcacagggacccggggccccgcggggctggggccagacaaagactcggcaaaggggcgagaggagggaacgagcgggcgccgggccactcggggctgagctgggggcgagcgggggcaggcggctgatgttttataaattgtaaataaaaaaaaaagaattctagaaaaaaaaaaaaaaaaaaaaacacaaagaaaaccaaaaaacacaagaaacaaaaaaaactcatgcgtggagagtaactatattgtcggcgggggcggcaaaacagacgggtaaacaagcagcgacaccagtggccacacaagtgtttctgtgagcccacgtttttttgcacacagggggtagaatacgggggggaccccacatagaagcgcggaaaattcgtagcacgcggggtcccgtattggg

SEQ ID NO: 3264 - DNA, 2826 bp, Homo Sapiens
gatgtcatgcaggcaagatggcggaaggggaggacgtgggatggtggcggagctggctgcagcagagctaccaagcagtcaaagagaagtcctctgaagccttggagtttatgaagcgggacctgacggagtttacccaggtggtgcagcatgacacggcctgtaccatcgcagccacggccagcgtggtcaaggagaagctggctacggaaggctcctcaggagcaacagagaagatgaagaaagggttatctgacttcctaggggtgatctcagacacctttgccccttcgccagacaaaaccatcgactgcgatgtcatcaccctgatgggcacaccgtctggcacagctgagccctatgatggcaccaaggctcgcctctatagcctgcagtcggacccagcaacctactgtaatgaaccagatgggcccccggaattgtttgacgcctggctttcccagttctgcttggaggagaagaagggggagatctcagagctccttgtaggcagcccctccatccgggccctctacaccaagatggttccagcagctgtttcccattcagaattctggcatcggtatttctataaagtccatcagttagagcaggagcaggcccggagggacgccctgaagcagcgggcggaacagagcatctctgaagagcccggctgggaggaggaggaagaggagctcatgggcatttcacccatatctccaaaagaggcaaaggttcctgtggccaaaatttctacattccctgaaggagaacctggcccccagagcccctgtgaagagaatctggtgacttcagttgagcccccagcagaggtgactccatcagagagcagtgagagcatctccctcgtgacacagatcgccaacccggccactgcacctgaggcacgagtgctacccaaggacctgtcccaaaagctgctagaggcatccttggaggaacagggcctggctgtggatgtgggtgagactggaccctcaccccctattcactccaagcccctaacgcctgctggccacaccggcggcccagagcccaggcctccagccagagtagagactctgagggaggaggcgcccacagacttacgggtgtttgagctgaactcggatagtgggaagtctacaccctccaacaatggaaagaaaggctcaagcacggacatcagtgaggactgggagaaagactttgacttggacatgactgaagaggaggtgcagatggcactttccaaagtggatgcctccggggagctggaagatgtagagtgggaggactgggagtgagggagccagagggagcagctcccccacccatggcatctctcgcctccctcgctcgtctcagcccagccctggaagactgagaatgttcccccaaatctcctctgccaaccagagctctgggcacagattctggtggctccctgctggccctcttgggcctctgctcacacctgggaaggggctctctaaatcccggccagaaactctgacttgtgccaacaataggatgacccaagggagaggaaacctatcctcctcaccagaagagcctgtgtttttctgctgaacacccactgttcctgaggactcctgctgggaagtcccaagggatagttctagcccttctgcctgtgtagacagaagctaaaccaccagtctctctcggaggaagctgagacaacatactctgtccatacataagcaggcagggagggccatgccacctacccttggctaaacagggacagtgaacacattttggttcctatcccagtgggtaagaggcacttatctctgggaaatttgcctctcttgggactctccccctcccaggcattttccattcctggaaaggctcctttggggttcagaatccagagaccaaaccctgacccacctccttcctttcctccagcccacgctggtctgtccccatgccttcccagggcttcttcatgtcagatgcacccaagtccttagcccagctgtgccacctgcaggagttcgctcttgcgtttcttcccctccccaagaagggagggggctacttcaggcccttctgtgtgttgcctggcaggataccttgtccaaccagctacccacctcaactcccctgtagtttaggacacaaaacagctaccagcggtacagagcggtgatcaaagccgagtacttacaactctggtaagcctagcttctccgcctcagcccttctgcttctggaagggctatcctgggggtgaacttgaaactctcatcaggcttctgcaaaagctcttcttcctgaagacagacccagcctttgtgctctcaccctccactctggtaaagctgcacctctgggggaatgaggggctgcaggaatctctggagagcctggtgcttcacgatgctgctctggtgattcttgtacctaatctggtgtgctcaccaatgagtgaaagggatcgtgggtcagggacaccgagagagtgaggtcacttccacttcaaaccttcagtgagggggtgggatggagagaatgctgaatcttttttttgacgggatggggtttttctctttgtaattatttctttagtttaattaaccttttggttgtttgtgcaatattatatattttaaattataatgcatctccccagagtattttgtagctgggaaaagaaaaaaggaaaaaaagaaaaaaagattctaacagctgttagttttataattaaaaaagaaagaaaaaagaactttgtcctgaaccttttacagacttgccgttaacagcattaaagtgattcacccgaagctg

SEQ ID NO: 3265 - DNA, 350 bp, Homo Sapiens
  misc_feature (142)..(142): n is a, c, g, or t
  misc_feature (232)..(232): n is a, c, g, or t
  misc_feature (260)..(260): n is a, c, g, or t
  misc_feature (276)..(276): n is a, c, g, or t
  misc_feature (291)..(291): n is a, c, g, or t
  misc_feature (305)..(305): n is a, c, g, or t
  misc_feature (322)..(322): n is a, c, g, or t
tttttttttggagttcataaaatcttttccgagccagcggtatgcagccagagctccaaagttcaaaggcattgccttgggttcaagtgccccccaaggctgttgctcagtcacagcttccagagcttccttcccaccacantgccaggagctgccagagcccccatgcagcccctgaccccagttccctcccaagtcccagggcctgaccctgatatctggggcaaggtgntcgggacatagataagtgaaatggtgtncagaggcccagtgganattcacatctcggtntcagccaacaggantttcccctagttctgangtcattaggcaccattttaagagttggg

SEQ ID NO: 3266 - DNA, 510 bp, Homo Sapiens
aatgattccagtaagatgccttgttaatgactcaacaacatgtcgttcattttttatatcccgaacaaatgggtgttgaagcatgtttgcagaagtaggacgaaacaggaaattttttatcgtacacttttccatgaaattgtggaacttacgggaccatccgctggatttgactgtgggagcagattcccgcaaaataacgaagagagcttccaagggttgaaggttacacagaggaggggctccttcagccatttcaatggcagtaattcccacagaccacacatcacttctgtaatcataggagcgtcttgggtcctcatcacagtcaatcacctcaggtgccatccagtatggtgtcccaatgaaactattccttcttccattagttctgctcacctgggcactcactccaaaatcaaccagttttaacttcgcattatgagtcagaagcacattctgacctttgatgtccccgtgaattactcggtgtgcgtgaaggtgagctag

SEQ ID NO: 3267 - DNA, 6501 bp, Homo Sapiens
gcggggcggaacgcgccgggcgggctccaccgcgccgtgtgcttccgcaggttgcgggggtcgctggggccttgtggcggggcagctccgcggggcttcgcccgctctctcacctcgccgtgctctctcgcggcggccggcggggcccgcgctgcagccggagacccggagaaaggtgaagaactgaatgtcatcatgtctggaatcaagcgaaccatcaaagaaaccgaccctgattacgaggatgtatctgtggcccttccaaataagcggcataaagcaattgagaattcagctcgagatgctgctgtgcagaagattgagactattatcaaagaacagtttgctcttgaaatgaagaataaggaacatgaaattgaagtcattgaccagcgactgattgaagcaagaaggatgatggataaactgcgtgcctgcattgtagcaaactactatgcttctgcaggtcttctaaaagtttctgagggatcaaagacatgtgatacaatggtttttaatcatcctgctatcaagaaatttttggaatcaccatctaggtcatcatctcctgccaatcagagagcagaaacaccatcagccaatcattcagaaagtgattctttatctcagcacaatgacttcttatctgacaaagataataacagcaatatggatatagaggaaagactctcaaacaacatggagcagagaccaagccgaaatactggaagggatacttctagaattactggctcccataaaacagaacagcggaatgctgatctcacagatgagacttcacgactttttgtaaagaaaacaatagtagtgggcaatgtgtccaagtatatacctccggataagagggaagaaaatgaccagtcaactcataagtggatggtatatgtccgagggtcccgtagagaacccagcattaatcattttgtcaagaaggtttggttcttccttcatcctagctataaaccaaatgaccttgtggaagttagagagcctccttttcacctgaccagaagaggctggggtgagtttcccgtcagagttcaagttcattttaaggacagccagaacaagcggatagatatcatacataatctgaagctggatagaacttatactggcttgcagactcttggagcagagacggtagtggatgttgaactccatcgccattctctcggagaagactgtatctatcctcagtcctcggagtctgacatctctgatgcccctccatctttgcctttgaccattccagccccagtgaaagcttcttcaccaataaagcagtcacatgagccagtacccgatacctctgtggagaaaggattcccagctagcactgaagctgaacgacacactccgttttatgctttgccatcttcattggaaagaacacccaccaaaatgactacatcccagaaagttaccttttgttcccatggcaattcagctttccagccaatagcatcaagctgcaaaattgttccacaaagtcaggttcctaatcctgagtcacctggaaaatccttccagcccatcaccatgagctgcaagattgtgtcaggttccccaatatcaactccaagcccatcaccattgcctcgaaccccgacttccactccagtccacgtgaagcaaggcactgccggctctgttattaataatccttatgttatcatggacaagcagccggggcaggtgattggagccaccactcccagtacaggaagtcctacaaacaagatctccacggcttctcaggtctcccaaggaacaggttcccctgttcctaaaattcatggaagtagttttgtaacatctactgtcaagcaggaggattctttgtttgcatctatgccacctctttgcccaattgggagtcaccctaaggttcaaagccccaaacctataacaggaggacttggagctttcacaaaagtgatcatcaaacaggaacctggtgaagcccctcacgtgcccgcaacaggagctgccagccagtcaccactcccgcagtatgtgactgtgaaagggggtcacatgatagctgtgtcccctcaaaaacaggtcataactcctggagaagggattgcccagtcagcaaaggttcagccctccaaggttgtcggggtaccagttgggtctgctttaccttcaacagtgaagcaggctgtggcgatcagtggtggccagatcctggtagccaaggccagctcttctgtctccaaagcagttgggccaaagcaagttgtaacccaaggagttgccaaagcaattgtgagtggaggtggaggaaccattgttgctcagccagtgcagaccttaaccaaggcccaggttactgccgctggtcctcagaagagtggatcccagggttcagtaatggcaacgttgcagctaccagccactaatttggccaacttggcaaatttgcctcctggcactaaactctacctaactacaaacagcaagaacccttcaggaaaaggaaaactgctgctgatccctcaaggagccatcctgcgagctacgaacaatgctaatctccagtctggctcagctgccagtggtgggagtggtgccggaggaggaggaggaggaggaggaggaggcggcagtggcagcggtggaggcggcagcacaggaggaggaggaggaacagcaggaggaggaactcaaagtactgctggccctggagggatatctcagcacctgacttacacatcttacatcctcaagcaaactccccagggcacatttttagttggccagccatcaccccagacttctggaaaacaactcaccactgggtcagtggtccaaggaacactgggagtcagcacatcttctgcacaaggacaacaaacgctaaaagtcatctctggacagaaaaccacattgtttacacaggcagcccatggaggacaggcatctctaatgaaaatatccgatagcaccttgaagactgtgccagccacctcacagctctcgaagcctggaaccacaatgctgagagtagcaggaggggttatcacaactgccacttcccctgccgtggccctctcagcaaacggtcctgcacaacagtctgaaggaatggctcccgtgtcttcatctacggtcagttctgtaacgaaaacttctgggcagcagcaagtgtgtgtgagccaggccaccgtgggaacctgcaaggctgccacccccaccgtcgtcagcgccacgtccctcgtgcctacaccaaaccccatctctgggaaagccacagtatccggactgttaaagattcactccagtcagtccagtccgcagcaggccgtcctgacgattcccagccagctcaaaccactcagcgtaaacacatctggaggggtgcagacgatcctgatgcctgtgaataaagtggttcagtcattttctaccagcaagccacctgccattctgcctgtagctgccccaactccagttgtccccagctctgctccagcagctgttgcaaaagtgaagactgaaccagaaacacctggaccgagttgcctctctcaggagggtcagacagcagtgaaaacagaagaaagttctgagctgggaaactatgtcattaagatagaccatttagaaactatccagcaactcctaactgcagtagtaaagaagattccattaatcactgcaaaaagtgaagatgccagctgcttttctgcaaagtctgtggagcagtactatggctggaacattggaaaaaggagagccgctgagtggcaaagagcaatgacaatgcgaaaagtcttacaagaaatcctggagaagaatccgagatttcaccacctgactcccctcaaaaccaagcacatcgctcactggtgccgctgtcatggctacaccccaccggaccctgagagcctgaggaatgacggggactctatcgaggacgtgctgacccagatcgacagcgagcccgagtgcccatcatcattctcctctgctgacaacctctgccgcaaactggaggacctgcaacagttccagaaaagggaacccgagaatgaggaggaggtggacatcctcagcctctccgagccagtgaagataaacatcaagaaggagcaggaagagaaacaagaggaagtcaagttctacctgccaccaaccccagggtctgaatttattggggatgtcacacagaagattgggatcaccctgcagcccgtggcactccacaggaacgtgtatgcgtccgtggtggaggacatgatcctgaaggctacagaacagctggtgaatgatatcctgagacaggctttggcagttggataccagacagcttctcacaacaggattcccaaagaaattacagtgagtaatattcaccaggccatttgcaacattccttttctggacttcctcacaaacaaacacatgggaatattgaatgaggaccagtgagcggagtgaggtgccctggagaagcaggctttgaaggcacagcgaagctgtaactgaggaccctgctgctcgggaaggaggtggtttccagtgtgactcggcatgtcatggctacccaacctttgccgctgcctgttcccacgtgtcaccagcacgctgcactccagatgaaatcctcctaggacaggagtttgtttcctgagtgtggagtgaggctgtcagtggatccgtgctttgtcggccagcgtttctgcagtctttgtaaaggccccacgagagcgggccaggccgtgtgcctcaggcccttctccctgggtgtgcttaagggggctccttgggcccgcctccccaggaggtagaaaatgagtggcaggctagagatttcacccattttgtgggctggagttaccagtagctccagcagttaccctgaagagagattgggcttcagccttcagcaggtggttctctcccatgcctggccttggtgtggaggggctgtactctgagcccaagtgagtcagctataggaagaggccatacctagagccaagaaccatgaaggcctgagagacggcagactgagcagaattccttttttgagcacgagagcattactagaaccattgtcaaagcagtggcaagggacggagaggtcccaacaggagtcaggaagaggtttgattataaccaagaaaactcactatgctaggaatagactgtgtgcaccagtcccagacacttggcagaagtgtagcagcgttacacatgtgtgcgaagcagatcgcaggttccacgccatctgcatggcctgcaggagcttctgctgctgaccccatgctgagtggccagtggggagcggcgcccggcaggctcttctggggtcgtctgtcctatccgtggattgtatatactcttctctgttaaggagtttttcccaagaagaaaagtatttaaaagaaataccagtgagtgccttaaagttggagaagtaactgcccatgcccagaaataaggatgccagtgcccagaagcagtgagattagtctgtgtccacaagcagaggccccctcgatgggagggagtggcaggcaggagaaggtggcgctgccaggtgcccgggtctattggaggcgccccatctcagacttcctaacacagcctgtgtggaaggcagaacaaagaatgcatgcccagtcagaaatctgttctattctgctccaggaaaatcggaaacctgtgagtcagagtcagagaaacttacccaagcaacgtaattcctgttttcatgggtcctgtagatgtttgagtcaggaaggtaaggcggggagtgactgaataaactctgccttttaaattgagcatctgggccgggcatggtggctcacgcctgtaatcccagcactctgggaggtcgaggtgggtgggtcacctgaggttgggagttcgagaccagcccgaccaacatggtgaaaccccgtctctactaaaaatacagaaaattagctgggcatggtggtgtgtgcctgtaattccagctactcgggaggctgaggcaggaagaatcacttgaacccaggaggcggaggttgcagtgtgccaagatcataccactgcactccagccctggtgacagaggagaccccgtctcaaaaattgattgatcaattcagcatctgagggctgcaagtacagaaggaatctattctcagcagggcatagggcacgcactggcttaacagtttagtatataaggctcaaatagtctatacctgaactgctataagcaaggtcgatagggaagtggatagattgcttcagcaaagtgaactgtgagatctccaggacagagggagaaagatctgatccaaatgagaacagattggttattgcaggtatcacagcctaaagaaattatctttttgcaaaagaaatattaaatgatttagcagtctccacgtgtgttaatgtttcaaacgtgtatcataatgtgtataattgtgtaacaaaattgtctacaataaatcttttggtatt

SEQ ID NO: 3268 - DNA, 423 bp, Homo Sapiens
  misc_feature (390)..(390): n is a, c, g, or t
tttttttttttttttttctgatttcaagtcaagatttattgctttacaaacaaacattatacttggtcttaatagaaaaatgacaccagatacatccaaaatacatttcacattgggatagctgccagttcagcacaaaacatacattactaggagcagggaggcatgaaaataaactatatcttactttttggtacgtcaggaacacttttgcctgaagtaagccctttagtactattttttattttatttatttttttaatccacccatctgcacactggccctttagtactctttaagtataaaactttacttgtcctgggctttgacccttgtgtttgatctaaatgacatttcaaacataaatgtcttttgactagtgcgctttntgttatgtacagaatttaaaatgtgatcgtttg

SEQ ID NO: 3269 - DNA, 8063 bp, Homo Sapiens
gacctgcgaaggcagctactgtctggtcacctgactcaggatcaggtgcgggaggttaagcggcacatcaccgtgcgcctggactggggtaatgaacatttgggcctggacctggtgcctcggaaggactttgaagtagtggactcggaccagattagtgtctcagatctctataagatgcatttatctagccggcagagtgtacagcaaagcacatcccaggtagatacaatgcgcccacgtcatggggaaacatgtcggatgccagtgccacatcacttcttcctcagcctgaagagtttcacttacaatactattggggaagataccgatgtcttcttttccttatatgacatgagggaaggcaagcagatcagtgagcggtttctggtaagactgaacaagaatggtgggccgaggaacccagagaagatagaacgaatgtgtgccctttttacagatctgagcagcaaagatatgaagagagatttgtatatcgttgcccatgtgatccgaataggccggatgctcctgaacgactcaaagaaaggtcctcctcacctgcactacaggcgaccatatggctgtgcggtcctaagcatcttggatgtcctacagtcactcacagaagtaaaggaagaaaaggattttgttcttaaggtttacacgtgcaacaacgagagtgagtggtcccagatccacgagaacatcatccgaaagtccagtgccaagtactctgcccccagcgccagccatggtcttatcatttctctgcagcttcttcgtggagacatggaacagattcggagagaaaatcccatgatatttaataggggattggcaattacaagaaaattgggatttcctgatgtcattatgccaggtgatatccgcaatgacctgtacctaaccctggagaagggggatttcgagagaggaggaaagagtgtacaaaagaatattgaagtgaccatgtatgtgctttatgcagatggagaaatcttgaaggattgcatcagcttgggttcaggagagccaaataggagttcctaccactcctttgtcctctaccacagtaatagtcctcgctggggagaaattatcaaattgcctatccccattgaccggttccggggctcccacctgcgctttgagttcagacattgttccacaaaggacaaaggggaaaagaaactctttggctttgcattctcaaccctgatgcgtgatgatggcaccaccctctcagatgatattcacgagctttatgtgtacaagtgtgatgagaatagcacgtttaataaccatgctctgtacctgggcctgccctgctgcaaagaggactacaatggctgccctaatattccttctagcctcatcttccagcgcagcaccaaagagtctttcttcatctccactcagctctcctctaccaaactcacccagaatgtggacctcctagctctgctgaagtggaaagccttccccgaccggatcatggatgtactagggcggctgcggcatgtcagtggggaggaaattgttaagtttctgcaggacatcttagatacactctttgtgattttggatgataatacagagaagtacggcctgttggtttttcagtctctggtgttcatcatcaacctgctccgagacatcaagtattttcactttcgacctgtgatggacacgtatatccagaagcactttgctggagctctggcatacaaggagctcatccgctgtttgaagtggtatatggactgctcagcagaactgattcgacaggaccacattcaagaagctatgcgggccttggagtaccttttcaagttcattgtacagtcacggatcctgtactcacgagccacttgtggaatggaagaggaacaattcagatccagtatccaagaacttttccagtccatccggtttgtgctcagtctggacagccgaaactcagaaacactcctttttactcaggctgcactcctcaattctttcccaaccatctttgatgagcttctgcaaatgttcaccgtgcaagaggtggcagagtttgtgagagggacactggggagcatgcccagcactgtgcacattgggcagtcaatggacgtggtcaagctgcagtccattgccaggacagtggatagccgcctgttttctttctcagaatcccgccgcatcctgcttcctgtggttctccatcacattcaccttcacctgaggcagcagaaagagctgctaatttgctcagggattcttggcagcatcttctccatcgtcaagaccagctctctggaggcagatgtcatggaggaagtagagatgatggtggagagcctcctggacgtgctcttgcagactctgctcaccatcatgagcaaatcgcacgctcaggaggcggtaagagggcagcggtgcccgcagtgcacagccgagatcactggcgagtatgtgtcctgccttctctcactgctccgccagatgtgtgacacccatttccagcacctcctggacaacttccagagcaaagatgaactcaaggaatttctgctgaagattttttgcgtgttccggaacctgatgaagatgagtgtcttccctcgggactggatggtaatgagactgctcacaagcaatattatagtcactactgtccagtacctgtcctctgcactgcacaagaatttcacagagactgactttgactttaaggtgtggaattcttactttagcctggcagttctattcataaatcagccaagccttcagctagaaattatcacctcagccaaaaggaagaagattctagataagtatggggacatgcgtgtaatgatggcctatgaactgttcagcatgtggcagaatttgggtgaacataagatccactttattccgggaatgattggtccttttctgggtgtgacactggtcccacagccagaagtacggaatatcatgattcccatctttcatgacatgatggactgggagcagagaaaaaatggcaacttcaaacaggtggaggccgagttgattgacaagctggacagcatggtgtcagaagggaaaggtgacgagagctacagggagctcttcagcctactaacccagctgtttgggccctaccccagcctgctggagaaggttgaacaagaaacatggcgcgagaccggcatttcctttgtgacctcagtcacccgcctcatggaacgtcttcttgactacagggactgcatgaaaggagaggaaacagagaataagaagataggctgcactgttaacctgatgaatttttacaaatctgagattaacaaggaagaaatgtatatccgctacatccataagctttgtgacatgcacttgcaggccgaaaactacacagaggccgcatttaccctgctcctttactgtgagctgctgcagtgggaggaccggccactacgggaattcctccactacccatcgcagacagagtggcagcggaaggagggactgtgccggaagatcattcactacttcaacaaaggcaagagctgggagtttgggatcccactgtgcagggagctggcgtgtcagtacgagagcctctatgattaccagagcctcagctggattcggaaaatggaggccagctactatgacaacattatggagcagcaacgcctggagcctgagttctttcgggtcggcttctatggcaggaagtttcctttctttcttcggaacaaagaatacgtgtgccgtggccatgactacgagaggctggaggccttccagcagaggatgctcagtgagtttccgcaggctgtcgccatgcagcaccccaaccatcctgatgacgccatcctacagtgcgatgcccagtacttgcagatctatgcagtgacgcccattccagattatgtggatgttctgcagatggatagggtaccagatcgagtcaagagcttctatcgcgtcaacaatgtgaggaagttccggtatgacaggccttttcacaaaggccccaaggacaaggagaatgaattcaagagcctgtggattgaacgtaccacactgaccctgacccacagcttgcctggcatctctcggtggtttgaagtggagaggagggaactggtggaggtgagccctctggagaatgccatccaagtggttgagaataagaaccaggagctacgctccctgatcagccagtatcaacacaagcaggtgcatggcaacattaacctgctaagcatgtgcctgaatggtgtcattgatgcagctgtcaatggaggcattgcacgctatcaggaggccttctttgataaagattacatcaacaagcacccaggagatgctgagaagatcacccagctcaaggagcttatgcaggagcaggttcatgtccttggagttgggctagcagttcatgagaagtttgtgcacccagaaatgcggcctctgcataagaagctaattgatcagttccagatgatgcgggccagtctctaccatgagtttccaggtttggataagctaagtcctgcatgttcaggcaccagcaccccacggggaaatgttctggcatcccatagccccatgagtccggagagcatcaagatgacccaccggcacagccccatgaacttgatgggcacaggccgccattcatcatcctctctctcctcacatgcgtctagtgaagcaggaaacatggtgatgctgggtgacggctccatgggtgatgctcctgaggacctgtaccaccacatgcagctcgcgtatcccaaccccaggtaccaaggctcagtcaccaacgtctctgttctgtcctcgtcccaggcaagcccttcttcctccagcctgagttccactcactcagcaccatcccagatgattacctctgccccttccagtgcccgaggctctccctctctgccagataagtaccgccatgcccgtgaaatgatgttgttgctgcccacataccgggaccgcccaagcagtgccatgtatccagcagccatcctggagaacggacagccgccgaatttccagcgagccctgttccagcaagtggtcggagcctgcaaaccctgcagtgatcccaatctgtctgtggctgaaaaaggtcattactccctacactttgacgccttccaccaccctctgggtgatacccccccagccctccctgcccggaccctgcgcaagtctcctctccaccctatcccagcctcccccacaagcccccagtcaggtctggacggcagcaactctacgctgtccggcagtgccagcagcggcgtgtcctccttgagtgagagtaactttgggcactcctcggaggccccacctcgcactgacaccatggactccatgccaagtcaggcctggaatgctgacgaagatcttgagccaccctacctccctgtccactacagcctctctgagtctgccgtcctggactccatcaaggcccagccatgccgaagccactcagccccagggtgcgtcatccctcaggaccccatggacccgcctgcgctgccgcccaagccctaccacccccgcctgccggccctggagcacgatgagggggtgctgctgcgtgaagagactgagaggcctcgaggcctgcaccgcaaggctccattgcctcctgggagcgctaaggaggagcaggcccgcatggcctgggagcacggccgaggggagcagtgaggggcaacgaggcggctgggatgccgccctcagtaagcagcttgccaatcactccaggtctgaaaagcaagtcccccagccccaccccagggagccagagaggcttgcactcaggagagaaccacccccaagtctccgttctactgccgtgaactcatgtgttgccatgtacagaggccacagcagcatgaagggttgtggcttccctttttatttttttacatttccatttctatgggttttcctttctttcctttatgcagtagatgctttcttcctcctgcagttctggaccatgtggagctacatggagaaattgcacagacagaatcactttgccacactgcagggcccaggagtgggagcccaggccctccctccagggtagagatgcaccgaatggaaattgcactaaggacctcttcctttgctgtatggacagaagagttcatggttgcattcagggattgcaaggaccatatagacatgtcacaggtggaaaaagggccacaagccgttttgcacaaatgcctgcccacctgcccctcttccatccaggagtgtgctactgaggggctggctggaccaacctgctggctcaggcatgtgactggcctaactgcatgcccagggcactgccagggttcaatgggccagccgtctcctactccaccttggatttttctctccatcacatcatttctgaccatttgctcccttccattcttgaaacacctcatgccccacaggagccccagtggtgactggatctgcaagggttatctcccgccctctggggtttgagtggaggtatggagccagagaggctatcctagctaccttcctcctagggggagctggtccccttcctatgtggtagagagactggtgtaagagtgtggggtgtggcaggcgccggaaatcctcaaagctttcagaagcatccagaatgcctaccatcagctcctgaatcagggattttcagcactacctctgagccatggggttggctgcccagccaggcttccaggccctgaggacatgtggtcaggttcagcaggctcctgggtaaagagggtgggagggggcttctccttttggaagcagatagccatgcaggtagaattgtcatctcccaagtggccacatacagcaacccactccaggccatggggaccaccactcagggttcggggctggcaggagggtagtttctccagtctccccagtctgttggtgtctttataggaaactataaagcagagcagtggtgtctttagaggaaactcattcaagtcagggcactgattttcctctcagtttattatttggggggatagggtcaggtgggtatagtagtactttaccagggtgcttttaagttactttaaaaaaagcctacaaaatattttttttcttttatttgctcgagttcacattaatgatggtcacaaggctgccttgttgggcaggcgtattgcccccagttcctcttctgctggcctgtatgacctccacagccaggccctgggcccaagccccttgtcccttctccactgcccctctttccagacagtaaaggccatggtcagtgtgtttttctcttgtaaacaaaccccagcttgtttaacagaaatgctaataacctactgggaaagatggaggtctaaattacctccagggtttttctgggggtttatcaccagtgtgggtcccttctgataccaccaggttcactccaggcagagtggggcggaaggctgctgaggatatgggtcagttacagcagccctcacctcaaagggctggcctgcttctcagcctacattcatttgcaagcttcaatctctggaccatctggtgttcacaggtgttagagggttaggggttaggggctagttttggatttgattcataggtaggagggcttagattttaaggcacttctgaaagtcaatccctggacaaggcagtcatcacataagaacagctaccttctccacttggtggcacaagaggtagggaggggagtatgggttcatttggcttcgcattatgcaaggtgaaaccgtttgttttccctctccattttccctaactaaatgaaaaggacacattctgaaatcccttttgttggagaataagtcagtctgaggggaaatgggaggccagagatgagaaccctttgaaaagattgtaaaatactgattttcattctttcaagcttatttgtaaatacctatttgaatgctgtgtatttgtacaggaatttgagcaaaaaatgtatagagtgtgatgtccaattggtattcagcactataaatgtgtttttaacctcc

SEQ ID NO: 3270 - DNA, 399 bp, Homo Sapiens
ggtagcgagtgatgctgtagggtgacagagcaagacgtccgctccaaaaaaaagaaaaaaaaatttcttgaagtggaatgatgtacaccaaatacccactttatagatattacagggatggtgaaaaattagtaaatagcttcacaaaagaggcagcgtgatacctttagtgttttctagaatttttttctggatattatatgtaagaatttattgtttgagggaaatacgaggtttcattgtttaaaatcaagagtgtattgtttactgttttacagtattatttaatatccaactggtctccaatctccattacatagggactgtacagagcctgtgaagatgtatgaatggtatcttttataatccacaatacatttctggtaagatggaatcact

SEQ ID NO: 3271 - DNA, 503 bp, Homo Sapiens
  misc_feature (251)..(251): n is a, c, g, or t
  misc_feature (275)..(275): n is a, c, g, or t
  misc_feature (397)..(397): n is a, c, g, or t
  misc_feature (468)..(468): n is a, c, g, or t
  misc_feature (477)..(477): n is a, c, g, or t
ttgtagtgtctgtagtgtttccacctctgacaagtgcttctgccgaagactctgcagctcagcccagaactcctcatcttccccactgctttctgactcctcgctgctcaaacacaggctgctgtaggagtagttcatccacactgggctgggatggctcaggggttgggggctgccccaactttggggttccttcccatcatctccttcctcctcaactccagcccccagaccctcagctgcacggtcgntctcagccagagcttccctgggtntctggcccgcctccagcactgtcctctgtatctgagctctctgaagtgagctgaggggttgaaggttttggagaaccagagagagtgggggattttggcttgcaagggaagaggctcagcgntttccttggatgaagtcacttgggaaacgcccaacaagctgcggctttccctcttcagagatggggcgccntgggctttnccctgggaagggcccaacaagaagtt

SEQ ID NO: 3272 - DNA, 472 bp, Homo Sapiens
tttcataataaaatgggggttattttaagccactaaattctggggtggtttgttatacagcaatagataaatagaacagccttcaacaacgaacgtttgctgagtgcctactgtgtcccaggcactgcataagactctggagaaggcacagcatttttgtctctggattcaggacctgctaggagcctttaacttcctccccgtgcagtctgaaccaggcctgagcaggagcgtgtggcactcggtgtcgtctctgcagaaacggcatcaagagcaaggctgatgctctcatagctgggtggaggccaggcgggctgggtgctgagcagggcatccctcgatccacttggctccagggcttcctccgtagggtatgcaggtggtgttgggggcccctcggccactgggaagctcacggcttcctcgttagtcggggatgtcaaccactttggggggtcctgcagctctcctt

SEQ ID NO: 3273 - DNA, 442 bp, Homo Sapiens
tttttttttttttttttgacatacaaaattttattctttatttattattattatttatttcttatgtgcacaaaagaaaaagaatcaaaacgaaccgacgcactgaaagtggccgaggagaccagaaccgtccggggacatttagcaggttaggcctgggcctgggtccggggtctctgcccggccagccccacaggactgggatgggccggacctcggcgccctcgccgccctcgccgccccgttcgggccactggagcctggctgggcgccgggttcccttaaacgattctcttttctctttttccttctcaaataaaaagggctcgcaggggagagagatctgggcgaggactccaagccttttcggatttgttcaaggatttttatttattttcactttattgactttgtttctgttatttcgagtcgcctcgtgccg

SEQ ID NO: 3274 - DNA, 461 bp, Homo Sapiens
tttttttttttttttttttttttttatgggaaacatgttttatttttgccatttagctgggaaatcatcaggatccagacataagatagtgtaattattctgcaaacacccaggggacagcttttgtgtcacccatagcacccgagggtggtcaaagtggctcattctggctcttccaagaaatgaatccaactggtgacaggggactcagagacaacttctcttctcctttcccacagggagacatctcctgcttccttttccagggcaacgtaggctgaatacatcccaaagtgctcagatgagctgcttggtggccacaggcttaactgggcctgggccagccaaggaccgaacccaggctgttgggagacagcttggactctgtttcatgcagggctggtttagatttatcacaaccaccatactgggcagcacagcctcttagaatgagagccaga

SEQ ID NO: 3275 - DNA, 428 bp, Homo Sapiens
  misc_feature (111)..(111): n is a, c, g, or t
  misc_feature (394)..(394): n is a, c, g, or t
ttttcttaagggaaaaatcacgctgtgttcttttaaaatccctcaggttttatgttttattgctaccagagtctgcctccctgaggttcttgtatagactagttatttccntctgtaaagaagctgttctattcgttctcgcctggtttggaacaaactgaacacttccaaaggaggcagtccttgcagccttgtctccttccactcccctcctccccacagtcctgggctggagcagcgagtctgtcgatcccagggccagagacaaggcagacaaaggttcatttgtaaagaagctccttccaggcacctcctctcttctccttttgcccaaactcacccagtgagtgtggaggcattttaaggaggcatcctctgccaaggaccaaagggnaaaggagggaaagggggccaaaaggccaaattgg

SEQ ID NO: 3276 - DNA, 701 bp, Homo Sapiens
ataaatcaatacatgtaaggtatacactggtttggcctggaaagggcaggacatcttgaagatgggggtttccaggtcagaggtagatcaaagagttcctgactggcaatggttgagagagttaaactttacctgaaaagatgaagtcagcttaagttaaagtaagggaggcttgggtttaagtcatgtagatgaagcctccaggtagcaggcttcagagagaacagatgatgaatttttctttttaggccttaaaaggtgtcagactctccagaaaagacctaataagagaaggagattctctacagaatgcagtttcccccacaagagacagctttgtagggccatttcaaaatacgtcaaataaatatattggggggtaaatttcctttggggcctgctgtcatgtgatgctataccagagtcagttgggatttggtattttattgccacaaagggtctgtttggttagtcttaagatctctgttttaatgttaatgctggtcagttgtatttaaattccaaagggaacgagggtaatatgaggcaccctgtaatctgaccataatatgaggcaccctgtcttcccatcatggactagtttttcaggttcctttgagatcccctggggcaagacaggggtccattcagcccggtgggggatttagaatttattcgggttgctgtatatatatgtatat

SEQ ID NO: 3277 - DNA, 620 bp, Homo Sapiens
gagccggaagacgctgtgtgtggacggaattcgggaccgactgacggccggccggcttcccggaactggaaggttacattgattacccacctagtacaacatcttacgggaagagcatagtatttcctagaggaatatgaacataacaggaaggtatcattggctctgaattaaatttgaacttgtcccctgaatagctacaggttttggaagctgaatcaatgttatcagatgagttagaatccaaaccagagctcctggtacagttggttcagaatacgtccatcccattgggacaggggcttgtagaatcagaagctaaagatattacttgcttgtccctccttcccgtgactgaagcctcagaatgcagtcggctaatgttaccagatgatactacaaatcattctaactcctccaaggaggtcccttcctcagctgttttgagaagccttcgggtgaatgtgggtccagacggagaggagacgagagctcagactgtacagaaatccccggagtttttgtccacttcagagtcttctagcttgttgcaagatctacagccaagtgatagcacttctttattcttcttaacctaacaagagcggtctgggctctta

SEQ ID NO: 3278 - DNA, 328 bp, Homo Sapiens
attttctttctaagctgagagttttcactgaagggaagaaactgattttacaattaattaagagatgaaaaacctatagcttagcagttaaacacctgggtcctagacccagataggcctgagtttgagcccagtcacctgcaagctgaatgttcttgatcgttatttaaactctcttagcctcaggtcccccatcttcaagtggagargacttcctgccatagtacacascscagcagatcaccaaatgtttccagctctctgbtgctgtggamacttcctggcttactgatttgtgagtvagtgggccatgtgattggttctagcc

SEQ ID NO: 3279 - DNA, 502 bp, Homo Sapiens
  misc_feature (423)..(423): n is a, c, g, or t
  misc_feature (461)..(461): n is a, c, g, or t
  misc_feature (494)..(494): n is a, c, g, or t
gcagtggggagattgtaaggaagcggtggcgactggtgaagcaagtctcacatgtcggcgttcttggccaatggatacaaagataaagaaaatgttgcctttttctaggaactgtcagaaatcctcatgcctttcaagacttctgtgaatgacttgaattttttattccctgcctagggtctgtgaacgaggcctgtctcttccctggggtttctttccatggcctttatttctcctcttccagtgggagttttgcaggctcttctctgtggaaacttcacgagcgttggctgggcctcggcttcgctggagtgtactccagggtgaaggcagagtgggatttgagacccaggttaggcacgacccaggctgagaagggacgtttccatcattcacagtgccctccccacagcactacctcancccgacccccaccctcactcctaccccaccccgcgatncgtcaggggtgccacggtgggccggagggtgcngggtctgt

SEQ ID NO: 3280 - DNA, 1199 bp, Homo Sapiens
cattcgagcgacctcggaccacaatgccagcatggactttgcagaccttccagctctgtttggggctaccttgagccaggagggcctccaggggttccttgtggaggctcacccagacaatgcctgcagccccattgccccaccacccccagccccggtcaatgggtcagtctttattgcgctgcttcgaagattcgactgcaactttgacctcaaggtcctaaatgcccagaaggctggatatggtgccgctgtagtacacaatgtgaattccaatgaacttctgaacatggtgtggaatagtgaggaaatccagcagcagatctggatcccgtctgtatttattggggagagaagctccgagtacctgcgtgccctctttgtctacgagaagggggctcgggtgcttctggttccagacaataccttccccttgggctattacctcatccctttcacagggattgtgggactgctggttttggccatgggagcagtaatgatagctcgttgtatccagcaccggaaacggctccagcggaatcgacttaccaaagagcaactgaaacagattcctacacatgactatcagaaggaccagtatgatgtctgtgccatttgcctggatgaatatgaggatggggacaagctgcgggtactcccctgtgctcatgcctaccacagccgctgcgtggacccctggctcactcagacccggaagacctgccccatttgcaagcagcctgttcatcggggtcctggggacgaagaccaagaggaagaaactcaagggcaagaggagggtgatgaaggggagccaagggaccaccctgcctcagaaaggaccccacttttgggttctagccccactcttcccacctcctttggttccttagccccagctccccttgtttttcctgggccttcaacagatcccccactgtcccctccctcttcccctgttatcctggtttaataaccccccacacatacacctctggtgacctatttgcacagaccgtcgtcttccctccagtcttctgagggataggggacattccatcccaagcttctcccttacccacacctatccttttgaggggctttggggtggggctggggcaagcagagggactgggtcttcacttcttgggctaataaaattgtttctttgtggaccaaaaaaaaaaaaaaaaaaa

SEQ ID NO: 3281 - DNA, 3054 bp, Homo Sapiens
tcctctgcgtcccgccccgggagtggctgcgaggctaggcgagccgggaaagggggcgccgcccagccccgagccccgcgccccgtgccccgagcccggagccccctgcccgcggcggcaccatgcgcgccgagccggcgtgaccggctccgcccgcggccgccccgcagctagcccggcgctctcgccggccacacggagcggcgcccgggagctatgagccatgaagccgcccggcagcagctcgcggcagccgcccctggcgggctgcagccttgccggcgcttcctgcggcccccaacgcggccccgccggctcggtgcctgccagcgccccggcccgcacgccgccctgccgcctgcttctcgtccttctcctgctgcctccgctcgccgcctcgtcccggccccgcgcctggggggctgctgcgcccagcgctccgcattggaatgaaactgcagaaaaaaatttgggagtcctggcagatgaagacaatacattgcaacagaatagcagcagtaatatcagttacagcaatgcaatgcagaaagaaatcacactgccttcaagactcatatattacatcaaccaagactcggaaagcccttatcacgttcttgacacaaaggcaagacaccagcaaaaacataataaggctgtccatctggcccaggcaagcttccagattgaagccttcggctccaaattcattcttgacctcatactgaacaatggtttgttgtcttctgattatgtggagattcactacgaaaatgggaaaccacagtactctaagggtggagagcactgttactaccatggaagcatcagaggcgtcaaagactccaaggtggctctgtcaacctgcaatggacttcatggcatgtttgaagatgataccttcgtgtatatgatagagccactagagctggttcatgatgagaaaagcacaggtcgaccacatataatccagaaaaccttggcaggacagtattctaagcaaatgaagaatctcactatggaaagaggtgaccagtggccctttctctctgaattacagtggttgaaaagaaggaagagagcagtgaatccatcacgtggtatatttgaagaaatgaaatatttggaacttatgattgttaatgatcacaaaacgtataagaagcatcgctcttctcatgcacataccaacaactttgcaaagtccgtggtcaaccttgtggattctatttacaaggagcagctcaacaccagggttgtcctggtggctgtagagacctggactgagaaggatcagattgacatcaccaccaaccctgtgcagatgctccatgagttctcaaaataccggcagcgcattaagcagcatgctgatgctgtgcacctcatctcgcgggtgacatttcactataagagaagcagtctgagttactttggaggtgtctgttctcgcacaagaggagttggtgtgaatgagtatggtcttccaatggcagtggcacaagtattatcgcagagcctggctcaaaaccttggaatccaatgggaaccttctagcagaaagccaaaatgtgactgcacagaatcctggggtggctgcatcatggaggaaacaggggtgtcccattctcgaaaattttcaaagtgcagcattttggagtatagagactttttacagagaggaggtggagcctgccttttcaacaggccaacaaagctatttgagcccacggaatgtggaaatggatacgtggaagctggggaggagtgtgattgtggttttcatgtggaatgctatggattatgctgtaagaaatgttccctctccaacggggctcactgcagcgacgggccctgctgtaacaatacctcatgtctttttcagccacgagggtatgaatgccgggatgctgtgaacgagtgtgatattactgaatattgtactggagactctggtcagtgcccaccaaatcttcataagcaagacggatatgcatgcaatcaaaatcagggccgctgctacaatggcgagtgcaagaccagagacaaccagtgtcagtacatctggggaacaaaggctgcagggtctgacaagttctgctatgaaaagctgaatacagaaggcactgagaagggaaactgcgggaaggatggagaccggtggattcagtgcagcaaacatgatgtgttctgtggattcttactctgtaccaatcttactcgagctccacgtattggtcaacttcagggtgagatcattccaacttccttctaccatcaaggccgggtgattgactgcagtggtgcccatgtagttttagatgatgatacggatgtgggctatgtagaagatggaacgccatgtggcccgtctatgatgtgtttagatcggaagtgcctacaaattcaagccctaaatatgagcagctgtccactcgattccaagggtaaagtctgttcgggccatggggtgtgtagtaatgaagccacctgcatttgtgatttcacctgggcagggacagattgcagtatccgggatccagttaggaaccttcacccccccaaggatgaaggacccaagggtcctagtgccaccaatctcataataggctccatcgctggtgccatcctggtagcagctattgtccttgggggcacaggctggggatttaaaaatgtcaagaagagaaggttcgatcctactcagcaaggccccatctgaatcagctgcgctggatggacaccgccttgcactgttggattctgggtatgacatactcgcagcagtgttactggaactattaagtttgtaaacaaaacctttgggtggtaatgactacggagctaaagttggggtgacaaggatggggtaaaagaaaactgtctcttttggaaataatgtcaaagaacacctttcaccacctgtcagtaaacgggggagggggcaaaagaccatgctataaaaagaactgttccagaatctttttttttccctaatggacgaaggaacaacacacacacaaaaattaaatgcaataaaggaatcattaaaaa

SEQ ID NO: 3282 - DNA, 261 bp, Homo Sapiens
  misc_feature (80)..(80): n is a, c, g, or t
  misc_feature (173)..(173): n is a, c, g, or t
  misc_feature (229)..(229): n is a, c, g, or t
ctttttaaacttttaaaaaggcacaaaacaagaaactatgctactcctgcctttgtcgattggtgtatgagcatgcaatncctagagctatggcaatcatcttgcagccaagaaaggtacttgtggtcatggggagagaatggcagcatagaaagagggaaaaaaccaaggtncctgattctgacctgggggacatatcttagttaaaccaaccacccctcccctgggngctgtcctacttagggactgacattttatgtt

SEQ ID NO: 3283 - DNA, 731 bp, Homo Sapiens
tcggctaggtacgaggctggttgtgaatcggccgaggattgcgcgtggtggccatggcggccagcggggctgtggaaccaggcccccgggggctgccgtcgccccgtcgcccgccccggccccgccgcctgcccctgatcacctgttccggcccatcagctgccgaggacgaggagcagcagcccaccgagatcgagtcgctatgcatgaactgttactgcaatggcatgacgcgcctcctgctcaccaagattcccttcttcagagaaataatagtgagctccttttcctgcgagcactgtggctggaacaacacggagatccagtcggcaggcaggatccaggaccagggagtgcgctacactttgtctgtcagggctctggaggacatgaacagagaagtggtgaagactgactctgctgccacaaggattcctgagctagattttgaaattcctgcctttagccagaaaggagctctgaccactgttgaaggattgatcacccgtgctatctctggcctggagcaggaccagcctgcacgaagggcaaacaaagatgctacagctgaaagaattgatgagttcattgtcaaactgaaggagctaaagcaagtagcctcccctttcacttctgatcattgatgatccctcagggaacagtttgtggaaaaccaatgctctcagaaagatgatgcctggtgatccacgtaaaacggaccgatactggat

SEQ ID NO: 3284 - DNA, 364 bp, Homo Sapiens
tttcataggcaaatgctgctgaactgaatagaaaggaacttgggagatttgaaacagtgctcgggttttcgctaggaccggtttgggctttgtacaggttatttaatagctttgttaaagataattataataattataacattaataaaaatgttgcttttgtcttcagctccatgcagagctacagcatgatatgtctctgtaaagtgatcagcagttgcagcgtgaaaataaatactttaactcaggggtcactacaggaagaccccgttgagccggtctcatttgatcttttcttcttctgggtggctgtactaagcggtcgggtttccccgggaatttgatggttcctatagtctgcctg

SEQ ID NO: 3285 - DNA, 1884 bp, Homo Sapiens
aggaaccgcggaggaagtgaaggccggctgaagtgctcacggctcactgcagtttcaagttcctgggctcaaagatgggagtctccctatgttgcccaggctggtctccaacacctgggctcaagtggcttggcctcccaaagcgctgggattataggtctgtgccgcctccctccggtctcggtggcgcggcacgcgcggctctctaggcctccttcagctctgtggtgacggtggccgaggtggagggccggtctgaagagtggcgggactggcttcacttcctccgcggttcctcggagccgcctcgctcctcttcagggactttgctgagaagggctctcgggcgtccagaccccaccgcaaaggtgtttggcgatccgccgagaagttgttggccccaggagcatccctcggggccgaatgcgcagtggacgatgccccttctgacccaacagatccaagacgaggatgatcagtacagccttgtggccagccttgacaacgttaggaatctctccactatcttgaaagctattcatttccgagaacatgccacgtgtttcgcaactaaaaatggtatcaaagtaacagtggaaaatgcaaagtgtgtgcaagcaaatgcttttattcaggctggaatatttcaggagtttaaagttcaggaagagtctgttacttttcgaattaatttaactgtccttttagactgtttatctatttttggatcaagtcctatgccagggactttaactgcacttcgaatgtgttaccaaggttatggttaccctttgatgctgttcctggaagaaggaggagtggtgacagtctgcaaaatcaatacacaggaacctgaggagaccctggactttgatttctgcagcaccaatgttattaataaaattattctgcagtcagaggggctccgtgaagcattttctgaattggatatgacgagtgaagtcctacaaattaccatgtctcctgacaagccttatttcaggttatctacttttggaaatgcaggaagttcccaccttgactatcccaaagattctgatttgatggaagcatttcattgtaatcagacccaagtcaacagatacaagatttccttactgaaaccctctacaaaggcattagtcctatcttgtaaggtatctattcggacagataacagaggcttcctttcattacagtatatgattagaaatgaagatggacaaatatgttttgtggaatattactgctgccctgatgaagaagttcctgaatctgagtcttgagtatgacaattcactgatatttatgtgtacatttatgatagatgaagttcttattctgagtacagtactctttgtcatttcatattggattttctatagagaagaagcacaatggggaagataggagcaaggtcatgtaccctaatagttactatgttttgtaaatccattttgtagagggcatgtaaataaatgttttcctgtagtcatagattattcaggactgtcctttagttctgtcttttgaactcatgggaataattgtgagtcagcgtaacatttcaagagtctaaaggtggccgggtgtggtggctttaatcccagcactttgggaacccgaggtgggcggatcacctgaggtcaggagttcgaaaccagcctgaccaacgtggagaaaccccatctctactaaaaatacaaaaaattagccggacgtggtggcacatgcctgtaatgccagctactcgggaggctgaggcaggaaaattgcttgaacccgggaggcggaggttgtggtgagctgaaatgacgccattgcactccagcctaggcaataagagcaaaactctgcctcaaaaaaaaaaaaaaaaaaaaaaaa

SEQ ID NO: 3286 - DNA, 533 bp, Homo Sapiens
ttttaaaagttcaaagcctcaaagttttactttgcgtttactgtgggttttggcttgaggatctcagcataaaagcagctctctatctctttgacaggcaaaaactcaactaagaggaacaatgacatacagagagaactataaaactaaacacaaaggaaagctctatcaatttcaagtggctacacgttttgctgaggctcaactctggttttgccgggccagggtctcaggacctcagcatcacctcctgcctcagcctggttgttaccctttcttctgggaggcttctgcttcctagaccttgagaaggtctggcagacacagcttaggaaactgccaaagcagagtggtggtgatgccaaggatgtcactgcaggagaagagggcctgggcttctgagccaccgagagctcacaggactggatctgacattcctgatgcatcacaccggaaccctcttcctgcagatactgtaatctgtcctcatggagaaggtcaggagtatcttcctgggcactgagtagagttgg

SEQ ID NO: 3287 - DNA, 456 bp, Homo Sapiens
gtttttttaagagcttcaatgcatcttttattgggctaaataatattgtaaggctcaaaataacttcctgtccccatctcatctctgaaaagacttaataatttaaatgtatctaacatcatgggggataaatttacttttcaaaacaaaaaaattttaaaatgatttatcagtaaacatcacctttagcagcaattattaaatgaaacgtaaaaaacaattcactaacagtaacttacaagtgtccaagagagaatacctatgcttattaccccttttgtttagaacataatttatgtataatttggcttgcaaattttttaatcaatgtattaaaacatgacagtacattttctgttaattcctgctggtgtcttagaaaagctcttatggaaagaaaaagatatgcttcacaggtaatggatacaatgagtgatttgggaagatggtaactaa

SEQ ID NO: 3288 - DNA, 456 bp, Homo Sapiens
tagtatattcttggaggcaaactgatgtattgaaagagaagaatttggccttctggtctatttcttgagacaggaagcctcgagagtaatatatgttttcaaatgatagcagacatctctcactcaagccatggcacagcattgccatatttattgttgatggttattactgcagaagtgcaaattaagtcaactgatagcacacgggcactcatactgcttccctaatcccaactcctatttttgaagtgttcgccaagttttaaaaacactttgtcgtgaacatgcatgtggtgtgctgaataaaaagaaaagataaatcagaagacagctgctgagatactctttaaaacaccaaaagatatttaacatcctattaaataaataacttagaaagaaatagaaagggatgaaggcagaatgcacaagcataccatactatttgtattgttagaa

SEQ ID NO: 3289 - DNA, 812 bp, Homo Sapiens
ccacgtgatgtctaggtgcgagcgctcgggtgttctgtcacttctctgctgggccggtggccgcaataagatagcttccttgctcccgcccgaacggtcgccgcggccaactgcctcgcccgcctggcagcctaaccctccttctcttcttctcctctccggcttcgcgcggccctgcctccctctcgcccggcggcatccgcttgctgctgccaccgcctcctcatcttctgcccggccaaccggcctgccccgctgcagtgatgtgcgacaaggagttcatgtgggccctgaaaaacggagacttggatgaggtgaaagactatgtggccaagggagaagatgtcaaccggacactagaaggtggaaggaaacctcttcattatgcagcagattgtgggcagcttgaaatcctggaatttctgctgctgaaaggagcagatattaatgctccagataaacatcatattactcctcttctgtctgctgtctatgagggtcatgtttcctgtgtgaaattgcttctgtcaaagggtgctgataagactgtgaaaggcccagatggactgaccgcctttgaagccactgacaaccaggcaatcaaagctcttctccagtgatggatggatggactgataactccggaagaatgactctcctgtggcctcacactgctgcctgtctgtcttgtcactctcttatctgccagcttcttcagctaaaatactttaagaggggtgagggaaacacgaattcttacaaatccgactaccagaaaaaaaaaaaaacccgggcctttttcgggtccgaaa

SEQ ID NO: 3290 - DNA, 350 bp, Homo Sapiens
tattaatgttatatatgtattagtgtaaattatttctactttatgtttcaatttagaccttacactgattttaaaaattatatgcataggtaggttatattatttctgaatttcatttcagaaattagtaaagagattttcagaagacttgttagaagaagtcagtgattgtggatgggactgagaatttctgctttagtggagccaactctctcttggttgagaccagggaagtggcccagcacaagagagcttctgcactccaagagctagcttcattgcttttgggaaaagattcaacgtgtcaaacagctaaatgataactttctctccctggaacctgatcatgc

SEQ ID NO: 3291 - DNA, 518 bp, Homo Sapiens
tcctggtctccgtggatagcatttattgggcgccattcggagggggaaatcagataggcaggaagagctgagggaggctgtggcagccacgacctttggagtccgggggctgcccggggtgggggtgtggtcgtgagggcatggtcacccacacatattgcatattctgtggcagtgtgcccaggcataaggcattggggaagcagagaggctgcctgcagtgaaagggagtgagggggaagcaacactggccttccaggtccctaggaaagacccagcagagactgaacagtctgccacgctgtgccccacggccattccgcacccttccccaccttctctccgcagctttggttgtggctccctcgggactgacaggacaggacccttcgagggtagggtcacacacaggacagaggcagccagcactgcccccccacccccaacataaacacagagggcaccttcaggtcccatgtgcagccagttcctccacactgagacgggactcacaagca

SEQ ID NO: 3292 - DNA, 437 bp, Homo Sapiens
  misc_feature (86)..(86): n is a, c, g, or t
  misc_feature (140)..(140): n is a, c, g, or t
  misc_feature (219)..(219): n is a, c, g, or t
  misc_feature (231)..(231): n is a, c, g, or t
  misc_feature (243)..(243): n is a, c, g, or t
  misc_feature (256)..(256): n is a, c, g, or t
  misc_feature (266)..(266): n is a, c, g, or t
  misc_feature (294)..(294): n is a, c, g, or t
  misc_feature (318)..(318): n is a, c, g, or t
  misc_feature (350)..(350): n is a, c, g, or t
  misc_feature (383)..(383): n is a, c, g, or t
  misc_feature (398)..(398): n is a, c, g, or t
  misc_feature (418)..(418): n is a, c, g, or t
  misc_feature (429)..(429): n is a, c, g, or t
  misc_feature (435)..(435): n is a, c, g, or t
ttttttttttttttttttaagattctgaacttttattttctggcatgaaaagtacaaataattaaacaattccatgtaaaagtctnttaccgcggccaggcctgtgatcccggtaataaatagtctaaacgcaacggaangtgttcttgttgggtttttttttttttttttgtcttttgttttgtctttttttttttttttttttttacagttttttancacccccaacanggactctgtcgngatttgaaacctnccgaataaanaacaggatgaagggaggggtggaggggntgagccttcccccctgggcctggnccctgccccccagggacgtggaagccccaagnccccctcgcctggggagccccggcctgggcccntgcgggaaagggggntggcctccaggggaaggggncctggggtggngttgantt

SEQ ID NO: 3293 - DNA, 1018 bp, Homo Sapiens
ccgctgctcatcaccagttaatgtagtccatcaattctgagacaagtgaaggctgtcttgtgaacgacgagaacagataatatggcggtctccgtccaagcaggtctaggtcaatatccatcatttatactcctcctgccttagtagccttgaatgtgtgaggggctgtgggaatgtcagattgctcatgttctgtgcctccaacttgaataaaatccttgatccagggtaagacctacagtaatggagctctggggataggggaggaggcattacagggttctagagaggaaacatactcgtttgtgtcactaatttggtggggagaggggaggtaaatgagtgtaacccaccctgcctctgaagacatgcctggacaggcctccatggggggtgcaggacttcataccacttgtagatatgtgtggatttgattatattgcaaaaagagcatagaacgaataactctggctcacataatgaatccaatgtcttagctaggtacatgcaaactagccgaggcaatggtctatgcataattgctggagcatgacgcaattgtcccccgatcactttatgcccttttctgaaagggtgctgaacaaactgtacgcattcaccgagggtcgagaccgatgcttgaaagttctgacttccatggggggctgtccgctccatacccaagcacatacagtgcaccccactctgcaaagcccagaacccatcgagaaacggtgcagccgagagctaatccgcgcaggaggtacctgcctgaaagcacggtgcagggtggagccatacatataaggctgatgcaagcgatcacgctatcaggcacagaaaggtgcgcggtatggtccaacgaaaccggtagaagcccatgcggagtcaacacgaccgaagaggagcccccctgggtcctcggggcacagaaggcggaggcccggcacacaaggaaccgggagagaacaagacgaccacgacagcttggtcggaaccaagacagaaagctgcataa

SEQ ID NO: 3294 - DNA, 4132 bp, Homo Sapiens
gagctccgccacgcgaggtttcgggctcgtggttttgcttcctccggccaaggtccccgccgctgcatccctcgcggcttcccgtgcgctccgggccggagccgagccgcctgcgctgccacagccagcgcctccacacactcgcagacgctcacacgctctccctccctgttcccccgccccctccccagctccttgatctctgggtctgttttattactcctggtgcgagtcccgcggactccggcccgctatttgtcatcagctcgctctccattggcggggagcggagagcagcgaagaagggggtggggaggggaggggaagggaagggggtggaaactgcctggagccgtttctcgcgccgctgttggtcgtgccgctgcctcctcctcctccgccgccgccgccgccgccgccgccgccctctccggctcttcgctcggcccctctccgcctccatgtgccggatagcgggagcgctgcggaccctgccgctgctggcggccctgcttcaggcgtctgtagaggcttctggtgaaatcgcattatgcaagactggatttcctgaagatgtttacagtgcagtcttatcgaaggatgtgcatgaaggacagcctcttctcaatgtgaagtttagcaactgcaatggaaaaagaaaagtacaatatgagagcagtgagcctgcagattttaaggtggatgaagatggcatggtgtatgccgtgagaagctttccactctcttctgagcatgccaagttcctgatatatgcccaagacaaagagacccaggaaaagtggcaagtggcagtaaaattgagcctgaagccaaccttaactgaggagtcagtgaaggagtcagcagaagttgaagaaatagtgttcccaagacaattcagtaagcacagtggccacctacaaaggcagaagagagactgggtcatccctccaatcaacttgccagaaaactccaggggaccttttcctcaagagcttgtcaggatcaggtctgatagagataaaaacctttcactgcggtacagtgtaactgggccaggagctgaccagcctccaactggtatcttcattatcaaccccatctcgggtcagctgtcggtgacaaagcccctggatcgcgagcagatagcccggtttcatttgagggcacatgcagtagatattaatggaaatcaagtggagaaccccattgacattgtcatcaatgttattgacatgaatgacaacagacctgagttcttacaccaggtttggaatgggacagttcctgagggatcaaagcctggaacatatgtgatgaccgtaacagcaattgatgctgacgatcccaatgccctcaatgggatgttgaggtacagaatcgtgtctcaggctccaagcaccccttcacccaacatgtttacaatcaacaatgagactggtgacatcatcacagtggcagctggacttgatcgagaaaaagtgcaacagtatacgttaataattcaagctacagacatggaaggcaatcccacatatggcctttcaaacacagccacggccgtcatcacagtgacagatgtcaatgacaatcctccagagtttactgccatgacgttttatggtgaagttcctgagaacagggtagacatcatagtagctaatctaactgtgaccgataaggatcaaccccatacaccagcctggaacgcagtgtacagaatcagtggcggagatcctactggacggttcgccatccagaccgacccaaacagcaacgacgggttagtcaccgtggtcaaaccaatcgactttgaaacaaataggatgtttgtccttactgttgctgcagaaaatcaagtgccattagccaagggaattcagcacccgcctcagtcaactgcaaccgtgtctgttacagttattgacgtaaatgaaaacccttattttgcccccaatcctaagatcattcgccaagaagaagggcttcatgccggtaccatgttgacaacattcactgctcaggacccagatcgatatatgcagcaaaatattagatacactaaattatctgatcctgccaattggctaaaaatagatcctgtgaatggacaaataactacaattgctgttttggaccgagaatcaccaaatgtgaaaaacaatatatataatgctactttccttgcttctgacaatggaattcctcctatgagtggaacaggaacgctgcagatctatttacttgatattaatgacaatgcccctcaagtgttacctcaagaggcagagacttgcgaaactccagaccccaattcaattaatattacagcacttgattatgacattgatccaaatgctggaccatttgcttttgatcttcctttatctccagtgactattaagagaaattggaccatcactcggcttaatggtgattttgctcagcttaatttaaagataaaatttcttgaagctggtatctatgaagttcccatcataatcacagattcgggtaatcctcccaaatcaaatatttccatcctgcgcgtgaaggtttgccagtgtgactccaacggggactgcacagatgtggacaggattgtgggtgcggggcttggcaccggtgccatcattgccatcctgctctgcatcatcatcctgcttatccttgtgctgatgtttgtggtatggatgaaacggcgggataaagaacgccaggccaaacaacttttaattgatccagaagatgatgtaagagataatattttaaaatatgatgaagaaggtggaggagaagaagaccaggactatgacttgagccagctgcagcagcctgacactgtggagcctgatgccatcaagcctgtgggaatccgacgaatggatgaaagacccatccacgctgagccccagtatccggtccgatctgcagccccacaccctggagacattggggacttcattaatgagggccttaaagcggctgacaatgaccccacagctccaccatatgactccctgttagtgtttgactatgaaggcagtggctccaccttggggtccttgagctcccttaattcctcaagtagtggtggtgagcaggactatgattacctgaacgactgggggccacggttcaagaaacttgctgacatgtatggtggaggtgatgactgaacttcagggtgaacttggtttttggacaagtacaaacaatttcaactgatattcccaaaaagcattcagaagctaggctttaactttgtagtctactagcacagtgcttgctggaggctttggcataggctgcaaaccaatttgggctcagagggaatatcagtgatccatactgtttggaaaaacactgagctcagttacacttgaattttacagtacagaagcactgggattttatgtgcgctttttgtacctttttcagattggaattagttttctgtttaaggctttaatggtactgatttctgaaacgataagtaaaagacaaaatattttgtggtgggagcagtaagttaaaccatgatatgcttcaacacgcttttgttacattgcatttgcttttattaaaatacaaaattaaacaaacaaaaaaactcatggagcgattttattatcttgggggatgagaccatgagattggaaaatgtacattacttctagttttagactttagtttgttttttttttttttcactaaaatcttaaaacttactcagctggttgcaaataaagggagttttcatatcaccaatttgtagcaaaattgaattttttcataaactagaatgttagacacattttggtcttaatccatgtacacttttttatttctgtatttttccacttcactgtaaaaatagtatgtgtacataatgttttattggcatagtctatggagaagtgcagaaacttcagaacatgtgtatgtattatttggactatggattcaggttttttgcatgtttatatctttcgttatggataaagtatttacaaaacagtgacatttgattcaattgttgagctgtagttagaatactcaatttttaatttttttaatttttttattttttattttctttttggtttggggagggagaaaagttcttagc

SEQ ID NO: 3295 - DNA, 930 bp, Homo Sapiens
cgccagaagccagccaaggtatgagcagcaggcgcccacacaagcccctccctgtttcatgtacaggcctccttctgtgcatgacccagccggtatgtgccccgtgcccaggtccatgcagggggctcaccctgccctgtctcccatggcgcagagcagcctgtggggctgtgttcctatccttgttttctgctgaatcagctcagtcaaagcagcctccaggtttgagtctgccctgttaccccaccaagtaggtggctcgcatggccatataggtgtgtgttgaagagctccgctgtccttccttcacagtgttaacctggcaactccttgctcctgtccctttcctctgtgccgcacacctgcagcagacacgcctctgctggttctgcttgctttggggggtggggtgggaaagtccctgttggtgctgagactctgattttaaagtgttcacacagacatttatcactgtgcattgatctgcacctgcacctgcctgtacagatgccaacaagcccgtgctttgggctgtcagttaaatcttgttggtcctttgggaggctgaaaatagtcacttgaacaaatttaaggtttaattccttaccagttggcaggggaaagttactgattctataacttgacataaccttatgggcacattcatgaaaaatatctgtcactcatttttaattttatgtcatgtgcttccagtgactcccattatcttttggagattcgttcccatgggggaccggttcagccaataacgaaatccaaacaaagcaacgaagcggaaccaagggagccccgcgcacagggcgtggcctcaacctgggctggggaaacacggaaaaagaaggcctggcctacacactggcattctaaccacagactaatgccggcgaataacgccgcggtcggacaaca

SEQ ID NO: 3296 - DNA, 393 bp, Homo Sapiens
  misc_feature (227)..(227): n is a, c, g, or t
  misc_feature (323)..(323): n is a, c, g, or t
  misc_feature (333)..(333): n is a, c, g, or t
  misc_feature (385)..(385): n is a, c, g, or t
ggcatacttgtctgacagatcttaatactactcctaacatttagaaaatgttgataaagcttcttagttgtacattttttggtgaagagtatccaggtctttgctgtggatgggtaaagcaaagagcaaatgaacgaagtattaagcattggggcctgtcttatctacactccgagtgtaagagtggccgaaatgacagggctcagcagactgtggcctgaggcaanatctggccaccacctgtttggtgtagcctgctaagaatggcttttacatttttaaatggttgggaaagaaaaaaaaaaaagaagtagtagattttntagcatgtgntgtaagtaatgttaaaacttaaattccagtatccataaataaagttttatgngaaccaaa

SEQ ID NO: 3297 - DNA, 463 bp, Homo Sapiens
  misc_feature (249)..(249): n is a, c, g, or t
ttttttttttaggcgtacgggtgtgtttatagtgactagagtttacaagggggctgggtggcgggactgccgtgtacacactgtaactccatgtgtccagtttgtcctgctgacgcgttccacagctgtcaccggaaagctatctcctggggccagcagcatccaggaagggggtacctggggctgcagagacaagctcgtcggcagggcagggtgagggaccatgggtggaatggcagtggctgccantgggctcggggctggcgcaggcatctcacgtcacaccgtgatgcctgctgtggctccagaagttcccaagccacgtggtgacagactgtgggtggtggccaaagtggcacatgtcaccaagcaaggtctcgagcttgcagtggtcccaccctctggggcagtgttgtgtccttgccgaggatggacagactgaccaggccccacggtcctgaag

SEQ ID NO: 3298 - DNA, 247 bp, Homo Sapiens
  misc_feature (21)..(21): n is a, c, g, or t
  misc_feature (34)..(34): n is a, c, g, or t
  misc_feature (82)..(82): n is a, c, g, or t
cgccctttttttttttttttnttgaagggtgaanaaagaagtttatattggtgttggaaccagctcaagaggagtgggtggnctcctctctgtaggcaattatcccattgggtgttcagctctcagctgagagaaggccctgaaaagagtggctcctctctgcaggcaagtcattcagatgtctgcaggtctctgaagctctcagcagacggcagctcctctctgctaacagtttctctctgaaggt

SEQ ID NO: 3299 - DNA, 2494 bp, Homo Sapiens
tggtgatgggggagctccctgctccctgcttctcaggccccacccctcctccttgttcttgctcttctcagcaagccttttggtgcctggtgcagatctgcgacaagtacctcccaggttactacagtgcagggctggtgagtgtctggaggctgggtgcatccggggctgtggcgtttcctccaggctgcaggcaggtccttgccttgccccaccctggccttcccggcttctgcccacagggccggccagttctcccctgatgggggcacagctgacttggccctcttctcatggcttgtcccacctgcaggaggccattcagctggacggggagatcttttttgcactcctgcgccgggcctccccgctggcgcatcgccacctgcggcggcagcgcattgaccctgtgctctacatgacggagtggttcatgtgcatcttcgcccgcaccctgccctgggcgtcggtgctgcgtgtctgggacatgtttttctgtgaaggtacttctgtggccctccaggccatgaggggctggggtttctgtggtggctaccaggggttctgtcatatttctggtggtccatggacaaaaggtacttgttgggtggaggtttcaccataagcagctgggggctggagaaacaggcctgattttagttctgccaccaacccagagcctgctctccctgccaagatcctgagactgatagcagctcatgtactttcacagggcctcagtttcctcatctgagattggcagtagatggggatgggggctgtgagtctatcctgatcaggacaggctgagatcttgggtctgaccaccccatgctctctactctccacccctgcaggcgttaagatcatcttccgggtggccctggtcctgctgcgccacacgctgggctcagtggagaagctgcgctcctgccaaggcatgtatgagaccatggagcagctgcgtaacctgccccagcagtgcatgcaggaagacttcctggtgcatgaggtgaccaatctgccggtgacagaagcactgattgagcgggagaatgcagcccagctcaagaagtggcgggaaacgcggggggagctgcagtatcggccctcacggcgactgcatgggtcccgggccatccacgaggagcgccggcggcaacagccacccctgggcccctcctccagcctcctcagcctccctggcctcaagagccgaggctcccgggcagctggaggggccccgtccccgccgccccccgtccgcagagccagtgctgggcctgccccagggcctgtggtcactgctgagggactgcatccatcccttccctcacccactggcaatagcacccccttgggttccagcaaggagacccggaagcaggagaaggagcggcagaaacaggagaaggagcggcagaaacaggagaaggagcgggagaaggagcggcagaagcaggagaaagagcgagagaagcaggaaaaggagcgagagaagcaggagaaggagcggcagaagcaggagaagaaggctcaaggccggaagctttcgctgcgtcgaaaggcagatgggcccccaggcccccatgatggtggggacaggccctcagccgaggcccggcaggacgcttacttctgacctctgccctggggctggactgcatggcccccctctttccctcagccaagaacaggcctggcccaaggtgccaccccctagcaccttgtcaggctgtcccttgctggggaaagtggcttggttccccatctcctcgccagctgctgatccctacacgggcaggacagatgggcagctgcaaatgagtctggagcctctcatctcccatgaggctcagctggggtctctgtcgctcctgccccagttccctctgggtcccctcctaggtgctgtcctgaatggcccgttgtcatcccaggggtgactcctggtgatgggagtcagcagtttcagattcttacactccatagctccccttaccatgaggtggagctggcttccttttccctgtcttcagccctccctgtctcccccacttcctggccagggctctcattctggacctgtgttgtaattgtgtacagaggatggcgttggcctggggtgggggtgctcgctttgtcttctgtcctttggttctccttccataatgctcctgtacccagtttatttaaggggacatgcactggaataggaaatgtcccccatctcccttcctgcaccctgctgtgctccctccaaacccaccttgctctgtgttctcaggcccccctgcttttgtctcaccaggacccatacctttcaccttgttcccttccacccctccagttagtccctatctgggtaagggtcttcccttgagctccagggggtggaacccaatgtttacattctcttctgtctctgcccccaccccatgcagcgctttgaggaattggaaaagaacctgctgttgtacctggaaaaaaaaaa

SEQ ID NO: 3300 - DNA, 264 bp, Homo Sapiens
gtctaatgaaaaggcactcgggagctatttctgaacggacctgggcttgtcggaccagtgagcggcggcggctgcgcggcggcagcggcagaaagcgtagctgcctttgctgtagtccacgccccctttgccgctccgggtgacagtctctgcggaaagtcacgtttgtgatttcgggagagcacagaacgggacggacggcgctcttgcttgggtcatcttggccaggttacgaagaaacagtttccttgtgaagcagtgcct

SEQ ID NO: 3301 - DNA, 515 bp, Homo Sapiens
agcggccgccctttgttttttttttttttttttttttttcaggtcacacaacttttattgctgaagaccatcgctgggggctgctgcagacaggaatgtggcctccttcccagtcttgctaacattccccagtgtacccagccccatcagcccctgcccagcctctccagcttgctcttctggggcagtctttcccttgagcggccatggcctgcctgagctgggctaggctgggctgatctgcttggatcctgcctctgagaagcacagcaccacaaaagactctgacgggcccaaggaaggtgaggggagcaggactggcagaggaataggtgccccagaaaaaaggctggggaaggcccaggcttttagctggcgagtccaggcacgttgatgatttgcaggaacagggccaacttagatccttcagcagggctgcctggaaggcatgggaccatgttagctttctctccatagcagtttttatgtcattgctatgtttctgaaacaactga

SEQ ID NO: 3302 - DNA, 395 bp, Homo Sapiens
tttttttttttttttttgcttttcaaaattttttttaatagttaactaagttaggaaaaagttaccatcttcatcaaatacttaaaattgtaaagcaaaatatatggaatagaaaatggcattcgttcacgtcagacacttgtgatgataaagtatggtactctgtgagtggactgatgaccaaggcagatgtgtacagatgctaaactgttgggaaaatgctgcttatgagacatctctgcttcttgagacctgaatctgcaaatgttgagcactgtaccttacaaaagccaacagtttcttggcacagagtgtaaaagtttcatgggttagaatgttggtgaaattgtacactcagtacctgaatttaaactttaggagctcacctcgtgccg

SEQ ID NO: 3303 - DNA, 519 bp, Homo Sapiens
tttaaactccacactgtaaccaggagtcttttcaaagcaatatcctggtcttgtctggcattcccttggtctaccttggaggcatttatccaggtgagaattgtggttaatgaagctccataaaacccacacaaagggtcaaccctgcattatttggtaaagtgatggggttaccataaccagcagcacaaagcacagcacttagacctgtgccagagagcttaactgtacaatgtgggccaccctagccatgataaaacaatgactgatgaagactaactcgacaaagaattgtttgagagtcacgcattctacccacttacctactctgtattttattctggcgttaaactggactgtcagaaacaaaatgctttggcttcactacccaacccaactagtctcccaacacaaccccatcccgctaagaaaactgctatcactgagtcatgtttttttgtcatgccctcaccttccagcaagggttgctgtaagaaacagcctcgagaatactaaggc

SEQ ID NO: 3304 - DNA, 3158 bp, Homo Sapiens
gaactccctttaaggagcagccccagccctgctaacagcactgctggtaccattgacagcgacggctgggacgcgggtttctcagacatcgcgtcctcagtgcccttgccagtctctgaccgctgctttagccacctgcagcctactctcttgcagcgagccaagcccagtaacttcctgctggacagaaagaaaacggacaagctgaagaagaagaagaagaggaagcgcagggacagtgatgcgcctgggaaagaggggtacagggggggcttgctgaagctggaagccgctgacccctacgtggagacccccacgagtcccaccttgcaggatatcccccaggctcccagcgacccctgctcgggctgggactccgatactccctcgagtggatcttgtgccactgtgtcacctgatcaggtcaaagaaataaaaactgaaggcaaacggactatcgtccggcagggaaagcaggtggtgttccgagatgaggacagcactggcaatgatgaggacatcatggtggactcagatgacgattcctgggacctcgtgacctgcttctgcatgaagccatttgccggccgccccatgatcgagtgtaatgagtgccacacctggattcacctgtcctgtgcgaaaatccggaaatccaatgttccagaagtgtttgtctgccaaaagtgccgggactccaagtttgacatccgccgttccaaccgctcgcggacgggctcccggaagctgttcctggactgactgctggctggcgaggaggctgcgagcgtggaatcggaagcgaccgcgggcttttttgcccttctcttagttgagcacagaaccctcagctctggtgcgggcagatccctgccatttaggtgcctaagcaaaaggacaggctgtccaaggtagaaactgtacatagccggtgaccgaatgcgacctttgccagccagagctgctgccagagctgcgttccctgcagtggaggtggactggacacccacgtgcagcgggtttggctcatttgaaaatgagggtccgtggtagctgtgcgttttgctatcattgctaagagattcccgctgattgggctcagtgccagctgttattctgcttccactgtgttggggagaggtgttcggtttccccagcctgttaatgaacagccatacgtgtaagctttttcttgagtgttaagtcttttaccaaaagtgtctgtacagcagccatccaagttgcccctacttagtggcttgccctctgcctgcctcagctgctgcctgaccggctgggggaggcactggcgggaggcctcgggctcccctggaagggcgctgggctggcgggtcagctggtggttcttaggtttccttctgtttgttaaaagggacaatgtggccacttctctgtggaaagggagttggttggggggttgagatggcccgtgttcataactcagtttcctgttttgcacgatgtaaaaaccctgtctttttgcacgatacagccaaaagtattggctgatttcttgctgagtgccctcttagttggtgtgtgaggtcttggtgggctcaggccagctgtttgcgagtgtgggaactcataggttctgtctttgtctcttcctttcacctcattctggtagcagcataaaggttaggcaatcactgggacccgcatggtgttcctccaaagaatagggtaaaggagagctgggagggagccctctccgttgggtgactcttgtgtgccctttagacaggctggcctgccggttccacagggtacagttaggacttgagtctttctttttctgttttgagttggtgagtgagtgatagggtaacatgggccttcaggatgaccccttggaactgtgccgagttccttaaatctcagctgggatcctggacctgggaggcccctgtgagggccagctctggaaaaacctgggagttgatgccggaggctgtggaagaactctgctcgagggcagggtgccctggaacactggtagttctggggctgggagggagaggggctccggctttctctgaaatgaacactgctcttcagcagttcaagtacttgttctcaaaacattttctaattgattggtaggttttcataagcattgtttctttaaggcatggaaagggaagaatgctcaagcaagtcatgtttgttttcagtgggatgggcccgcgttctcactgctgggggcttccccttcatgtggcacctttgtgccaggccaccaggcagactcttcccaccttctcccactgaagcaccaaggggcttgaaccgtaatttggctaatcagaggcattttttttgtcctagtatctttcacacttgtccaaccgtcttatttttttaaaagttctgttgcttgtattaacacgaaactagagagaaatagtttctgaagccagtttattgtgaagatccccaagggggaggttcggtagagaaaaatagtaagctggtttagaaactgacgagggcaaacagccaggacgcattggagaggaatttgccaaagatctaccctgagataacgcctgtccagtgtcttcaccacgtgaataaccagcgctccaaagtgtttttctgctttgaaaaaaaaaaattccacaagcttttaaaggtgcatttaagaatccatgtgactttagaatggaactgccggccctggcaactgtcacgtgtgctagaaggttcgatgcctctggaatgcatgtgatactcatctccattttgtttccttgattgcatttttgttcttttagcagatctgtccctgtgggtggtgtctaagaagtcggacaccttggtttttgtgttagattgagctgggcagctgcaatcagcttctttatatgcaaattaggcacgacccatctgtggttcctggttggtggctaatgaagtgaggggagggagggatgtcaccccaaaagtaggccctcccattggctttggccaggccagacacttcacatcgtttacatggttctgtgtaattttaaagtttatgtgtataaagcgaagctgtttctgtgaaactgtatattttgtaaataaatatattgctactttgaggttcatgattcaaggttcaggcgattgcgttctgtgctgaagga

SEQ ID NO: 3305 - DNA, 1006 bp, Homo Sapiens
  misc_feature (647)..(647): n is a, c, g, or t
atagccatcacctaggctggatgcagtggctcacgcctgtaatcccagcgctttgggaggccgaggcaggctgattatgaggtcaggagttcaagaccatcctggccaacatggtgaaaccctgtctctactaaaaatacaaaaatttagctgggcgtggtggcaggcacctgtaatcccagctacttgggaggttgaggcaagagaatcgcttgaacccgggaggcggagattacagtgagccgagaccgcgccactacactccagcctgggcaacagagcaagaatggtctcaaaaacaaacaaacagaaaatacgcacactaacacgactagcaggcatcgagctatcctgggtctaaggagataatataccttgtggtaatgtgtgatcctcccgaggtttaacaggtctgggactcagtacttgatcagcaataggttgtggtcacaggaaatggaagctgtctcaggacctgtagcaacttgcctgcatgctgggttatgttatcttttgagtggtgcccaatacgaggtgtctaggggaaagtcttaagtggtttggagcccatgacatggggtatgatgactagatttttgtacaggtgagcctcaataaactcatgcgtacacttgtgagaactcaantcggaaatgggcagaaatggattacatttctgggctctgaaatcccacagagttcataaaaatacatgtgtgctttggggtttccggggtaggttacccttctttatggaaatgatcttgggactggaagcttccagggaaagaatatcggtggggagacaggggtttggtttatgaattcgtaataacaccataatttaaaaattgggccatagaaaaatcggggaaatgggaggattgaggtacccaaatagcaattgttgagtttaaaactctgtgttgtgttataaacgacgacctgtggggataatttgtgaacacacaggtataaagaccacagaatttgttataaaaaaagg

SEQ ID NO: 3306 - DNA, 2094 bp, Homo Sapiens
gaattccggtccggagtcagtgccgcgcgcccgccgccccgcgccttcctgctcgccgcacctccgggagccggggcgcacccagcccgcagcgccgcctccccgcgcgcgccgcctccgaccgcaggccgagggccgccactggccggggggaccgggcagcagcttgcggccgcggagccgggcaacgctggggactgcgccttttgtccccggaggtccctggaagtttgcggcaggacgcgggcggggaggcggcggaggcagccccgacgtcgcggagaacagggcgcagagccggcatgggcatcgggcgcagcgaggggggccgccgcggggcagccctgggcgtgctgctggcgctgggcgcggcgcttctggccgtgggctcggccagcgagtacgactacgtgagcttccagtcggacatcggcccgtaccagagcgggcgcttctacaccaagccacctcagtgcgtggacatccccgcggacctgcggctgtgccacaacgtgggctacaagaagatggtgctgcccaacctgctggagcacgagaccatggcggaggtgaagcagcaggccagcagctgggtgcccctgctcaacaagaactgccacgccggcacccaggtcttcctctgctcgctcttcgcgcccgtctgcctggaccggcccatctacccgtgtcgctggctctgcgaggccgtgcgcgactcgtgcgagccggtcatgcagttcttcggcttctactggcccgagatgcttaagtgtgacaagttccccgagggggacgtctgcatcgccatgacgccgcccaatcccaccgaagcctccaagccccaaggcacaacggtgtgtcctccctgtgacaacgagttgaaatctgaggccatcattgaacatctctgtgccagcgagtttgcactgaggatgaaaataaaagaagtgaaaaaagaaaatggcgacaagaagattgtccccaagaagaagaagcccctgaagttggggcccatcaagaagaaggacctgaagaagcttgtgctgtacctgaagaatggggctgactgtccctgccaccagctggacaacctcagccaccacttcctcatcatgggccgcaaggtgaagagccagtacttgctgacggccatccacaagtgggacaagaaaaacaaggagttcaaaaacttcatgaagaaaatgaaaaaccatgagtgccccacctttcagtccgtgtttaagtgattctcccgggggcagggtggggagggagcctcgggtggggtgggagcgggggggacagtgccccgggaacccggtgggtcacacacacgcactgcgcctgtcagtagtggacattgtaatccagtcggcttgttcttgcagcattcccgctcccttccctccatagccacgctccaaaccccagggtagccatggccgggtaaagcaagggccatttagattaggaaggtttttaagatccgcaatgtggagcagcagccactgcacaggaggaggtgacaaaccatttccaacagcaacacagccactaaaacacaaaaagggggattgggcggaaagtgagagccagcagcaaaaactacattttgcaacttgttggtgtggatctattggctgatctatgcctttcaactagaaaattctaatgattggcaagtcacgttgttttcaggtccagagtagtttctttctgtctgctttaaatggaaacagactcataccacacttacaattaaggtcaagcccagaaagtgataagtgcagggaggaaaagtgcaagtccattatgtaatagtgacagcaaaggcccaggggagaggcattgccttctctgcccacagtctttccgtgtgattgtctttgaatctgaatcagccagtctcagatgccccaaagtttcggttcctatgagcccggggcatgatctgatccccaagacatgtggaggggcagcctgtgcctgcctttgtgtcagaaaaaggaaaccacagtgagcctgagagagacggcgatcttcgggctgagaaggcagtagttttcaaaacacatagttaaaaaaaaaaagctt

SEQ ID NO: 3307 - DNA, 399 bp, Homo Sapiens
tttgtttccttcaagagaggtcgtgtttctcttggggctggaggctggaggctcagcccaggtgccgaggggccaccagaagacatggggctagtgcggggaccaccagcggtgcaagcaggaccacccccaaggtggctgtctccagagttctgcctcttgcagtacagcgaggaggaggggtgcaaggagcccctgtggttaaaggtggaggcggaggtgtccacgctgtagcggttcatgcccacagggttcaccaggtactcttcggtggtgactgtcttgactgcagatgtatctgttttttattatttgtagcagttactctactttcctaagctcatgcatttgacttatccaaggcagggtctcacacagtgcttggaacagaagagggtt

SEQ ID NO: 3308 - DNA, 747 bp, Homo Sapiens
gcctcgccgtaggaagtgcatcagcctgcctgaagataattcatcctcttccccaaaacctggcctcttccagcgtgcccttgggcagctaaaaccgtcatctgctaacccctgctcacccaccccaggctggtctagaactcctgacctcaagtgatccgcctgccttggcctcccaaagtgctgggattacaggcatgagccaccatgcccaggccgggaataattgttttttaagtgtgtatgttctaaacagaagaaggcgctaccagaggaacagaaagcacccaggcgaaggaggggcatggacaggggtggggagaggggtgggcccaggaagcatagaggggcagggcttccaggtgagccaataggaccagggccaaggcaagagggacaagcagaggacggtgctgagagccacctgggctgggaccacagcaggaaaagagctgcgatgcagcctccgtccaccactcctcctaaactgcacttccatgctgtcaccttcccgaagcatggctctccagagctcccctttgcccagtcttagggtgagggtgtttccagctggctccccgccccatccacaggttgctcctcttagcacctcctgtgctctccctatctacagcccatctggagtaggttctgctttgtggcagccgaggggcggtgctcagctcccatgaagggggtctcctcaaatcggactgtggtgcttggctcgtctgcggacacgcggtg

SEQ ID NO: 3309 - DNA, 192 bp, Homo Sapiens
  misc_feature (142)..(142): n is a, c, g, or t
  misc_feature (186)..(186): n is a, c, g, or t
ttttttttttttttttttttgcaataaatgctttttattgtatgctcatttcaatgagtaacatttagaaataataatcccacataacagtagcgatcttattttacagcgtgtacatcatttacagccacataacacacanttttagtagatattccaaatttaatattctgaagttaagaaagntaaaaa

SEQ ID NO: 3310 - DNA, 435 bp, Homo Sapiens
tttttttttttttttttttttttttttttttttttttagggttgagggggtttcaccgggttggccgggatgggctcgatctcctgacctcgtgatccccccgccttggcctcccaaggggctgggattgcaggcgtgagccaccgcgctgggcctaaatcaaatctttatccatgcacattggaacacaggattactgggttgaaatcattctagttttggcatttaaatacttggagatgaatctattttagcacaagggataaataactcgggagggcatctctatcttctttccttttgggcatttggctataccacgtttaggtactaaaacagctttgcttatgttggccaggggaaaacatggcattctgtgcgcaaagctaatgatcgccagccctgccttggcccctcccttgtttatgggcattg

SEQ ID NO: 3311 - DNA, 2683 bp, Homo Sapiens
tgggcgccggcggagcggagggagatccgagcggcggcggcaagctggctgcgagcggctgagcactccaagctcgccggcctttggtctccaggacttgtcccagcagcccctcgaactgagaattacaccatcggacccctggctctgaggccttcagacttggactgtgtcacactgccaggcttccagggctccaacttgcagacggcctgttgtgggacagtctctgtaatcgcgaaagcaaccatggaagacctgggggaaaacaccatggttttatccaccctgagatctttgaacaacttcatctctcagcgtgtggagggaggctctggactggatatttctacctcggccccaggttctctgcagatgcagtaccagcagagcatgcagctggaggaaagagcagagcagatccgttcgaagtcccacctcatccaggtggagcgggagaaaatgcagatggagctgagtcacaagagggctcgagtggagctggagagagcagccagcaccagtgccaggaactacgagcgtgaggtcgaccgcaaccaggagctcctgacgcgcatccggcagcttcaggagcgggaggccggggcggaggagaagatgcaggagcagctggagcgcaacaggcagtgtcagcagaacttggatgctgccagcaagaggctgcgtgagaaagaggacagtctggcccaggctggcgagaccatcaacgcactgaaggggaggatctcggaactgcagtggagcgtgatggaccaggagatgcgggtgaagcgcctggagtcggagaagcaggacgtgcaggagcagctggacctgcaacacaaaaaatgccaggaagccaatcagaaaatccaggaactccaggccagccaagaagcaagagcagaccacgagcagcagattaaggatctggagcagaagctgtccctgcaagagcaggatgcagcgattgtgaagaacatgaagtctgagctggtacggctccctaggctggaacgggagctggagcagctgcgggaggagagcgcgcacctgcgggagatgagagagaccaacgggctgctccaggaagagctggaagggctgcagaggaagctggggcgccaggagaagatgcaggagacgctggttggcttggagctggagaacgagaggctgctggccaagctgcaaagctgggagagactggaccagaccatgggcctgagcatcaggactccagaagacctttccagattcgtggttgagctgcagcagagggagcttgccttgaaggacaagaacagcgccgtcaccagcagcgcccgggggctggagaaggccaggcagcagctgcaggaggagctccggcaggtcagcggccagctgttggaggagaggaagaagcgcgagacccacgaggcgctggcccggaggctccagaaacgggtcctgctgctcaccaaggagcgggacggtatgcgggccatcctggggtcctacgacagcgagctgaccccggccgagtactcaccccagctgacgcggcgcatgcgggaggctgaggatatggtgcagaaggtgcacagccacagcgccgagatggaggctcagctgtcgcaggccctggaggagctgggaggccagaaacaaagagcagacatgctggagatggagctgaagatgctgaagtctcagtccagctctgccgaacagagcttcctgttctccagggaggaggcggacacgctcaggttgaaggtcgaggagctggaaggcgagcggagtcggctggaggaggaaaagaggatgctggaggcacagctggagcggcgagctctgcagggtgactatgaccagagcaggaccaaagtgctgcacatgagcctgaaccccaccagtgtggccaggcagcgcctgcgcgaggaccacagccagctgcaggcggagtgcgagcgactgcgcgggctcctgcgcgccatggagagaggaggcaccgtcccagccgaccttgaggctgccgccgcgagtctgccatcgtccaaggaggtggcagagctgaagaagcaggtggagagtgccgagctgaagaaccagcggctcaaggaggttttccagaccaagatccaggagttccgcaaggcctgctacacgctcaccggctaccagatcgacatcaccacggagaaccagtaccggctgacctcgctgtacgccgagcacccaggcgactgcctcatcttcaaggccaccagcccctcgggttccaagatgcagctactggagacagagttctcacacaccgtgggcgagctcatcgaggtgcacctgcggcgccaggacagcatccctgccttcctcagctcgctcaccctcgagctcttcagccgccagaccgtggcgtagcctgcaggctcgggggcatagccggagccactctgcttggcctgacctgcaggtcccctgccccgccagccacaggctgggtgcacgtcctgcctctccagccccacagggcagcagcatgactgacagacacgctgggacctacgtcgggcttcctgctggggcggccagcaccctctccacgtgcagaccccatgcgtcccggagcctggtgtgtgggcgtcggccaccagcctgggttcctcaccttgtgaaataaaatcttctcccctaaaaa

SEQ ID NO: 3312 - DNA, 805 bp, Homo Sapiens
  misc_feature (242)..(242): n is a, c, g, or t
  misc_feature (547)..(547): n is a, c, g, or t
  misc_feature (610)..(611): n is a, c, g, or t
  misc_feature (738)..(738): n is a, c, g, or t
gtcattaatgaaaaaacacaccatagacggttacctacactgagaagagtggaaacgatggtgttaggggagaggaataagaaggtccgttcagttagagctttgcaagattcgtatatacagcaccagatcctatgaaatcagcgcccctcgagtcagtacagtttgtgagaaatgaacacttcagaattgcagtagaaaatatggccataaaaaaacttcggtcttccagtcctatgcangaaagggcaccatgcaaggtggggtctcgctggagtggctcgcggctctggcgaccctggggctccccttccccagccccgaccccgggccccacctccagggccagtcacttgcttccagagtgcactgccgtcacagtggtgggcctgggtctccgctcggctccaactcctgagacccccgacgaagaagaaatgaaactacagagcgtggaaggtgccagacagtctttttggctggccaaactgaggctgctcgaaacacttgcatttgaactgtccaggctgctgccgaggtgtagttntctcatatgtctgacgacggccgtggcattaaatgcttgtctccatttgctcttggcaaattnnttccgatctgggcgctgacggactccgtgatgtttttgtgagggctgtgtaccagcgatcccatggtgccgagctgcctgcttacacgtgtatctttttaatcgggtccttctccatcagtttccgnatgaatctttttcgagaatccgggtgtcattccagttaggagagtcaacttatatttcgcctttgag

SEQ ID NO: 3313 - DNA, 463 bp, Homo Sapiens
tggcccgaggagtgtgctcaggccgggctttccagaaggccacaggccactgcaaaccctgctgcctgccggccgcccagacaccacatacgccacctggcggccctaagccactcccgccacacgctcactccaggttcgtatagaaaaagcacagctctcactggccagtagctgccaaaaagaacacccatcgtataaggaaatccagccccatagaaaacaatctgcccaccgaccccctttctaaggatagcctttgaaggggttttttggttccttttttttttttcagtttttgtttttacttttgtcccgccgagtactatgtattaccagccccccaccccacagatcagttttcctagtctttgggaaacgggttgtgttttttttcctttgccgagttggatttccggtcccggctgacacctcccttcgagtgtgcgcccctccccacccc

SEQ ID NO: 3314 - DNA, 700 bp, Homo Sapiens
gtgagcatggtgccagcctgggccagagcagctcctcctaaggggtggctgctcagtgacgccgggttgagggacagaaggaaagttgctggctgcgggctcctccatgctcttctcctctctccccagtgcaagatgtctctgaacgggcagcgtggggagtgctggtgtgtgaaccccaacaccgggaagctgatccagggagcccccaccatccggggggaccccgagtgtcatctcttctacaatgagcagcaggaggctcgcggggtggacacccagcggatgcagtagaccgcagccagccggtgcctggcgcccctgccccccgcccctctccaaacaccggcagaaaacggagagtgcttgggtggtgggtgctggaggattttccagttctgacacacgtatttatatttggaaagagaccagcaccgagctcggcacctccccggcctctctcttcccagctgcagatgccacacctgctccttcttgctttccccgggggaggaagggggttgtggtcggggagctggggtacaggtttggggagggggaagagaaatttttatttttgaacccctgtgtcccttttgcataagattaaaggaaggaaaagtaaagtgtgtgtcttttgcctgagtctttggggtcttccagggagagatgcagagcctggcctaggttggcctacccg

SEQ ID NO: 3315 - DNA, 113804 bp, Homo Sapiens
gatcaaatgtgctcttatcaagagagtttttaaaactgcagatattttgaaagaaaatcttaaaattttattacaatctactactccaaagaaatataagaaaaaaaatatttgacccatctcgtctctaccctgaatttccctgagattgagaaggaattattcaattttctcttctttctgacagaactatcccagatgaatagctacaaagctacaatggccaatggacgtaccataagatttgtgctctgagattcccttgttaagggtatgagagggactcatgggaagaatttgggctgaggagggatgggaaaggaaagagggaaggagaaaaggagggcattcccctagaagctcacaaaaatacagacataacctcataaaccctaccacaatacacggggaaaaaaaatgtgccttccccaaagttacacaaagtcctcttgtgtcttctttctcccctgtcaaggtgagatctcacatacataatactgttcattggtgactcttcaaggatgtggagttggaaaagaagagggtataagacattgtgatatacctgagcccccaggcttcatagccccacgttctgatggtagttttctgtttttgttcaaagaaaagagaattaagattatgccattaaaacactattgttttaaccttctatgataggtagacacatggtagaaatggagatagagagaaaggcatgtctttgggatatatttttgaagtggaccaatttatgttattgttgagggaaaagcaaataaaaacagaaccaagaattaccctgaggttttgatagggtggatgctattgtctgagatagagaaaaatgatcaagaagtaggtttagggatgaagaatagaaattaagagctttggtttggccatgttaagtttgcaacatctttagtggtcccagtaaatgcagatttggtagactccagtgctgtatttaggctgacgtattcttcttaggtgaatgacaccagaatccactctgtctcccaggaggaaaacctaaatggcaccccagaccagccttccccttcctgccagccattcacctgcaaccaattcaagctctctacatctcatcaccctgttattacatctaaattctcatacccaaccgacttcttcaatccaattcccataatattgtgcccctttcaatcattaggacaaaaaagtgtagttgtgtaactgctactggatggtatccatcacagcacaggacacaatccaacacacgataaagatttgatgatacgctgggcatggtggctcacgcctgtaatcccaggactttgggaagccgaggtggaagaatcgctcaagcccaggagttcaagatacgcctgggcaacataatgagaactcatctctacaaaaaaaatttaaatgagatgggcattgtggcatatgcctgtagttctagctacttgggaggctgaggcaggacgatggcttgagcccgagaggtcgagactgtagcgagctgtgatcatgtcactgcactccagcatgggtgagagtgagaccttgtctaaaaaaaagatgatctgaagtactgtagaattttatgtttcttttgtttcttttttgtatccttcccacacaaccctaacgtggttacttccaacaatacccacaggtaatgccgccacagccccagcagaagtctggttaaccagagctccagttaagacatcaaaactagttccaaagtctagaaaaatctcagcatcaatcagttagcccaatgtttccagcgcaggtgtgtccagttcaagaacttcatctttgatgattccttatctctttcaggcagtgaggcaatagaaggagagaagaaagagaataaatgctacatatatgtcatttcatttccacactctctatcatcatcattctaatatcatatggtattgttgcattttcctgttccaatggccatcagaatggatctttagttaatgccaattgtctactgtatatataatcattacagaatgaaaagagaggagtaagcataaatgattagaagttgttcaaatttcttcagaaaaggttcttagaataagagcctctactggggccaggtgcggtggctcacgcctgtaatcctggcacttggagacgccaaggagggcaaattacttaaacacatgagttcaagaccagcctgggcaacatagtgaaacctcatctctattaaaaatacaaaaattagccaagcgtggtggcgcacacctgtagtcccagctactcggaaggctgagacacgagaattgcttgaaccagggtgatagaggttgcagtgagccaagatcaccccactgcactccagcctttgtgacagagtgagaccctgtccccccaaaaaataaataaataaataaataaataaataaataaataaatagagtctcagttggtgttgacaagtgaaatgaagacccaggacatggcagaaaggaagacagaaattaccctagttagagaaagtacattgagatgaggcaaaaccaatcagatagaagcagctcatgaaaaggtgtgcatcaagagatgcagacacttatatgaagctggcatgggcattccatggaggtcattagagttcatgggcagaaatgtgaatttcattcctgaagtaactgagaaatcattagagcaaatttgaccaattataattaaccctattgggccagccaggggcagaaacatacttccatcctcttttccagacctcaactccataagaagttaatttgtattgcacaacccagtcttctggcttagacagaaacatttcgttttttagaaattaccaaaaatatttatagcttgactaagctaatttaaaacacacagcaaaagcatggcatgccttacgttctctgggctgcatatctctaagcccgcgtgatggctttgtcgagagcactctattaaaagcaacactctccattcaccaggactgttgcatagattacataggacctcttttgttcattaggtaactgtctagcatggagacgcaattgtttcctgtcatgttttcttcagaacctaaactttcgaggcattcgggccttgagcaagcgcctgagctcatctcagggtgaggtatttcgtgtactgacccagcaaaatattttataatccatttcctaatccaggaaaagctgagtcttacccttgcataaacccaaaatttgccctgaaaaacaaatgtgattaaataaaacaattggaaaaagatttgctttgttctgctgctaagattcaacatttgcccaatagccacagccagcctagccatcaggaatcgtggccaaggtatgcaggcagccaagctcattccttcacacctgacacagacaccagacttttctgcatctcttcctggccctttaggagaagcagagactactattggttcctttactatcaaagacagacaccaaaagctcctcaaatctccagagaatgtgaagtttatcatttctaagtatactggacaaactctttttttttctgatttaactagtaatatgtcatctggaaaagctattttgtcataaattagaaagagcatcaagaagaaataaaaattattttgctccaacatgtacatggagaaaaggtaagtggaagagcagaggggaggggaagggaggccattagcaaaggccaccactagctaaggtttgtgctggaaacttctttaagcagatgttgatttcacatgctgcatttgatacacgtgtctcctgataaaagcaaagggaatgaaattacaaagtccaacactgtcatcaccacaaagcaatatgcaaattatggtcttaaaataagtgtctgagagacctgggtagtttcatccatacaaaggcaatttctttgtcatcctcttactgattaactacactaatctccggtgaagcgagcttgggattcctacaaagtacaatgttgtgatccatgacatttaagacatggaaggggcctctccagaaatgagccactgggctgagcctgggcagaaaatagactgcaatgagtcacacaatgtaagacggcacaaaagatgattcaccatgtctaaaggaaaataaataggagtgaatggctagtgtactcagggaaactcagtcccaatgggcagagtttattggtctgcatcactctgagttccgtcatggagctgttgggatgaggtgatggtgctggaaatgctgaaacggtgagggggtgaggaagcagctccttttggggcagtagcagtgcagtagctgcttgtttccagttaaggatctctgtggcagggggatacatccgcactggatgctctgaagtgtatgatgtgaaatgatttatccagaaggctgcacagctggcatcagataaaacatttggaaccactttagctgtgcattacctagaggcagcattctcttcctcgatgctgaatttaaaccattcctgtcatttcagactctctaatgaaatctgtttctcacaggatgtctctgtcttggaaatggcatgtggtctccttgcaaaatgaaaaggaatttaaagcatataaatcacctgtttttcttcctctctcaccctacacacacacacacacacacacacacatacacacagacacacacacacacacaccctttctgttaaaaaaatttcagaacagaagaagaaaagcatggaagtgataaaggtatgcttctcagaacagggaatggtgagggaggagtggctactgcctgtcaatagctcacaagcagcaatgctgactgccaaatgactcatgcaaaagtcccagagggatcggttccctcagtcgccctttaggagagagagacagaaaacgtgatataaatgttcccacagaatcacggctttgtcagatccaaggcttatgctgctgctcactatgctggagtgtaaataagttgatgtgccctatcgtagctaaaaacctaacagaaaacattcaaaacactcacatacatacttgtacacaattcaagctccaatgcgaaagtataaatagtctgagtctctcctgttctatgcttgaatattaaagtaagttttaaagccttccaatattacttgatgcaatttaaaagctaaatctatattgtgatattactatctttatctcaactataattccaaaaccacttcaagaaactaaaaatcaagtttaagcagaacccaggaagggctgcagtttgaagtctaaacacaaatgctctttactattggtaaataggggccttacttccattgattataagccacagttacaagaacaccacatctttaacttttcccatataccttggttttccatggtgatgatgctactgcttaccatagttcttcacctcgcctggaattagccaaagaattggatgctattttcaagggtgctagaaaagacacctagggctcggcccaatttgtaacagtacaacaaatggttagtgagccttgtttgtctgagtaccctccttcctccacacaatgtggctcagaaacagcagctaagtagaggcttctgtgcccctctcttaaggtgaacagacagggaggacaccaggagcccttatcaatgatggttcagtgagaaatgggaagagttttgttgttttttgtttaaagaagcagaccctctgaatactttcctagagagcccaaaccattcaggttgcttgatctcttgagttgccagggttttctatccaggcctttggccaaaactgctgtggtcaccatgcattgtgagattacagtgctcaaatagttaatgtggctgaaagcttccactggacattttatgggaggtgacacaaagccactggggaagaaactggttcttcataggaagtcctaaagccctacaccataaatcacttcaggtgtcaaaacatcttcttaagccacatcatcaatgtttctggctttcattaacacaagcaaaaccacctgcagtcctcactaccaaaactaagagctttagtcttcctgaggttctaccatgtttcttatccatattaattattgcagaaacacctaaacccttcactcattgcttagtgtcaggcttgccatctaaagtatgttttcagaaatgtcaagcagtttttggccaccgagtgtatgtcagtgtattctggcggatacaaattattgttttgcgttacttaccatattatcttgcaataaaagacctgcaaactcatcacaagatcaactgcaaagtcatctacagaatgtaaccatatctataatgacaaagaaaacattgttatattaccaagtcaaaatatcctacactggcgctatcctacacattgtacggccaattataaatatctttctggtggttttagcccaagtaaaagttaccccagtgaaggtgtgttaatgaagtccactccactccctgcctggttactaaaacctttactcaatgctcagaacaaagtctgattaattcttcactgactttcagaatacaaacagtatccgtattttctcttccattaaaacaagcagtgattagcagaccctggcaatacatactcagtcattcaaatctctttagaaggtactgaaagatactttgtaggcaagagtcatgaaaccaagatttcagggtcaagtacaaaacaggcacaactcttaagtatattccttttctaataaaaagtattttcagatctcttatattaaaatagaaaatagttttggttgttctgacagcagtttatcatactggctccgtcctgagctttctagtgctagggtctggccatgtctgtgctttccgcaaggagtcacagtaacttaatattcttctacaatgtttgaaggggaccgttagctatatatggcctgggcccagatctgtgtcttcctttcctaggcttattttcaaatagaaaataaaaataagtcccacttatgtcaaagagtttcaaagagctttgtatttaaaaaaaaaaacacaactaattttgatggcaactcactgaaataaggaaaaggtgttaacaagattcttattggaagattgcaatactaggcagggaaggccatggtatgctgacaagcatattgcagtacagttgaacaataatttgataaatatcataagtcaaaaatgtatttaatacacctaacctactgaacaccctaacttaacctagcataccttaaaggtgttcagaaattacattagcctacagttggacaaaatcatctggtacagagtacactgtagagtactggttagttaccctcgtgatattatggctgcctcggagctgcaactcactgatactgcccagcatcacaagaaagaagatcatgaagcatactgctagccccagaaaagatcaaaattcaaaattttgactacagtttcgattgaatgtgtatcacttttatatcatcacaaagccaataaattgtaagtcgactgacatacagtcataagtctgggacaatctgtatagtactttgtagttttgtttttatttttttgagacaggatctctgtcatccaggttggagtccagtgaaacaatcatggctcactaaagccttaacctccccaggctcaggtgatcctcccgcctcagcctcctgagcagctgggacatagtcatctctaaattgaaaacgtgcaaaagatgcaatggtaaaaaataaaaattaaaaaattctaaaaaaacacgtaaaacttaggattccttggggaaagggaagtgcctattttctcatcgtgctttgacccttgcttgatttccactgcaggcattcgccagccctttaccatgacatcttctgtgggctcaggtctgtcccaatttcagagatcttcaagagtctgtatatttcatctgcctctgaagcccacaatgtagaatttggtaagaagtcccactgaccaacacaggatccactagttcagattatccctgctcaggttagttgctgcaaaaactccttggctctgcctaatccccatgttgcccattcctttctgcaatttggtcttgtttacaggattgggtctctgcctaggttcccctttaattcttgccagttagttgccctatttagtacactctttaccctcaaagacaggtgctaaatcctgagcctgagttaatggagaaagagcccctaatggtttttgccaacaaatatctagagctatctaggacttctgtccctgtactctcaaccaaataaaggtgtatcatttgggatcatgatttgagtttcctggctccagaggcccaagttctaagtctccctactactatttattcacttagctggaggtgtgtgcaacttgtctctgaggtggtagcaataatctctcccatctcacatgcacatttttaaaaaactttttattttgaaataactatagtctcacagaaggttgtaagagtcccttgtagtcttgaatcaacttccctaactgttaatataaaaaatatagctatagggccgggcgtggtagctcacccctgtaatcccagcattttgggaggccaaggtgggcgggtcaccaggtcaggagatcaagatcatcctggctaatacggtgaaaccccgtctctactaaaaatacaaaaaaaaattagccaggcatggtggcgggcgcctgtagttccagccactcgggaggctgaggcaggagaatggcgtgaaccccggaggcagagcttgcagtgaaccgaaatcacaccactgcactccagcctgggtgacaaagcgagactccgtctcaaaaaaaaaaaaatatatatatatatagctttagtacaatatcacaattacagtacaatatataatgagactattatgaacaattagatgccaataaactggaaaatctaggagaaatgaataacttcctggacacatacaactctccaagattgaatctagaagaaataaaaatcctgaataaaccaataagtaatgagagtaaagcaacaattaaaaaaaaaatcttccatcaaagaaaagctcaggaactgatgacttcactgatgaatcctaccaaatatttaaagaactaatatcaattctactcaaactcttcaaaccaattgaagaggagggaatacttccaaacccattatattaggccagcattaccctgataccaaaatcaggcaaggacacaacaaaaaaaactacaggccaatattcctgatgaagatagttgcaaaagtcctcaacaaaatatcagcaaaccaaattcaccaacatattaaaaagatcatttatcatgattaagtgggatttatcctaaggatgcaaggatggctcaacatatgcaaataaatcaatgttatacattggattaatagaactaataacgaaaagcatatgaccatttcaacagatgctgaaaaaacattcaataaagttcaatgttcctttatgataaacaacctcccactctccccaccaaaaaaaaaatggatataaaaggaacacatgtccagaaaataaagacctatatgacaagcccacagctaacatcatacttaacaggaaaaaatccaaatactttcctctaacatatgaaataagacaaggatgcccactttcaccagttttattcaatataatactggaagctgtagtcacatcaatcacgcaagagaaaaaggaaaaggcatccaaattgaaaacaaagaagtcaaattatctttgttcacagaagccataaccttgtatttagaaaaccctaaagactctaccaaaaaaactgttagaactaaaaaacaaactcagtaaagttacaggatttaaaaaatgtacaaaaaatcagtagcatttacatacagtaggagtgagcaatctaaaaaaaatatcaagaaagcaatgccatttaaaatctctagaaaaaatataaaatacctaaaaataaatgtaacgaaaaaagggaaagatctctacaaggaaaagtaaaacctctggtaaaagaaattgaagaggacagaaaaaaaaataaaaagatattccatgaacatgaattggaagaattaatactattaaaatgtcagtactacccaaatcaatgtacagattcaatgcaatccctatcaaaatgccaatgacatttttcacagaaataaaaaaaaatcttaaaacaagtaccaagcaataaaagaccctgaatagccaaagcaattctgagcaaagagaacaaagctggaggcatcacaatacctgacttcaaaatatactataaagctattagcagtaaccacaatagcatggtagttatataaaaactgacacataaaccaaaggaactgaatagagagcctgtaaataaatccctccatttatagctgactcatttttgacaaagtttccaagaatatacagtagggaaagtacaatctctcccataaatggtgttgggaaaattggataaccatatgcagaagaatgattggataaccatatgcagaagatagatccctatctctcataatatacaaatgtcaaattaaaatggattaaaatctaagatctgaagatagctgttccaagatggctgaataggaacagctccagtgtgcagctcccagtgtgaccgacgcagaagatgggtgatttctgcatttccaactaaggtacctggttcatctcactgagactggttggacagtgggtgcagcccacagagggcgagctgaagcagggcgggatgttgcctcacatgggaagtgcaaggggttggggcatttccctttcctagctaagggaagccatgacagactgtacctggaaaaacgggacactcctgctcaaatactgtgcttttctcaaggtcttagcaactgacagacaaggagattctctcccatgcctagcttggcaggtcccatgcccacggagccttgctcactgctagcgcagcagtctgagatcaaactgcgagacggcagcctggctgggggagggacgtccgccattgctgaggcttgagtcggtaaacaaagcagtcaggaagcttgaactaggcggagcccactgcagctcaacaaggcctactgcctctatagactccacctctgtgggcagggcatagctgaataaaaggcagcagacaacttctgcagacttaaacgtccctgtctgacagctctgaagagagcagtagttctcccagcatggtgtttgagctctgagaatggacagactgcctcctcaagtgggtccctgacccccctgtagcctaactgggagacacctcccagtaggggctgaaatacacctcatataggtgggtgcccctctggtatgaagcttccagaggaaggatgaggcagcaatatttgctgttctacaatatttgctgttctgcagcctctgctggtgatacccaggcaaacagggtctggagtggacctcaagcaaactccaacagacctgcagctgagggacctgactgttagaaggaaaactaacaaacagaaagcaatagcatcaacatcaacaaaaacgtcatctacaccaaaaccccatctgtaagtcaccaacatcaaagaccaaaggtagataaaaccacaaagatggggagaaaccagagcagaaaagctgaaaattctaaaaaccagagtgcttcttctcctccaaaggattgcagctccttgccagcaacagaacaaagctggacagagaatgactttgatgagttgacagaagtaggcttcagaaggttggtaaaggccgggcgcggtggctcacgcctgtaatcccagcactttgggaggccgagacgggcggatcatgaggtcaggagatcgagaccatcctggctaacacggtgaaaccccgtctctactaaaaatacaaaaattagccgggcatggtggcgcgcgcctgtagtcccagctacacgggaggctgaggcaggagaatggcgtgaacccaggaggcggagcttgcagtgagtcgagatcgcgccactgcactccagcctgggctacagagcgaaactccgtttcaaaaaaaaaaaaaaaaaaaaaaagaaggttggtaataacaaacttttccaagctaaaggaggatgttcgaacccatcataaggaagctaaaaatcttgaaaaaaggctagacgaatggccaactagaataaacagtgtaaagaagaccttaaatgacctgatggagctgaaaaccatggcacaaaaacttcatgacacatgcacaagcttcaatagctgatttgatcaagtggaagaaagggtatcagtgattgaagatcaaatgaatgcaatgaagtgagaagacaaggttagagaaaaaagagtaaaaagaaacaaacaaaccctccaagaaatatgggactatgtgaaaagaccaaatctgcatttgattggtgtacctgaaagtgacagggagaaaggaaccaagttggaaaacactcttcaggatattacccaggagaaaatccccaacctagcaagacaagccaacattcaaattcaggaaatacagagaacaccacaaagatactccgcgagaagaaaaaccccaagacatataattgtcagactcaacaaggtcagaatgaaggaaaaaatgttaagggcagccagagagaaaggtcaaattactcacgaatgggaaggccatcagaataacagtgggtcccttggcagaaaccccacatgccagaagagagtgggggccaatattcaacattcttgaagaaaagaattttcaacccagaatttcatatccagctaaaccaagcttcctaagtgaaggagaaataaaatcctttacagacaagcaaatgctgagagattttgtcgccaccaggcctgccctacaagagcccctgaaggaagcactaaacatggaaaggaacaaccagtaccagccactgcaaaaacatgccaaattgtaaagatcatacatgctatgaataaactgcatcaattaatgggcaacataaccagctaacatcataataacatgatgaaattcacacataacaatattaaccttaaatgtaaatgggctaaatgctccaattaaaagacacagactggcaaattggataaagagtcaagacccatcagtgtgctgtattcaggagacccatctcacgtgcagagacacacataggctcaaaataaggggatacggaaagatctaccaagcaaatggaacgcaaaaaaaaaaagccggggttgcaatcctagcctcggataaaacagactttaaaccaacaaagatcaaaagagacaaagaaggccattacataatggtaaagggatcaattcaacaagaagagctaactatcctaaatatatatgcacccaatacaggagcaccgagattcataaagcaagtccttggagacctacaaagagacttagactcccacacaataataatgggagacttttaaccccattgtcaatattagatcaacaagacagaagcttaacaaggatatccaggacttgaactcagctctacaccaaggggacctaatacatatctacagaactctccaccccaaattaacagaatatacattcttctcagcaacacatgacacttattctaaaattgaccacataattggaggtaaagcactcctcagcaaatgtaaaagaacagaaatcacaacaaactgtctctcagaccacagtgcagtcaaattagaactcaggattaagaatctcactcaaaactgcacaactacatggaaactgaacaacctactcctgaatgactactgggtaactaaggaaattgaggcagcaaaaaaagatgttctttgaaaccaatgagaacaaagacacaacataccagaatctctgggacacatttaaagcagtgtgtagagggaaatttatatcactaaatgcccgcaagagaaagaaggaaagatccaaaactgacaccctaacatcacaattaaaagaactagagaagcaagagcaaacacattcaaaagctaacagaagacaagaaataactaagatcagagcagaactgaaggagatagggacataaaacacccttcaaaaaaatcagtgaatccaggaactggttttttgaaaagatcaacaaaattgataggccgttagcaagactaatcaagaaaaaaagatagaagaatcaaatagatgcaataaaaaatgaaaaaggggatagtaccactgatcccacagaaatacaaactaccatcagagaatactgtaaacacatctacacaaataaactagaaaatctagaagaaatggataaattcctcggcgcaaacaccctcacaagactaaaccaggaagaaggtgaatctctgaatagaccaataacaggctctgaaattgaggcaataattaatagcctaccaaccaaaaaaagtccaggaccagagggattcacagccgaattctaccagagatacaaagaggagctggtaccattccttctgaaactatcccaatcaacagaaaaagagggaatactccctaaatcattttatgaggccagcatcatcctgataccaaagcctggaggagacacaacaaaaaaagagaattttagaccaatatccctgatgaacatcgatgtgaaaatcctcaataaaatactggcaaactgaatccagcagcacatcaaaaagcttatccaccatgatcaagtcagcttcatccctgggatgcaaggctggttcaacatacacagatcaataaatgtaatccatcacataaacagaaccaacaacaaaaaccacatgagtatctcttgatgcagaaaaggcctttgacaaaattcaacagctcttcatcccaaaaactctcaataaactaggtattgatggaacgtatctcaaaataataagagttatttatgtcaaacccacagccaatatcatactgaatgggcaaaaactgcaagcattccctttgaaaaccggcacaagacaaggatgccttctctcaccactcctattcaacatagtgttggaaattctggccagggcaatcaggcaagagaaagaaataaaggatattcaattaggagaagaggaagtcaaattgtccctgtttgcagatgacatgattatatatttagaaaaccccatcatctcagcccaaaatctccttaagctgataagcaacttcagcaaagtctcaggatacaaaatcgaagtgcaaaaatcacaagcattcttaaacaccaataacagataaacagagagccaaatcatgagtgaactcccattcacaattgcttcaaagagaataaaatacctaggaatccaacttacaagggatgtgaaggacctcttcaaggagaactgcaaaccactgcccaacgaaataaaagaggacacaaacaaatggaagaacattccatgttcatggataggaagaagcaatattgtgaaaatggccatactgcccaaggtaatttataggttcaatgccatccccatcaagctaccaatgactttctccaaagaattggaaaaaactactttaaagttcatatggaaccaaaaaagggcccgcattgcctagacaatcctaagcaaaaagaacaaagctggaggcatcatgctacatgacttcaaactatactacaatgctacagtaaccaaaacagcatggttctggtaccaaaacagagagacagaccaatggaacagaacagaggcctcagaaataacactacatatctacaaccatctgatcttttacaaatctgacaaaaacaagaaatggggaaaggattccctatttaataagtggtgctgtgaaaaatggctagccacatgtagaaagctgaaactggatcccttccctacgccttatacaaaaattaattcaagatggattaaagacttaaatgttagacataaaccataaaatcccttgaagaaaacctaggcaataccattcaggacataggcatgggcaaggacttcatgactaaaacaccaaaagcaatggcaacaaaagccaaaacagacaaatgggatctaattaaagagcttctgcatggcaaaagaaactatcatcaaagtgaacaggcaacctaaagaatgggagaaaattttagctatctacccatctgacaaagggctaatccagaatctacaaagaactcaaacaaacttacaagaaaaaaaaacaaccccatcaaaaagtgggcaaaggaaatgaacagatacttctcaaaggaagatatccctgcagccaacagacacatgaaaaaatgctcatgatcactggtcatcagagaaatggaaattaaaaccacaatgagataccatctcacgccagttagaatagtgatcattaaaaagtcaggaaacaacagatgctggagaggatgtggagaaataggaatgcttttacactgttggtgggactgtaaattagttcatccattgtggaagacagcatggtgattcctcaaggatctagaatgagaaataccatttgacctagcaatcccattactgggtatatacccaaaggattataagtcatgctgctataaagacacatgcacacgtatgtttattgcagcactattcacaatagcaaagacttggaaccaacccaaatgtccatcaatgatagactggataaagaaaatgtggcacatatacaccatggaacactatgcagccattaaaaaggatgagttcatgtcctttgcagggacatggatgaagctgggaaccatcattctcaggaaactatcacaagaagagaaaaccaaacaccacatgttctcactcataggtgggaattgaacaatgagaacacttggacacagggcagggaacatcacacactggggcctatcgggaggtgggagcctgggggagggacagcattaggagaaatacctaatgtaaatgacgaggtgatgggtgcagcaaactaacatgacacatgtatacctatatatcaaacatgcatgttgtgcacacgtaccctagaacttaaaatataataacaaaaagaaaatctaagacctgaagccataaaaattttagaagataacctcaggaaaattcttctagacattggcttaggcaaaaagtttatgaccaagaacccattcataggtgggaactaaaaaagttaatatggaggtagagagtagaataatcactaccacacactggccagggtgtgtgtgtggatggggaaagatgaaaagagaggttggttaatggttacaaatgcaacaaaaacaaaaataaatatatgggatttaattaaacctaaaagcttctgcacagcaaaagaaataatcagcaaacagacaatccacagagtgggagaaagttttcgcaactgttcatccagcaaaggactaatatccagaatctgcaagtaactcaaacaaatcagcaagaaaaaaaaataatcccaccaaaaagtgggctaaggacatgaatagacaattatcaaaagaagatataaaaatcaccaacatgaaaaaatgctcaacatcgctgattatcagggaaatgcaaatcaaaactacaatgtaatacaactttactcctacaagaatggcgatcatttttttaaaaaatactagacattggtgcggatgtcatgaaaagggaacacttttaccctgctggtggcaatgtaaactagtacaaccactgtggaaaacaatgtggagattccttaaataactaaaagtagaactaccatttcatccagcaatcccactactgggtatctacccagaggaaaagaagtcattttatgaaaaagacacttgcacacacatttatagcaacacaattcacaactgcaaaaacatgaaaccagcccaaatgcccatcaatcaagtggtttaaaaatgtgatatatatatcacattttatatacaaaaaatatgtgatacattttatatatgatatatatgtgattatatgtagttatatatatatatgtgtgttatacacacacaccatggaataatactcagccatataaaagaatgaaataagggcattcgcagcaacctggatggagttggagaccattattctaagtgaagtaactcaggaatgtaaaaccaaacatcgttcttataagtgggagctcatctatgaggacacaaaggtgtaagaatgatacaatggactttggggactcagggagaagggtgggagggggctgagagataaaagactatacattgggtacagtgtacactgctcctattccccaaaaactattgaaaaaaaaatctggaaattaaaaaaaattgaaatcctataatttgcagcaacatggatgaaactggaggtcattatgataagtgacataagctaagcacagaaagacaaatattgtacattttcatccataggtgagaactaacaaagttaatatgggtgtagagagtagaataataactaccagagactggccagggtgtgtgtgtggatggggaaagatgaagagagaggtcggttaatggttacaaatatacagttaaatagataagctaagacctagtgttcgataaatcagtagagtgactatcgtaaacaataatctattgtatatttccaaacagctggtagagaataatgcaaatgttcccagcataaagaaaaatttttaaggtgatgaatattccaattatattggcttgattataacacattatacgaatatagcaaaatatcacatataccccccaaaagtatttctattatatatcacaaaaatacgaatcagaaaccaaagtaaaatttatattttaatataaaatggatcaagtttttctgttacatcacagttttctttggtgacatactgctcagcttgtctaggcttgttacatacattgtgtcaaggaattaattatattggctgcacttgtgatctctgcttcagcaattaatgctgttttgataagtaagcatcttttagtgtttattataagctatgttctagcaatctctaatgaattagcaatctgtaatactctcattaggtagaaattattattcctaatgtacagataagaacctgggactcgaaaaggtaaaatgactttctagtttgtctaattgcagagtttttatatctaatgctgatgcctctgtgatccagaataattgccatagaatttcagtccctaaataaattccttgacaaaagccttcattggttaagtgaatttagtgtacattttaaaataaagtatgttgtagaagtcccttcttgacagttttcaatgcatattagcatactaaagcctccaagaagtactgctaaaagaagtaattgtttaacccagcatttcccaaattaatttagccataaggctttttagaaaaacacaatcagcactccttatagccagcattccataattccatagaatatgttttagggaactctgttctgaacttacattctgccctgttttaaaatacctgatatttctataaaccatataatcctgtaagaaaggcaccaaagtgctactatgtcacaagaactcaatgaacagttcatttatatggcattatagcatcttaccgatagaggtaataatccctatggcaaaagtagtaaagtgtgagtgtgtgtgtgtgtgtgtgtgtgtgtgtgtgtgtgttcctttggtttctgaagataaccctagagaagtagaaagtttacaccaagtctgaaggcaagtgctgttaaaaaaaacaaacatcccttaatgagcttgattttcaccttgaatagtgtactactgtgaaaagtttaagaaaacaaggtcattggttggggggtgtctatttaactagtacaaaataggatttaacatataccaaagaatttactttctttaaatctcagtcgctggttttaattttagtacctattgcctgtgtctgtacatggctcatgtaacatactacattatttcctaccactcttagctcaaatgtcagtttctagacagaccctacactttctattccctgtccttgaactctaccctctgtcaactagatatttaaacaaacgcttggtaatgagtgtgatgatgatgatgatgatgatgacaatgatggttttagatgcaaagttatggacatacacctaacataatatcatactaagtgccttttttttctaaatgtctttgtattagtcccctttcatactgccataaaaaacttcccaagcctgggtaatttataaaggaaagaggtttcattgactcacagttcagcatggctggggaggcctcaggagacttacaatcatggcggaagccaaaggggaaacaacgcaccttcttcacaaggtggcaaaaaggagaagtgccgagcgaagcgggaagagccccctgtaaaaccatcatatctcgtaagaacgaactcactatcacgagaacagcatgggggaaaccgcctccataatccaattacctccacctggtctttcccttgacacgtggggattatggggtttataattcaagatgagatctgggtgaagacacaaagcctcatcatatcactttttcatttttaatacaattgcaaaatgagtcaaatacactgttctattttatagtcacagcatagagtaatgagcaaacctaggctggtcactgctatgttattcttataaggaaaaggaaaattcagctttccattccagcttgctggtatttccatttcactaggctataaataaaacgaacactagagttaaaaaacttgaatgtttttctctttctagtgataagtgtaattagtaatttgttttaaagatatttttaaaccctttaaatgatttaattgaggtcagtaacctatgtaacaaacagcacgttagagacacaacaatggctaaaactcctcattttctctaaaaattaattaaaattattttctctaaatataagaaatgccaaactgagctaaaataaataagacaatacttatttttaatagaaccatctataatttctacctatagaatacttttaaaggttctaaactaaggcttttaacagtgtcaggcacaaattgttaccaatcaaatgaactaaattaatatgcttttatttgctattttattactaattttttacagtgggtgaatactactttttctgtgtcctaaactacttaaagtacataaaatatacttttataatatactagaacttactgtttcccagacttaagactgagtcattagagtaagctacacactagagtggaacaaaatttagcttaatctgaatttcatgatttggtttaaaataaaccaaattttactttgccttctaactttgtaacattttaaagcttattcaggtcacgatgcaatgaaaataaaaaacaattgacaaatgtactttgtgttaattctgtttaaacacttgtccacctagaaactttagaggttttcatacagaatacaaaaatgctattacctttccagtcttaagctaataattgtaatacaattcacaatttaaattctaaactaacatgccatctgttgctatgaatctaaaaatgttgccatatttggaaacttttattatattaaagcatgaaaatttggatttctgaacaaccagtaacttgtaaaaaagctctaatttctactttcagaatacgtttaggattcatatgttcttgtgattccaaagaatttgaagtccagtggagcacaaaattaaaaccaattttaaaagtatttaactttaatagaaattggcacaagcattcataaatcttaactaattttgttatcctcctttaaatcaatttctttacatggtagtccagttagtaagttgctaagttactagttgttaacttgccagttaataagtccagctgctaagacaactcagcaattaatgtgtattagaattggatttcttcaaatgtgctctaactatatggcctacattggtcatttatcagaatatacaacttacatgcctcttcgcattaacacatcataatggattcaaaggtttacctttaataagtttaatttaaaacttaaataagttttaaatatgaaacaagtttaaatgctataaaacaagagttaatatatgtaaataacctaaaggcttactttatattccatcgcagactttgtcttaaaatatctggtagttataagatagggtgaaaatagatgcattttcaaaaactggggcttatttcatgaaggaaatttggcttaataattagagctttcagccgagcgcggtcgctcacggctgtaatcccagcactttgggaggccgaggcgggcggatcacgaggtcaggagatcgagaccatcctggctaacacggtgaaaccccgtctctactaaaaatacaaagaaaaattagccaggcctggtggcgggcgcctgtagtcccagctactcaggaggctgaggcaggagaatggcgtgaacccgggaggcgaagcttgcagtgagccgagatcgcgccactgcactccagcctgggcgacagagcgagactctgtctaaaaaaaaaaaaagaaaataataataataataataataataataataataataataattagagcttgcatgttaactaagttcaaggtaattgctttatagtctcaaattttaaaatattaaaaacataaagttaacatttatatgagtaagaattatgtctggttctcttttctataaagccatctatctacttacattttagagcttatactttaaatttttttaattataaaagtgatatatatgcagagcttgaaaaagtcaaaccttgttttaaaagatttaaaccagctgggcgcggtattattataacttctgtgaagaaaacaaaagtttttccagctacgtggtctgttagaaaataaaaattaaacggctcagactaagaagatgtggaagaaattataggaccagactcattttcagatactcaaaacaaacgatcagttgccaagtaatcaagtaccttttttacattctcttacctcacccattctttatacatttaattatgtgtgtatgtgctttttagatcccatacctatataattatctttaatttttagtttaatttgcataggaaatgaagaactggatacattaaatttttttttgttttgaatatgaatttatactgctgtgttaacaaagactgcagtcgtgactgggtgtggtggctcatgcctgtaatcccagcactttgggaggccgaggcgggcaaatcacgaggtcagaagatcgagaccatcctggctaacacggtgaaacctcgtctctactaaaaaattcaaaaaattagcttggcatggtggcgggcgcctgtagtcccagctacttgggaggctgaggcaggagaatggcatgaacccgggagacagagcttgcagtgagccgatatagcaccactgcactccagcctgggcaaaagagagaaactccatctcaaaaaaaaaaaaaaagaaaagaaaaaagatttaaaccaaaacagttgtcccctgacttcagcccagagccaatcaacttgcactcttttaatggtttcttctttctgttttgttttctgctacctctagataatttaatatgttgctttttgtttttaactctttggataaaatatttagccaacttttgacagctctgtaaagcttctctcaacacttttccatcgttaaacctgtcagataacccaattgtcacttttcgagtcaccttcctggggcctgccattctccccagttcaccagaatggtttgctctctgggtctgataaactttcccttcaccattaatctgagatttctacttgtctctccttctcttcattgttgattacctatttcctcgatatcaggtcttcctctcaatctatttcttcgtttagtggagtacattctccagcagcctctaagaaagggtatatggtaggtttattagagactttgtttatttgaaaatacctttatgctatctttatactgaatagagagctctgtggccgggagcagtgtctgacgcctgtaatcctcaaacttcgggaggctgaggtgcgtggagttcgagaccagcctggccaacatggcgaaaccctgtctttactaaaaatatacaaaaaattagccgggtgtggtggtgggcacctgtaattccagctactcgggaggctgaggcaagagaattgcttgaacccaggaggcagaggttgcagtaagccgaggtcgcgccactacactccatccagcctgaagacagagtgaggctctgtctcaaaaaaagaaagaaagaaatcctactgcacattaaattgtgcctcaaagtctctactaaaaaggagaaaggtatattatctccaaatctttctttcaccttttcatatgaaggtgaagggattggaaattcccttaattttttcagtcttttaaaagggtattatggatatgtgctatttcaaatgccttttgttttaaaaggagtatatttatcagattttatcttttaggggctgcaaatacatcctaagttgagcaccacagctaaagtacattgtaagtattttgaaaaatacttgcagtataaattcataatcaaaacaaaatttttaatgtatccagttattcatttcctatgcaaattaaactaaaaattaaagataattatacaggtatgggatctaaaaagcacatacacacataattaaatgtataaagaatggatgaggtgaaagaatgtaaaaaaggtacttgattacttggcaactgatcgtttgttttgagtatctgaaaatgagtctggccctataatttcttccacatcttcttagtctgagccatttaatttttattttctaacagaccatgtagctggaaaaacttttgttttcttcacagaagttataaataattaaaattagtgaactctagggcacccaaagacatctcaaaatctttttaagctgtactaaatatttgagattttaatagtaagcaacttacaaacatctccctctcattatcaattaatgaaaagcctcccattcctaataaacaaaatttaaggcttttaagtttgtatagcaaatgttttccactctcttccagttaccaacccttgctatgcaatagaaaatatttctagactatcgagcctgtgcatatcttcccttctctttcgcctcaaaatacctactttagcacgtatccgaatcacctggagggcttgttaaaacagattgccgggcaccccttcctgtttccaattcagtagaggcaaagcccatgaatttgtattatcacatgttcccagtgatgttgatgttgctactctaggaatcaataaaattatcctcaatttctttccctcagtttaagaaaattaagtagcacttctttcctttccaacaagtttaaatttgtactcttggttttatcttccttctcattctaccgttatttctgtatttccagcatctcagtctctttctatatgcattgactcctctctgccttctagatgcacagacctcctttttcaaaaatatatataaaacaaatacaccgtctatttaaaagttaccatctatgtctctcataaatctgttcactgccaaatttctaggtaaaatatccttgaaccaaaacctctacattcggccaggcgcggtggctcaccctgtaatcccagcgctttgggaggctgaggcaggcggatcacttgaggccaggagttcgagaccagcctggtcaacatggtgaaaccccgtctctactgaaaaaaaaaaaaaaatacaaaaaattaaccacgcgtgctggcacatgcttgtaatcccagctacttgggaggctgaggcaggagaatccttgaacccaggaggcaaaggttgcagtgagctgagatcgcaccactgcactccagcctgggcgacaagagcgaaactccgtctcaaaaaacaaacaaaatctctacattctattacttctctccattacttagatcatctttcagagtccaagcaggaaacagacagcactttcaacttgggagaattattattaaattatttataaaagtctgggtaggatgtaggaaaaccacaatggatactgcagttagttgggctagatacaatgcaagatcctttgccattcttaggcctgagggtgtgggaaagcaacatccccagaagctggagagattgtcatacggagagagctgcccgacaggagctgtgaccttcccgattgtggctcataacaacatcatgagagagggcagaaaaaaaagcttcattctctttctcctgccaacacgccaatattctgctggtgctccaaatggttatcaagcctgtgcatatctttctcttacggctcaaaatacctactttagtacacatcagaatcacttggagggtgataactggatgtcagagggaaaataagctggttggtaaagtcctagagattaatttcacaagatatagtagagaacaaaggatggatctgcaaataagcaatatcccttaccatatggtccatctcttttgttcctcagattcttatcctttatttaggtagacacatttatgtcctcaacacaggaaacatacaatcatacaaagtcctacaagctactatttcataagattgatgtcaatttagtcatattcttctcctgtacacatggaacattctccaagacagcacatatactagactataaaagatatttcaacaaacttaaaaggactgaaacaatacaaaataagttctccaaatttaacaaaattaaattagcaatcaataacaaacacatatttggtaagaattcccaaatacttgaaaattaaacaatatacttttaagtaatccatagttcaaagaagaaatcaagatgaaatttaaaaatattttgaactgaatgaaaataaaaacatgacatatacaaatttatgagatgcagctaaagcagtgcttagagggaaatctataggtctacatgcctgtatttgagaaaaagagaactctctaagcctgaatgtatagaaaagaacagcaaattaaagctaaaggaagcagaaaataataataaagagaacagaaccaaagaaaaagaaaagagagcagagaaaaatcaatgaaccccaagctggttctttgacttcaataacttctttgacaacttcaatgttgactgatatggttaaagaaaaaaaagagagagagagaaaataaagattaccaaaattacaaaagtagggaggaacttgaccaccaaaccttatgaaattaaaaggactgtaaggcactactatgaacaaactagacaactaagatgaaccagataaattcctagaaagaacaaattattgaaactgaataaagaacatatagaaaatctcaacaggcctgtaatatgtaaagaaatagaaaaaataataataatttaaaatcttcccacaaagaaaatcccacacctggatgattccactagttaattctatcaaatatttaaataagaaataataccaatcatttatgaacacttccataaaagtgaatccttcccaattcactctataaggctgctattacagtgataccagagtaaaagataggaaaaaaaaaggaaaagaaaaagaaaaccacagaccgatatctctcatgaatacagatgcaaaagtcttcattgaaatgttagcaaatcaaatccaggacctctttctgaagtgctgtcatggtccacttcttgacttactggtaaattacttagctaaatatttttgtcttgtgcacttacctctttatgttatggttcaagattttaaaagatttaaacatacacatatacaagaaagaaaagaatgcctagtctatgttctcaaagtacaagtaatttagtaaaagactagattaatagaaaaacaaaagtaatggcagaatatgacaagtaccctgaaaggtatagggttacaaggaaatgagaacatagctgatccatgtatgctactgtttttatgttactttatgtttgagggtgtatggagggaaaccagaaaaactataaaggaaagagaattttgattgccttaattatggataggtagaattttatctgaagaaaaagaaaaatttaggtagagatcagcatgagcaaagcttgaaccatatttgggagaaacatcaggtcaagtttggctccaccactatatgtacaatttttttttgagatggggtctcactctgtcacccaggctggagcacagtggcatgatgttggttcactgcaacctccgcctccctgactcaggtgatcctcctacctcagcctcctaagtagctgggattacaggcgcccactaccacatttggctaatttttgtatttttagtaaagacggggtttcaccatgttggtcagcctggtcttgaactcctggcctcaagtgatccaccagcatcgccctcccagagtactggaattatagcatgagcaccacgcccggccagctttcttcaatttataaaatgaagagaatatacattaaaattaatcaataaggcttcagatctaaaattttatgaaagagctatttacaccttatcatgaacaaatatatacaccctggcctccaaaacagttaaagggaatcaacccagacataactagcaatgctttctcaaatgactggatattgctcctatataaagctaggttttcttaaatttattttaaaaaccatctctttaggacttgaagaagagtcctgaatcccaatattttgtcaacaaatttgactttacctgattagcagtcttcttgattttgcaagttttaagcatattctgcctctgacatacccttatcccaatgtcctacccaaccatcgctttttcaggctgaagagttctgccaggaggcaaaggttgcagtcagccaagatcctgccactgcactccagtctgagtgatggagtgagattgtgcctcaattaaaaaaaaaaaaaaagagttctgtaattgttttcataaatcttaaagatctctctatcccactgatattttaaatttgtcatttccagtatttattcaattctatcaggtctttttgaggttatggaattagagatgaatactgtagcagaataatgttattttgttaggggagaaagaaaacccttatcactttcctgggctttttgacagcaatgtgtcagatagctatcttcatggaattatttatgaagaaatacagtttatgacagtgtttctctttaactttactagcaaaagaactccttttttcccaataaaattatatataatacctcactacataaaacagaccataaagtgcaactgctctggttgtagtttgtaactgcctaaagcctcacagatgcggttcagctcttgcccctctttcacaccccatccaacaaagacccccaagagtgcttcccaggcagcacggaggacagcaagaaaatcatcactttacagcatctgtaaatattaaagatgtcaacatatacagaagaatcaaagcttcaaatgaaatcaattacttcaaaaggcttctttactgcaacatcaatagaacatttataaaattcatttctcaatttactcaaacacacatacaaaaattcacaagttcatatttagaaaactgcctttttaaatccgtcttagaataaatacagcatcaacttaaccatatactggccactagtgtagcacatcagaaaaaataattattaactctttccataataaatgtcaatatagtaaaaaatgtcaagcacacattagtgaaatggatcaagatcattttttattgcacatctgcttacatgtctgctgcttttgggcagagttaaacctgacatattgagtcagtttccgtcattttacatcaactaaattatagcagtgaattgcttatgtgtctcccaggcttaccttccagaaactagaacattaacctttccaatttatctaggtactgaagcacaaatttaacatttgtttttgcaaaatttaaacactcagaaacaaaccaaacaacatcctatacagaaaacaatttttatgtctagatatacaattgaggttcagagaacttctgattatacagtattgtaaaggtaatgataatccaaccctcttccaaactatttaattcctgtatatgtaattaagcatttattttcagaaattttaacactttcagcaattgattctctcacaattaggcatttttaagatcctccatcccaccaaaaataacccacaatgactccaaatcttgtttttcttttttaaaacgctattctcttgggactaaactgttcagaataatcagtattcttattccctttccactgtactctactgctcaatgcaaaatggagaatatgtggtccaaatagaaatatggcatttgtgcaggtcaagctttgaagagacatggaccacatgattagcctgatttttaaaaagcaacaagaatggtgacacaactattacaccaaacacaaaattctggccattaatgaatcagaagtaataactgatgctcctactttaaattcatcaatgccatatttaagaagtcaagcaacaacacatacttggcaaaatcttctaaattctcaagttatcaaacaaaaaagttatttttaatactttaccccccttatatcttatgattcaatcacttatattttcctttgttagattattcagaagaaacaattctatttaaccttaataagtttttgtctcacacattttatataaagttactaaaatcacaattctgagaaatttatttttaatcatacaaacattatatgatttaactgcagtaaagaaattatatcttttcttaatctatttagaatgatattacaaaatctctaagactcttttccacagcttttctttatatgaacaaactcataattatgtaaaatgcatctcaactccacagtgaactagcatccatgcttattccacataggtactgccagtggtccctgcggtgtcctttcaacaatgacaaactcttcagggttgccaaatgcctcatagaaaaccaataaatcttgtatggcatgctcctcaatctgaaaggaggaagggaaagaagactctttactcttttaattataaactaagcaggatgtatttgccttccaatttccttttgaggaactatcactttccatggatacaatacagtgaaattaaatcaggtatcctgcattttaaatcaggtatcctgctatctctgtggcaaggagaaagcttgaggtgtgaggtagaatcatgagatacccatgcgctcttcaatttgaatcttgagcagaaggaaaaagaaactgaaaatggttgctaaaattcattcattccaatagctttattctgtgagatactttctgttgttgtacaagtcttctaaatcttgcttctgagctttccagtgctactatgcgtcttttctgtttccaagcctggctgtctggtctttcagctaagtctatggaatcttaatatccctcaaataaattatcttttccttaagttagccagagtgggcttctgttgcttacaatcttagaattcttactgatacagaagccaagtgcagcactagagaatactgccaaattctctactggtcattttaaaaaaactaaaataatccaaagtatcaccaaagcaaaaatataagctttatcataatttattagtcataaattaattgccctgaatatctacaactaatacatacactgctagatgcctcagtttaattttacctggcatttacattttaatttcatagatacaagcacctgtccaaaacaaacaaacacgattttcttaaaacctaagtaggaaatgtagttcttctctaaattaaaccctactaagtatgttatttacctgaatcagagccaacggtttttctcgacttctaataagagctgcttcttgttgtagttcttcttctacaatagatgcaaaagtgactggggctaccatggatggagcagtcactgaagaagatagccagggactgaaagaataataataatgagtttcattcatcttcctaaatttttgcatgcaaaattttctctgaaatactttttagcaatgctacaattctttccagtgacctacaatgaacgaacctggaagctttcacagagattacagaatgatgagtttcactcatcttcctaaatttttgcatgcaaaattttctctgaaatactctttagcaatgctacaattttttccagtgacctacgatgagcgaacctggaagctttcgcagagattacagaatgatgaggtgagaaacagaaaaacagaagaactaatgttttatttggaccagtattagagagaaaattttggaaagtaccaggaaatggggagggagcagaaacaacataactgaacagaaaggtaactcaaactacagtacggagaggatacaagtaatacattctactcaataccatactattcccaatttcttaacattctcttattctctttttttttttttttttttgagacagagtctcactgtgtcgccccggctggagtacagtggcatgatcgcggctcaatgcaatctctgcctcccaggttcaaacgattctcctgtcctagcttcatgagtagctggcatcacaggcatgcgccaccatgcccagctaagttttgtatttttagtaaagacagggttttgccatgttggctaggctggtcttgaactcctgacctcagatgatccacccgcctcagtctcccagagtgctgggattataggcatgagccactgcactcagccttaatgttttcaatgctaagcagcaacttagctttggaggcccataacttatcaattaaccttacttgggactgtctagaagtggtaaatctgaaatatggttgccttctggtcctggggtaccatgggtagagcatctgcaaaacaaatgccaaaattaaagattaaagcttctagtaatattagtcaaactgcttattaatagatacagaggaagaattgtaaactcctgactccagaggcaaattaaatgagtgcagtcaagcttacctttaaaattataagtaaacaaaataatctatatttataaaaccttctgtataaaatatcatagagaaagatactgcaagaaatagcctatttctaataataaatatatatatacacacaccagataaaccaataatctctaaatcagataattaacagccgaattttgtaaggaactaatatactttatgagcaaaggattacagataggacagaaatataaaatatgatctttaccttctaagaattcacaagctagttgaggaaacaacatacaaaatgacatataaaataacagaacagaatttaagacagtataacaaattgagtcacactggctataacaactataaaaatcacaatatttaatcatttgagagggcctcatggatggaatgaacttgagaagataataaaaaagaggtatatgatgaaagcagtaagaagcattccagtaaggagaaaaacttaaaaaggtacaatacagatggacctaattatggaattttacagctagaaaggtccctagagattatctagattgctccaatgctctctttcagcaatgagaaaactgaggactagacaggtttaacaacacaaagtcaaacagagagtaaattaacaggacctaaaatattgacttcgtgattcatttatacacatttattgagcatgtcaggattactgtaggtgctaaaaatcaggctgattaaaacccaatcttctcccctcaaaaaattctgatggggaagatttaaaaatatacttaagcaatgataaaacaatgtataaagtactatggatgcacagaagaaaaaatacaatatggaagattgtatatactgatggcttcactgaggaaatgacattaaagctgaggagacgtacaattagaaagaattttggttgtacaaatacatggacctaaaaaagatttcagttatttaagtaaaggcaggctgttctcttcaataagcaaagaatgcctgaattcagggtaaggaagaaacttaaagagaaataaagtttaaaagaaacaatagagccagagtacaaaatgcactgaaagctaaaatgtttagccctaatgtgtgggcaaacaaatttactaaaagcctaagtacttcatgtgtattatcccatttaatctttgcaataccctgtgaagaaagcatatattaactattatagagattaaaaaacaaactcaaagaatattatataatttgtctgattaacaagttagataagtagcagagagataacaaaaatctggtctttttgatttagagtacagtgttttttccatgatcacacagctacctttatttttactattccccttattctggaatatattccacttcaaatgtcttctcactcttttacagttggctcaaatgtcaccttctctctcctcctacaaaacttcaatcattatgataaagcatcacacactgttattattgtttacatgtcaatcttaactgctagactagtctcttggggaacaggactgtgtttcattcatctttgtatctcagtgtccaccagaatacttggaaatagtcgtttatgaaaaattaattagaaaattaacgactgaaacagaaactcaaagggtatttttttagtatacgataatgaaaagcagaggtttttaggttctttattgctttaaattactgataacttttcttagagatataagtactgaattacaaactgatataagccttgtagtaagcctgcatgataggtattactactctcatttccatattatgaaactgaggtacagaaagactcagaaagagctgtataatgttatactgaatctcaaatatgtttcctaagactacaattccataactttttccactcatgatgtttcaacggataatttcattaattacaaatttatccaatgtggagtctgtcaaaatttcttcttaaaatgaaccaaatttgtcaaataaaatagagctatgattaaacaaatatcaaaaacattctaaactttcaaataataaatatagcattattgagttttcaacattagcaacatagaagtagatatcgcaagagacaatctgtagaaaatttagccttctgaaaataaacagcaacataaaaaggttaactgaaattttccttaaaagatttttgttctggccaggtgcagtggctcacgcctgtaatcccagcactttgggaggccgaggcaggcggatcacctgaggtcaggagttcgagaccaccctgaccaacatggagaaatcccatctctactaaaaatacaaaattagccaggcttggtggcgcatacctgtaatcccagctactagggtggcggaggcaggagaatcgcttgaacccaggaggcagaggttgcggtgagctgagatcaagccattgcactccagcctgggcaacaagaacgaaactccatctcaaaaaaaaaaaaagatttttgttcaaaccaaaaaacattaatattgtcacatttacactttaaaggaactaaattattctttgctcagttggccttaaaaaaattgtactggcttaattagaaagatttttatatcagattggagctgatataatcacagaataatttttttctcacaagtagtttttttcactaattagaaacacaagctcagctgggcacagtggctcacacctggaatcccagcactttgggaggctgtgggcagatcacctgaggtcaggagttcgagactagcctggccaacatggcaaaaccctgtctgtattaaaaatataaaaatcagccaggcatggtggcaggcgcctgtagtcccagctactggggaggctgaggctagagaatcacttgaacctgggaggcagaggttgcagtgagcggagatcacgccattgcactccatcctgggtgacaagagcgagagtccgtctcaaaaaaaaaaaaaaaaaaagaaacacaagcttacattttctttccagaattacataaggggacatttcagtgaaaggaaaatgagaaataaaagcacatgaaataaaaaagaatacctaagtaacaataaacaaataaaaattgtacaaattgctcacttttagatgttaacaccctcaaacaacattgtcattcttgccctaaccttggaaaaaaatcacattttctagaactaaaacaagaatgtataatttgtggaatttcctgagatgagtcccccacccctggcaccctaactccccaaaggaccataagcattcctatcttcttaactcccacgatttcctctgtttatactgccccatcttctcttatttcttcttttaaaaatcccatcctgtattcaaaagcttatgacaatgaaaggaatcaagaattaagtgatctctttttttctaatgtttttcacatgcttataaatataataataaaatatttggaaatgaatataaaaagtgcttatgaactgacccagctcaagcccttcttctgcaatgaagtcttcctgacaacaccagcccatgctcagtttttcttctcagaaccactcatttggtacttcatcatattgtaatctctttaatacttccatattgtatcgtaatttctttttgttttgttgttgttgttgttgttgttgtttttggagacagagtctcactctgtcgctcaggctggagtgcggtgacgtgatcctggctcactgcaacttccacctcctgggttcaagcaattctcctgcctcagcctccctagtagctaaattacagacatgcaccactatgcctggctagcttatttatttatttacttatttatttctctttttatttatttatttattttttgagatggagtttcactcttgttgcccaggctggagtgcaatggcacaatctcggctcaccacaacctccgcctcctgggttcaagcaattttccttccttagcctcccaagtagctgggattacaggcatgtgccacccctggcccggctaattttatatttttagtagagatagggtttctccatgttggtcaggctggtcttgaagtcccgacctcaggtgatttgcctgcctcggcctcccaaagtgctgagattacaggcatgagccaccacgcccggcctaatttttgtatttttagtagagacaaggtttccccatgttggccaggcttgtctcaaactcctggcctcatgtgatccgcccacatcagccccacaaagtgctgggattacaggcatgagccacagcgcctggcccttgtatcgtaatttcattcttattctgtcatttaacttccatgtatgtatattaatatttatcaactagatttcagacacattaaaggctgcacctatacattctacttttatatatacccaacacaggccagtaccaggtagcccataatttgcaaattaatgaatattttagtttgtctgtaatgtttaatatttcctttttaaaaaagcatacttattatgttttctatgatggaaaaaaaccctgaaactcaaagctatctgtcttctttctcagaatcactagcagtgatagccaaagctatttaaaacattaactcccataccaaaaatactgaagctatggatatatcatactgtcataaactccattgagtcaaacttccaaagcagtataacagggcacacttataattaagagccctgatgttatagcacactctagtgatcaactatgaaaccacagatccatattttaagttccatgacaaatcgttatatatctaaagacttttttttaagtttcaatgaatattaatatttaaaatataaaaatacaaaacttatcttaattttcatacctttaaattgatatatctaagacatgcaatataactcactacattagaaacaaatgttacttgaaacagggttacaatttcaattaatttactcattcattcaccagactcactgagcacccaatacatgccagaagctaatatgaacactggtagtaaaatgatgagcaaagacaaacatcctccttgctctcattgaacatataattaaacatacaaacatgaaaatacttagagtagacaaatattaaagaatcacactaataaatatggaacgtacaataaaaaagaagtactatgagaacaaacaacagcaaactgccccagtaagtcagacttctccaaagaatataactgaatagatattgaaagaagagtcagagtcgtcagtctgtcaaagagtaaggaggtggaaagaaggaaagtgcatttgagaactaagagaaggccaagatgactagaatacagagatcaggttacaaaatcaagttaaagacagttggcaggagccagactatgtaggccttgaaggccatgttaagaatgctatagcttttctcttaaaagcagtaaactccaaattttaaaaaagaacatactggcttaatatatttggagtaaagaaaggcaagaccagtcaggagggtaactctggtggcccaggtgaagtatcacaccagactgactcagaggtgatagcactggagataaaatttagtatatggatttgagaaatatttaagagataaaagtggaatgctctaacagtagactgaatatttgtgaagaaaatggaagtgccaaagacacaaattcttcctatttactgaggaagaagattccgaaaaaacaggctgttctatgttttgtctatatttttgtttgattttggttttatgagatgggtatgaggaaaacattaagtttagttttggacatgaagtttgtggtctttctgaacatccagatagaatggtagggtcaataagagataattaagtctaaagttcagatgatagatatgggcaagagatataaattttgagactttagtacatgtctgacgactgaacatatgctcattaaatggatagtgtagaaagaatataaagtgaaataagacgacgaccagtaattgaacttcaagtatgatgagtcacataaaaagtggatggtgttggcaatacaaaggtcactgttgaacttagcctgtactggtactgtttcagtttagtaatggggctgggagatagaatcaattacggactgattgggaggtgacaactcttttgagaaatctggctgtgaagtggatggagaattggtaatgataggacaactgatagaagaaagtgtgcccagaccacatgagagacctgagcacattcaaaaccagaggggaagaatctagttaaaaggaaaatgttgaatcttacacaagaaaggaaaggggtaattaatagttttcaggcttctgaaatgggaagcattaagataaaagcacaggtattggcctaagataggagagataactcttctatgacaaaacaagaaaggaggatagttctatataggcaggggctaatttgttcaccataggcaggggctaatttgttcaccactgcaactctagtacttagcataatgtttgacacaaagctcataatcaataaatgtttgatagacaattttaagactatgtacctagttttatatttataagcctatcataattataattgtaatttataaatatgcaaaaaggcttaatctgcttcatatgttagtattccatttaaggtttttttattttgttttgttttgttttttgagacggggtctccctctgtcactcaggctggagtgcagtggcacaatcatggctaactgcagcctttacctcccaggctcaagcaatcctcccacccagcctcctgaatagctgggactacgtgcacatgccaccaagccgagctaatttatttttcttgctattttttgtagagacagggtttcatcatgttgccaggctggtcttgaacccctggactcaagtgatctgcccacctcggcctcccaaagtgctaggattacaggcattaagccactgaactcagcctaagattttaattttaaaatagtattttaatgctagaagtattagacaagttagggagatgacttcagatattttttgctctttgattttctgtattgcaagaaaacggctcaagaactttccgcctaaatctaagtatctgtaaaaaagaagacagtcacaatagtaacaataaaaatatgcctaaacatttaatctaaatcaggagtttccaaacattgttgtcagaagactttgatagttcctcaggacaggtaaagtgacattaaactagtatagctcccagtctctgttccttgcttcagtcagaaaagtttatattatctgtttgatgcacttgaattggacataacatatcttacttattttgttttgttttgtctgagaccaggtctcactctgtcacccatgctggagtgcagtggtttgatcacagctcactgaaaatactgcttttaaattatagatagattttgatgtttcatgtaggcatttaaaatatgaaacttttttttaaatacattggactttctaaagcagtatcaaaaatagctaggccaggtgtggcggctcatgcctgtaatcctagaactttgggaggctgaggtagaagaactgcttgaggccaggggtttgagaccagcctgggcaacataatgagacccccatctctactttcatgaaaattaaaattaaaaaatagctagagaaaaaattgcaaatacctaaaggtccatcaacagatgcacagataaacacattgatgtggtatacccatacaatgaaatactattcagtagtgaaacagaatcaatggatacccataacagcatgaataaatctcaaaataattatgctgagtaaaagaagacagattttacaatgggtacatactgcacgaccctgctgatataaaactctaaaatgtacaagctaatctttattggtagattagtagctgcttgggagggggaaacagaaggaagagaggaagggattacaaagggacatgacaaaacatctgaaaatgatgcttatgttcactattttgaatgttgtgttggtgtcataggtgtatatatacgctgaaactacagaatgtatactttaaatatacgcaattgattttaagtcaattatatctccgtaaccgtttcaattttttttaagtggggaaggaatttaaacatgctaattttaattctgaatgtaaaagagtgtacaaaaaatctgcctcataaagttttaaggattatttcagaacataaaaccaccacagaatattttaaggtagaaaatgtattagttttaagtttgttttattacctgacaatttttggtgcctgagaattttcaattcctttaaaagaaacttttttgacatgatcgcctgaactatggctagtaacagactttttttcttctagtaagaaatcccggaatgacttggatgaaactgaatgcagagaagatgccctgcaaaagaaagcaaagatcatgttaaaacatccattttgtaaaagggcattgctggaagttataagagaacaataagaacgtataccaaaaattttacaatatacaattgcagttttcaatgtgatgttggattcttgctgccaattgtgaaatatccaaaactattccataagaaaaaccaatcaatgaagaccaagtctagagataactcagatgttaaaattagcaatattaaaatagctattacaattatgcatcagataacaacaacaaaagctcattaaaaataggtaagttcggcaaaagaaaagaaactattaaaaaaagagcaaaatgaaaattcaagaatttttaatatatttttaaaaattcactgtatagatggaagagtcggtaaacttgaagataaaccaaaagaaatttttgaatctgaaaaacaaaaaagagaagttgaagaaaattattccatagtgagttataagataaaatcaaaaggtctgccatatgtgttaactgaagtcccagaaataaagaagagagatacggcagagaaaaagaaacaatggccaaaattttcccaaatttggtggaagatataaatttaaagactccagaattttggcaaaccccaaaaaagataaaacaaagaaaaccatatttaggcacataataaataaacagctgaaaaccaaagctaaacagaaaatcttgacagcagccatagaaacacaacacagaatgaaaatgagtagcttgttatttgaaacaatgaagcccaaaagacgatggaaaggaatctttaatatgatgaaagaggtagagaatgtcaatccagaattctatatctgagtaatcttgaaagtaggtcctcttcaagtcatgccttgaaatgactatagccctggccaaaccttgactgcagcactgtggaagatcctgagtcagaggcattcagctgagattcctgacccaaaggaattatgataataaatgttggttgttttaagctgttgttcaagtataatctgttatgaagcaataaataactaatacaagatattacagaaattaaaagggtaataaagaaatcttatagagccaggtacagtggctcatgcctgtaatcccaacactttggaaggccaaggcaggtggatcgcttgagcccaggagtttgagaccagcctggccaacatgatgaaactccgtctctactaaaaatacaaaaattagctgggcatggtggcacacacctgtaatcccagctactcaggaggctgaggcatgagaattgcttgaacctgtgagtcagaggttgcagtgagccgagacagggccgctgcattccaggctgggtgacagagcaggactctgactcaaaaaatgaaaaacaaaacagagaaaaaaaaaagatagaaatgttataaacaacttaacacaaataaatttgacaatttacatggaatagacaaatatcttttttaaaaaactaaattactgaaaataacagaaagtctatatagactatatctattttaaaaattgaattaatctcactaggttttttaactgcaaaaattgacaaactgattctaaaatttacatgagaataaaatatcccagattagccaaagcattcttttaaaaaaaatagaaagttggaagaagacaaaaccaattatggtaatcaggatagtataagctaggtctgaatgtatttcctccaaaactcatgttgaaatgtaaatgtcactgtgattgtattgtgagatgagacctttaagaggtgtttaagttatgagggtgcctcacaaactgactaatgccattatcactgagaatggttaaccctttttgctgtctctcaccctgctggcatatgccttccactatgctatgaagcaggaacaaggctcctgccagatgccagcaccttgatattggacatcccagcctctagaactgtgagccaataaatatctgttcattataaattacccagtctgtgggactctgttacagcagcacaaaatgaactaagattgtgtgatactggcataaggattgacaaacagatttcttcaattatgttttactgttctttccactgactatgccataattggaaacagtacctgatttcccacaattttattttcctaactcacaagctccagctattttctaccttaacagccacagaaaatttatggagaagaattttagacatttgtacctgcataaaaattaaccagaattttgctcctcagcaaaagaagccctgtaattttactctaaataatattttagctttaaaatattaaataattgaaattgttttatattgtatgggttagctctaaatggaatttgaaagaatttacattcaaacatcaagccaggccacaaagaaaaagtattcttccactgaagatgactgatgagaaaggttctattatttctccaagtgaaacatttaattttgagaagtagccaaatcccatacatacttagtgttttcacattaaatttaaaatttgcctggttggaacttcaatctaatgcaaaaacccagttatccctaatactttccattgccacacctaactgtcagcagcaggagtacaactataaacactgggaattctacagactaggtgaatgaatgtgtgaacaaactagtgaaaatcctaccacaacctcaagtatatttagagtgctaatttgtgttttgctaatgaattgcacattaaccttaatattaatgtaaacatatttttaaaaatcttttgaagaagtaaaatcttattagatgatacttcaggtaatgatgtacctttaagaaggattttaaaaaccagttacatcggctgggcgtggtggctcacacctgtaatcccagcactttgggaggccaaggtggatggatcatgacgaggtcaggagttcgaaaccagcctggccaacatgatgaaaccccatctctactaaaaatacaaaaattagccaggcatagtggtgtgcatctgtaatcccagatactcgggaggctgaggcaggagaagtgcttgaacccaggaggcagaggctgcaatgagccaagattgcgccacggcactgcagcctgggcgacagagcaaaactctgtctcagaaaaaaaaaaaaaaaaaaaaaacagataaatcatcacagtcatgaatacattctataaataacaatctgtaaatctgattaaaatgttaacttcagccaggaacagtggctcatgcctgtaatcccaacactttcggaggtggagacaagaggactgctgagcctaggagttcaagaccagctggggatatacagacccatctctacaacaaataaaaaattagctgagcatgctgatgcacacctgtgatcccagctactcaggaggctgaggtggaaggattgcttcagtccaggaggtcaaggatgcagtgagccaagattgcaccactgcactctgtctcaaaaacaaaaaaaaagttccaattttttctttaaaaccaatgcatacgagatatgttctcaggaaaacaatctattccatttttacttcaagcatatattacaagtatttacattctatgtgtatctgattaaaaatcaagtgatatactgaattatgtggctatctcataattttataatcacatgaaaaattatatcatattatattcactcaataattaatgttttatccagagttcaggttaaaatactttgcagccttctaagaattcaagaaagaaaattattcaacaatttaataacagtaatttcaatttatactgaagtgctttgctttgctgtgcttcatagttactgtgtttttaaacaggttgaaggtttgtggcaaccttgcatggagcaagtatatcgtgccatttttctaacaatacatgctcactttgtgtctctgtgtcatattttggtatttctcctggtatttcaaactttttcattattattatatctgttacggtgatcttgatctttgatgttactattataattgttttggagcaccatgaaccacatccatacaagttggcaagcttaattgataaatgtttgttttctgactgttacaccaattggcagttctcccatctctctccctctcctccttaggcctccctatttcctaagaaacaacaatattgaaattagaccaactaataaccctacagtggcctctaagtgttcaagtgaaagaaaaagtcacatgtctctcactttaaatcaaaagctagaaataattaagcttagtgacgaaagcaccaccctgatcagtcagcagtcatcaacatcaaggcaagatactccaccataaaaagatgattcactgaaggttcagatgaccattagcattttttagcaataaaatagttttacattaaggtttttttttgtagatattatgctattgcacacttagcaaactacgtatagtataaacattacttttacaggcaccaggaaaccaaaaatttcttgtgacttgctttattgcgatgtttgctttactaaggtagtctggaaccgaacctgcagtatctccaaagtatgcctgtatagtcttaaaaagagcataaattactaattgtagacaattcagatacctctcaccttgatgataataattcagaatatctataattctcaaaaattcagattacccataacatctataattatctaaattatctataattggtcagttagataaattttcttagtgtactaagatacataaaactcattactcatgtttgtacttaagttttccaatcatgttttcataaaataaatgtataacaaatatcacttgtatttgataattatcaaattcttttttttttttttttttttgagaaggatttttgctctgttgcccaggctggagtgtggtggcatgatctcaactcactgcaacctctgcctcccaggttcaagtgattctcctgcctcagcctcccaagtagctgggattacaggcatgcaacaccatgctcagctaatttttgtatttttagtagagacggggtttttccatgttggccaggctggtctcaaactcctgacctcaggtgatctgcctgccttggcctcccaaagtgcttgaattacaggcatgagccatcatgcccagccagataattatcaaattcttttcaaagaaaaataacctatgtttttggtcaaaatttatggcatctttcttcccatctttctagaattctccttaatatgccataatagactcttaaaatttggatagatagtcccttcaatgtggcactctaagctcatgttgctattaccaaggaaaaatttttcctatgtttgaaaattagtcagaagtttcagataaatgaccacttgaataccttcctctgaaatcctaaagtgtacagcaaagtaatcagaaaggtataaacccacaagggcaaaaataataagctattaagacaatggcagtctaaaaacagcaacacatttttgaaggatagcaaaagagatggaatgataaaaactgatgtcgccgagtggacaaaaagaaatactagcagtcatcaggtgggtgacagtaaagagggaagctgagaactctggaaaggggcatatactggagacagagtatgtatcaaatcctgaagtcgacatgagcatgaaaattgtttcagtttatttaaggaggggctgaaagtgccagatgtactccctatctccatatggtcatattactacatctcctttactctggcagaaggaaaatttgattcaaagtcactagtaatagaggatggcgggagtgaactgttgtgtacaaagtctatacactaaatgtgaaaacctattacaaatggtgacaagttcagtcccagctctaacctccctacactgagatacgcttccagaatgctagcaacaaaatgtacaccttaacagcaaaaaaaaattaaaaggctgctctttagaaaaactgacagactaaagagaccaaggagaaaagatatggagataaccaacatatggggagattcaggggtccctaaggaatctgatacgttaccctatagtcacacctatcagtctatttgtacaacataggcacacagagcttccagtcagaacttaagagaaaacaatcaatcaataaattgacaaaatgaaataaaataaaacacatatagagtagaatgaataaaacatggatgtaaatcaatggctatttttagctttcttttttttggttgattggtttattttgttcaatatcatattggtaagattcatccacactgttgtatttagtcatgatttattctttttcattactctgtagtattctactataaaaataaattaatttatccactgactgctgatagacatctagattgttttcagtttgggctattacagataataaattatgaacattcttatacttgttgcgtggtacatacgtgtgtgtttctgttgggtatatactaaagagtgaaaatgcctacagagtacagagatcttcaacattagaatattaaaacaatactatagaaaaaggtatcatcaacaaacaaaccaaaaaaagctcttgataaagattttaatgattggaaaaagtcaggcaaatgttccagaaagtagaattaaaaggcatatatgtggacaatagaaaagaaaaagtgtagtggctcacacctgtaattccagtactttgggaggctgaggcaggcagatcacttgaggtcaggagttcgagaccagccttgccaacatggtgaaaccatgtttctactaaaaatacaaaaattagccgggtgtggtggtaggcatctgtaatcctagctattcaggaggctgagacagaagaatcgcttgaacctaggaggcggaggttgcagtgaaccaagatcgcaccactgcactcaaacctgaacaacagggtgagactccatctcaaaaaaaaagaagaaaaagtaagaaatttagagaagcctagggggaccaatatctgactaatgtgatttgtagagaaaacagtgaggaggaaaagtatcaaagtaatattaatattacataagatttccctagaacttaaagacatgctgttgccaattaaaagagcccaagtacccaggatgtatcaaaaaagacctacattatgatacattactgtaaaatttcagaacattagagataaagaaaagatcctgtaaactttcagggaaaaaaaaagtggagaagaaaacaggaggtaacataagaagatttaggaattaaatggcattgaataaattctccaaatgatttccaatttagaatcccgttcccatctatcagtcaagaagaatgaaggctagaataaaaacattttcatgaatatacgagctccaaaaatatatgtcttatacatcctttatcagaaacctactggagttgtgctacatcaaaacaaggagtgtatcaagaaatagaaaaccacaggatcaagaaaactggggatcaaacactggagagaagggaagacctgcaagacaacagttaaagaaaatctcaagatgacagatattcagcatgcctggaaaagacccggttcagatcacaaaagagcacaggactctaaggaatatgcctccaaaaaaataagtgaaacaactttcactcgttcactttttgcttaaggaaaatgattgatggcatgcttacagctatattaccaagtccaaagcttcatcatgagcttagttaattctctcaaactgcaatttagtacttgacagtggttccaataacttttccccctttttggattttccatacctttgtttaaagaaagcacaactcagtattgcagcagtcatatcataaaccctacaagggtaacagtcaaatctgtcttgttcattgccttatcatcagaaactagcacagtcccttacatttagaaggtgcttaacaaatactgataaattttaaaattctgctaagctcatcctctccagttttaccctcttttctcttttccttgggtgttcttacctcttattttactttctttttcagtaaccatgctttggacctactaatagccctaacaagcactgatttagttccattggtaacatttagaataaaattatttgccactttcttcaaaataattaacattttaattgagaaaaatattccttcttacaaacagaataatgtggccttagaaacattgaaaggattcccctaaaccatgggtagctgccaagatcctccccagtccttgtgagagaaagagagttctactgatttcttcgtaaggcttcacattctccatgtagttctccagtattggtttccagatattttaagttacaagaaaaggaaggatggaacggaagctggagtacaacctattttacatatctcaaaattatatctgacctctttggaggttattccaatgctgccactatgtgtaaattccaatggagaaaatgtaaacacaacattaagtaaggagcagtgttttaaaaagtgaaaaataacaagctatgattataaccatgtaaagatatttatggagcatgcagaaggacaaagaaattagcgtagtataaataaagttttctttttatatgtgtctgatgtatttaatttcttataaaaaataaaaataaattttaaatcactttagcaagaaaatctaattagaatatcaagaagaaattatatctatatatgaaaaatatatccacattttgatgtgtatgatgatgtgtgtcatcatgacttgtatgtcaaaacaccccaaattaaaagaaaataaacaacaacaaaaaaagtgtttgtttcccaagttccaatttttaacttgaaaacagaaggggagataaaatacttgaaaagactttagaaacactggaagtgggaaggaactccaaagtcaagtactaccttaaaagcaaatgcacaaatctatattaattttaataaaaataagagcataccatgcattcactggtttgggggcttttgaaggagtgaataaaactgtttccatgctattcattcctgaattgttttccttggtagtcaatgcaatcatttttcgttgcttctgagaaagtttaactccatgagaaactgttttgctagaaattaaaccaattagtttcagtggtttcttctgacaaagtttaattccatgagaaatcattttgctagaaattatatcaattaacattaatttctgcttaataaaggttactggtaataataatgttttctatttatttcatgttattttaccattattggatcaaaatgctcacaagtttcaacaatgaaaatatcagtttatactaacaatgatcaagtaatagctacatatgagccctccaacatatcacaaatttcaaaaagaacttgcatcacaagccttaactctttggcttttgtagccaatagtccacaatgatcattttagagtcaagtttctgggatgtaatactgtattctacaagagctggattatcaactcaactctatctttagcacatatttaagaaataatattatggaggctaaattgcccagaaaaggatgtataattaactataacatcaaatgcagaaaaataataagaaagatgcagtaagtctgtccaattcttagggcagaaatacaacatgaaatgatcttttgtaatgttttcaacccaccctaaatgtgactttggtgtagctccacatttttgtctactttcttctatttccatgatagttctgagatccacaacaggagggctgacaggactaaaagacataaaaggttactttgcaaagcattcatttacctataaagcccaacccccaacttcactgaaatgataagtgatatgtgagattaataatcagagtataatttagatttatcagctgtgagccagtttcataaaggatattttgaataaaagctacttttatatacacatatataaatattaactaatatatatccaaaatgttaagtgatatagcacatatacaaataacaactaatatgtatccaaagtcataatgttgtgatataactgaaattcctatatttaaaaaaacattttttaaaaaaagtgaagcaatagaaagattcttaactaaattaggcagaaaaactcaccaaagttctaattaaattcttacctttaggttaaatgaagcttgaaaattacattctttcctttctatttttaacaaacaaaactcattctactgtttaatattaacaaaaacaaacatttaatagaaaaacttggggatactaaataatattggagacccaccagaggaagttataccataatgacaaaattctacaatcattagaaatagatgatttctggccaggtgtggtggctcaagcctgtaatcccagtactttgggaggccgaggcgggtggatcacctgaggtcaggagttcgagaccagcctggcctatgtggtggaatcccgtcactactaaaaatataaacattagtcaggggtggtggcaggcgcctgtaatcccagctactagggaggctgaggcaggagaaccgcttgaacctgggaggcagaggttgcagtgagctgagatcataccactgcactacagcctgggcaatgagggcgaaactctgtctcaaaaaaaaaaaaaaaagaaatagatgattttcgacctaaatgaaatctacactacagataaaaataagtcagtcaggcacagtggctcacacctgaaatcccagcactttgggaggccgaggtgggcggatcacaagatcaggaattcaagaccagtctggccaacatggtgaaccctcatctctactaaaaatacaaaaattggctgagcatggtggcacgcgcctgtagtcccagctactcgggaggttgaggcaggagaatcgtttgaacccaggaggcagaggttgcggtgagccgagatcgtgccaccgcactccagcctgggcaacagagcaagactgtctcaaaaaaaaaaaaaaaagtcatattacttcatattaaagggaacctgtttcctgtactttttttctttcatcaaaaacaaattctacttattatttacactaggcaatactacaaaatgaatgtagaaatgtttgtgtatatgtcaatattgagaatgtttattgcctattgctatgcattttgtcaatgagcatagtactgaaatagcctaatctatcttgtagaccagggtatttttaaaacatgtttaacaaaatatcctaacattagcaatcagaagatgtttccagatgttcccacatattaaatatttaccaatttgtgtacttatgcaaaaaaaaaaattgaaactaatttctgaactaaagtttaaaccatgaagcacataaaatggaacatcataatctttgttccaactctgcaaaatatagcctatttcaaaagaattaaacagtccagatgataatatgtcaattaacagttttagactttatcaaccattgtaggcatataaacatgaagcacaagcttaattaacattttgaaagaatactacattctaattacatctgctactcatttaacttttctttttcttttttttgagatggagtcttgctctgttgcccaggctggagtgcagtggcgcgatctgggctcactgtaacctccgcctcccgggttcaaacgattctcccacctcagcctcccaagtagctcggattacaagtgcgtaccaccacgcctggctaattttttgtattttagtagagatggggtttcaccatgttgcccaggctagtgtcgaactcctgagctcaggtaatccacccacctcagcctcccaaagtgctaggattacaggcatgagccaccatgcccagccttcatttgacttttctaaataaatgaaaaaatatatatataatataggcaagttaaaaggatagtataacattaaattaatatcctctgaaaattaactgaatagttacacattttgtgaaattttaaataccccttcacatgctctaagagataaagtctatgattgacaaaattgtcttcctgtgcagcatttttaaccaatacatattatctaagaaataactactgatactaagtttctctctatatacgtaaaacatagtatttgctactattcactgatgataatacaaaggcaactaaattttgcctggggttggttgggggggaagcctattatagctggttagcaatttgtaggtatttaggcaattttctgtgcattagaaatttatattaatatttcttaaatgttcatcattaaaaaattaaattgcattaaaaatgaatgacatttctcaaactaacagttatagaataaaataaaaatcctacctgaaagaaccagcaacccaactggcagagctggtagtatcaattctgttactgggaataggctgtggagcagatattttaagtattggtgacttttcccatggttttaaatcttccctagaatacacaggagatgtaccattaacatacggtttgactttcgcctggggagagaaaaaaaataaaaaaagttaacaggcacctagaacagtaactaacacatagctggtacttaataaatattagttacattataatgaagaataaaatcttatgacaataagccatctagtattttcaaatcatgttcttctacagttttgtgccttagccaactctcaaatcacattattgactataactgaattattatgagctttgaaaataatttttagggaaactagtttgcatattaaatctctacacaaatagttaacatgtaatatataaaagttgtacaaataagacatgaagcagtaattttaaaattaatatccatggcttgaatatgaaacaaaatgaaagttttgtataaatgtcatataattcactctgatgtaaagtactgtgaataaaattaaagtcaaataatactgacaccttgaaaggaaccctaaaactactgctattgtaatatgtcaaggaagttattaaaatgatatgtctatttccaggatagattcttctgttattgtaaatcactcacaatataccctgagccttcctttaaacctcaattgtcttacagaccaaccttagtgtgaatataaattgcccccaaacttctatcctatattttaaaaaaaatcaatcctggcggggtgtggttgctcacatctgtaatgccaggactctaggaggctgaagtgggtggattgcttgagtccaggagttcgagaccagcctgagcaacacggcaaaaccccatctctactaaaaatataaaaaaattagctggacgtgatggtgcgtgcttataatcccagttactctgccggcttaggtgggagaatcacctaagcccgggaaatcaaagctgcagtgagctgatactataccactgcactccagcctaggcaaccagagtgagagaccctgtctcaaaaaaaaaaatcaaatcaatccttgaggcctaaaagactctaagaagaaagggtaaacttctgttgtcttatgaattcctagaagttccgatacgttttgtggatgtgtaggagttacagaaaagtgactctatctctattcagttacacatttttctctaataggttaacagctatggaatcaaatgttaaggagtgtctaagaaatgccctccccagagctgattaggctaggaatcctgcagcttaatgtgctagattaggagaagaactcaaatcatttccaaattgttttgctccagttaataccctggaggaaagagactgcgaactttcaaagtaggcttattttcgaaatcatttgccttgacaatttttaactgatgttaactgacatttcacaagataaatttcaataatttagctacaaatatattttttcaacatgtctatagtgttattatattttacatcaacattatattttagttgcacaaagactagaaataacatcataaagggctcaaaactgccattacaatctctaaaaatagaaatgttgtgcaaatttaagaaaactaacactatatttgtgattcttatataccaacctggaaactgttttaaaattagggcaaaaataaggaaatattaaagataaaccatctataaatctaaaatctgaaggtaaggaggtagtgcttcaaaaaacaaacctcaatcttatctgaatgaaatcctgttgtgaaatcaggggactgtaaatctctaggactacccactcctgcatagcttccttcagagtctgatgtcaacagttctggaagagattccacagaattggtcttaccagactttaataatcctaaaacatgaaattaaaaaaaattaaacacatatgcattaaacatatatgcattacattccatgaaccagagagctaaaaaagctttcatttatccagatttaataacattcaaattatatttatggtataaaaatcttaataattcaagttaactggagaaagaaatcagtttaagtgaaaaactgaaatggaagagattctaaaacaataattttattcattacaatcacacaccaattgtgtaatgaacctgaggaagatagttctttgggatctgctctaaaaagtgatttaaaatatttttgtccgcataagagacaaaggagaaagggaaaataattaaaatccagacctcttttccctttctcatctgtctcttggtacagtggtctccgcacccaagcaagggggtagcttcattctatgtgggaggaaccctgtggcctttttgcctctcacttagccagctgactgaccccatagcagaggctcccgcagaagacaactgtggcctgtttgaagtgtgtttttccctgaaatctctggctattgagagctcgcttgaagcaagagggttgttgtgaaatgtatatatcatttcttctcttaggcaagctaaatgcctggcctcatgccacacctggtatccaggttcaaacttttgcttagattcacatgtccatttccacacatttcaaatttattagaatctaaatgaagtaccaaaataagctataaaataaagatgttatctaacttgtaactaaaagctgtataattgatttaaaaataaaacctaccatctcttatacattgttctctttaaagtaaatcaccttaacaagctaaatgtttcttttattgttatcactacaatttggaaagaacatttaaacattttttttgccacacaatctttttgaatttttttttttttttgagacagagtcttactctattgcccaggctggagtgcggtggcatgatctcagctcactgcaacctccacctccaggttcaagtgtttctcctgcctcagccttccaagtagctaggattacaggcatgcaccaccatgcccggctaattttttttgtatttttactagagacagcgtttcaccatattggccaggctggtctggagctcctgattttgtggtccgcccgccttggcctcccaaagtgctgggattacaggcaggagccactgcgtcttgcctctttttgaatatttttaaggctggcaaattttcatcgaagagaatacatctaatattagaacactctcaaaagtcagttagaaataaatccagaaaaaaagaggacaattaatgtggccaacaattacttctggtcaaaaacagttttgctgaatgccgtttgtctaactttaagatcgacacagatgttaagcttttacgcaactgtctttgatgaaattggcctcatactcaaattttcttccttaacaggtctttttggcctccaattaaatctgaccttttagttatctttgactacagatatcctggccacagaaagaacagtacaccaggaaaatacggacctggaatcaagagaacaaattttatttcttttggtcactacttcaaatcacttatgttttttgagcttctttccttaggtttaaagtaagggacataaattatttcattactaatgtctcttctagctctgaaattctaagattctaacacatatggtaacaataacattatttaaaacaaaccaaatatctgcttttccataagtcatttaggtgactggaaagtcattactttcaagactgtctatccattattcatccttccatcaatccacccctgcctccttctaaacactaacggtaattcatacaacacagagaacacagagtcacagaattttaaatttagaaaagtcctaagataatagctttcccatttactaggtctcctgattcctattttcattgcttcataaataaattttaggcatattatctatcctttttttatctttatgttatctaaaactattcttgacattattcctttgagctttagtgaacatatcaagcacctaatttgaagcatctcagtaaacataaaaaaaaaatccttcttctttgccctgcctaacaagcttttttttccaaagggacacaaaacaatgtactcttctatttttcaaagttgtttgtatacagctgattgactatgaagtactgttagcagaaactgtactaggttatgccttagtgctatagacaagagtaacctaccatttctgaaagccatactgtagtctcattattttatagtcacaattcatgttttatctaaagaaactactaaaacgtatatagtttaatctagatcagatgaatctagaatgtgagacagtctataacacaattggactgaccttttggaaaagagaaaacaaaaaacaaaaaagtacagcagttttatactagttagaagagactaaagagatactaataagcaaagataatatgaaccttgatagaatactagtttttttgttaatgttaaaaaaaaaagactataaaaacatttgtcaacaattaggaaaatgtggatatgaagtataatactaattaacactaattaatgtcaattgtctcaggtatgataatggtattgtggttgtgtagaagagtattcccatcttaaaagattcatattcaagtattcgggggaaaagtatcatgtctacaacttattccaagtggaacaatttttttttaagtctctgtattgtgtgtgtgtgtgtttgtgtgtgtgtgtaacacatggaggaaagaggagacagtaagcaacaaagagtctgcaagaaaatgcaaatgtgatgagaagttaacaataaatctgaataaaatgtacataggtgttcatggtatttttctttcatcttttcagtaagttaaatattctcaaaagaaaaaactggggaaaaatattttagaaaaactacataacctgacctttactttcaaacaggctcacataatgcctaaatacattttatattctactaccagattacaacccccttatgcatatgaatggcatcttacttggagtactgacatatttaaattgaatcaacatgataatagttatctctgtcatgttttgccaacctctaaacccctatgccactggaaagagtagtctttctaaaaacaaatctcatccagtcacatcctgttttaaatcatcaacagccacccatagcctttagaataaaacacaaattccttagtttggcatataagagcctccaaaatctgaccctatccaacctatctcctatactgaactatatgcacaagaaatgtgcaactctttctcttgctactaagcttgggaacacattgccccctttgcttaatatacctatctgcctccttttcttagataacttcattcttcaagactcagctcagcattgctttcctctaagaggacttccctgatctcagattagtttgagtacctcttttgtgctcccagagcaaacttcaactggagtacttacaataaactatcacttttggtacctccataaggactgtttatttcagtagccccagcagatgacatatgtgaatagagacatagaagattagaactggaaatacatgctcactttccacgaacctgtagatgatggactctgaataatatctgaaaggttataacctccagaactatctgaacgtttacgtggcttctttttagcttttgtttttgctttcttgaacatagtttccctaggaaaaagcaaacataatttcagcagtgtttagggaggtaactaagataaatgcacttatttaacccaacatgtttaacctgaaggctactttttaaaatatttacactttcaatgtgttagacctacagatattaattatgtatttactttgtattataccaaggttaagaatgagcgtaactacctatttcttatgtcagaatttctcaatttcatcttccaataccaacacaaaagtgtcatatgtccaagatgagagtgaagggacacactggagaaaagaaggaagaaaaggaggaaaagaaaaaaaaaaaagaaaacagcttacgaatgattttgttccatatttatttcttctttcaagaagatatctccatcttctacttccaaatagctaatatctggtccatcttgatatggtgtaatgactcttctatccattgctggaatctgcagaattgaagatatcacttttcaaatacaaaatctgtgaagttttttttttttttttttttttttttttgtgcacacgtggctcttgccatgttggccaggctgtttggaacacctggccccaagcaaacctcccatcttggcctcccaaaatgctaggattacaggcataagccaccacacccagcctaaagatgttttttaaattatgtaagatattccatttttaatatgtggtgacattaactagaacagccttgaatactcaataacttcctaaatttacaagagggggttaaattttgattcaattcaataaaaactttattccataaacctgccaaaaaggaaacttgagaaaaagctccactttattattaaagatagatttattcatttcttagggatcatatgaattcatgtttttgcacggtcctgacctctggtaaataacaaaagacttactctgaggctttcagtaactttcatttataaagaaattaataaatattaactttattattaagtatcttgaattctgattatcatatgtatctgtgagatctgtaaaggaatcctatatcatcagttttaaaagatcctaatgtactagaagtcattaggaaactattccattaataagtctgatctaatatactgcttaagctggtaatattatagccgcgaaaatcttaaaacataaaccttaccattttccggtaaaactcagaaagatccttcaaaacaccatcgcttaaaacatcaagagacctaaaatataggatacaaaattctatcttaagattcaagtgacttgataactgtcaagttgcttacatacgtagatatttcatattgctagataagtaacaaagttattttttaagcattatatatagcagttgctacaaattccttttggaaatagatgtggttgtatattacatatttcaaataaacagcaaagcaaacatattacacaaatatcttgaataaaactcaagcaactctttttttttttctttttttgagatggagtctcactctgtcacccaggctggagtgcagtggtgcaatctcagctcactgcaactgctgcctcctgggttcaagtgattctcctgcttcacaccctcccaagtggctgagactaccaggcacacacaatcacgctcggctaatttttgtatttttattagagatagggtttcaccatcttggccaggccggtcttgaactcctgacctcaggcgatccacctgcctcagcctcccaaagtgctgggattacaagcataagccaccacacccggcctcaagcaactattataaataaatgtacaaagaatcttctctacttcataagagtttcataaaaattaactaaatgaatctatgtaatgcttttagaacaccgtctagcacatagttaatagtcattactactgaagtaaaatataaaaataaactaaacaatgaagctttaaaataaaaactgacaccaggaactctaatctcaaatttctgtgttctcatattgtcaccaatgactttataggaagtaaaatattttgaccttatatttttaaaaaagtatacatttatttcattttaaaaagatcactgttaaaaacattcaaaagttttcaagagctctctaattctaaaatgtacataacttctaaatcatcagcattgatcaaattctttccatccaggtaaacatcattattcacatttaaatcactaataatatctgctattatatataaatatctccttttgcaacaatcttacaacatatgcacctcacctaccttgcttcaagtaaagctgccatattcaatcctataaactgtaaacaagacagtttcaactgttttgcactatacattgctgcaaattccagtagcatagcagcattcttcagggtaactacaaagaaagaaaagatttgcaaaattagataaaaggcacattaccacagcaaaataaaatacatttatgtctaaagctgtacgatttgaacatttggaataaagaaaaaaaagtttcttgccaaaaataagttaatactggggcaaatatgtaactcttccatcccaatatgccaaagtaatttcaaaagattggctatgaggaaaaataagctcacacacaagcatattctaagcaaaacagaatacagaaggggcatagtgccacccaaaagcaaacacataagaactgacaatcttccacctaacattttctgaatatttttaaaaagcttttattaatgaacaactttcctttccatttacatagcagttattccctcttccataaaactaaaaaagatataaaactaagaaaaactgatgaaataattctataaaatatattgagttatctatcagaattcatgtgggtgtatatatatacatgtaagtatataaatatatacatattttgaaaatacgtacatcacaatcttatcataatattcttcacaccagtgaaaaatctgatatactgtgcaaaagattctggatttagttacaattgtagtaacattatatataaagtacccattttcctagagactctcccagaatattctacctacataacaggtaactttcagcttcctgttccctccactatttttcttaattactctatcagtaccagccaatagggaaacacagttgttttctacatctggcttcttgcatttctttttctttctcacctgtgattctatcaaaagttgcaactgcagtcaataatggtctctgtctcactcctgactaatctacattttcaactaatgatgaacagagaaattgaagaaatgataaaattagatcatataaaaacttctttagagttgttcacatgggaacaagtatccacatattcctaataatcagagaccaaaggaggtggtagcctccttttcctaggttctaggaacatcaaggaattaataaaggcaactgtgcagccagagccatgaaagaacactgaggaagaagaccagcaaaggcaactgtacaagtgtaaaatatcacttatatgtatgtcttatacctgttgtatgctgtgtcctttattttagaatatttttcttttcttgcttaaaaggagatcagggctgttgttctctatttaataaccaaggagtagacagtctacagtgctcaagaaaagtgagaactaaaatgccaaagccaagacaaactcctagcaagtatgaactagaaaaaatggacaggaattcccttcacacttcttgaagtagcagtaaagcagaacagatataagattagaaagtcaaaaaggctgtcaggtggaagctaaggaaagttaacctttattctagagtaagcaattataaatatgtaaacagggggaagatgtaactacttcctacagaaagcttaaagaaacagaagtagacaggagaaagagcatttaaaacactactgtgacactacccagaaggaacagataacagtgacctcaactgcatagtaacagtgagaacccaaaggtaggggaaatgtgaccaacatagttaaaaggaataagttttgacaactgaatgaatttgagtgtcagggccaaaataataaagaaaaactcattttggatttcaaagtacagtgttcaggaggatagccatgaaattaactaagataatgaagagagcaagaaagaagagttcaagaaaaaaagagatgtgctttgttcagatatataatgggaaagttaaatttttaaaatcactgcaaatagtagaaaatgggtagctaaaaacacctaaagccaagatcagggcaagagtacaaaaatttcacttttaaactctcacccttgaaattagcaaataaatctgacaccatctttattcttcaaggttttatgacatttcaatacaaatattacatttcaattctaagtcatatatattttcacatatttctaaaataagaattcacttacaaatgatggcatgtaataatttacatattttggcaggttttcgtggtaccaaaaaaatggtctattttaccataagtggaatcataaagtcaataaagtacagtaatccttgatgaacctgaaaacatattaatattcaaactcaaaattactcacgtttttcagttaatgctacttcacaaatctctttcaaccgggttatgagaagttgatcagccaccacaagaacactacaaataaaatctacattttgagattctaaaaaaagaaagaaaacaagcatcactttttctttgtatacattatacctagaaaaaaaaatttgaagtaattagtacactagaaaagagatttaagtaaaaaaaaaatttgaagtaattagtacactagaaaagagatttaagattattttctaaatgttgaaagggcaaccataataaaaagtaaatacatcaaaatatatttctattttttaggtagaaagctgacaaaattacaccaaaatgtcttgatctcacactaggaccataaaatggccaacttaaattgatcatttcagtctagaagcccactagaatgcctgacttgtttataatctcccatgttgttagaaaaacacttctcaagctaatacaaagagggaaaagtcaaatctcagcatcacacttaatatataaagggtggggaaataatgctcttatgctttcttatttaaaacaaaatttgtcatctaagagtgcttttttgtaactattggacttccttaatttaaaacaactttcttgggccaggtgtggtggctcacgcctgtaatcccagcactatgggaggtggaggcagaccgaccacttaagaccaggagtttgagaccagcctggccaacatggtgaacatatctctactaaaaatacacacattagcagggcgtggtggcacatgcctgtagtcccagttaccggggaggctgaggcacgagaattgcttgaacatgggaggcagaggttgcaatgagacgagatcacgccactgcactccagcctgggcaacagagtgagactccatctcaaaaaaataaaaaataaaacaactttcttggtcctcagtactactaatggctttttgcccctgagccactgccaaaataacaacataaattgaaagaaaaaaataacagaggaagagaggaaagggaaaaaaagattaagaagaaaaaaatctgacacagaaaacagctttaaaatatgagacaaagatgaagtcactaggaatgacagactaagagcttctaatcctctcctctaaaaaaaaacagacaactgtggaaaattgtcataatcaacttttccagaattctggaaatcagccaaaagcttataataatctaggaagtgtttacttaagaaaagcagttgaatcttgttaagaacagtgggattcaggacactgcagcctttcctgttcagatcttcctctcccctcctccacagcagtactgaaaccaacagctccataatcacagggaatcacattgacagcctagtagccacaggagacagaacagttgtagagcaatagtatccttatttgacctgtctgctagttctctgaaaatcccactagaatgcttatctttatttgacctgacataaagcttgcccagtgacaacagccttttatacgggggcaaacaattagcaataagtaaagtaaagatattgaattagtgatcaaaaaacttcctacaaagaagagtccaggaccagatggcttaattggttaatctgactgaatatttaaagatgaataatacaattgatgaattaatacaagataaattgatacaattctccacaaactcttcaaaaagtagaagatgaagaacacttcccaactcagacaaggaggccaatattatgctgattctaaaaacagacagggacatcacaggaaaactaaaccaatatcccttacaattaaagatgcaaaaatcctcaaaaaacgctaagaaactaaatccagtaacatataaaaaggaattatacaacatgacctaacagaataaatccaaaacgaaaggatgattcaacatatgaaaaatcaatcaatataatacacaaaaataaagtataataaacacacggccatcttaagaaacagaaaaacatttgacaaaaatcccacaccctttcatgataaaaacactcaataaaccaggaatagaaataatcttcctcaacctgataaatggcaactacaaaaaacccacaagtaacatcctaattaatggtaaaaaggctgaatgctttttcctaacatcagaaacaagacaaggacaaccactgttgccacttctattcaacagagtactagagattcatctaatcagggcaattaagcaagaaaaagaaataaagcacacccaaattggaaaggcataagtaaaaccatctctatttgcagatgacatgatcttgcatatagaaaatcctaaggaatccactaaaaaaactactagaattagtgaacaagttcagcaaggttgcaggatataagatcaatatacaaaaatcaattgtaattctaaacactagcaaaggacaatccaaaaataaaattaaaaaaatttccatttaaaatagcactaaaaattcttaataatttttaactaagaaagagcaaggcttgtacactgaaaactacaaaaatcattgaaagaaattaaagacttaaatatatagacttaaataaatggaaagacagctggtgttaatggattataagatttaaatattaaaatgacaataatcctcaagctgatctacaaattaaatgtgatttgtattaaaatcccagctgcctttattgcagaaattggcaaactaatcctaaaattcacatgaaaatgcaagaaacccaaaatagccaatacaatcttgaaatagcagaacacagtaggaaaactcacatttcccaatttcacaacttacaacaaagcaatggtaatcaagacactgctgtactggcataaagagagttcagtgaaatagaactgaagagtacagaaataaaactttaaatttattgtcagttgatttttgacaaaggtgctaaaacaattcaatgggaaaacaaatgtcttttcaacaaatggtactcaaaaaataggacatacagatgtaaaagaataaacttggacccatagctcacaacaaatacaaaaaataacttaataagaatggtggttactagaggtcaggggattagggtaatgggaagatattggtcaaagagtacaaaattacagttataagatgaatgaataagatctagagaccttatatacagcatggccactacactgataataatgtactgcatacttgagatttgctgaaggactagatctcaagtactctcaccacaaaaaaaaaaaaaaggtaattatgtgaggtgacggttatgttaattagcttgattgtggtaattatctctctctatatatataaatatagatattatacatatatatatctcaaagcatcatgttatacactatgactacatataatttttacttgttaattacaccttaatacgactggggggggaattaactcaaaatggatcaaagacctacatgtgagagacagaactataaaactcttagaagaaaacatacagggtaatcatcatgaccttggatttgacaacgaattcctagatatgacaccaaaaacacaagtaacaagtcaacatagacaatttggacatcatgaaatgcctgtaatcccagcactttgggaggctgaggcaggaggatcacttgagcccaggagttccagaccagcctgggcaatatagggaggctctgtctctaaaaaaatttttacaaattaaccaggcatggtggtgcacagctgtagtcccagttacttgggaggctgaggtgggaaggatcacttgagctcaggacgccgaggctgcagtgagccatgaccatgccactgcactccagcttgcccaatggaataagaccctgtctcaaaaataaaaaaaaattaagtttttgttttaaacgacacttcatcaaggaagtgaaaacaactcagagaaggagagaaaatacttgcaaatcatatatcccataagggactaatatccagaatatataaagaactcttgcaacattataaaaaaacaaataattgagaaaaaaagtgtccaaaggatttgagtatgtattcaaagaagatatacaaatgaccaaaaagcatatgaaaagatgttcaacatcattagtcattagtgaaatacaaatcaaaaccacaatgttgcataacttcacacccgttaggatggctataataaaaaaggttgatattagtaagtgcttgcaaggatgtggagaaactggaaccctcacactgttagtggttaagttaaatggtacagctagccactgtgcagttcggcagttcctaaaaaattaaacagatgacccagcatttccgcttctaggtatatgcccaagaaaaatgaaaacataggcccacgcaaaaacttaggcatgagtgttcacagcagcatgattcctaatagacaagaggtaaaaacaaccccaacatccatcaactgatgaataaatgtgttatatccacacaataaatattatttggcaataaaaaacaatgaagtgttggtacctgctacaacacagataaatttttaaaacatcgtacttaagtaaaataagttaaatataaaaggtcacatgttgtttgattgtatttatacaaaatgtccagaagaggcaaatccatagagacagaaaacataataggggttttccacggactggggataagagagagtgggaagtgtctgctaatgggtacaaggtatctttctggggtgatgaaaatgttctagaattatacagtgatgatagttgcacaaattcataaacatactaaaaactacttattgtatgctttaaaagtataagttttatcatgcaaataatttctcgatttttaaaaagaatgaaagtagagaaaaacataccatgtctcagttatcttactctcaagtatacaaatcttcagaaattttgtcctcagttaaactctatctccttacaagactacccagatttcctaggcagactcagaggctagcttcttaaaaatgcatctgctttttagagaattactctgttggattatatttgttttcttatacatttgtcttctccactagattgagtttcttgaatataaaaaaaggtctatccacttatttttatccccagtatacagctggggttaaaaaaaactaatggaatatgacagaacatccagtaccattccaatgagtaaacatatcttgtaactaaaagttactgttttgcctaacaaagtacataaatgacctctcttcataaattttggtacaatttttaatctgtttctttcaagatgtgtaaccacaaaggggaaaaacaggtaagaaagaacttatgtaagtatttgtcaaaactatccctgttgtcaattcattcatctccatcatagaagtagctggaaattgaactgctgaatctaatttcaaccattacctacaattcctttttttttttttttaatgaaacgcttcacaaatttgcgtgtcattcttgtacaggggccatgtaatctctgtatcattccagttttagtatacttgctgccgaagcaagcactaattctcaaagagttcattttcacatgggtaatgaaaacctttttctgctcctttactattagcaatcattcctattgcttattctaaattaagcctttattggccaggcatagtggctcacgctataatcctagcactttggaaggccgaggtggaataatcccttgagcctaggagtttgagactagcctgggcaacatagtaagaccccggtctccataaataataaaaaataaattaaatattttaaaaataaaataaattaagcctttattgatggtttttttctattagaaattaagattcacgttgattttaccattattccattatatgtgaagtatctacaatgtcctaactcttattaataccttttatcaccacagcttcatcagtatagaggtagtccaaaataacttttaatatatcagaatgtattggcatttccagagctgcacaactggaagcctaaataaaataagacaaaataaagtaaaataattcattctaaacaataaaatattacattctaatttgggttattggtacaaaacactctgaacaggaaatcacatcaaatgcaaaacataaaatttacaaaacacatggctaaaataatattaaatttaattttaaaacataacatgaaaaaggaacaaaaaaattcagaaaacaagaaacacagtggtgttcctaatacatttctaaataataacggggaaatttttatttaagtagcttcttggcaataattttaaattctaagtgttgctattttccagcagcctcaagcataaagtttaatataaatgaaaaactgagctaaaatatccagttctgattttgaatttctttactacatactttgcacaaaatataaagaaacatagttaccaacctaggcgctttttacttaaatcttacctcaatccatgagctactcagcatactatgaaaatattctaaaagaaaaaaaagttcaatgcaataagaatagtgaaacaatactacagcaaataaatcagcagctttaaaaagtgcacctaccaagtctagcacaaagaacacatttatgacaaggaaattcctttccatccactgatttcatggtcacgtcacacagaaatgaactgcaagaaaatgtttaattgaagcaagagcaatttctttacatatttagtgaaaaagattataggatttggcttaactttcagttttctcttaaaggtggcagagaataaataacttgcaggaatacatacaataaaatacttcatctttttccaccacagggaagataagggccttagagtaaagacaatatttgaaaagggagccgaatacaaatattcaaaaagtatttttctgattttccttttttttattccagaaaaactgttaataatataatactaagtgatatcatatttaagtctctgtaattcacttatttgtagtagctaatctgggccaagcacagttgaaacaactccacagtttatccttctccaaaaccttttcacttacagaggaagcatgaatagctaaaaacaaaactttttttttctttgaaacggggtctcgttctgccacccaggctggagtgcaatggtgcaatcttgtctcactgcaacctccgcctcccgagtacaagtgattctcctgcctcagcctcccaagtggctgggatcacaggcacccgccactatgcccggctaatttttgtattttcttcgtagagacaggatttcaccatgttaatcaggctcttgacctcaggtgatccacctgcctcggccccccaaagtgctgagattacaggcgtgagccaccacaccaggccctaaaaacaaaactttttaacaatatatttagaatagtatatttattactaagaattttttatactaaaggcaataatcataacaatgatgaagaggtataattaattggtttgggggctaataacatttcctaattataacaaggcacaaaattcaggcaagaaaaaataaaaattaaaagttccactctctattagaaagtcatcggaaagaaaaaactcctttgatgtcttcagcagttaatattttatcaatttacttcaacagctccccaacatttccagaaatgcagaatactagaaaaggtaagagggtatctacctatacattttgcttcatatgtgggtaagcagagatctatttccacacttaagtgccaaaatccagacatgaaatgttaatcttcctttccttacttaccattttttctgacttagcttcagtttattaccagtgttcttggcaataacattaattttttcattttcaaatctgactccatctaacctatcaaggatagataaaaattaacaattgatattcccctacaaaaataaacatacaacaaaaaatccaacaaattagcttacatctaaatataatactgtatcctagaaaagtatctcaacaaactcctactctgagataaagaaatatcatactttttcttccattttagttagaattcaaaatagattaaacattactgacaaaagacaaatcaaagccatagcacaaagtttttccttttttttttttgagacgaagcctcgctctgttgcccaggctagagtgtggtggcatgatcttagttcactgcaacctccacctcccaggttcacatgaatctcctgcctcagccaacccagtaactgggactacaggcattcaccaccattcccggctaatttttgtaattttttgtagagacagggtttcgccatgttggccagcttggtctcaaactcctgacctcaggagatctgcccacctcagcctcccaaagtgctgggattacaggcgtgagccaccgcgcccggccccttcattatttttaaacaggaaacacgatacacacccctcctctcttcccaccctacaacgaaggtttaactgccacaagcaacataaataccttaaaaaaagaaagaatttcaaataatctgattcataatatgatactatggtgttaggcaatttacatatgacaaaaccatatcaacaatatgaggcaaatattatctttcccatttcttatattgagaaactgaagtaagaaggatcgcttgagcccaggagttcgagaaactgaggtaaaagaaaattgtcccagccaggaatagtaaagctaagagatatgtatgtctaacttgaaagacctttccagcataccacattgcctgccactccagatccctgttacatacacaaaccagagttcaaacccaccaacagctttcctatccattaatgtaatccaagaagtcccagagatagctctgcccgcaaatggaggaaagacatatccatgtacctccccaaaaaaaggatgggtagggagaaagggagagagaggaagaggaggggaaggagaaagagaaggggatggaacaagtgggaggagacttggggaggggaaagaaaagcaaagcaaggcaaaaagggtgggatttttttttttttctttgagacacagtctcgctctgtcgcccaggctggaatgcagtggcgcaatctcggctcactgcaagctccgcctcccgggttcaggccattctcctgcctcagcctcctgagtagctgggactacaggcgcccgccaccacacccggctaattttttgtatttttagtagagatggggtttcacagtaagggtgggaaattttttaaaggaggactgaatgaggtacaggaacagatataaaagagaaatcatacctactactcaaattactgaagtcgaatttctttgcaacagtttgcaacattcttacaggatcatcttccctaatattttttccttttttacaagatttaggtttgctcttctgcctctcactaactgtttgagcttgattacttttgtaaacttcaaatgcagacttctggttatcatcttcatggaaattcactttattcaaatgagaattcagagttccctgatattcttctgggtttttgtttaagtgtattcttggtttgaagccatgagttaaaaagtcacaagtatctgtgtatataaattgtaaaaggtattcaaacatgtcaggatgaaccttctctaccacaaagagatggcaccctgcagaatcttcatctttctggtaaatatctgtaaattctgaagtattaccatctgaaagaaacaatttctgaaaaaaatcagaatgcactgccaaaatatatttatgtgcagggaagagtctattgccaacttgaaatgtcacatcatgaatgctgtccatttcatctgcttccctcaacagtttgccaaactcttcaaaaaaggatgatgaggacacagctggaatttcataaaggctagaaagaagacaaaaacaaattatgcttcaaaaaatatgaaggaaatcctttttcatacctagccaattctcctttaaaatgcaatttttttaacaatatttagaaaattttaaatttggcatttcctaaaatacaagaatattgcacaaagtcctagatgctatatcatcctttaatttttttctattcctttttatatttatattctattcttctctcaaattaaaatgataagaactaagttgtccgtatccctggttcttacagtactgtgggaatgcaattacaccttcccaaccaacatttcacccttctcagtaggaagaccaaccctcctgtggtttgccttggactgacgagtttctcagatgagactttcaatgttaaaactggggcaggcctgggcaaaccaggatggatgatgaccctacttgcagaatttcctccctcttcaacagtacccttgatgtttatcttaatctgatacctctctgcttatgtgacttaggagatttgcattgcgatttacagatggcgccacaacacttattttgccaattctcatcatattcaagggtcagaaatctttgcaaactgcctaagaaatatttataatacatttttcagaatctgagaacccagggtacatcatacagtatgaaagacaaataaggcagggtgcggtggctcatgcctgtaatcctagcactttgggaggccgaggctggcggatcacctgaggtcaggtggtcaagaccagcctggccaacagggcaaaaccccatctctactaaaaatacaaaaattagctgggtgtggtggcgggcacctgtaatcccaactacttgggaggctgaggcaagagaactgcttcatcctgggaggtggaggttagagtgagccgagattttgccacttagcctgggcaatagagcaagactccatctcaaaaaaaaaaaaaaaaaaaagaaagacaataaactttgtgagtgcatgtatagatattttcaatattttcaataaatgtcagtttataaaccaaaggaaacattcatcactccaagtataacaaattctacctctggattatctgtagacataatctgtaaacatgattatgtctaaggtctctataggtcttggcaacagctcttcaattaaatttgcaccagcagctactgaaaacaagaaaattcagtgattgttccttctaaaaaatgaaatttaatatatacaagtataccttgttttaggatctgactgcaggattgcaaagttgcatccacttggatctgtgctgacactaacagctctatgtgcaaaggtaagtttctcaagtcgaattctttcatacacactatttatatcagagacataagacacatctgatgaggaattgtgaaggtttgataaaatctctgttaaaaaaaaataaactaccattaatcaaggctttactgaaactactaaaatgattgagaagtaaatggaatagaaaaggagttagaaaaatatggaaatctttttcacatatattcagtgtttttgaagaactacatcctctcttcaacacattttccactgaatatattggctgtattatacaggaaatttttggtggatggattctcaattatccatgattccatctctttcaacaaacacatcctccatactgcaaccaaagttccctttctaaaaagcaaatctagtgtcatactagcttttaaaacttttcaacttatacttcctgttgcccaaagggaaaaaaattcttcaacttggattaaaaatatataaatctactgtcttcataatctgcttgtttatttgcttcctccctttctcttccccctttcttgcatgtattcagaaaatatgtgcgtaaccaaactgggctactatgatatcatcagtctggtgatatagtagtgaagaagacagacatgtgcctgctctcctcgagtacacaatctagcagggaagacagacattacacaaatgattatatcattacaagtaaaatcaaggctatgaaggtaaaggatatagtgcttccacaaagatatgaaatttacatgaatgaaatgattctggttgtagtgtgaagaatgtttaaggtaaacaaagaatagataaaaagaggccatttaaggaattactgtaaatccaggaaaagaattaaaagatgatatagactaggttgtagcaatgaatctggaaaaaagtggaaagatataagaaacatttgagaaagagaacaaaacttgatgactgattaattctagtgtaagggaatctgagtgtcaaagataataatttacagaaatagaaaacactgagaagcagaagttagagcatgaaatcatgaattcagtttcagatcactaaatatgactaagacacacttctaaagacttccataagttgaacctacgttctagttactcccacaaattaactctattttagtcttatgaggctttactaatcttctctgacactcagtcattccaatttctatgctctcaagaaacttattatgtggatattaacattagtctcagtgaactgcaaatatttacatacatgtctattgcccctacaagcctatgagtgcctcagtatagaggcccattttatatattcttgcatctttaaaactttcccctatatctggcacatagtaaatatatattaaatgtttacagacttgaataatctataaagaaataaaagaaatacaagtaaatcattaaattttacaaaagtcatttatctgtggctttatgattttgaagaatacgtttataattttctgagtaattataaacattcttgattttgttctggcacacaataactgagttattcatacaacaggtgatttaatgagtgactacaatgcgccaggaaatatgccaaaggctaaggatatagacgaatattcatggcccttgccatcactaaccttacactctaataggaaacaggcattaaaaaactaatcacaaagataaatacataaaagtaaaacctaataacacttgtcagttgaacctaatacttgtcaaattaaaggataattgaaaggtacttttacgtattgttcaatatatgaactgacctttcttttcagaactctttcttttctcttcaaaccatctccctctaaatccttctccatcttgcgtaacaaatagaatttcatttctatttaaagcaatatcagaaatgaagacctgacgtggataggcccatcgacactgcttcagagaactgttgactgatctccagcaaaacacctaaaacaaaaccaaatcacattgaaatataaagcaagtagcatttgaacaaccaaaaccttaaatcaagatatcaagagacaatgctgttaaaataaaagctctcattagtatgtttcaatgtttattcttccacagaaaaagatagctactataagaaaaatcaagatgattttaaagaaatatctttcagaaaagtatattaagcaagcctgaagcattagaaattatttcaaaggcactcctcttaagaagtagcaatttccagtattacctgtttagggcaaacagatgtgctacaatgctaaagaaaaacaaaatcttaaagctacaacttacaagtcaggcttcttgtagtactatctctttacaagaagaatgagccccctatgaaaatccaaactttactctcaagaaaaaagtaaatgtatgcataactcaattatataactaaaacaaaatcttagaaaagtcattacagaattcaatggttgtaaatggttctgcaaacctcagagtccctgaaaagtagctccaggggacttgctaagggatggagaatgatgagagatggggtgtcaggcttcccaatccacagtagcaattgttttatctgtttcatataccggtattccaagcacaatttcatttgaaaaattggaactgctgatttttaaaagtccaattccctcataatcaagttaagaaaactagaacacaaaatggttatctgacaaggtcgctaaaaagttattcacacaaaaagactatactgattgagactgactgatgctttcagagcttggttttcttaatgagactctattttgcaggaagtaaatatccagaagtataagctatatccatttcaatgtaagtgatacacatcccaaaatcaaatataagtttttatactcaactcttttatgtaaccccatttgtttccttccactagtacaaactggagctctaattctttttttttttccttcaacttttaagttcaggggtacatgtgcaggatgtgtaggtttgttacataggtaaacgtgtgccatggtggtttgctgcacagagcatcacatcacccaagtattacgcccaccatccaacagctattcttcctgatgtagagctctaatatttaaacctagttactactattaaaatcatcttcattctccatccctacaatatatgcctataatgacccagtatgtggagctttatgattaattcctcaatttctaaaatgtcaaactttacagcacattataaacctcggaaaacattattttaatttgataagtaaaaccagaaagttatctgtgttcttctacccatactgtgtgtttttcagtatcattagtgtatgatatatacctttaaatataatttttaaaatctaaatatattatttagagatggctcccaccctcccacccctcaaaaacaatttagagatgtattttatataatatataaatacattaattgaagcatatatttcagaaaataatctttttaaatattttaaattaataattttattagagaaatgtactgatatgtttgcataaggaactaaaattagaactttttatttaagagataagaaattccttatacactagtgatccggaaatatttcatatataatgtggatagttataatgtatacatatattataatgcatacatttgtataaaactaaatatggaaaaaaatttccaactatgcaccaaatttatcatattgcctgatctttacttttttaacagttacatgaggccaggcgcagtggctcatgcctgtaatcccagtactttgtggggctgaggagggcagatcacttgaggccaggagtttgagaccagcctggctaacatggcgaaaccccgtctctactaaaaatacaaaaataagccaggcgtagtggcacatgcttgtaatccctgctactcaggaggctgagacatgagaatcgcctgaacccaggaggtggaggttgcaatgagccgacatcatgacactgtactctagcctggccaatagagcgagactgtctcaaaaaaaataaataaataaaattatagttacattacatatcttatatttacgcaattcagtgtcatttatcagtattcagtgtatacaccaaataacatcaaaatctcttttcattttaagcacaataaaatttttgattacagtttaacaaatcagtattgtgcaacattagattaaatgctgtctgtcatactttctctaaatcccacctccatactaattagtaatggatgtctaaaacatacttattttggcacccaatactaatcatcaaagtcaataggaattgtcactaacatagcaatacattttcatgttaccaggtctgctacagctatcaactgagagtaagattacacttttacataaacatgtacttacccttccagctccatccattgcaagaatgcaaattttttgacccccattttctttcaaatgttcaggatcaaccttgtattccatatgacccccagacacaagaacttttttcaagttcaactgtctagatgaaaaaaaaaaaaatcctagattaatatgttctctaaactacacatgcctaaacttcaaagaagttagtattcaaacaacaatctataggcaattattgtgaaggtgaagtaaaatgatttggtctttggtatctctagccttccattctgtaaatttcccctacaagggggctgttcctttctatgtcaagtctttttctcttaaatgactttacctacacacacacacacacacacacacacacacacacacacacacattaaatgcctgaagttccacctgctaattcaaacattcactctggagtttaaataactggtatgggctgggtgcagtggctcccgcctgtaatcccagcactttgggaggccaaggccggtggatcatttgaggccagaagttcgagaccagcctggccaaaatagcaaaaccctagctctactaagacgaaaatcagccgggcatggtgatgcgcccctgtagtcccagctactcgggagggtgagggagaagaatcacttgaacctaggaggcagaggttgcagtgagcagagatcacaccagtgcactccagcctgggtgatagagagagactctgtcttaaaaaagtaaataaataataaataaataactggtatggctataagctcctaagtgcatctctattttaacagaaaagacaaattttaaacctcaaaattaaatagaaatgcttaatttaaaaaatggctaatcctaaacagatattgctaccatgaaaatcatctgtactgctattcagtaactcattcattagctacacatttcattatatctgcacatttgatgtgcatagcattatgtgaaatctgcctgctgctactccaatgactgtcctcccttttaaattaaaggaaaaaaaaattttcaaaattactatattgtataacttaatctgtaacaaaataatttccttaatgtactcttggatataacatatttatgtgatttaatgttatataggcaagttttataaatgttaactaaaaatacaactcaacatcttacatatcacctcaaactcaggaaaaaacctatttagtcagttttaagaaacatattcacattttcatgtttctatcactaaaatataacctaaaattgaagtcaaaagtaactttctgccaggtgcagtggctcacgcctgtaatccaagcattttgggaggccaaggtgggcgaatcacctgaggtcaggagttcgagaccaacctggccaaaatggagaaaccccatctctactaaaaatacaaaaaaaattagctgggcatgatggcagatgcctgtaattccagctaatcgggaggctgaggcagaagaattgcttgaaaacctgggaggcgggggttgcagtgagcataggtcacatcactgtacttcagcctgggcaacagagcaagacaatgtctcaaaaaaaaaaaaaaaaagtaattgttactcaaagaaggtaagtttttacaaattgatagacattttctgctcatgagtaacttcatggatggtacctgttttacattatcaaaagcattttgttgcatttaaatttaaatccccaattgttttaaaagttagatagctattctccagaattcctgtacacaactgctcccactagttgagctatccactttcaagaatcatttatatttgtacaatgacctatttaagtacttgtatttttttaaactaataatgtatatatttataatgaatttatcacagtaaaatactatataaatggtaacatattagtctgaaacctgtctatagaagttgaatactttggaatggcacaataaatatgagcagcaaaaaactgtcaaactaattaatcaattataaaagattcaaaatgtattaaaaatgtacaattctgcacttacattacttcacaattgtttttaagcactggttccttaaatcattcaaaatgaaatgacaggtgacacattatgagtatggtttatatgaaaacacagggaattccagttggtgcacccacccatacttaaaactttatgaagctgggcgcagtggctcacatctgtaatcccagcactttgggaggctgagacaggagggacgcttgaacccaggagttcaagactagcctgggctacagagcaagaacctgtctcaattaaaaaaaaaaaaacaaaaactttatgattctttgctttgacttgactagtcaaccaactgctactttactgcattctataataacatgtttttttaaaaaatatacttatcagttataaacactaagcctggttagagggctcatgatatatgattatattctaaagataaataaatgtataatgtaaaaaaggctatacaggaaccaatgatgagagtgtcacgaatcaagaattatgattaatctatttctgtgcacctaaaatacaaaaaaagaaaaaaatatatagctcatatttaactacatattaaacataattcagaaataccactttacaatttacacagaaattttatatatattcactggatccatgccaaaagacaaaaatcaaagacaaaaattcctgatgtttttcctcattcaattttttccatttgacatttatagaacatagcataaagctaacactcagatatttgctggaagagttgaattattattaaaattacgtttctttcacagaaatacacatacttagaagccatcttcttgcactgatagtctgcaagtaagtaaatatctccccttgtggtaacacagactgtagctccatcacttgcagcaaccaaagacagagcaatgtctttatggtgaagggcagagacctgacgaggagcagttacacacttttctccattgggatctagcaaacaacctaaaaaatgatacaaataagcaaatcacaaaatagctcttttaagagtcctatttagccaagcacagtgtctcatgcctataatcccagcacttggggaggccaaggtgggcagatcccttgagccctggagctcgagaccagcctgtgcaacatggtgaaaccccatctctacaaaaaatagcccagcatggtggtaggggcctctggtcccagctattcggggggctgagatgggaggatcgtttgagcccaggaagtcaaggtttcagtgagctgtgatcgcaccctgaactccagctaggatgacagagtgagactttgtctcaaacaaacaaacaaaaaatcactcataatctcattctaatcaataaaaattaaaaagaaaagataattttttaaagagtccaatttaatttccagatattgtcattaaggatttcttacccagttgtccaccatttagtcccatagtgtaaacagcttctctagtccataggactgtatgaaacctgcctgctgcaacgccaatgattgtccttcctttcagatattttgcctgtatctatttaaagacaaataaaactgcaatttactatatatttatgacctagtacaattttttaaagatccagcagaccagcaaatatatggtatacttgctgttagtggtccactcaagtgcaattggcagttgtcactaacagatctcagcactcatactaagacctgaatccttctcggaacacaaaacattgtgatgcagccactttcagtcagcagttttaacatatagaaaattgacatggtgtaagaatcaaattattaaacttttagctatttttctttttctaacaagcaatatgcaaagcagccagtctcattcttaatagaaaacacagtgcttctaaattagatatttccatggtctctcaatagtggcattattgacattttgggctagatgtttttttgtcgtgcgattgtcctgtgcactactgtgcaccttctggagatggctgtgcacatgagagtaaaaaagtagaataaagaatactggtttttggacccatgtcccctaacatcaacttgtcacgtgtgatatctgtgcagaggcagatttactgaagcaaataaaacttaagtctctgagttcctcacttgcatgaacccatttggtattgataaatttcatattttttcttatggagggcctaaaaagtgtttaagtttcaaatccaaaatatctggacctccctttgcttatgaagacttaaaagatgcagtttggtggctaatctcccaagtgcagaatttcccaagtgctttctttcttactccaaacaaatgctaatatgtactatgcttaatttctcctgttaaaaataaagacaacaggctgggtgcagtggctcacacctgtaatcccagcactttgggaggccgaggtgggcagatcacctgaggtcaggagtttgagaccagcctggtcaacatgacaaaaccctctctactaaaaaatactcaaaaaaaaaaaaaattagccaggcatggtggtgtgtgcctgtaatcccagctactcagaaggctgaggcaagacaatcgcttgaacccgaggggcagaggttgcagtcagctgagatcgcaccactgcactccagcctgggcaacagaggaagactctgtctcaaaaaataataataataataataaataataaagacagtatataccactgaagataaagttaaataacagaaataaaataagttgctctgtcaataacttacatttttttgttcatacaggttttattgcaaatgtaaaaccttattatttaaaagagtaaagcttacctgtctgggtacattacaactggaaggcggtggaataattcctaattgatgaaaaatgtttagaccaaatgtataaacacatccatcttcagttaatacaacagtatgatccttagcagctgccacttgggaacaattatgaccattcagtccttccacaagccgagggacctacaaaataaaattaactttagtatactacattaaccatttatacagatatgcaaatagaatttgatgatactacatctaaaatgacatgaaatgacatgactgatacatggctgtatctatcataggtaaattctacatttcagcaaagggtagatgagtttaaaaggatatggttgtaagtttatgagcaaaatacataagcccagtaagacattccagtgaaataattcaattcaacaaatgatttttgagcccttaccaagtgcaaatttgtttggtatgaataaagggagctcatcaaagtatacacgggtacattgaaaaaaaaacaaaaatacagaatcaatgtttcccttcggggagtagccaaacatatagtatcatattcctttggagtcatttatctgtcctgggttcaaatcttacttctgtcactacctatttgatctcaaatcaaatttcttaacctctctgtacctcattttcttcatctgaaaacagtaatcagtcaataaacgattgctattattagtgtcatcatcatgcataaaatgaagataatacctgtgcctcacagggctgttgtgaggcttaaggtaatattatatatgaaaagcataaacaatgcttggaacaaaataaaccctcaaaaatggaagctattatcattatagctttccctctttttaaaagcaccatttaatagataagtatatcagaagtccccacaaaaaacatcttaaaataacgtagtgaaccaattttctgataggtaatgtactaggtctcttctaattagcactaagtttcagtagcacaaatataaattttgtgactacataatgaaaatactggctcaatttttagaccacagaaatcttaatgagaagttaaaaacaaaaaccagaactacttcaggaaaagtgttttacaattagtgtgccttcttttttgtttttttttttttctttttgagacggagtttcactcttgttgcccaggctggagtgcaatggcacaatctcggctcaccgcaacctccgcctcccaggttcaagcaattctcctgcctcagtcttccaagtagctgggattacagacatgtaccaccatgcccagctaattttgtatttttaatagagacagggtttctccatgttggccaggccggtctcgaactcccgacctcaggtgatccgcctgcttcagcctcccaaagtgctgggattacaggcgtgagccactgcgcccggcctagtctgccttcttctatttcaactctagaaacattttaaagcttatgtaacgctcctgactcagtatttgctataagcaaagtattactttttttaatccttttgcattgtatgtaaatccttaatttaaacatgatatatcaggaaacagattttttaaaatctattatcaattgatgtattatttcgtccttacagttgaaaaaaaaatttagttaattaaatctttcagcttatcagcatttttctaaagttacctaaatagtgtaatgacatttcaattaccaagcatgtctgttcatctccatgtcctaatcgccctccaggaccatgaccacaggtataaacctgccctttctgagacagaaacacggagtgaaatttacaaagcaccacctaagggaaaacaagagaatattattaaacttctctgaataaaatatcctttattttatgaaaaagaaatagaatattgttaattgtttaaacaggataatggatacaaggggaatttataagactttaatttccacattttaagtttcctgtaataaaaataaaagatacatatgctttgttttaaaattatgtctaaaaacattgacacgaaaaaaaagaacaaagaaagaattaagcatgtgttacccacagaagagattacccaaaggaaaatataattttaaaccttcaattccaaaaattagtagccagttgttttccagtttcatgaaatatcaaacagtaagaaatgagcaaagtgcaacaggaagcataaagattaccaaatagtgatatatggtactaataaaaataatagaaacatcttcagagtgttttcaaaaaacaataaagccatttatacatggcgtagggggcagtatgtccttttctttatctttggttttatcaacatgtctttaatatacatttataattattttaataaataattttatatttattttcaagtttttctctcctttcccacttcctttttccttatctgcctcaatctcagtacactcccttgcccctgatacacagacttactattcacatactacagaagacaaagatactgaaacagttgaactgcctcagcagaacacaataacaggaaaccatcagcagtttcaaatatatatatatttacatatctaaccctgggccacattttgctattttccaagctctgatattcattatactcactttaccttaataatatttttaaaatcttctcatttttaaagattgtttgcatttatatttcttacaacatctgcaaatatttctaacttaggatataaaaagatgagtaagaaataaagaaaccctaaaatcatttccagaaagtcaaggtcctttggaaaacaaaaaaattataagctagacaagctctaaatatttacacataccctagaccgctcggaattttgtaagcacaatatagctatcaaataaaaaaagtaatgcaaagattattatctcatttagctgtaccacaaatacctaaaaagtttaaaaataaaatccaaatttgtattttaaatttacaagttgtcagtgaaattcattttatgaaataagaaagaatacatttcattcaattttatattaaatattagaatgccatcctacaactgctgacttctactactaaacaacagttgcaatactagacagttttaagttatccaactttaaaaaccccagactttttttttttttttgagacggagtctcgctctgtcacccaggctggagtgcagtggcgccatctcggttcactgcaagctctgcctcccgggttcacgctattctcctgcctcagcctcccgagtagctgggactacaggtgcccgccaccacgcctggctaattttttatatttttggtagagatggggtttcactgtgttagccaggatggtctcgatctcctgacctcgtgatctgcccgcctcagcctcccaaagtgctgggattacaggtatgagccactgcgcccagcctaaaacccctgaatttttaaataagaactgagcatggattttcgcttttaattatctggaatatataatactaacattaataatctctgtctcatggtagttaattaatttggtactgtataatatagaatcagccccttttcaataacaaatggggctctctatataactggtactcaattaatattcccatacttgctttctcttccctgactgaaatttatactgatttctttccttcaaacctacccactgtgcttgcttcaccctcattctgtggtaaataaaatcccttagatccttaataccttcacaaaacacgcccactgccttgccttacctgaaatgtggctttctctttgagtacactagttcactcacaaccctggcaaatggaatatgctcaaatattccaaactatatatttctttggatcagacatttcaatcaccctctgatttcctaatgccatcatgattccctcactcttgtctttaaaatccctgctccgtaacagctcatgaaataaaggtatatcatgtactacctcaaaaaaggaaaaacaggtgtctttcttgtgccacaattccaatcaatcattagtggctgctaatggttggattatcattttaaggaggagtctgaggacccactcaagctcagcatgagaaaaaaaaaactgactagcatgtctgcaaaaagctctagactaggtgagcagcttgtacacttgctgcccctgctctgatttctcaccatcttgctcacccctctcacattcactaaagacttggacaccaagcttgattctcgcccatcacaagtcctttcattatcctaagttccctccacatctacagagaagacccacaagaatattagctttcatgacaccattctactccctacttctctagccacttttcattcctatatgggtttttattcctgttctctcaaaatttaatattctctagagtttaaggattctattgctttttttgttcaattgctggttgtgatgcattaggttgtgacttttagtttaaaaaatagtgttctatggagccctaaatatagtggtcatattatttatcatgcaaacatttttgagaatgaaaggggatactaacaattacactaggaaaataatcataaaccagaactgtcctgggcaaactagggatatgttgtcaaagtagctctaaaaactgtctaagaattcaatctcaggatataaactaagtgttgttatgtatgtcatatataaataataggtgaaagttggaaagagccagtactatagtgataaaaacactccaagctcatattctggatcaaagaagttttatgaacttcaaaatgcagaaagaatataactaggaagttgtaggaaatgtaagttgaaatggtaatttaggaagactgaaaaagttcttacattccaagccacagagtttggactttatccaaaggtgacttagtagataaacacataattagctcttttttaagacaaataattctggagaagaatattattggggttgaaatgaatggagccaaaaagtcaaattaggacactgttgtcactgtccaaaaaaagagcttgaaaaggacatggcacctaggttcatgagacagaaaagaactaaatagacatgctctgaggtatcatcttcaggatttagaatttgagatttataacattaaaaattgaatagggtagtttaggagtggcaaaaataacacttcagacattctaaatttaaatatcttgaaagaatacccacagtacaactgaaataaagttcaagagaaagactggggctagagatacacatacatacacacatatacacaatgtaatacagaaagatttgtcaacagtagctgtatctggggaagtagaagatatcatgcattgtaaggatataagaccacagaccaaatctttacaattgtatctattaaaattttacaattacttacatttaagaactcaggttcacaaaaagcatcactcgtgcctaagcatctaagggcaaatttttgaaccccacacttccaaaacattgcttatctgtctccataagtgatgaaattttagttctatctactatccaaactgagaactgagacttagacatttaattatttattgcttgtcagtgtgaatacaaataattaaatagaatgactggcagtttaccagaccctcagttaaaaaactctatagcctttccagactgctgtcatccaacttcacataagattaaacatattctcttcatgataaatagcttggaacctaaaaacattattttgttacaaaaaattgcaagaagtgtgttgttttctaaattgaaattattttattttttaatgccaccaaaaaaaaaagaactgttgttcacttatcaaaaataacactgagcttcaacaacaaattcacttgagaaacagcttacagaattgtaatgtttgttaaatagaaaagctagaaaatcaagagaagctttaccctcttaaattaaactactatctgtataacattttctaatttctaacactaattgcacaaatatcttatattttagggtattttacaaagtctaaatataattaaggctaacaatatctaaaataaaattagcaaagttctattgattgatttcctcattaaaatgttactgtacctgaaacaaagttatgtaatccacatgaaaagctgaacaatcaaatacaaaagttctttctcatctctaaaagtatatagattgtacttcaaaaatacctgcttgatataaatcccactcctggagaacagatccaccaactctggatgatgtttgctattctggcttccatgacccagggtaaaatttgtattatcgccccaagtataaacatctgtaggatctaaaataaaaattagtttttatacttttttatattttaaaacacatataagaactaatttaactacaatatttagaaagatgccaacgctcttctctgaatgaatatattaatatgatattaggtaattctagaaatagaaaatccaaatcatagtacaggcctgtctcaatgcaagcaatcaaacatttgttccttgcttcttttttttttgttgttgtttttttttaataattgagacaaggtctcattatgttgcccagactggtcttcacctcacgggctcaagtgatcctcccacctcggccccccaaagtgctaggattacaggcataagccactctgcccaggctgtttcttgtttctttagcagctaaagtttaactgccaaatgagtaaaacaccaccggccatatctacttagtttccatgaaaataatatatagaactgtatcaaatgtaagatattattaatccacacatacaaaggttctaaatgttgcaaatgtgatattactctttgtacaggaacactaactttcaatactttgtttttcatagacacaaaatcacactagtgattagggtaaagcccattaaactggaatacaaatcacagctaagttcatgatataaatcttcatttttattttagaagatgaataaagtcttagaatggaattatcactgttaacctgcaatgcagtatccagggtagaaatagaaatacagaatgtgtccttactcagcttgcttactagttaaatgcaaactatacagtgccccaattaaatcttttcttttctgccaattcccacttccaaatctcaaagagcaaacaaactggagggataagtgaaactgagaatgtgtgaataaaaaaataattggagccgggcacagtggctcacgcctgtaatcccagcactttgagaggccgaggagggaggatcactggagttcaggagttccagattaccctggtcaacgtggcaaaacctcacctctataaaaaaagtataaaaattggccgcacgcagtggttcatgcctgtaatcccagcactttgggagaccgaggcagacggatcacctgaggtcaggagttcgagaccaacctgaccaacatgaagaaactgcatctctactaaaaatacaaaattagctggtcatggtggctcatgcctgtaatcccagctactcaggaggctgagagaagagagcctctcagcttgaacccgggaggcggaggttgcggtgagccaagatcgcgccattgcacgccagcctgggcaacaagagcgaaactgtctcaaaaaaaaaaaaaaaaaaaaaattaattgggcatggtggcatgggtctatattcccagctacttggagggctgaagtgagaggatggcttaagctcagaaggttgaagctgcaatgagccgtgttcttgccactgcactccagcctgactgacaaagcgagaccctatctcaacaacaaccacaaaaataatgataatttccagagaccctatctcaaaaataacaaaaggaataaaaatttacattcctttttccttctacctcaatgctgatgttactttctgagtatatatcaattactttacagtagttacaattataacagtcctcccattttagattgtacttttatatagacataaatatggattgaaattttaaaatgcaaaataaaattgttctgaatatgaaacaaaaaatatccaacatataccaaagtaaaatttctttgcagatagccacacacaaataaatttccccactactttaagaagaataaaatttcattaaaattttctaagctaagctgcaccttaatggaatacatttgtaaagttttttttttttttttttttgagacgaagtctagctctatcacccaggctggagtgcagtggcaagatctcaactcactgcaacctccacctcccaggttcaagcaatactcctgcctcagcctctaagattgcctagaggagctaggattgcctgtaactaggattgcctgctaccatgcccggctaacttttgtatttttagtagagacggggttgtaccatgttggtcaggctcgaactcctgacctcaagtgatccgcctgcctcggtctaccaaactgctgggattacaggtgtgagccgcagcgcccagcccatttgtgaaattttcttaccagtattctcgaactcctgacctgaagtgatccgcctgcctcagcctaccaaattgctgggattacaggtgtgagccgcagcgcccagcccatttgtgaaattttcttaccagtattcttgaatactacatgagttggtctatccttcattacaagatccaaagctgacaagccttctttatcttgaatatacagactaacaccatgctaaaacaaacaaacaaacaaatacataaatatatatatattattaattacctatatcatcagtaacttcctattttattattatttttttttttttgagacagaatttcgctcttgttgcccaggctggagtgatgcaatggcgcaatcttggctcaccgcaacctccacctcccaggttcaagcaattctcttgcctcagcctcccaagtagctgggattacaggcatccaccaccacgcccggctaattttctatttttagtagagacagggtttctccatgttggtcaggatggtctcgacctctgacctcaggtgatccacctgctttggcctcccaaagtgctgggattacaggctgagccaccacacctggccgacttcctattcttatgtatcaaaaagtcagataatcaaccccataaatacactgaaaaaaaatttaataatgattatctctcatattcacacacatttttctctcacatactgcagagaataattaagaaaaatcacatatccgactcttgctggaataaggaagaatcagaaaatgtgaagaaataaaaaattaacattttaaataaaaattaactacatgtgaacttttttttgcaggggggacggaatctcgcctttgtcgcccaggctggagtgcaaaggcacgatctcagttcacagtaacctccgcctcccaggttcaaacaattctcctgactcagcctcccgagtagctgggattacaggtgcccaccaccatacccggctaatttttgtatttttagtagagatggggtttcaccatgttggccaggctggcctcggactcctgacctcgtgatcagcccgcctcagcctcccaaagtgctgggattacaggtgtgagccaccgttcccggccatgtgaacatttttaacaataaagcatttctgatacccctttaataccccataaatacactgtccctacaagtccctagctctgggtttgtgtctgtgtgggagtgcatctgaacataaacatttaactcttcttgcatttgaggagccacactctgccgggcgcagtggctcatgactataatcccagcactttgggaggtgggtggatgaatcgcctgaggtcaggagttcaacgtcagcctggccaacatgctgaaaccccatctgtagtaaaaatacaaaaattagtcaggtgtggtggtgcatgcctataatcccagctacctgggaggctgaggcagaagaatcacttgaacccgggacacagaggttgcagtgaaccgagatcgcgccactgcactccagcctgggcaacaagagtgaaactccgtctcaaaaaaacaaaaaaaaattatctggagaaggagagacataaaatttcaaatcagtttatttagtttatacttactctattttagtttgaggaattttttcttatttataatttgacagttaattgttgatgacctgtttattctgcgaggtatctgatatcccttcaatatattttgtttatgttaccatagttggttccagttgcaggcaaaaataactctaatacatcaatatttatcaagcatgttcctatttgttcattaatttttgttgttattgttttttttggtttttttgagacggagtcttgctctgtcacccaggctggagtgcaatggcgtgacctcggctcactgcaacctccatctcctgggttcaagcgattctcctgccgcagcctcccccgtagctgggattacaggcatgtgccaccacgcccagctactttttgtatttttagtagagatgaggttttgccatgttgcccaggctggtttcgaactcctgacctcaggtgatctgcccgccttggcctcccaaagtgctggaattacagttgtgagccaccatgcccggccattgttcattaatttaattgcttggttttggttttggtctatctccccctagtagaataaaaacttaaacaaagaagggattctgtcttgttcactgcaatatccctagcacctggattactgcctggcacatatcaggcactcaaaaaatatttgttccaaatacctcacagacagtatattatttaatccatataacctatgattctgtgaagtcttctgtttacaaatgggaaaaattaaagcaagttcttccagaatagtaagtaaaccaccagtataaaagagcaatggtttagcaacaacagatacagcaggactccacaagcataaacagtctttaccagccatgcatcctgtcatggaatcaagaagccccaaaagagctacataagataatctgtctctattccagctttttgtaggcaacaagtttctgctaaggttttatatctttggcattaagaaactgacaatttactgtgcaatttacaaatgttatagctatgaagttttatcaaatttaaattcattaaaatgtgtgtggtttcttcctgataatccataatacctgaagtgctacagctgacatcagagacggaactgacatgaagacacctatcactgcaccccttccaattaaagaagtgttggaaggtcaaagtaaaaaaatatgctgaacaaaagcagacagcctaccaacatgagaatgctgaatggttaatacaggatttaggggaaaaccgtcagtggaatacatccactgttatgtatctatcactgatcagcagggctctgatgccaataagacagtcaagctaagggcaaggtgacaacggcacaatttcctggcttctattagccaaggtggctagagtgactgaggatttcgatggggcaataaaatctcacaggaaggaaaggaccaaaattcagtccagaccataactatttcaaactgtagccctaaatgctaacacctaaatggcaacccctaggatggcaggaaacccaaacccagggaccttctcaaactcagcagggttggcagtcatccaactttccagcagaaactgaaaaaaaaaaagccaaggttttacagatggaaaagggtaagaatggagctgagagatgctttaactcttactaacctagctttccctataatgacaataagggaattaaacagataccccaaggtttcagatataagaggaatcttctctaccattaacaaacttaaaaatgctttacttcatggatagtccctgggggggaaaaaaaaaggaaagtgctattattactctctttttatagataaaactgaagttcaagatttaataatttgtccacgatgattcactaagtagtagtagtagcagcagcagcagcagcagcagcagtagtagtagtagtagtggtggtggtagtagtactagaagatagtagtagtagtagcagtagtagtagtagtagaagatagtagtggtagtagtagtagtagtagtagtagtagtagtagcagtaatagtagaagatcagtagggagtttaactccacaaaagaatattttactattactatataataaaaattattcttatcagtaaatgttactacataaaagccactacagaaatattttttaagtcaaaattaaatgaagacactgaaggtaagcttctgaatttgaccagaagttccttaaggaccagaactgtttttttcttttccaggtcctccacaaacatgacaaaatccctatacaaaaaaaattgttaaatttaaggccagacatggtggctcacacctgtaatccctgcactttgggaggctgaggcaggtggatcacttgagatcaggagttcaagaccagcctggccaacatggggaaaccccgtctctactaaaaatacaaaaataagccgggcacggtggcacatgcctgtaatctcaggtatcgggaaggctggggcaggagaatcacttgaacctgggaggtggaggttgcagtgagcggagatcacaccactgcactccagcctgggtaacaaagcaagactccgtcgcaaaaaaaaataataataaaaataaaataaaataaaattgttaaatttaaaactcatgacttctgacagtgagtttctaatttgcattcattagtgaaatgacattggggtgtatttcaaaacgctttattatttgcctattcaatacaacacacctaatctactagaaagaaaattttatataaattaaacaattttaatgattttttttttgagatggagtcgtcctcggttgcccaggctgaagtacaatggtgcgatctcagcttacagcaaccgccgcctcctgggttcaagtgattctcctgcctcagcctcccaagtagctaggattacaggcatgtgccaccacacccagctaataatttttgtatttttagaagagacagggcttcaccatgttggccaggctagtcttgaactcctgatctcaggtgatccacctgcctttgcctccaagagtgctgagattacaggcgtgagccaccgcgcctggccatcaatttctttttttgagacagagtctcactctgtcgcctaggctggagtgcagtgacacgatcttggcaaactgcaacctctgcctcctgggcttagctgattctaatgcctcagtctcccaagtagctaagactacaagcacacgccactacacctggctaatttttgtatttttagtagagatggcgttttactatgttggccaggcttgtctcgaactcataacctcaagtgatcggcccacctcggcctccaaagtgctaggattacagcatgagccaccacacctggcctcatcagtttctttagagcttataaacaccgtatgttaactaaacaagaaatgaaacatactactcaaaaacacaattcctaaataatgttcaacaactactgcccttttaaagttaataataggctgggcatggtggctcatgcctgtaatcccagcactttgggaggccgaggtgggtggatcacgaggtcaggagatcgagaccatcctggctaacacggtgaaaccccatctctactaaaaaaatacaaaaaattagccaggcgtggtggtgggtgcctgtagtcccagctacttgggaggctggggcaggagaatggtgtgaacccgggaggcggagcttgccatgatccgagatcaggggccacagcactccagcctcggcgacagagcgaaactccatctcaaaaacataaataaataaaataaagttaataatatagttatttaagaataaatcattttaaaatactaaaagatattgttacaaaaatactaattgagatgccattagactggggcaactctagcactttaagtttatccataagtaaacacacagccagtaaacagtaaaatgaaactagagtctttaccaatcagaaaccaccaactaacctctaactagggtctttccactctaaccaattaaatatattttctttgtctttattctgcatcggcctataaaagctcactgctcaggctgcagcacagctctctgagcctcttctggttctgaatgctgcccgattcataaatcattctttgtgcaaataaattgtgcttacttaatgtaaagtatttcttttaataatgtataatactcattaaatgatgtatgggatttagttcaaaatattatgagatgtacaaataacacaaaattggccaacagttcattatatatagtaagcatgataaatgtttaaaattttacatcacaaaaaagttaagtaaaaggatatatggagttttaattccaaagatcagttacagtagtaagagatagcaaacaagcaagaaaaaatgcaaatattttccaaaaagcatgtaggatgtatgaaaatgattaagaaaaacatattccagactaaatacgtttaaaataaacaaatgacaattaccttcaatagagaccaaacacaatcaatatgtccataaaaaatgcttctgtgcaatgctgtccatccagactctttgtctttcaccaacagatccactcctttctgaataagccaatctaacactcctttctttccacaggaggaaacaaggtggagggcattcctgccaaaaacatccttgatagttgcagcattgtaacaatgactggagagaaaggccttaatctggttttcgctcccctttgttaccacagaaaggacatccaaagcatgcttcagggatcgacactttgatgtgcagtcaggcatgggtgaactcatcctaactgtttttataccacttacttcagaatcgtgaaaactaattttaaaaaatgaaaaagccaggacacaaaggtgctattgaggaagttacagagaataaattacctttttaggataatttaaatcctcctgacaatagtataaaactatatatctttatacaattttttggcacttaaatcaaaaaaattataaatagctctataaagttcatatcaaatacaagttcttcatttaaaaaaattccacagtttataaattattcctggagtcaagcaccaagggggagtgaggaggggaactccccctccacactgtctgacccttttaaatatccataattgcaagggtgacctataagagaaagagaagagaaaataaaaattcaaaatctgtctctcgctctccttgagtactttagaacacaactacctccatatttagatgcccttaacccatttatgcttagtgttccattactggaacactaagcttacgggagttatttatatcctaatgctcaaggtcatcgccaagatctgatttttcacaaaaaacatttgcaacctctggcataaacgggttaattccttttttttcttaaatctatcgacctttcatatttatggtacctatatttttatcagtcatccttactccatttttccactctcatgtttaaagttaacccacattggttgtactctggagtttctctttctttccagtccttcattccttctatgctgtatttttacactctactagttatgtccccacaagctatgaatacgcttaaatctaccatctttctaagaatcccatcccaaacctataccccctaaaactgtatcatcaccaccaacacaacaataaccaacactctcatcagttactccgtttttactaagtacccaggcactgtgttaatattgttacctctgcctgaaaagtccttcatcacatgaagagatgataattaaacaaaggtattaaaacaactggatagctatctttaaaaaacaactttagatacggtacttactttatatcttataccaatataaattctagatggttcaaaggcaaacaaaaaaacgaaactacaaaagcactggatgaaaatacaaaagactctttttttataatcacaaagtacaaaacacctttctaagcaggatctgaaatccgaaagtcataaaagattaattcaatagtttaaaaattacattaaaaagtttaaagacaaaaggagaaaaatttgcctcaatatatatggtcttttagatcttccttaatgtgtagtctttgggagcagagaaaattggctataagaagactatttagaaggacatacttgagtttactatatgtatagggaaagcttctatgcatcagagggaagtatgaaatattctaaatctgtatttttccactcccacttcataccacaccaaagagtcagaaatctgagatctaactagttttctgatcttaactactttgatttctccacctggaaactagatgattataatcttctctattaggttggtacaaaagtagttgcagattttgctagtaaaagtaatggcaatggccaggcgcagtggctcatgcctgtaatcccagcactttgggaggccgaggcgggcagatcacctgaggttgggagtttgagaccagcctgaccaacctggagaaaccctatctctattaaaaatacaaaattagccaggcgtggtggcacatgcctgtaatctcagctactcgagaggctgaggcaggagaatcgcttgaacccaggaggcagagtttgtggtgaaccaagatcacaccattgcactccagcctgggcaacaagagcaaaactctgtatcaaaaaaaaaaaaaaattaatggcaattacttttaagaatccaatcccaaacctataccccctaaaactatatcaccaccaccaacacaacaaccaaccctctaaaagtaatggcgattatttttaatggcaaaacctacaattacttttgtaccaacttaatagctccagatctgttctactaatacattctgtaatttgatatagtcctcataaaaatcatctcccccttaaaacactgatttgaacaacagcaacaaaaagaacaagataaaacaaataaaaatgtgtttgggggccgagcacggtggctcacgtctgtaatcccagcactttgggaggccggggtgggcggaccatgaggtcaaaagatcaagacaatcctggccaagatggtgaaaccccatctctactaaaaatacaaaaattagctggccacactcctgtaatcccagctacttgggaggctgaggcaggagaaatgcttgaacccaggaggtggaggctgcagtgagccgagatcccgccaccgcactccagtctggtgacaaagcaagactctgtctcaaaaacaaaacaaaacaaaacaaaagacgggcacggtggctcatgcctgtaaacccagcactttgggaggccaaggcaggcgaatcacgaggtcaggagatcaagaccatcctggctaacacggtgaaacctcgtctctactaaaaatacaaaaaattagccgggtgtggtggcgggcgcctgtagtcccagctacttgggaggctgaggcaggagaatggcgtgaacctgggaggcggagcttgcagtgagccgagatcgtgccactgcactccagcctgggcgacagagagactctgtctcaaaaaaaaaaaaaaaaagtgtttggtagcaaagagaaaaaaaggtaccaatcgtcaagtactttaaaaggttaaaaatggaaagcatgacacagtagttccccattatccatttgctttctatggtttctattacccacaatcaaccatagtccaaaaatattaaatgaaaattttggaaataaacaatttatgttttaaattgcatactattctgagcagtatgatgaaatctcatagtgtcccactccaaaccactccacctcacctgagacatgaatcatacatttgtccagcattgccatactgtacatgctaccaactcgatagtcactgagtagccctcttggttagcaaattgtaaaaacatagcatatatagggttcagtactctctgcagtttcaggcatccactgggggttttagaatgtgtccttggataagtagggactatttattgtatgtggcaaaatagttcatccagttaatttcattcttttaaagctctaaaatcccaccatgtttgtattttcattgtatgcataatacctggaaggaactacttactggtgaatcactcaaaccttacattaaagaattaagatacaacagaaaagaattccctaattcattagtatatataatgtaaacatttaaaggggggaaaaaagaatgttaaaaagtcattccatactatcatatagagaaagcggcacctacagaatactatgaacataaacatggaagcgattaagagctaggatttcttagagttttacatacatagattcaaatatagcaatgtcagctgttatcagttatataactaaaaaatgacataatctctccaagtcgtttcttcatctgaaaatagaaacaatccatggacttcacatggttactataatgataaatgaaactacctaacatggtacctggcactaaatatgcattcgacaaataatagttttcattactattgtttcttcagtcataaaaaggtaatacattttaactccaaaattcatgtttgagcttcattatcacttgttaccacttctccaaagaaatcattattgctaaagttactaatgacttccaaattaccaaacacttttagatattttcaattcttacttgccttccctgcttttatgtctttaaaacctcattcccttaaggagtctaaaagagatccaggaagggcaggaagtcgcagaaacatttaagcatgggctctctctcttaaccacttcttcctagggcattatcgcttcccctgtccttcaaactgggcttctctgaaataatcctcagtcctctacttcatattgttcctgatagtttcaatccttttcatgcttttaactctaccgtacacatgattataaatccccaaatctgtctcttgctcacatatttgccctaaactccaggcccatatttccaatgcctattgtacttcttatctatgcattcaaaaactgcttaaagaaggggaagaaagcaaaggaaataagcatttaaagacctaatacatacggaatgctttacatcagaccagtcaagtaaaccacctaaatcataccaccaagaaaagagggagtcagacttcaaatacagatctgtttaatgatgaggtccgtgctatttctgctacgttacactgtcttcttcagcgcatccatagtaggtcacaaggcattgggaatacaaaaataattaggacctaaatattttagataaaataaaatacaggttcatggataatactcaggtggatgcatagctagtttaacatatgtactaactgaacaaaacttatgatctattacacagttcctattatcaaagggtcacagtttggtagaagagagtaattttatttaggcaagtaactaaaacatatcataattataaacctatggtcaagataaaacaagtgacacataggaacggggagtgcagaagaggggtccaggtaagactttctacaggagataaactatgtataaactaagacttaaaagatgagtactggccaggcacagtggctcatgcctgtagtcccaacactttgttaggctgaggcaggcaaatcacttgagcccaggactttgaaatcagcctgggcaacatggtgaaagccatcgctacaaaaaaaaatacaaaaattaggcgtagtggcacatccctgtagtcccaactactctggaggctgaggtgggaggatcacttaaaactggtcagtcaaggctgcagagagccaagatcatgcaactgcactccagcctgagcgactgagcgagactccttctaaaaaaaaaaagagtaccatatgtgttggcctgataaattctgggtgagagcacatttgaagcagaagggatagtaaatataaaagaactagaatcatcttggtccattccaaaatttctaaataattcagaagacagaaagaagtgaggcctaacatacacacaaggatagacaggattttgaacagccttatgtgccttttcttagagatttaaaaaaaaaagggcaggcaatccaaagacatacttaggatcttgaattgacaagatgtggtggtaattcccaggtttctggcttggagaacagatagggaaactagaaagaagagtaaggggtcaatactttggaagtgagtaaagcaaaacaaaattaaacaacggaaaaaacacacaaaaattataggtgaaattttgttttatacattatacacagtgctctacataaatataatccttattattgcccctgtaaatatgatcactttcattttctgatgaggagattcatgtgaaagtttaaaaagcctacctaaaataataccgacagaaaagtgctcttgatcccacctattctatgctaccaaactgctctcccaaaaggcagttagaaaaatttcaatgcaagtagtatagtgtagtagaaaaaagtaccatggaattcaattcaaaataattgaattcaaaagcagtttggtagggcagctggagactcaagcgattctgcctcagcctcccgagtagctgggattacaggcacacatcaccatgcctggctgatttttttgtatttttggtagagacggggtttcaccaagttggcctcgaactcctgacctcaagtgatccgcccaccttggcctcccagactgctgggattacaggcatctttttttttttttttttttttgagatggtgccacactcagtcgcccaggatggagtgcagcggcgcgatctcggctcactgcaacctccacctcccgggttcaagcaattctcagcctccccagtagctgggattacaggcgtgagccaccgcgcccggcctaaaaaatttcttgaagtaaactctggtttgactaaagcttctgcaaatatttgcaaatgtaattatttttagaaaccagttttgtcctcatctaccttgcctcaatttctaaaacaaataaaagttaaggaattcaaaatacaaaaagagaaatgatcaagagggggctggcaagcctgtgaatttacaccactttatgggcactgaaacactactactcataaaagtcatatcctttcagtatttctgataaatttcaaatggcctacttcgaggcataagttaaaaggtgctacatgaatctctggctaacacagtcaagttttatgaactacgttggaaaacaggagtcaaggacggcctatgttacctaattcgcagctgaactaaaactctttgagccagacagctctgcctgttacaaaaacaaagggcctgtcttctctgtctctctcaaccctccaccctccaaaaagaatcagttcctttttacatagcaatcaatgtccacttatcagatttcacgacctgcttccccagagtcagtatccccagggtggactcaaacttgtgactccaggaaggggataaggaacatgagcgcccacaggaatggcttcaaatccaagactcgaaggaaagtgacactacataactatcacaactaggaatgcaatgtcgctggagggcgtgtccagcaggacgggagcgtagcgcatcgccgggacaggccattcattagctgaggggggcggtagggaccctggccactcggccctctccgcgccgcctcgcgcgaagcccggcagcctcggggccacagagtcccctccccacggtccccccgcgccgccgtccgcagccacccgcaccctccagaaggcgaatactctccccctgcccccgggctgaagggaagccgcaccgcacggtcgggcagcgccaagccctccctcaccagtcgctagatgaaactgcgccggtggattccgcagggtccacatagagccacaaagggactcatcctcagtgaaggcaataagagaaaccgaacggcgccagaggggccagtccccagacccgggtcagttcggcaggcggctgcaatacagccgctactacaggaatcgggaacggggatgtagaggaagggcccgagcgggcggttcccagtaataaggcgggcgctggttggctggggctcctgtatgtctcttgatgattggctggtgcctgcccagaaggtttcgcgtggcagcacctctgccatggccttttccctggcgccccaaaggaacttgacctcgccggccttggggccgctgactcaggccaggggcggggaaaagaaaaaggccgcagcggggaactctaggccaacaacggtgatgggagtgtccctttcaggccagccatctcgtagttagaaacgtctctctaggtagctggagactcgcgggggaggctaaacccgagtggagaaggagacctggcaggatgccttggacacccggtcgctacgcagcagaagccaagtgcataggcgtcctgcacagaagagtttcctcccatggccttagcagtggggttactgcaaagccaaaggtgtagtctccgtaaacccagcctcacccctctctggatctccatacacccggattatctggcagtcactcccttggtcagaaggcgtcactgccctcttagatcaccaccgtaggactagctgccgacccgggtcacgccactcactgcctgacaccaggcttacactaggctttttccacttgaactctgaatctaaaggccatttagaaagtggtcaagtgaaaaatgctaggagggacagtagccaataatcaatactaggttactgaatgggaaacacactgctgctgaatgcctaatacggtaagcactcagtaaatgattgttcaaggaggtgtagtgtgactcaaaacaaacgacactaagaatcatgagttggctgtacagctctgccacgttgagttttacaagccactgagtcgacctcatctaatctctaaaagaaaggagttgcgcatgtcttaatgcccactgagctctgcttgctctcttttgaagccttttttgtgggagggtaggttactagcccaaagccacacagctgcttagcgaaagagaaagggagactaggacccagccctcctactgcccttcccagcacataattgtttctttgctctttattcttaatgtccttctacaaaacaaaaaccagtttgtaatgtcaaaattgagtggttttgaaaataagcttaagttggccgggcgcggtggctcacgcctgtaatcccagcaatgtgggaggccgaggcgggcggatcacgaggtcaggagatcgagaccatcctggctaacacggtaaaaccccacctctactaaaaaaatacaaaaaattagctgggcgtggtggcaagtgcctgtagtcccagctgctggggaggctgaggcaggagaatggcgtgaacccgggaggcggagcttgaagtgagcccagatcgagccactgcactccagcctgggtgacagtgagactccgtctcaaaaaaaaaaaaaaaaaagaaagaaaataagcttaagttgtatctccagatatttaaaaaaagaagctacatataatgactttcatattcatgaacaaagaagccaataatggcaaataaagctgctagtgtaaataaatgcattgacctgagttcgtaacttctctctcttgtatctgggcaagttaattcacttttctgaagcctcagtttcctcatttgcaaaatgggagaaataatgtattttggggttgtgaaaatgtaatgatagagatatatagcacttagcagagagccttagtcacacacaataatacttcataaatagtgctaatgaataaagtatttccttagtggctgaattagtccaagcaggcattcattaatttaaaagttacggccaggcaaggtgagtcacacctgtaataccagcactttgggaggcagaggcaggtggatcatttgagcccaggatttcaagaccagcctggacaacatggtgaaaccccgcctttactaaaaattaaaaaaaaaattaggcatggtggcgcacgcctgtgattccagctactcaggaagctgaagtgggagaataccctgagccctaggagatcaaggctgcagtgagtcaagatcacgccgctgcaacgagtcaagataacgccactgcactccagcctaggcaaccggagtgagatcctgtctcaaaaaatagtaataaataaaagttaaaattaccaggtctcggacaatttgtggtaagcattggggatccaacagtgaacaaaaatacatgtagacccagatattcccaagcataataaattgcaacgtttataagtattaatctgatagatttatctgacttccaaaagatgtgacacatgaactaaagactgagcagaagataactcagataactagataacgaggagataagtagatgaagcaggaaagaaataacattccagtcaaaggaatgtagaattgctccccttttcccaggaaagttagatgctttcaaaagtacttactggttatttgcaagacaaaatattaaaataattaggaaatagtacaaatgaaatacaattaaatgaaaaatatattgtagatgtggttaagggaggaagaaatcaaaatgagccattttgtttgatttttaaaaaaattttgtgtttacacatgaaagaataggtcaaaatatatctacaatgattgtttctatggtgggattatgggtgattcttaatttctatcattttgacttttgtaattttcattgcaataatttaaatattacttgaatgattaaaaaaatcaaagtttggaaaaataattgactagagtttctaaagtagttttattttttaaagtaaaaaataaaaaaaccagagatgactttaaaagattgcagtgatgggccaggcacagtggctcatgcctgtaatcccaggaggccgaggcaggcagatcacgaggtcagcagatcgagaccatcctggctaacacggtgaaaccccatctctactaaagaatacaaaaaaaattagccgggcgcagtggcgggcacctgtagtcccagctactcgggaggctgaggcaggagaatggcgtgaacctgggaggtggagattgcagtgggccaagatagcgccactgcactccggcctgggtgaaagagcgagactctgtctcaataaataaataaataaataaaaagattgcagtgatgggcggagggagtagaaaaagaatagtacaggcatcaagagtggagcactgcagaaatatttctaagccacatggcatctataataaactccctaaataccatttttccaaaataaattggtagtactatcctttataattaaaagtactgacatcattatgtgtattttgctgtctttcaagttgtataggagtaggaaatgacagtgctggtggcagaagagaaaacactagaatttgattagaaacccaaacctgattaggttctacaagaatgatttttagaggaagatcaatagtgcagctggcctagagatgactggaaccttattgtttagcctcattctcttctactccacaccatcttctacaggacatcactggttgactacaactttctggcacacaaattaagtacctcacataaatcacatatctcacctcaggtttgccattagggaagatagcactgagcctattatctcaagcacaaaagttctaggcacctgacggactcatgtcggcttggattaggtgaggaatcaaggataacatgattgacatcctctattagagtcatggttaaagcagagtgaagagtagttccccaaaagaaagcagggtgaggcagacaaaacaataggccacatagggtgtttgtgttcttctggattcaggtgtatggtcccagctgcgttcttcctatagaatcattatctttccaatccttacttacagagggtcacctccccacatatctgtgaagactttccggatggcctttcctagcaattattccctttatactgcttctatcacttagtcatataatgtatcacactgttttatttttagatttgttagttttactcctggagacaaggattctagaggcaaggtgcccagatataaagttttactcctatgcttactatctgtgagatgtcaggcaagttacataaaccctctaagcctagtttcctcatctctgaaatagggttaatagtattgctttcataaagttcttaagaagtttaaatgagattttatatatatatataatataatgtatatattatatatatgaagctcttagtacaactcttagcaacttaattgacataacctgaaatgaactgcctggatgaatctgtttccaccaaattaaagggtgggatggggaaacaaagaataacccacaaggtggcagtatttgaatgtaactttagaatcttatgtttaaaagcatagtccaccaaaaaaatctgaaattcaaggcaaatactggagaaattcaaggtaaattcaaagcctagatgaaataagcagaactttgagataaatcaaacttataaacttaacaggcttagtattctattacaatcagaacactgaactcctaaaagtcttccctttacgatgactgaaaaatgtatcatttgcctttctcagcccatcttactgagaattgctcctattccttttctacttagctaaataattaaatctgtgttgtcactattagaaagagagagagagaagaaagaaaaagagtgagtttgatacatagtggttggagccttctcttcatgccataaatccctaggactgatagaaaagacatacttaggccgggtgtgggggctcacacctgtaatcctagcattttgggaggccaaggcaggcagatcacctaaggtcaggagtttgagaccagcctggccaacatggtacaaccccatctctattaaaaatacaaaaattagccgggcatggtggcagacacctataatcccagctactcgggaggttgaggcaggagaatcacttcaaccagggagatggaggttgcaatgagccaagatcacaccactgtactgcagcctgggcgacaagagcaaaactctgtctcaaaaaaaaaaaaaagaaaagaaaacatacttaacatacttaaacttatcagtgcattggaaaacaagaaccttggccattgaaggtccagaacttatgaagagtccttgaaaagtggataagaggctagattgggaaaaagtaacagcctgtggtgttgtgatatatatataggttttcatccacagctcttggctcataactcccatagcccttgttacagtcatttgttataaagttgggtatgttagacctcaggaacaggcctctgaccttctcctgcccttcttccatagtttccgcacctttctgactctgggtcttaagaccctcccacgagagagtcccaccctataccctgcgggaaggaatgctgatgtcctgaagcttccataaaaatccaagaggacagagttcatgagcttccagataggtgaacacatggaaattcctggagggtggcacacacagggagggcatggaaactccacgtcccttccctcatacctcaccctacgcgtctcttcatctgtatcctttgcaatatcctttttaataaaccagtaggccaggcgcagtggctcacgtctgtaatcccagcactttgggaggccgaggcaggcggatcacctgatgtcgggagttcgagaccagcctcaccaccatggagaaactccgtctctactaaaaatacaaaattagccaggcatggtggcaaaagcctgtaatcccagctactcgggaggctgaggcaggagaatcgcttgaatccgggaggcagaggttgcaatgagcagagatcatgccattgctctccagcctgggcaacaagagcaaaactctgtctcaaaaaacaaaaacaaaaacaaaaacaaaacaaaaaaacagtaaatataattatttcctgagttctttgagccactccagcaaattaatagaactcaaagagggagtcatgggaaccccaacttgaagccaatcagtcaggagttccggaggtctgaacttctgactggtgtagggggatgtcagaggtatttgaaccatagtgactccatcttgaataggggctgggtaaaatgaggctgagatctgttgggctgcatccccagaaggttaggcaagaatagtcacaggatgagataggagactggcacaagatacaggaagaacctgctgataaaacaggatgcagagtcggggaaaagcggctcacgcttgtaatcccagggatgggaggccgaggcaggcagatc

SEQ ID NO: 3316 - DNA, 549 bp, Homo Sapiens
  misc_feature (536)..(536): n is a, c, g, or t
cggccgcgcgcttggcgcagtggacaagtatcgactgcgcaagaagttcccgctgcccaagaccatctgggacggcgaggagacagtctactgcttcaaggagcgctcccgcgcagcgctcaaggcctgctaccgcggcaaccgctaccccacgccggacgagaagcgccgcctggccacactcaccggcctgtcgctcacgcaggtcagcaactggttcaagaaccggcgacagcgcgaccggaccggggccggaggcggcgcgccctgcaagaggtgaggggcctcgggcggcgcaagtccagctctcccggggacatcccgtccaccagccctcttcccccgtgcccactgctggggccggcgcgccgaggtcctcggacatctcccgggaccagctcacaatctcaagcgcccgcggggcgcggggactaagtgtggacgggacaggcacccgcccgggccctctccccgcacgcgtctcctcttccagcggctccattccgagctccttcccaaatcccatcggtgttggngaatcacactgcg

SEQ ID NO: 3317 - DNA, 366 bp, Homo Sapiens
tttttttactttgaaaaagtatcattttaaaacataactattattgtaaaaataaaaaataaacatgacaaatcagtcacaaggcagggaggcaggaagtcatactacaacaaaaagtctatggatgaagtatctgcttaatactcacacacagaaaacactctcagaaaatgtttctttaatttagtttaactaaaatttcatcaaggtagaatgcagttttgtaaaaagttccaaggatcctattacacagttgctaattaaccttcagttccttatttatacattttttacttacagatataaaaggaaaaaaaatcctagaaattattttaaacagaacattatacaattaattaaaagtag

SEQ ID NO: 3318 - DNA, 348 bp, Homo Sapiens
  misc_feature (223)..(223): n is a, c, g, or t
  misc_feature (253)..(253): n is a, c, g, or t
  misc_feature (292)..(292): n is a, c, g, or t
  misc_feature (322)..(322): n is a, c, g, or t
cacagctcagggaggagggaaggcaggtaagctttggacgagaactggcatatttattttgacccaaatcagggatttccccagtccacccagtactgggctcttaagcaaaagtctgagaaacaagacagtggtttgaattctggggcctttgtgtaggattgtgcctgacctttatttatttattaacagcagggccactcgtctagggcagtggagtctncgtgtctcctggggctggggcagggcattngcagttacgcatggccctgaacctggtctggtgcccccnaacctggtctgatgccccctcagctctttnacaatcaattgtggctgttgggtttt

SEQ ID NO: 3319 - DNA, 2912 bp, Homo Sapiens
tccctccttttctttccaagtcacaaaattctcccctcccctaccccggagtttacggccctcctcctgtttccgatttcagcccggaaccggaagtgtagtgggcggggcccgtcggcggaaaacgcagcggagccagagccggacacggctgtggccgctgcctctacccccgccacggatcgccgggtagtaggactgcgcggctccaggctgagggtcggtccggaggcgggtgggcgcgggtctcacccggattgtccgggtggcaccgttcccggccccaccgggcgccgcgagggatcatgtctacagcctctgccgcctcctcctcctcctcgtcttcggccggtgagatgatcgaagccccttcccaggtcctcaactttgaagagatcgactacaaggagatcgaggtggaagaggttgttggaagaggagcctttggagttgtttgcaaagctaagtggagagcaaaagatgttgctattaaacaaatagaaagtgaatctgagaggaaagcgtttattgtagagcttcggcagttatcccgtgtgaaccatcctaatattgtaaagctttatggagcctgcttgaatccagtgtgtcttgtgatggaatatgctgaagggggctctttatataatgtgctgcatggtgctgaaccattgccatattatactgctgcccacgcaatgagttggtgtttacagtgttcccaaggagtggcttatcttcacagcatgcaacccaaagcgctaattcacagggacctgaaaccaccaaacttactgctggttgcaggggggacagttctaaaaatttgtgattttggtacagcctgtgacattcagacacacatgaccaataacaaggggagtgctgcttggatggcacctgaagtttttgaaggtagtaattacagtgaaaaatgtgacgtcttcagctggggtattattctttgggaagtgataacgcgtcggaaaccctttgatgagattggtggcccagctttccgaatcatgtgggctgttcataatggtactcgaccaccactgataaaaaatttacctaagcccattgagagcctgatgactcgttgttggtctaaagatccttcccagcgcccttcaatggaggaaattgtgaaaataatgactcacttgatgcggtactttccaggagcagatgagccattacagtatccttgtcagtattcagatgaaggacagagcaactctgccaccagtacaggctcattcatggacattgcttctacaaatacgagtaacaaaagtgacactaatatggagcaagttcctgccacaaatgatactattaagcgcttagaatcaaaattgttgaaaaatcaggcaaagcaacagagtgaatctggacgtttaagcttgggagcctcccgtgggagcagtgtggagagcttgcccccaacctctgagggcaagaggatgagtgctgacatgtctgaaatagaagctaggatcgccgcaaccacaggcaacggacagccaagacgtagatccatccaagacttgactgtaactggaacagaacctggtcaggtgagcagtaggtcatccagtcccagtgtcagaatgattactacctcaggaccaacctcagaaaagccaactcgaagtcatccatggacccctgatgattccacagataccaatggatcagataactccatcccaatggcttatcttacactggatcaccaactacagcctctagcaccgtgcccaaactccaaagaatctatggcagtgtttgaacagcattgtaaaatggcacaagaatatatgaaagttcaaacagaaattgcattgttattacagagaaagcaagaactagttgcagaactggaccaggatgaaaaggaccagcaaaatacatctcgcctggtacaggaacataaaaagcttttagatgaaaacaaaagcctttctacttactaccagcaatgcaaaaaacaactagaggtcatcagaagtcagcagcagaaacgacaaggcacttcatgattctctgggaccgttacattttgaaatatgcaaagaaagactttttttttaaggaaaggaaaaccttataatgacgattcatgagtgttagctttttggcgtgttctgaatgccaactgcctatatttgctgcatttttttcattgtttattttccttttctcatggtggacatacaattttactgtttcattgcataacatggtagcatctgtgacttgaatgagcagcactttgcaacttcaaaacagatgcagtgaactgtggctgtatatgcatgctcattgtgtgaaggctagcctaacagaacaggaggtatcaaactagctgctatgtgcaaacagcgtccattttttcatattagaggtggaacctcaagaatgactttattcttgtatctcatctcaaaatattaataatttttttcccaaaagatggtatataccaagttaaagacagggtattataaatttagagtgattggtggtatattacggaaatacggaacctttagggatagttccgtgtaagggctttgatgccagcatccttggatcagtactgaactcagttccatccgtaaaatatgtaaaggtaagtggcagctgctctatttaatgaaagcagttttaccggattttgttagactaaaatttgattgtgatacattgaacaaaatggaactcatttttttttaaggagtaaagatttttaattctgtgattgtgtgtatgtgtgttgaaactgtaaagcttttatgactctaatattaatctcttaaatgaaattaaaaggcaaaagaacatgattgagcttaaatgatcatttcttcctgcagtgattcttggattgttttctcatgtatttg

SEQ ID NO: 3320 - DNA, 372 bp, Homo Sapiens
ccaggttccaagaggagacacctggagacgcaggcaggaaccatgcagacctctgtgacctagccacggaagtcatatagtatcaccactgccatacctcttggtcaaagcagccctgagctcacccatgaagagggatatagacctccacttctagacgggagaagtacccaggaattttaggggccacctccagatagttgccaaacccctcccacccacacttcactgtcactttggagatggagtgaacgtgccaccttcctgcttgctgtctccataaaggctgtgcacaccctgcttgagaagcttgggcgatgcgtttttattttcaagtagaattttggcaaagaccacttactttcttttcca

SEQ ID NO: 3321 - DNA, 482 bp, Homo Sapiens
tttttttttttatgtacactaatgtttgtatcagcagatttataatagccgaagaagcaacatagatggccgtcaatggacacatggataaacggggaatatttggccatggaaaaaaatgaaatataggttgagcattcctaatccccaaatccaaaatactacaaaatccaaactttttgagtataatgatgccacaagtgaaaaattcaacatacaaatacttaatacaaactttgtctcatgcacaaaattgttaaaaatattgtataaaattaccttcaggctatgtgtataagatgtatatgaaacaagtgaattttgtggttagactctgggtcccatctggaagacatctcattatgtaaatgcaaatattccaaaatttgaaaacatctgaaatccaaaacacttctggtctcaagcattttgggtaaggaatacttaacgtaaacggacacaagctacaatatggatggact

SEQ ID NO: 3322 - DNA, 1403 bp, Homo Sapiens
aaaggcgtgagcgcgcgtgcgtgcgtgtgcgggtgcgtgagcgtgagcgcgcggaggccggaagcgagcgctgcgcagtcgggtggtcgcgggccatggagggtagcttctcggatggcggagcgctgccggaggggctcgcggaagaggccgagccgcagggcgccgcctggagcggggacagtggcactgtttcccagagccacagcagcgcctcggggccgtgggaggacgagggcgcggaggacggcgcgccgggccgcgacctgccgctgcttcgccgcgccgctgcgggctacgccgcctgcctgctgcccggggccggggcgcggcccgaggtcgaggccctggacgcgagcctagaggacctgcttaccagagtggacgagttcgtgggcatgctggacatgcttcgcggcgactcgtcccacgtcgtcagcgagggcgtgccgcgcatccacgcgaaggccgccgagatgcggcgcatctacagcaggatcgaccggctggaggccttcgtgaggatggtggggggccgcgtggccaggatggaggagcaggtcaccaaggccgaggccgagctgggcaccttccccagggcgttcaagaagctcctgcacacgatgaacgtgccctcgctctttagcaagtctgctccctcgaggccacagcaagccggctacgaagcccccgtcctgtttcggaccgaagactacttcccttgttgcagtgaaaggcctcagctctgacggcctgaccactgcggcaagaggaccccagctggggtgcttacctccagtatgaagtgaattgcaaatcctgcttatggacatatatgatgttggagtgtgggattttaaagtttactttctacaaactctccgtagtatattcatgattcagtgtagaatgtatagactttatgtcttccaagtttaaaaaaagagacagggtcttggtatgttgcccagactgttcggaaactcctgggctcaagtgatccttccacctcagcctccccagtagctgggactacggggtcgccactgcacccagcctgtgtcttccagctctaatcagaaagctgcttgtcgagggcatggggaatcaaactgaatgaacttttctctgcactgtggcaaaactgttatttttatggattttactaaatggcgttaccttttcaagatttatatgtttgtataatcataagaaaattgagccattaaagccttgttattcaatcctaatagtcagttttctagaacctacttttagggtaaatggtacattatttaatattatattgaacctcctatagcgtggattgtagaccaaaggaaatggtacaatttctgagaatatatgttgattttttgtgactaattccaaagttgtatttg

SEQ ID NO: 3323 - DNA, 377 bp, Homo Sapiens
tgttttgatctgtttactttcaggaactaaggaggaaaaaagtgaaggacaggaatacaataattaataataataataataataaaagaaaccagaagccaagatgccccagatcatgctgggagcagtggagaattggaacagagggatggatggtcaaaggggactagggaggatgccacaggccgtcaggggtcataggccaccaggaggaagagctctgtgctctcgtccctccacagcgaaggctgagcttacccgccaaaaaccgacaagggaggagagggcctagaaacaggagaaggatgtggagttggcacctgctaccctctggctacccatcctgcatcacataccactgaccccactatcacacc

SEQ ID NO: 3324 - DNA, 420 bp, Homo Sapiens
gctgctagttgactcttagagtatcccggttcatcctgctacactctcgtagcgaaccagctgcagccgcatatagccatcttcatgttccttgtacctggtgaggtaggagcataaagggcagcaaacccaggcagggggatacagaaatggccgaggctggcaaagtaaggaacaaacatgagggatggaagaagtcctggattccaagtgacaggagttgaagacaaaaaaggtctttattggaatatgtagaagaaaaggcaagagggaaagatcattactcaaaatggaaagttttatatagaaacccaaccagaaaaacagagactgactgactgtgttggagggtgaaagtgtcaaaggatttatgagaaggccttggagctaaggatcagaacccttagactctagctctag

SEQ ID NO: 3325 - DNA, 420 bp, Homo Sapiens
gaacgttcggactgaggtttttctgcctgaagaagcgtcatacggaccggattgttttcgctggcccagtgtccccggagcttgtgtgcgatacagagagcacctcggaagctgaggcagctggtacttgacagagaggatggcgctgtcgaccatagtctcccagaggaagcagataaagcggaaggctccccgtggctttctaaagcgagtcttcaagcgaaagaagcctcaacttcgtctggagaaaagtggtgacttattggtccatctgaactgtttactgtttgttcatcgattagcagaagagtccaaggacaaacgcttgtgcgaagtaaatgtagagtcattaacaaggagcatgtacttggccgcagcaaaggtaattctaaagaagagcagaggttagaagtcaaagaa

SEQ ID NO: 3326 - DNA, 540 bp, Homo Sapiens
caacggaactttcttcggtgtatcttagcgctcttcttcggagtggcgccgcagccggcttctgggcttcttggctgccccaagctggcttcttaggttggttccgcccgcctttttaacctgggcttggcttccccggaggctgccttcttgttgagtttaaaggagccagaagcaccggtgcctttcgtttgcaccagagtgcccttgctcaccaggctcttgagaccaagttggatacggctgtagtttttctccacatcatagccggcggcagccaacgcttttttcagagcagccagagaaactccgctacgctctttagaggcggccacagccttggtgatgagctctgacaccgggggaccggacgccttacgaggcgtacccccagccttttgggccgccttcttctttacagggaccttctccgcaggaggcgcggcagcgggagcggcaggagcagtctcggacatgttgagaatcaaaaactcgggtacaagtggcaaagttccgttgaagccgtcgggtaccgagctc

SEQ ID NO: 3327 - DNA, 463 bp, Homo Sapiens
tttttttttttttttttttttttttttggacatgaaagtatataatataaaaaaatccaactccggaaaaccagaatacaactcaccaaatgttttgcttctccaccaacgtaacaatttataaagcaagagatgagaaaaagagattattgggaaatgtactgaataatgaggagtctggggaatagaacaaaagttgtaagtcgtaacctgacccatcttacttcactggtaatcaagtcccagccaaagggatgaaataaagaagtgagtagtttaaaaactctgttggaccagcaccttgaatcaaatggatgttttagggttctgtttcccactgaaccaagaattgtatccctccatctctccttgaggagaggccctatgttagaccttggctactcatcattaagataaaatcttaatagataaaactggaattccttgaatccatgaaaagaca

SEQ ID NO: 3328 - DNA, 396 bp, Homo Sapiens
tttttttttttttttttgccattcatttgtttctttattcaatccctcgcaccaatgcctctctggcccagcgctgtgtggggagctgggacatggggtcatgggactgccccaaccctctgggaactcataggctggcagggtgggaggaggcaggcttgtggctgtaactgtgggtaggagtttcacgggcatctcaggctggccctggacccctggaaggggggctgggtttgggggttaagtggagtcggtcagggatgagggtgggaaggggacagcaggcagaggatgtggggggcaggtggctgaggcctggagggacatggggaggggccaggggccaggcttacagggcttctgggtaaagctgtggagctgagactccactgcttg

SEQ ID NO: 3329 - DNA, 583 bp, Homo Sapiens
  misc_feature (470)..(470): n is a, c, g, or t
cgccttttcatcaatcgcccacatcactcgagacgtaaattttttactctctctacaaggttttttcctagtgtccaaagagctgttcctctttggactaacagttaaatttacaaggggatttagagggttctgtgggcaaatttaaagttgaactaagattctatcttggacaaccagctatcaccaggctcggtaggtttgtcgcctctacatgaaaaggatggtttcttggagcttccacaaacttaaaaccatgaaacatctattattgctactattgtgtgtttttctagttaagtcccaaggtgtcaacgacaatgaggagggtttcttcagtgcccgtggtcatcgaccccttgacaagaagagagaagaggctcccagcctgaggcctgccccaccgcccatcagtggaggtggctatcgggctcgtccagccaaagcagctgccactcaaaagaaagtanaaagaaaagcccctgatgctggaggctgtcttcacctgacccagacctgggggtgttgtgtcctacaggatgtcagttgcaagaggctttgctacaacagggaaaggccaatc

SEQ ID NO: 3330 - DNA, 709 bp, Homo Sapiens
tttttttttttttttttttttgagacaggatctcactctgctgcccagactggaatgcactggcacgatcacagctcactgcagccttgacctcccgggctcaattgatcctcccacctcagcctcctgagtagctgggactatagacacaccaccatgcccaactaatttttgtattttttgtagaccacggggttttaccatgttgtccaggttggtctcgaactcctggacacaagccttggcctctcaaagtgctgggattacaggcgtgagtcaccatacctggccccagttttatttgttaagggaattgggtgtttgtcctaattttcttcattctagactttgctgactatatccctggggaatgtatgttatgctattttgtgtcctcatcttttcatataacttagcaaacattccccatactgccacagggttttcacaatctgtcctaaatggcttcatactattccatccagtggatatactgtaatttttttcttgggcatttggttgctttcagtttttcactactataaatattgctggaatgaacatcctgacacattgcagcttttcctggacatgggatgacttccttagaatatgctaccaaaagtgtaattatggctctgaggcaagaagaatttttcagcttcttggcacacagtgacaagtgtttgtccaagggtttgtatgtccc

SEQ ID NO: 3331 - DNA, 304 bp, Homo Sapiens
tttttttttttttttttaaaacaaagtctgtttattacagcaattaacagagcagcgtttgccggcatgcttttcagtggcaaccagaaaagtgcttactccaggtgcatagattcgggaaaccatgcaccttgagccaaaatgaaaccaattagaggcttaggaaatgggttccagccaccccaggaaacttaaccatccacgagtcagttcagccgaggtagaacctcagtgcaggaatttagcatgacatacattgctactttacacaattaatccaaacctgtcgccagggttgtggtct

SEQ ID NO: 3332 - DNA, 479 bp, Homo Sapiens
  misc_feature (237)..(237): n is a, c, g, or t
taaaattacaccaacatgtattggcttaaaacaagaaacatttacgatgtcacaatttccagcagtcaggaatctgggtgagggtaactgggtggctttggctgtaggttcctcaaggctagagtcaaggggctggctggagctgcaggcatctcagggtggaaaatctgcctccagactcactcatggcagtgggcagccctcaggtccttgctggctgttggctggaggcatcanttccttgccccatgagcctctccccaggcagttcccataatggaagccccttccatagagcaagcaaggcaaggtggggaggaccagcaggacataaaccagtcttccagtaaccatgatcctgacgtagtaagttatctatcgctgtgtaacaaatcagcccaagatttactggttgatgtggtttggctctgtgttcccaccgaaatctcatctcaaattgtaatccccaccaaattctg

SEQ ID NO: 3333 - DNA, 425 bp, Homo Sapiens
tttaaatttctttttagtagagatggggggtcgggtcttgctattttgcccaggctggagtagtggcacgatcttggctcactgcaactctgcctcctgggttcaaacaatactcctgcctcagcctgctaagtagctgggattacaggcataagccatcacacccagccttgaggattttcttatactgtgtttgaatccacatgactgataatatgcttaatgtttgagaaattataaccttgcaattgaggttaatgatctactaactacctttgtgttgatcagattgtgtacaatctggaaaagacaacgactaatccaaagaaatgaaactacagaatttcaggcattgtaattatacctgtaagaagttaacctagcagagaaaacgtttaactatccctcccatcaccatcaccatt

SEQ ID NO: 3334 - DNA, 312 bp, Homo Sapiens
gctcgacttgtgttttttttgttttgttactttcattagtgttttcaatatgtgtgggcgcaggctgcagaagggtggaggaggctggcctcagaggacacccaggcttggggctaagtcccagtgtccatatgaagctgtttctggccttgtccgtttttgttgtcccaggctctgtgcccctcactcagtcaagaacttgtctttgtgttgcttcttggggacatgctcagggcagaagtcagagcggaggaggcgggaaaagtagattatgatcatcacgtccagcatgagcaggatacccagcaggaa

SEQ ID NO: 3335 - DNA, 802 bp, Homo Sapiens
  misc_feature (19)..(19): n is a, c, g, or t
  misc_feature (76)..(76): n is a, c, g, or t
  misc_feature (224)..(224): n is a, c, g, or t
  misc_feature (260)..(260): n is a, c, g, or t
  misc_feature (290)..(290): n is a, c, g, or t
  misc_feature (293)..(293): n is a, c, g, or t
  misc_feature (311)..(311): n is a, c, g, or t
  misc_feature (375)..(375): n is a, c, g, or t
  misc_feature (386)..(386): n is a, c, g, or t
  misc_feature (395)..(395): n is a, c, g, or t
  misc_feature (402)..(402): n is a, c, g, or t
  misc_feature (414)..(414): n is a, c, g, or t
  misc_feature (463)..(463): n is a, c, g, or t
  misc_feature (466)..(466): n is a, c, g, or t
  misc_feature (478)..(478): n is a, c, g, or t
  misc_feature (484)..(484): n is a, c, g, or t
  misc_feature (488)..(488): n is a, c, g, or t
  misc_feature (490)..(490): n is a, c, g, or t
  misc_feature (506)..(506): n is a, c, g, or t
  misc_feature (525)..(526): n is a, c, g, or t
  misc_feature (535)..(535): n is a, c, g, or t
  misc_feature (540)..(540): n is a, c, g, or t
  misc_feature (576)..(576): n is a, c, g, or t
  misc_feature (584)..(584): n is a, c, g, or t
  misc_feature (588)..(588): n is a, c, g, or t
  misc_feature (622)..(622): n is a, c, g, or t
  misc_feature (628)..(628): n is a, c, g, or t
  misc_feature (639)..(639): n is a, c, g, or t
  misc_feature (650)..(650): n is a, c, g, or t
  misc_feature (653)..(653): n is a, c, g, or t
  misc_feature (667)..(667): n is a, c, g, or t
  misc_feature (671)..(673): n is a, c, g, or t
  misc_feature (681)..(681): n is a, c, g, or t
  misc_feature (685)..(685): n is a, c, g, or t
  misc_feature (688)..(688): n is a, c, g, or t
  misc_feature (699)..(699): n is a, c, g, or t
  misc_feature (703)..(703): n is a, c, g, or t
  misc_feature (719)..(719): n is a, c, g, or t
  misc_feature (721)..(721): n is a, c, g, or t
  misc_feature (729)..(732): n is a, c, g, or t
  misc_feature (741)..(741): n is a, c, g, or t
  misc_feature (743)..(743): n is a, c, g, or t
  misc_feature (745)..(745): n is a, c, g, or t
  misc_feature (753)..(753): n is a, c, g, or t
  misc_feature (756)..(757): n is a, c, g, or t
  misc_feature (762)..(762): n is a, c, g, or t
  misc_feature (772)..(775): n is a, c, g, or t
  misc_feature (785)..(785): n is a, c, g, or t
  misc_feature (787)..(787): n is a, c, g, or t
  misc_feature (789)..(789): n is a, c, g, or t
  misc_feature (792)..(792): n is a, c, g, or t
  misc_feature (798)..(798): n is a, c, g, or t
  misc_feature (802)..(802): n is a, c, g, or t
tttgtcttctcccctattnagctcagagtgtgcccgctgcgccgacgctgtccgtacctgccgccgccgccaccgncaccatgcccaacttcgccggcacctggaagatgcgcagcagcgagaatttcgacgagctgctcaaggcactgggtgtgaacgccatgctgaggaaagtggccgtagcggctgcgtccaagccgcacgtggagatccgccaggacggngatcagttctacatcaagacatccaccacggtgcgnaccactgagatcaacttcaaggtcggaganggntttgaggaggagaccgtngacggacgcaagtgcaggagtttagccacttgggagaatgagaacaagatccactgcacgcaanctcttcttganggggacggncccaaancctactggaccngtgagctggccaacgatgaccttatcctgacgtttggcgccgatgacgnggncttgcaccagantttatntccnanagtgaagggaagttgnctttgctcctactttcaannaagggtttncaggntcccctgaggaattatgtcataggttcctgagcttnccagtggnaccncccctttttcccttacccaattttagggttgatncccccnttacccccatnaaaattttggnggngtcccccaccccancccnnnagggtttngttnccncttttttcccnattnggctttacccagtttnanctgtcaannnnggcgttttncnantcttttcnttnncaacnctcttctccnnnnttttcctcgntnanctntccttncccn

SEQ ID NO: 3336 - DNA, 826 bp, Homo Sapiens
gccggggctgaggctctgtcagtggtaactggtaaaatccaggaccaaactgccagagccacaaggggatcctggggctccatctcccagccacagagctgcccggctgcaggccaagtacccggccatcaaggccctgatgcggccagacccgcgcctcaagtgggcggtgctggtgctggtgctggtgcagatgctgacctgctggctggtgcgcgggctggcctggcgctggctgctgttctgggcctacgcctttggtggctgcgtgaaccactcgctgacgctggccatccacgacatctcgcacaacgcggccttcggcacgggccgtgcggcacgcaaccgctggctggccgtgttcgccaacctgcccgtgggtgtgccctacgccgcctccttcaagaagtaccacgtggaccaccaccgctacctgggcggcgacgggctggacgtggacgtgcccacgcgtctggagggctggttcttctgcacgcccgcccgcaagctgctctggctggtgctgcagcccttcttctactcactacggccgctctgcgtccaccccaagggccgtgacccgcatggaggtgctcaacacgctggtgcagctggcggccgacctggccatctttgccctttgggggctcaagcccgtggtctacctgctggccagctccttcctgggcctgggcctgaacccatctcgggcacttcgtggcgagcactaatgttcctcaagggcagagacctatcctactatgggctctcaaatggacaccttcaatgtgggtaacacgtggagcccaggattcccagatccggg

SEQ ID NO: 3337 - DNA, 395 bp, Homo Sapiens
aaaactaaaattggttttaataaaagttttggagtcatcaaaatgagtaactatacacattcctcctctccagcaagtatacagaaatcttcccttactccaatttgacgctgcaaaatcatacatgcaccccaggctgatctgttattgagatatctaagtctggtctcacccattactttaacatatcagaggaattaacataacagcctagagaacagaaataagagataataggtgcttcagtaccacccaaattatctactaagaccacagtgtgggcaacagaatgcagattcatggtagtagttccttgaatgaaagagttcagacagaatcttccacaaacacaaatttttgcggtatccaaatcttggcagagatggaatggaatg

SEQ ID NO: 3338 - DNA, 135 bp, Homo Sapiens
  misc_feature (69)..(69): n is a, c, g, or t
gcttgcgcgcgtgagctgagccggtgggtgagcggcggccacggcatcctgtgctgtgggggctacgangaaagatctaattatcatggacctgcgacagtttcttatgtgcctgtccctgtgcacagcctttgc

SEQ ID NO: 3339 - DNA, 440 bp, Homo Sapiens
ttttagatggcttatttctggtttaatgaaactcacctaaaaacaataaagtgatggaaaaagtttggactgggaacctggcatcacacagtccagttctgcctcttagtgatgcctttgggaagatcattttattcttctggccttccatttccattcattcagttattcatctaagtaacaaatattcctctaatggctcctgtgtgccaggaactgttttgaagagttggtatagaacaaaatccaggatgtcctcctggaattttcagttatcaatgaagtacagttgacccttgaacgatacgagattgaactgtgtagctccacatataagtcttagatgccttcactttgtggcttctcttccaccttctctacctcttcttccacctctgtcacccctgagagagcaagaccaagttcttctcctcctcctc

SEQ ID NO: 3340 - DNA, 392 bp, Homo Sapiens
ccaggacagatgacccctaagcgcaaagctagagagcctcacgggacacagtggaagggcgcggggaaagccaggcaatgtcggacccaggcggcaccgggtctgggaggtgggcaggcaggagtggtcaccacttcagggtcatccaggaaatacagaacattttccagaaaacttccgggcatcatgaaaaacaaaagctgggctgggctgggcgagggccagggcctgtccctccctgctggctcacattgactggcagccagacctgaaaggggcccagggaatccgaggtgacccccagggctccgccagggaaacctggggcccccttgagcaaaacactggccaaggccactgaggaagtccctggcacaggaggggctaccatc

SEQ ID NO: 3341 - DNA, 631 bp, Homo Sapiens
  misc_feature (512)..(512): n is a, c, g, or t
ccgttgctgtcttgacaaaagattgtacttggtgccctcttcccggaggctcgtccttatgacttcgtgtggataagcaatgcaggaggacagcccttagaaagagcagcagctgccataagtccaaaaaaacttgtggaatttttctcagtcccatttgcagaagaggctaatggagcttctttcggatacttctttaaactttcataaatagcaaagcagattatagtttcggaaattccagcatacgaggcagttaatcctctatagaagccacgaatgccttcggtctggtaaacgtaacgagcacactggagtgtattcatctgcttagagcccctcactttctgttctagctgcattcgggtattaaccatccatataggattcattaaggaatttgtgataaaagctgcagagccagctgagaaaatatgcacaatattgctgttaggcacgaaaatgccattaaattgctctttggctttggagtaacatgcaaagtatacagnccttgatggtgcaactccaaccaaatttggacccaagcctctaaaaagtgactttggtccctctttctccaagatcgacttcagaaactgaaagagtccaggtgtcacggatgttgggc

SEQ ID NO: 3342 - DNA, 487 bp, Homo Sapiens
gctttagaaagaaaagcacccactaacacaataaacacgaaaggctgcttaaaccaaatgcagtgaatgcttatcttggtcagctggagttcacctaagcaaggactggaccaggcaaggaggccctgaacagcagcctgcttctggggccagctttcctcttggagccgcagtcctggagaatcatgctgggaggtgttagtgctcgtgagagcgcacagaggagcacagcctacagtcgatttgatgtccatcatcttcccttgcatggggagattaatagaccatagggaagacagaggggtctgagaaggactccctgagccgggccctcctgcagggaggcaatgctgaccacatcaagcatgggctccccagctgtgagggtcatcttcgctgctgctgatcactgctctgtgatttcaattaaatcatgaagggtggattctcgcacacgcacacttctacagatacacacatgcacaga

SEQ ID NO: 3343 - DNA, 6534 bp, Homo Sapiens
gggataatgctcccgagaaggattctggcagcagttctcaaaggctagacttgagtggtattgctgcatatgcgctgattcttcagcttgtctctaaccgaggaagcattgattgggagctactcattcagaaaattaaaagaaagaagccagaaaatattatcaaccctttgagaacacgacacaacgaactttatattttaccacttccttgaatagttgcaggagaaataacaaggcattgaagaatggcagatgaacggaaagacgaagcaaaggcacctcactggacctcagcaccgctaacagaggcatctgcacactcacatccacctgagattaaggatcaaggcggagcaggggaaggacttgtccgaagcgccaatggattcccatacagggaggatgaagagggtgcctttggagagcatgggtcacagggcacctattcaaataccaaagagaatgggatcaacggagagctgacctcagctgacagagaaacagcagaggaggtgtctgcaaggatagttcaagtagtcactgctgaggctgtagcagtcctgaaaggtgaacaagagaaagaagctcaacataaagaccagactgcagctctgcctttagcagctgaagaaacagctaatctgcctccttctccacccccatcacctgcctcagaacagactgtcacagtggaggaagatttacttacagcctcgaagatggagttccacgatcaacaggaattgactccctctacagctgagccttcagaccagaaggaaaaggagtcagagaagcaaagtaagcctggtgaagaccttaaacatgctgccttagtttctcagccagagacaactaaaacttaccctgataaaaaggacatgcaaggcacagaagaagaaaaagcacccctagctttgtttgggcacactcttgttgccagcctggaagacatgaaacagaagacagaaccaagccttgtagtacctggcattgacctccctaaagagcctccaactccaaaagaacaaaaggactggttcatcgaaatgccaacggaagcaaaaaaggatgagtggggtttagttgcccccatatctcctggccctctgactcccatgagggaaaaagatgtatttgatgatatcccaaaatgggaagggaaacagtttgattctcccatgccaagtccctttcaagggggaagcttcactcttcctttagatgtcatgaagaatgaaatagttacagaaacatcgccctttgcccctgcctttttacagccagatgacaaaaaatctctgcaacaaaccagtggcccagctactgccaaagatagttttaaaattgaagagccccatgaggctaaacctgacaaaatggcagaagcaccaccctcagaggcaatgaccttacccaaagatgctcacattccagttgtagaagaacatgttatggggaaagttttagaggaagaaaaggaggccataaatcaagagactgtgcagcaaagggatactttcacccccagtggacaggaacctatacttactgaaaaggaaactgagctgaagcttgaagaaaaaaccaccatttctgacaaagaagctgtgccaaaagagagtaaacccccaaaacctgcagatgaagaaataggcataattcagacctccacagagcacactttctcagaacagaaagaccaagagcctaccacagatatgttgaaacaggactcgttccctgtaagtttggagcaagcagttacagattcagccatgacctctaaaacactggagaaagccatgaccgaaccatctgcattaattgaaaagagctcaattcaggaactttttgaaatgagagttgatgacaaagataagattgaaggagttggagctgcaacatcagctgagcttgatatgccattttatgaagataaatcaggaatgtccaagtactttgaaacatctgccttgaaagaagaagcaacaaaaagcattgagccaggcagtgattactatgaactgagtgacactagagaaagtgtccatgagtctattgataccatgtctcccatgcataaaaatggtgacaaggagtttcaaacaggaaaagaatcccagcccagtcctccagcacaagaagcagggtacagcactctcgcacagagttatccatcagatttacctgaagaacccagttctcctcaagaaagaatgttcactattgatccaaaagtgtatggagagaaaagggacctccacagtaagaataaggatgatttgacccttagcaggagtttaggacttggtggtaggtctgcaatagaacaaagaagcatgtcaatcaatttgccgatgtcttgcctagattccatagcccttggatttaactttggtcggggacatgatctttctcctctggcttccgatattctaaccaacactagtggaagtatggatgaaggggatgattaccttccagccaccacacctgcactggagaaagccccttgcttccctgtagaaagcaaagaggaagaacagatagagaaagtaaaagctactggagaagaaagtactcaagcggagatatcatgtgagtctcctttcctagccaaagatttttacaaaaatggtactgtcatggcacctgaccttcctgaaatgctagatctggcaggcacaaggtcaagattggcttctgtgagtgcagatgctgaggttgccaggaggaaatcagtcccatcagagactgtggttgaggatagtcgtactggcttgcccccggtaactgatgaaaaccatgtcattgtaaaaacggacagtcagctcgaagacctgggctactgtgtgttcaataagtacacagtcccattgccatcacctgttcaagacagtgagaatttatcaggggagagtggtaccttttacgaaggcactgatgataaagttcgaagagatttggccacagacctttcactgattgaagtgaaactggcagcagccggaagagtcaaagatgagttcagtgttgacaaagaagcatccgcgcatatctctggtgacaaatcaggactgagtaaggagtttgaccaagagaagaaagctaatgataggttggatactgtactagaaaagagtgaagaacatgctgattcaaaagaacatgccaagaaaactgaagaggctggtgatgaaatagaaacattcggattaggagtaacctatgagcaagctttggccaaagatttgtcaataccaacagatgcatcctctgagaaagcagagaagggtcttagttcagttccagagatagctgaggtagaaccatccaaaaaggtggaacaaggtctggattttgctgtccagggtcaactagatgttaaaattagtgactttggacagatggcttcagggctaaacatagatgatagaagggcaacagagctaaaacttgaggctacacaggacatgaccccctcatccaaagcaccgcaggaggcagatgcatttatgggtgttgagtctggccacatgaaagaaggcactaaagttagtgagacagaagtcaaacagaaggtggccaagcctgacttggtgcaccaggaggctgtagacaaggaggagtcctatgaatctagtggtgagcatgaaagtctcaccatggagtccttgaaagctgatgagggcaagaaggaaacatctccagaatcatctctaattcaagatgagattgccgtcaaattgtcagtggaaataccttgcccacctgctgtttcagaggctgatttagccacagatgagagagctgatgtccagatggaatttattcaggggccaaaagaagaaagcaaagagaccccagatatatccatcacgccttctgatgttgcagagccattgcatgaaacgatcgtatctgaaccagcagagattcagagtgaggaagaagagatagaagcccagggagaatatgataaactgctcttccgctcagacacccttcagataactgacctgggtgtctcaggtgccagggaggaatttgtggagacctgcccaagtgaacacaaaggagtgattgagtctgttgtgaccatcgaggatgatttcatcactgtagtgcaaaccacaactgatgaaggggagtcagggtcccacagcgtgcgttttgcagccctagagcagcctgaggtggaaaggagaccatctcctcatgatgaagaagagtttgaagtagaagaggcagctgaagcccaggcagaacccaaagatggttccccagaggctccagcttcccctgagagagaagaggttgcactttctgaatataagacagaaacctatgacgattacaaagatgagaccaccattgacgactccatcatggacgctgacagcctctgggtggacactcaagatgatgataggagcatcatgacagaacagttagaaactattcctaaagaggagaaagctgaaaaggaagctcggagatcatctcttgagaaacatagaaaagaaaagccttttaaaaccgggagaggcagaatttccactcctgaaagaaaagtagctaaaaaggaacctagcacagtctccagagatgaagtgagaaggaaaaaagcagtttataagaaggctgaacttgctaaaaaaacagaagttcaggcccactctccctccaggaaattcattttaaaacctgctatcaaatatactagaccaactcatctctcctgtgttaagcggaaaaccacagcagcaggtggggaatcagctctggctcccagtgtatttaaacaggcaaaggacaaagtctctgacggagtaaccaagagcccagaaaagcgctcttctctcccaagaccttcctccattctccctcctcggcgaggtgtgtcaggagacagagatgagaattccttctctctcaacagttctatctcttcttcagcacggcggaccaccaggtcagagccaattcgcagagcagggaagagtggtacctcaacacccactacccctgggtctactgccatcactcctggcaccccaccaagttattcttcacgcacaccaggcactcctggaacccctagctatcccaggacccctcacacaccaggaacccccaagtctgccatcttggtgccgagtgagaagaaggtcgccatcatacgtactcctccaaaatctcctgcgactcccaagcagcttcggcttattaaccaaccactgccagacctgaagaatgtcaaatccaaaatcggatcaacagacaacatcaaataccagcctaaaggggggcaggtacaaattgttaccaagaaaatagacctaagccatgtgacatccaaatgtggctctctgaagaacatcggccacaggccaggtggcggacgtgtgaaaattgagagtgtaaaactagatttcaaagaaaaggcccaagctaaagttggttctcttgataatgctcatcatgtacctggaggtggtaatgtcaagattgacagccaaaagttgaacttcagagagcatgctaaagcccgtgtggaccatggggctgagatcattacacagtccccaggcagatccagcgtggcatcaccccgacgactcagcaatgtctcctcgtctggaagcatcaacctgctcgaatctcctcagcttgccactttggctgaggatgtcactgctgcactcgctaagcagggcttgtgaatatttctcatttagcattgaaataataatatttaggcatgagctcttggcaggagtgggctctgagcagttgttatattcattctttataaaccataaaataaataatctcatccccaaactgtagtaattgttacaattttctatttaaaaaatgaatagtacatgcagaaattgacctgatttccatttgcaacaggaagacactggctttacatgggttcaattggacaattatttttgctctgctctgttttgcatggagtattattattttaaaaattgcatttttacctttcatgtgcctgaaggctatccactacattctgaaggccttgttaaaatccaagctgctcatttcactattctgtttctgagtgagaagataaaaactgcccattgtaacttatttcaggttaaattaaaccaaggagtctgattgcaggaagggaagagcatgtaagaaataagtttttttaaagtgttattttgtataaatgggaagaaagattcaattaagttattaacatttgggacctggataattatatcagagtatgtcagtccaataaattatttaactaattaaaaaatagttgcaaagcatttgagctgtggttgaggaagtggtgtttagaatgtcagttgatcagctagatttgtgtccacactaccagtttcaccccccctttcatctgtttgatacagtattatagatataaatatatatatatttctctgaggccatttgggatacttcctcatatactcgaatattataacttcttattcacaggatctg

SEQ ID NO: 3344 - DNA, 374 bp, Homo Sapiens
cacgagggcagccgcagcagcagccgccgcggcggcacggaggagccagacacaaagagaggggctgtttgcggggtggggtggggggttcgctatgtcggatgacgattcgagggccagcaccagctcctcctcatcttcgtcttccaaccagcaaaccgagaaagaaacaaacacccccaagaagaaggagagtaaagtcagcatgagcaaaaactccaaactcctctccaccagcgccaagagaattcagaaggagctggcggacatcactttagaccctccacctaattgcagtgctggtcccaaaggcgataacatctattaatggagattaaccattctagggcctccaggatccgtgtatgagggtg

SEQ ID NO: 3345 - DNA, 335 bp, Homo Sapiens
atggctgtgtagttaagaattaagaattgggttttttaaagttgtggagagtagctgatgaggagatgggacagcataatattcaactacggtatttctttttcaaagcttattcaggtaaaacagtttcattaaagggtagaggccctctttagcaacatgctagtggagaatacccccctttgcctgcccaagacatacagaaaagaaggattgtagaaggtcccacgaaaacattagaattaggaggctggaatttaaacttagcaaaggaaagcagtatcggaacagtggtttcaagaacccagtcacgtcgcacattctcaaggatgctg

SEQ ID NO: 3346 - DNA, 296 bp, Homo Sapiens
ttttttttttttttttcctgcctcatgctttattttccatagagcttgtttccatccatacctcctctggtctcatccatgctgattccagggtccaggttctcaggtctgaggtccataatgtcaggtgaagccctgcccataccattgcctagtggccaacacccccgcccaccacagcctgatgaaccctttgtcaaccagggttttttattccaacaaagaatctcgtatccctgagggcacacagtgaggctgcctcactcctcttccatgctaaggatttgcagcaggat

SEQ ID NO: 3347 - DNA, 1055 bp, Homo Sapiens
gcgatcttatcaagctttttgggaggtataaaacaaaatccccattttttccttggatttagttcctcaggaacagagaactttgcaattgatgatctcaactctgcatcatctggtgactcctgattctgcaggactaagacatttcccaagagttctgctgcatcagccagtgaggacaagagttcttcagtgcggttcagctcaaggacacctaggcttccccagcagggggcttgcttgcaggtctgacaaaccacagagcgttgagcagatggcctgggactcccagacctggcagagggttttattagggcccgcctggcctgcaccgtttcatccaagtaccctgacccagcactcatcttccctggcattctctgttatccaccagctcctctgcacacctcagcgtctacttccacgaacttctaaacatcaaaaggtacaatggccagggtgcggcaggagagtcgggggcagggcagccttcaaatccacactattgaatccacacgatggaaagaagagaacagatggggaagttctccagagatcatgagatgcatccaggcagtgttctcatgtgagaggatagggaggccaaaaactaaaattgctatcagcccccgccgctgtctggtacgcgaggaaactttccgaggactttacaagcatagttgcaaaatgctagtaggtctgggactcttcaactttctcttctagggccacagtagactccggtgtactgcctttctggccgcacctgggtatgggtgacaagagggcccccttccgaccctgcgcaagtgtcagactccagcgtgggcccttgcaccggactgccacaagcctgaagcaaaaaatccgtacttgttgcccacctgaatgccttgctcagcgcaggcctacacctggcttccacatttacggaccactaaaactttattgcaaccttgttgacccaggtctattacacaccaggaatccttcagaagccccattcgcctcacatggacacactcggtaaccagcgggcggcacaacctctccag

SEQ ID NO: 3348 - DNA, 328 bp, Homo Sapiens
ttttttaccatgatcacaaagcaaaatataattagtagggtaaatgtgctgagtgaagacatttataaaatgcattgaatagagaaagcagaatttttccagaattgggcttaattgtcctgctcagtacaaatggcatctaccagccactgagaatgctccctccgggttgctgttgtaagtccttgaatgaaaccttatcatctgtgagacggtgaagcataagagaatgctgcctgagaatgctccctgaggcacagttgtaactccaacacgggctcgcttgggttctgtgggcacgttgcaaaatacctctgcacctcacttt

SEQ ID NO: 3349 - DNA, 584 bp, Homo Sapiens
aaactatcaatgccattttttattttaaaaacagaaaaattaaaacccacaattatacgtagccaagttgttttcactctccatttattttccttttaaagtgctacatttgtgaactcattagcagttaccctatcaaaatttcaaaatcatgaagaaggttatacataaaaaatgaatgttggcttgagggccaaggaaatattgactgattagatagaagagcacatgatagatctgaactactctatgtcatcattcatttggtcaacaactgcaagctcctggatgtggctgattttgataaagtcatagaattcacagtattcttcacatttgttcaatggtcatcataaatacacatcacaataaccctaatttgtgactgaaacagaaactcttttcttttttcttcgaattttgtataatatttattttatcaaactcttttctaaatagcatttttaatgaacatgaatgtataaaactgtgaacaattttaataaaagcagaaactggtcgggcatggtggctcacgcctataatcctagcactttgagaagccaaagcgggatgacagcttg

SEQ ID NO: 3350 - DNA, 331 bp, Homo Sapiens
tttttgaggcagtgaaaactaagttttattcatctttgtatttatgatagcacttacaatggacaaaaatggggctcaaaacgggtttatgaatgaaataataatacacttaagaatccaagaggggcaggtcatttaaaagaatccaatagctggttcctatcacctgaggcttcataagacctctttctggttttctctcattcattcagctaacttttagagcacatacctctaaaatttacagcacctatctcagagttctgtctgatgctctgaggctgagcctggcagtaactacaataaggacaacaccaaccctccccacact

SEQ ID NO: 3351 - DNA, 372 bp, Homo Sapiens
  misc_feature (25)..(25): n is a, c, g, or t
  misc_feature (43)..(43): n is a, c, g, or t
  misc_feature (115)..(115): n is a, c, g, or t
  misc_feature (145)..(145): n is a, c, g, or t
  misc_feature (336)..(336): n is a, c, g, or t
  misc_feature (342)..(342): n is a, c, g, or t
  misc_feature (362)..(362): n is a, c, g, or t
aagacagttgaaccttagaagattnagctaagattcttgtttnggcaacctgcaagtaatgtttcatttttctattacgtgatctctttgcccatacagttggcagatgtttttnccccctttttctaccttaaacttttttgtntggagtacagtctaaaccaacatcagttagccttgattttctttcttttttggacaattgtctggttcattgacaaaagtaacaagtttggaactaagagatatgttacaagctgcacttaacaccacctgaaaacccaagaatcatctgaaggttttgtcagtagtaaggtaggttttgtgtgtgtgtgntgtgtngtgtgtgtgttgtgaagatnggaattaggg

SEQ ID NO: 3352 - DNA, 485 bp, Homo Sapiens
tagaaacaggttctcactatgttgccagggctggtcttaaattcctggcttcaagtgatgctcccacctcagcctcccagagtgctgggattacaggcatgagctgcttcatctggtctcttgtagcatatttttactttccaagagtgtttttattctctgaatgttcatctttttagctgcctcctgttgttctttcatttacaatgtctttccttatttctctgagaacagcagtaactttttaaaaaaaaacagtgtgttctctattctctcctagttgttggcttatatgcaagagaggggcaccacaaatctggctgacagctctgagcaggtagatgtggggcttactggctggaagggacataggggaacccactccccaaggagacccttttcttagggtatgtgagcaagcagcttgagtatgagtggatgctgcaaacagatccatagggcaatgtggctaggcattttggggg

SEQ ID NO: 3353 - DNA, 363 bp, Homo Sapiens
tttttttttttttttttcaataaattgctacaaataaggttctaaaatcaatacataaggcaaaattggcttttaaacattccttacactgcccacacacttgaatacacctacacaacacagtgaaggggcactggggagaaggactggctgagggcccagcaatcacttcccgtctcaggctgggtccaggtcagcacccagggaatgggaggggtctggattgtctgtgcctttaaaaacttttgttttgtttttaatcctcagttgaatttgttcgctttatgcatccctgatctcacatcaccatatacccaaacactgatacaattaatagatggtggtaatttttacctcgtgccg

SEQ ID NO: 3354 - DNA, 566 bp, Homo Sapiens
tttttttttttttttttcaattgattttattttcattttttattgaaagcttcatcaaagaaaacagaagtttaaacctaacatccactgatctacagaaagcccaagggatgggggagatggttgctaatttgactgtggtacagatgaagaaattaaaaataaaaccagaaacaccttagaattacagaactttccatgacagtcagagacagcagtacaaaaatgctcttaaataaagttcaaaattgaatgatgtttcagaagttccatgaagttgaatatggactgaaacaagggttttaaaagaagctgtgtccctttttttttttatagagactgaatatctcatagcagatactactacatatatttttttaaattaagattccatttttcttcttcttcttttgaaataaatggaagcatttgtgtccagaatagagaaaactttttcaaatatctttttgaaataatttttacagttcctgaaaagcatggaataacttatttttttatatatgaagagataacatatttgagggaggaggaaaaaacatctttct

SEQ ID NO: 3355 - DNA, 511 bp, Homo Sapiens
gcggccgcggcgggaagaagggctagcgaagcacccccgaccgggcccaggcgccggacgccggggggcgcctcgctgcaacttctctttggaagccccgacacgagccccggcccgcgcgcgcgctcccccacggccacgcgcgcaccctgccgcccgcacccccgcgcgccctccgtctattttttcctcttcctttcatcctcacactctaaaataggtcaaggggtggaagttacacctggtgcagccctcggctctgatgcaaaagcagcttttgcccctggctgcgggacagcgctgtgactactcgcatcgggagagctgctgccagtcgccgcaccgtgcagaaagcgccggcgaccggagcactgacaatggtctgcataggggagcggagagaagcttctgttgcgccctagatccgctgcctctgcgcccgcccgcagggaggagggggcgcgacaggtcgtctagcgcgtgccccggagcccgcgcccgggtctggccg

SEQ ID NO: 3356 - DNA, 980 bp, Homo Sapiens
gactagtctagtgcgaggctggtgtcaatcggccgagggaagtggacgcatgcgccgtttctctgcatggtgtgcgttctcgttctagctgcggccgcaggagctgtggcggttttcctaatcctgcgaatatgggtagtgcttcgttccatggacgttacgccccgggagtctctcagtatcttggtagtggctgggtccggtgggcataccactgagatcctgaggctgcttgggagcttgtccaatgcctactcacctagacattatgtcattgctgacactgatgaaatgagtgccaataaaataaattcttttgaactagatcgagctgatagagaccctagtaacatgtataccaaatactacattcaccgaattccaagaagccgggaggttcagcagtcctggccctccaccgttttcaccaccttgcactccatgtggctctcctttcccctaattcacagggtgaagccagatttggtgttgtgtaacggaccaggaacatgtgttcctatctgtgtatctgcccttctccttgggatactaggaataacagaaagtgatcattgtctacgttgaaagcatctgccgtgtagaaacgttatccatgtccggaaagattctgtttcatctctcagattacttcattgttcagtggccggctctgaaagaaaaagtatccccacatcggtgtaccttgggcgaattgtttgacaaatggcaaactgacttctttagaattttgcagttacagtagtatgttctcaaattggggggaaaaaaccctacatgtttcttgttaaggcgtctgaccagtcctgaaaattcttggtgggtccggattaaaaactggtccggattacccgtgaaaaactgaggcttccctttaaacaaactggtacgtactctaagttttcccccgtaacccattctttgataaatgtttccactcggaatcccggcgccaaacttta

SEQ ID NO: 3357 - DNA, 415 bp, Homo Sapiens
ctgaaatgggaggaaagtgactgtgaggaaggtgtgtgtccaccgagcacttggattcagcttcttcatttccaacatggaagaaacttacaccgactccctggaccctgagaagctattgcaatgcccctatgacaaaaaccatcaaatcagggcttgcaggtttccttatcatcttatcaagtgcagaaagaatcatcctgatgttgcaagcaaattggctacttgtcccttcaatgctcgccaccaggttcctcgagctgaaattagtcatcatatctcaagctgtgatgacagaagttgtattgagcaagatgttgtcaaccaaaccaggagccttagacaagagactctggctgagagcacttggcagtgcctccttgcgatgaagactgggataaagatttgtgggagc

SEQ ID NO: 3358 - DNA, 2772 bp, Homo Sapiens
aacagcgtcccctaaccagccctttctatctcattgttctgacttggacacgccatggctcaccgctcccaaagtccccactatgtctccctagctgaggaaataaaagcagagaggggtgatgaaacagtgacgatcctggggaaacagctgaggaggggagggagggggaagaagccactaaaaaagtgaaatgtgcttgggagaatcggcctgcctgcagggtagatgccctttctctctgctggccagctctgcccctcagtgagaaactttacatattgctaagatgcctggccaatgaaacagttccagagactttatgtcccccagtagaaatatgaatagaaatcaccctgtgggcaatggtcccattttaaaatatgctgtcccattgtcccctagagcctactttaacttgtcagaccatgtattccacttcatatgcaagaggcatgcactgagcccataggtggctaggcaaacacccaatagctccctgaaatggcttcattatgcagcctcgacagccaccccaaccctcccactctcacactgaaacacccagacctagagatagctagacacacccagacacccgccaagcccctcacatacagatatgtgcacaatgatacacagcaaacgtacacagagttcagtacacacaaagagctcacgcccacgtgcacacacccctcagttgggacagagttgaccaccaccacctttctcccaaacacatggcttttgaactgcctttccttggatccagttcaaggggatggaggagcagtgagagtcagccgcccttccactccaatttcccagcacctcccttatctctgcctcacaagtcacccagcccccctctcttccttccttgtgcttgaagaatctctccttgctggaaagccccctgttttctcaatctccctttccacttcggtaaaatctctacttgctggaaagccccctgttttctcaatctccctttccacttcggtaaaatgcccactttctggtccccacctttttcctgagtgtagtcccaaccagccaaatccaacctcaaaacaggaagacccaaggccagtgacccccataggcctgaggcttgtgcaggcagtgggcgtggggtaaggcttcctgatgccccctgtccctgcccagaacctgatggccctcattagtccttggctcttatcttggaagcacaggcgctgacagccgtcccagcccttctgtctgcgggcctgaaccaaacggtgccatggggaactgtctgcacagggtgagtatggggccaggccccagagtcccttatccctatgcccctcatttcccctgctgtttgcccctcagtctttatatctcttccttttcctcctcatcttttctcccttcccgcttttttcctcttccttcaaagtctttttccttctctccttcctatgctagcctcctagctccctcttgtgtccctccctttgcctttgagtcagttccatcctggtctcttggtgcctttccttctgaccttgcactgctcctccagccccagctgccctggcttccccaggactgttcctgctccggctcttcaggctccctgctttgtccttttccactgtccgcactgcatctgactcctgcagagaccttgttctcccacccgaccttcctctctgtcctcccctcccacctgcccctcaattcccaggagactcttccggtgtaactctgatggcctcctctgggtatgtcctccaggcggagctctccccctcaactgagaactcaagtcagctggacttcgaagatgtatggaattcttcctatggtgtgaatgattccttcccagatggagactatgatgccaacctggaagcagctgccccctgccactcctgtaacctgctggatgactctgcactgcccttcttcatcctcaccagtgtcctgggtatcctagctagcagcactgtcctcttcatgcttttcagacctctcttctgctggcagctctgccctggctggcctgtcctgacacagctggctgtgggcagtgccctcttcagcattgtggtgcccgtcttggccccagggctaggtagcactcgcagctctgccctgtgtagcctgggctactgtgtctggtatggctcagcctttgcccaggctttgctgctagggtgccatgcctccctgggccacagactgggtgcaggccaggtcccaggcctcaccctggggctcactgtgggaatttggggagtggctgccctactgacactgcctgtcaccctggccagtggtgcttctggtggactctgcaccctgatatacagcacggagctgaaggctttgcaggccacacacactgtagcctgtcttgccatctttgtcttgttgccattgggtttgtttggagccaaggggctgaagaaggcattgggtatggggccaggcccctggatgaatatcctgtgggcctggtttattttctggtggcctcatggggtggttctaggactggatttcctggtgaggtccaagctgttgctgttgtcaacatgtctggcccagcaggctctggacctgctgctgaacctggcagaagccctggcaattttgcactgtgtggctacgcccctgctcctcgccctattctgccaccaggccacccgcaccctcttgccctctctgcccctccctgaaggatggtcttctcatctggacacccttggaagcaaatcctagttctcttcc

SEQ ID NO: 3359 - DNA, 115 bp, Homo Sapiens
tttattgtaaatataggctatttcatgaagtttcaatttattcacactttttaaagcgcactgtgttgcagcaggactcatacctgctgtgtagctcagagtttgtgagtttcct

SEQ ID NO: 3360 - DNA, 735 bp, Homo Sapiens
gggactcgccgccatctcaggtctcttggctttgccagggcccaccggagaaaactgacgacccgtttctgtaatccttatgggagaccaaccttgtgcctccgggagatccactctcccacctggaaacgcacgggaagccaagcctccaaaaaagcgctgcctcctcgctccgcgttgggattatccggaaggaactcccaacggaggtagtaccactctaccctccgacctcctcctgcatcagccggcctgaagtcgcaccctcctcctccggagcaagtagagaaataaatttctcccaccctaaaccagtctttgagtgattgcagtatgactccatttccctggtgcattcatataatagttcacctggtgaaaaacaatgaagattatttacaatgctaccctgctttttctgggtgtcctgaacctggaagttgtgctttttaagtcttatgatgtaatcagcacgatttcacttcctgaattccggtgaaattctaagacatgggcaagatcgggtgtgtaagaccttctgagatttaaggccatgcccttggatcatggtgaacttaccaaagcaaacaatgcctgttgagaaatggtcctgcaggcagccaaccagtgaactcttttggtgacatcctgtacttgttgtttaactttatatttcctataaatccattaagggccaataaagtttgtctctaagcgctgtggttattccaaaaa

SEQ ID NO: 3361 - DNA, 329 bp, Homo Sapiens
tttttttttttttttttaaaagaacaaatatttattaagagcctagagtggcatgcgctgtgaaaggcgtggcatgtaattctttcccagttctttgcctgtctgaatatttctcattcttcaggtttcagctcagatatcacatcctcagagaacttgccttgccactctctctgaagagcctccccccgtccccgccaccgctactgtctcttgaactttctcagtctggccattctattaaaatctggaacgattttgctagtttgcggaagtttcccccaagctgcaggctccataagggcagtgacagtgtctctttctcaaat

SEQ ID NO: 3362 - DNA, 460 bp, Homo Sapiens
  misc_feature (364)..(364): n is a, c, g, or t
  misc_feature (366)..(366): n is a, c, g, or t
  misc_feature (429)..(429): n is a, c, g, or t
gttgcagtgagccgagatcgcaccattgcactccagtctgggcaacagagtgagattccgtctcaaaaaaaaaaagaaaaggaaaaaaaaatagcattatacctcttccttgtctcaaccgccatgaaaattctgaacactccaaattcagttgaataatccaaaacaaaatttataagtataaaataattttacttcttatagtaatagtatactttaaaaagcctcagggtatattatcttctaaacagctacaattcagtgcagctacattaaccaactatgttctctagttgaggaacaactaggcctatttcactgctgtgtagcctcagtgcctaacatgggtgccaaataaatattngnggattacactgaattgtaaaaaccattcgtttttgtttacaattgccaaaaatctcaaaaggncctgtatttatgtaattctttgaaattatta

SEQ ID NO: 3363 - DNA, 524 bp, Homo Sapiens
gtccgtgcgcaccgcccggcgtccaggtgagtctcccatctgcagagacgcggacgcgccggcccgcagttggcctgcggagcgcggtggacggtttggcgcccaccaggcgatcaatactttggatttttaatttctagatttggcaattcttcgctgaagtcatcatgagctttttccaactcctgatgaaaaggaaggaactcattcccttggtggtgttcatgactgtggcggcgggtggagcctcatctttcgctgtgtattctctttggaaaaccgatgtgatccttgatcgaaaaaaaaatccagaaccttgggaaactgtggaccctactgtacctcaaaagcttataacaatcaaccaacaatggaaacccattgaagagttgcaaaatgtccaaagggtgaccaaatgacgagccctcgcctctttcttctgaagagtactctataaatctagtggaaacatttctgcacaaactagattctggacaccagtggggcggaatgcttttgccccg

SEQ ID NO: 3364 - DNA, 445 bp, Homo Sapiens
  misc_feature (381)..(381): n is a, c, g, or t
  misc_feature (407)..(407): n is a, c, g, or t
  misc_feature (439)..(439): n is a, c, g, or t
attcggcacagggcgaaggatggcggggacactgtgaatgtcagcccagaaggtgatcagagcctgttaattaaaatggaaagaagacagaagggaaggtagacatcaggttctccctggagacttttcgttttcatttacgctgcggaaactgacgtttttgcctaacaccccatgtaatgtaaacgtataggcttgagtacgtgtccggccgcatgtgtagtgaaccctaaagctttcctaattgtagttagcatcgtccctaagcggaacgattttccgtgaacatgatttgtacttttctacgagccgtacagtatacggagaagctggcacaggtccttcgggcaaagcgatttgctttttgccataacatcgtgntttaacaaagcgtggttttgaaggantgaggcccattttgagatgtggggtttcaatnttcaaa

SEQ ID NO: 3365 - DNA, 611 bp, Homo Sapiens
  misc_feature (520)..(520): n is a, c, g, or t
ttttttttttcaacttaaccatactttatttgactgcatcttatttagacagcttgcacatttcaaatcccattaaatctctctccaaaaggatatgggacaatagaagaaaattatgcagcaatatccagtcaaacagcagtccaatattttgagatacacgtgatattttatagatactcaactcatatctgacgtcaatataatttatggttatgtttttacaaacctgaaagccctgtaacattacagcactcattttagtgatgtcatggtgcactgaaaagtaactctgatgtactaccaatttgattttatctatactcctgaaaagtgatgaacttcatgatttttagacaccataataaatatacacatccagtcttagacatgtcagccagtaccataacacagggcaaggtaaagttaaaacatgaaaaaacaaactgctttacatagatttgtcgagcaagtgggaagggtaatttgggaaagaggcagaaaatattataatcgattnttgtattttccttaatttggctggttcaacttcataaactaccggtctgggttctgatctgtggacttggctaagtagttcatcccaatga

SEQ ID NO: 3366 - DNA, 760 bp, Homo Sapiens
cccccacacaaatgggcctcaggatctcaggccttccacgtcaggggtgaccttccggagccccctggtgacttccagggctcgctcagttagcatttcagtgccatctaccccacgacgaggtggggccacccagaaaccaaagcccccttggaaatgatactctttcatcagggttgcctatggggccacggcgacaggtatggccccttgccaggtaggaggacattcatcacccaggaaccccaggtattaaagaagcccctgtgggggcagacagacatagcaggggtgggcagtgcctccctttatcctgacaatctctagtcgattcttgcctttttctcccgattgcggatttgggggccacctctaagatgcctctctccagccctgtctcaaccatactccaaattagtgccaacccaggggcctggcacctcccacatcatccattgtcttgctgccaagtgcgaataaacggtgtgatttgccaacctggagggtcccctcttatcccttcaagccaagcttcctgctcaggattagttccagctaagtctgcaagcctagaggagttttccaggctgtctgtgaagcctgggaacacacggcaactgggacattgtgagtgacctgttccatctaatatggtctgaatttatttcatgtctaatagttcagtcattaaaaaaaaaacaccaaacaacttcggcgccggcccagaaaattaaaccctgtggcgcggccagatagagta

SEQ ID NO: 3367 - DNA, 369 bp, Homo Sapiens
aaccaaaataactaattattaaacacccaaacacaatttatctgtatgtgtttatgactttcagattttcatattctcaatgcttctaactaaaatttggttcataaaaagtatcttatataaaacctatagtaaatattttaaaaatgtgcttttccatttttaataacatgtatttggtaaatacttgattcagagagccaatgaattagagtggcatatgagtttcacatagattcttatactaggtaagtatttaccaaaacatgtatcagaagcagaagtcgttaaaaaggtttaccagacaacaagactggaaagtgtattaagtgtgcctggcttgacatcttgttctggataatctagtca

SEQ ID NO: 3368 - DNA, 422 bp, Homo Sapiens
cggccgccccccgcgggtccctccctggctgcgggagagacggaggtagagggaggacacagagccgcgccgcccgcaccacagaccttcgcctcgccccgccggttcctcaccctcggggagcaacatggcagataatctcagtgataccttgaagaagctgaagataacagctgttgacaagactgaggatagtttagaaggatgcttggattgtctgcttcaagccctggctcaaaataatacggaaacaagtgaaaaaatccaagcaagtggaatacttcagctgtttgcaagtctgttgactccacagtcttcctgcaaagccaaagtagctaacatcatagcagaagtagccaaaaatgagtttatgcgaattccatgtgtggatgctggattgatttcaccactggtgcagctgc

SEQ ID NO: 3369 - DNA, 368 bp, Homo Sapiens
ctttttcgtgtcctgctgtgtaaaagacatcagatatattacagattttcaaacaggtgagcatccttttacgagctgggcaggtggggagtggcgtggttttgatggagtgaggagatttggttgaatgaacgctaagatggccagacgcacctcttcgatctcaactctgcagcctggggattccagagctgcaaacaaccactgaattcgttctgtaaacctgttgtcatttgacgtttccaggcaggcatcaacatttacattgtaattcaatagacgctactactacaaagggagcttattcttccagcttaatatgggttgctgcggggaacactgcagggatggaaactgactttttttgt

SEQ ID NO: 3370 - DNA, 370 bp, Homo Sapiens
  misc_feature (11)..(11): n is a, c, g, or t
  misc_feature (257)..(257): n is a, c, g, or t
  misc_feature (301)..(301): n is a, c, g, or t
  misc_feature (323)..(323): n is a, c, g, or t
  misc_feature (349)..(349): n is a, c, g, or t
cgctcgtcagngtcgacgagccatcctatggactagttaacactaaggtggagttcagacttttttagacaacggcgcgactggcagcctttctctatcaagggtcagacggtaaacgttttcagctttgcagaccagaggccctgtggctacagtagcgcagacacagccacaggcatgtcattgaatggctgcggctatgttccaataaaaacttatttacaataacaggtggtggccaaattggccatggcttnatttggtgaaccctgttctatgagatcacctaggcttcagcttnaaacagtggaagccatcccctngaatgacaagttcacaagggtatcanagaaagacccctgaattttca

SEQ ID NO: 3371 - DNA, 458 bp, Homo Sapiens
ggaaaaagagaaggctttatttcttgtaaacggtcgtagcctgcaaggtggcggccatctgtctgaggctgggaatctgtctccagccaaggccagagacaggcacgtccaaggaggaggggttggggcaggagcgctatgctgaagggattggctaaacatacatattcaacaggtaacaggaggagctatgaatattcatgaaggtggtcctgacacatgccctcttattgagcaaagcatgtaatatatgacccatgttcactttggggtggagacttaacatttacacatcttacaattagggcctttatggcaaaacgtcttttcaggacacaaaggcatgcaggtgcatcatctctctctattaacgggtcagctggtcggcatggtcagctggtcggtggtctcttatcaggagaaagtcactgaaatcagtctcttgtccaatcacagct

SEQ ID NO: 3372 - DNA, 411 bp, Homo Sapiens
tttttttttttttttttcctctgtgcatcctagaaaaactcccaggactagacttaggaggaggcaatcaagttatgtggtaaaacaagagtgccttttctgttggatatccactttagtttcctggcttccagggcataagatgtttagaaactttttttctctaaacataagaattattgtgtaccacaattttgaaccaccgatttccatatcttcagcagctatcaacttgccaattccctttgggtctcctttgtatattcttatgtttccttctgtttccagttgtcctcaaaaagagttgaggggggcatgactcttataaaatggataaaaatgaaactgtacagatgtttgcctcccttgtatctgtgagcatgatctctatcaggctggaaaatctgcttt

SEQ ID NO: 3373 - DNA, 259 bp, Homo Sapiens
gggtgatgttgatagatcagcgaacctggggtgcataaccttctttcattaaaccttcctcatagtccgtctggcaaaggatcatgttattctttaggaaaaatttgtctccaacacaaaatctctgattacaaagctgacatgcaaagcagtccaggtggtaaacattgtccttggcacgcatcaccatctcaaaggcagggatgagcttactacaggcagcgcagtttcccgttacaccaaagagcctcagatagtc

SEQ ID NO: 3374 - DNA, 325 bp, Homo Sapiens
cttccctggtgccgggagcagtcgccgctgccgcctccgcccgcggccgggacccccgtcctcgcccgggactccttacccggggaacctagaccaggtctccagaggcttgtggaagagaagcaggcgacccttcctgagttatcctggcttagcctcccaatctggctccccttccccttcccattcccctggtccccctgtcccttccccatccacccaactgaactgggtataggtcaaagctcctctccttccttttccttcctaggcactcattggctaggacctgtttgctcttttttttgtgcccagagatactgga

SEQ ID NO: 3375 - DNA, 1268 bp, Homo Sapiens
gccaggaccctggaaggaagcaggatggcagccggaacagcagttggagcctgggtgctggtcctcagtctgtggggggcagtagtaggtgctcaaaacatcacagcccggattggcgagccactggtgctgaagtgtaagggggcccccaagaaaccaccccagcggctggaatggaaactgaacacaggccggacagaagcttggaaggtcctgtctccccagggaggaggcccctgggacagtgtggctcgtgtccttcccaacggctccctcttccttccggctgtcgggatccaggatgaggggattttccggtgccaggcaatgaacaggaatggaaaggagaccaagtccaactaccgagtccgtgtctaccagattcctgggaagccagaaattgtagattctgcctctgaactcacggctggtgttcccaataaggtggggacatgtgtgtcagagggaagctaccctgcagggactcttagctggcacttggatgggaagcccctggtgcctaatgagaagggagtatctgtgaaggaacagaccaggagacaccctgagacagggctcttcacactgcagtcggagctaatggtgaccccagcccggggaggagatccccgtcccaccttctcctgtagcttcagcccaggccttccccgacaccgggccttgcgcacagcccccatccagccccgtgtctgggagcctgtgcctctggaggaggtccaattggtggtggagccagaaggtggagcagtagctcctggtggaaccgtaaccctgacctgtgaagtccctgcccagccctctcctcaaatccactggatgaaggatggtgtgcccttgccccttccccccagccctgtgctgatcctccctgagatagggcctcaggaccagggaacctacagctgtgtggccacccattccagccacgggccccaggaaagccgtgctgtcagcatcagcatcatcgaaccaggcgaggaggggccaactgcaggctctgtgggaggatcagggctgggaactctagccctggccctggggatcctgggaggcctggggacagccgccctgctcattggggtcatcttgtggcaaaggcggcaacgccgaggagaggagaggaaggccccagaaaaccaggaggaagaggaggagcgtgcagaactgaatcagtcggaggaacctgaggcaggcgagagtagtactggagggccttgaggggcccacagacagatcccatccatcag

SEQ ID NO: 3376 - DNA, 314 bp, Homo Sapiens
  misc_feature (196)..(196): n is a, c, g, or t
aaaattatggctaagaaaagatctactatcaagactgatctagatgatgacataactgcccttaaacagaggagttttgtggatgctgaggtagatgtgacccgagatattgtcagcagagagagagtatggaggacacgaacaactatcttacaaagcacaggaaagattttttccaagaacatttttgcaattnttcaatctgtaaaagccagagaagaagggcgtgcacctgaacagcgacctgccccaaatgcagcacctgtggttcccactttgcgcaccaaacagcctatcccagctgcctataacag

SEQ ID NO: 3377 - DNA, 546 bp, Homo Sapiens
  misc_feature (431)..(431): n is a, c, g, or t
agaccttaaagttacaaaaataaagtatttctatctcaggcaagtatttaatttcttaaaagctagtaagaaatgaaaagatcaatgtggagagaagtatgatttcttaaaaatgggtacatattttagttttttaattgtgaaatacattatgacctgtaagaacattgttcttcctattctattcagggtcattttaacatgtgagccttcagcttcattttgtacactacaaacaggaaaacataaacatcatgaatcagtttaggcagagatgtgattaagaattgtaaaagatggctttcataacatacataaaattccaaacactttgcatgtgaaaattttctgaattattaagcagtagggtgatctcagtgagacttggcttcatatgaaatgtttccattaaaattttaagtttgccttanaacaaaaaaaaacttggaaagcaaagctcccaaaccagctaagttagaaactgctcagtttctgaatgaaaatgacactgttttttatttttactctactgaattgaaagaacag

SEQ ID NO: 3378 - DNA, 462 bp, Homo Sapiens
  misc_feature (374)..(374): n is a, c, g, or t
  misc_feature (380)..(380): n is a, c, g, or t
  misc_feature (402)..(402): n is a, c, g, or t
  misc_feature (431)..(431): n is a, c, g, or t
  misc_feature (440)..(440): n is a, c, g, or t
  misc_feature (446)..(446): n is a, c, g, or t
  misc_feature (460)..(460): n is a, c, g, or t
gggccagcgatggcttcaggggtgatatttccaatatatatcagccctgggcactctcgccctgctgctcacagcatggtcctcacaccagcagcctccgccttacctgggagcttgttagaaatgcaggatctcccagatctattgagttagaagctgtattaacaagatccccagtgatttttatgcacaatcaagtttgtgaggcaccgctgcagacttctgagtgcaggaatgcggcagccctgggtaggtgtggttagaaggcctggacggggaggctgtgcggaggggatgatgaaagcatgggtgaggggagaagaccctaaacagctgtctttgttagtccccgcccacctgggcgggatgccagnaacaanggcacctgcagtcttgccctgnccttcctcccctcaagtgggtttggaggnaggtgtccntggagnttagctcttctggntg

SEQ ID NO: 3379 - DNA, 325 bp, Homo Sapiens
ttttgtaatactttatatcaacaaatatttatttagtgacatcgccagaaacaaagatggcttctggtatttcacacctagccttcgggaaggcctgttagacttgattttcctctctgccttggagagacacgaagttgctaagctaccatggggaaggcaacttctgctgtaattgctttcccagttttggtgctgccctagaatctttggttctccacgtttgctgagtcatcttcacactggcactgtctatagccactgtgttcttgtaaaaacaggctagaattactcccttgctcttttttccttttttttttttttt

SEQ ID NO: 3380 - DNA, 469 bp, Homo Sapiens
tgggatttccctcactaagggattacgcttgcggccgcataggtttttttttttttttttttttcacttattctttgtcttgttcttccattggaatgaagagtccaccatcttctatctcttcctcaggttggtgaaacagagtcctgagtggcttttcttgaggagaggcacaaacatctggctgggttgatttcctgggctggcttactggttttgcagattggctgcctgatggcagggaaggtatctccccttcagaattcatttgaggtttccctccttcttccttgacttcttcactaggcctctctgaaaaaggctcctttagggtaagatgatcacatctgtcttcttgggtaactggcccaggcctgagtgtcatttttttccctctctttgagccagtagcgtggagttttcctttaccaatgtgtatattaagggggtgaaaagactccaaggaagg

SEQ ID NO: 3381 - DNA, 643 bp, Homo Sapiens
cgttatcgccaaccctaatgaaatgctttctcctaagagcaagctgctggtgacagcttcaacatctgagaactgaatatatgtgtatttaggtatctaaggcaaacctatatatggatctagatatatcacatgtgatgtatatctaaatgcatatatatgtggtatacacatacgtgcacaagggaggctcatacacatgtatattatgaaggtactttgcagttgtgtttttattgtagagacttaatttatttaaagaaagagttgtctgtagtcctgtcctgtcctggagacatgaggggctgtctggtgtgaaggaaagtaggagggacagaaaacaccgtatcgattcagttccatcatccgctgcagtgacttcggaaaacagaatccagcatcccggtcctcccagcctcaggatgaactggtgaagagttgttctttgtgctgtggccagcgtgaccagggtgggctcctggcaatggccacgagaggtcaggagggggagctggcttagtggaaggtgtcggggataaatagtatttatcgcccaacaactattccaaatgttcatcgggtgagagggcgtaggaattatatccttcttgctcatcagttgatgatacgcccgagcagatgc

SEQ ID NO: 3382 - DNA, 841 bp, Homo Sapiens
ttatatctggaattgtcagcattcctgaaaacctacacgtgtatatcagtaaccaaaatgctatgcctttttgcaccttgtacagcagccaaatcatgaactcaaaagtatttgatcacagttctataagtttttacctacctattatggaataatcagtttttacagagattattaatatggtagaaccctgttatgtaattccaaaacttaagaaccatatttacatgcttaacacagaattttacatctaagcaaggactggctttagaagcaggtagttctacctctcattttacagatgagaaaaccgaagcccagaaaaactctcattgctcaaagtcacagagaaaattagtggcaaagccaaaaagattcagatcttctgactcgaagttgagagttctttatactctattatgctgcctctccagtgtaatatttgctttctgtaaatgggattaaatatgattgtaaataaaggaccatctgagctcctttttggtacattaaggcactttataaatggattttatgtctcatttttcgtatattattatttccatcatattctttattggaagatgccattaattttaacttttttactctttattaaaacagttccctgacatttcttacaacaccaatcatctgtaagaggtccttgtatgagtgaaattttctgctaatgcccaggtaaatcccatttaggatggtaagtccctaattgttaagggcctgacggtttttttaaaccgggtcttccggttcaccattatctggggggggtcccgcggaacgtggttaaatttaacccgggagggtaaggggaagaact

SEQ ID NO: 3383 - DNA, 408 bp, Homo Sapiens
  misc_feature (201)..(201): n is a, c, g, or t
  misc_feature (323)..(323): n is a, c, g, or t
  misc_feature (336)..(336): n is a, c, g, or t
  misc_feature (365)..(365): n is a, c, g, or t
attcggcacaggccaatagcaaaaatgatcgaaggaaccggaagtttaaggaagctgagcgtctcttcagtaaatcctcggttacctcagcagctgcagtaagtgcattggcaggagttcaggaccagctcattgaaaagagggagccaggaagtgggacggaaagttacacttctccagacttccacaatcaggaaaatnagcccagccaggaggaccctgaggatctggatggatctgtgcagggagtgaaacctcagaaggctacttcttctacttcctcaggggagtcaccacagcagccataaaaagcgaaagaatanaaaccggcacagnccgtcttggcatgtttcgattatgacttntgagattgatctgaagttaaacaaaaaaccacgagctgactat

SEQ ID NO: 3384 - DNA, 590 bp, Homo Sapiens
tagtcaatgaaaagagtatattcttttattggtttttgttcatacatgttaagtttcaactttcaataataaaattcaataaatttgattccttaatcataaaaactggctttacacattatttacatattgtcaaagtccatacaaaacatcacaaggatttgattgactctatgcatggtaccatcacacaggaggagggagcttatccagtaacatacattcaaagattaaattgcagatatgcacagagtatttggcactgtacattaatattataacaccttcctctcaaagacaggcattcttaagcgttagtcacgatataccagaatttgctattcacattaaaaccaccttttaaactttataacagtaaccgattattatagttttaagaaacaaaacacaatgagaactgggaatggaattcaaatcctccaacttcttgctatgctccaagctgccatccataaaacaggtttaattcggtaatttttccattgtggggagtgtcaacaagaaacaatttaaagacagtattttccaatgcaaataaagacacattctcttgtttaaaattaccaatt

SEQ ID NO: 3385 - DNA, 284 bp, Homo Sapiens
  misc_feature (52)..(52): n is a, c, g, or t
  misc_feature (92)..(92): n is a, c, g, or t
  misc_feature (94)..(94): n is a, c, g, or t
  misc_feature (137)..(137): n is a, c, g, or t
aaacaattagctggacctggtggtgcacactcagtaggctgaggtgaaaggnttcctttaacctgggagactgaagctgcagtgagccatgntngtgccactgcactccagtctgggggacaaagtgggaccctatntcaaaaaaaaaaaaaaaaagtcatcctcctccaactactgattgacatatggttcatcagttcagaccctcactgcatacaggttccctagagggttctatttaatagcttgaggaagggagactttaaaaggacgtgtgtgagtga

SEQ ID NO: 3386 - DNA, 272 bp, Homo Sapiens
tgggtggcttggcaggctcctgtctgtacccctccctaaccttctcaaaagaggtgcacagcctctcgggtgacttggaaactcctggacaaattccattctaacttattttgacatgtatacaaaccaactgtttagagattccacttgtgcaaagccctactgtgtttttatgttcctgtttaaaagagaagtttacttagcaataattataaataaatgaatattctttaggtgaggtgactgcaaatgcttctttccccagcagatcg

SEQ ID NO: 3387 - DNA, 318 bp, Homo Sapiens
  misc_feature (4)..(4): n is a, c, g, or t
  misc_feature (13)..(13): n is a, c, g, or t
  misc_feature (51)..(51): n is a, c, g, or t
  misc_feature (64)..(64): n is a, c, g, or t
  misc_feature (147)..(147): n is a, c, g, or t
  misc_feature (172)..(172): n is a, c, g, or t
  misc_feature (174)..(174): n is a, c, g, or t
  misc_feature (215)..(215): n is a, c, g, or t
cgcntggttagcntcggcggcttttggcatggcgactttttttggcccggntgggcaaatcctntcgcttaatccgcagaagatgtcgagtttcaaaaggaggtggcgcaggttcgcaagcgcataacccagcgaaaaaaacaagancaacttactcctggagtagtctatntncgccacctacctaacctacttgacgaaacccagatcttttnatatttttcccagtttggcactgtgacacggttcaggctgtccagaaagtaaaaggactggaaatagcaaaggctatgcattttttggagtttgagtctgagg

SEQ ID NO: 3388 - DNA, 497 bp, Homo Sapiens
ggtcgacgattgaattaggtattgagaattttgtctctctaaaagacattaagaacagtaaatgtcctgagggaacaaaacccatgctgatatttgctggcgatgatttcgatgtaacagaagattatagaagactaaaaagtcttcttattgatttcttcagaggccccacagtatcaaatatccgcctggctggattagagtatgttctgcacttcactgcactgaatgggaagatttactttcgaagctataagttgctgttgaagaaatctggttgcagaacaccacggattgaattggaagagatgggaccctcattggatctgggttctgaggaggacacacctggcatcggatgacctttataaattatctatgaaaatgccaaaagctctcaagcccaagaagaagaaaaatatttcccatgatacttttggtacaacttatggaaggattcatatgcagaagcaagacctaagcaaactacaaaccag

SEQ ID NO: 3389 - DNA, 639 bp, Homo Sapiens
cggaaagtgcgcttgccacatcccttcggatcacttcgtcctcccgagagcgttctgccttctacagctcggaaagaaagaaatcttagctgtgaagtgaccgtggagaaagcgcaggaagcgacacaattggttagggaggcagagagtgtgagcgggcgcaccccttgcctggggaccgcgctcgcgggcggggacggagcatcccagtggctgcacccgccgctccgcgctcctgcctggcgtcgccaaccccgcggcggccgctggaattccagagctgccaggcgctcccagccggtctcggcaaacttttccccagcccacgtgctaaccaagcggctcgcttcccgagcccgggatggagcaccgcgcctagggaggccgcgccgcccgagacgtgcgcacggttcgtggcggagagatgctgatcgcgctgaactgaccggtgcgggcccggggtgagtggggagtcttccctctgatccttccccagcacccggcccgcgcccgctctttgggcgaaccctccgtttcctgactttgagaggcgctttcccgcccgaccgccagagcagtttcgctttttttctttgcctattatcttgactgctggataaacccatgcagggacccatg

SEQ ID NO: 3390 - DNA, 616 bp, Homo Sapiens
  misc_feature (413)..(413): n is a, c, g, or t
tttttttgcccccgagacagagtcttactctgttgcccaggctggagtgcagtggcacgatcctggttcactgcaccctctgcctcccaggttcaagcgattctcctgcctcagcctcccaagtagctggtactacaggtgcgtgccaccacacctggcttattttagttattttagtgagatagggtttcaccatgttggccaggctggtctcggaactcctgactgcaggtgatccgtcctccttgggctcccaaagtgctgggattataggtgtgagcccccacgcctggccaacttgattatattaattttgggttttttgttttgttttgttttgttttttaatttttcaaagaatttgtggatcttggtataaagtcattggaacatatctgttttaacagcaaganatcctaggcagatacttcaaaaggttaaaaatccttaatcctacagaaattttaaatgaatcttatcaatgttttgtaaacaaacaatatgaatggccaaaaaattgccccccattttactggcaggtaatttatattgtcctacttaaaaatccccccctaatttttccaattgtactttaccgtgtttgtttccaatgaaa

SEQ ID NO: 3391 - DNA, 443 bp, Homo Sapiens
ctgtgctgatgtaccattaataatttaagccagtggttcttggcaggtgatcccaagacctgcagcttcagcatcacttgagaagttgttaggaatgcatactagtgggccccgccccagacatagtgaatcagaaaccaacagggaggcgcctagcattgtttttttaacaagtgctgggttattctgatgcacagtctagtttaagaaccactactttgggtaaacgttttgactgtttaaagtttatgggcggtgaagtgggcgtcttcaaagactagtacttacacagtttaggaagatttcaaggtactgctgacagtagtttattatgtcagtatacatacatgtgtaggagatcataatttagttcccttcttaatgttacatttcttagtttacttttcctaaagggccatagcctaattcttggatcccgggtg

SEQ ID NO: 3392 - DNA, 783 bp, Homo Sapiens
  misc_feature (559)..(559): n is a, c, g, or t
  misc_feature (569)..(569): n is a, c, g, or t
  misc_feature (582)..(582): n is a, c, g, or t
  misc_feature (618)..(619): n is a, c, g, or t
  misc_feature (640)..(640): n is a, c, g, or t
  misc_feature (655)..(655): n is a, c, g, or t
  misc_feature (657)..(657): n is a, c, g, or t
  misc_feature (697)..(697): n is a, c, g, or t
  misc_feature (774)..(774): n is a, c, g, or t
aagaaaaaaatggatgatttattatataaaattaagattggcagaatacagaaaattatttcttttacctttacatatttattgttaagtaccaagcaaagtgtaacaattagaagaactcattacaaactaccaaaatgtattcatttggtgaaattattcaagtcacaaatgcttagtaaataaatgtacttcaaaatacgtgaagtgtaaaacaagtatgaaaacagtgatcttaaacaatgattcctttcacaaaaactaaccaacaaacaagaagcacaagaaaaaggttgtcaggttagacagaaaaaaataaatcaaatgtattgttggttgggattgttaaactaaaatcattaaacgaaaaccagcaactagattcaaaagagagaaaaaaaaccgaaatgagtaattaggattcaaaaagaataagggtattacaatactatatctgttttcctactaatagcaagaaatgaggatttagatgccaattatgtcctgtagacccaggtgctctcaaagtatttgcactggtcttctaggtatgacatantaatgaactntactggtactcanaggtgagaaaacttacccattataaagggaaggaannacattatacctgatagagcanaaagatcacacattnanaatgatcaaaattcatctctagcattaccccccaccctcnatttagttgcctaagcattgggctggccttcctgctagtctcttctggtagcaaagaaaatgacatttccagggagntgaagtgaa

SEQ ID NO: 3393 - DNA, 476 bp, Homo Sapiens
atgtgaacatatatttacagtaaatattcaataatactttttacagcttacttaaatagaaacatgctttttctaatccataaataacactaatcattatccattcaactgcatttattaagtacttatgtctcatgcactgtgccagggatgcaaagatgaatatgatatggtccttgctgtagaagtgcccacaaccaagctaaagaagaaaacacgtaacattttctttcttacataatgaggccggttttatacaaatggtactgatctgctctttcctagtaaagtggttcccaaatcctgatcctatgggtcaacagatcaaaatgtttaacagttgaaataaaatgagatttgggtttcgtttttttactcagaaaaataaattaatgaataagatttcctctattaaagttttttcttggtttttaaaaaagtgacttgcacatatacaaccttttcattagtaaaat

SEQ ID NO: 3394 - DNA, 307 bp, Homo Sapiens
  misc_feature (98)..(98): n is a, c, g, or t
  misc_feature (125)..(125): n is a, c, g, or t
ggagtgcgcatccggacgtaggaggtggaggttgtggaattcgccgttcgaaagcagggactaaaagccccattttgtcttacgttccgaaaggaagngcgctgttgagcctttctctcagccgngagggaggcgtcgacggcgcgcggaagtcctgagttgaggcttgcgggatcctttccggagaaagcgcaggctaaagccgcaggtgaagatgtccaactacgtgaacgacatgtggccgggctcgccgcaggagaaggattcgccctcgacctcgcggtcgggcgggtccagccggctgccg

SEQ ID NO: 3395 - DNA, 557 bp, Homo Sapiens
tccttcttcaaaaattgttaagaatatttattaaaaagtgcaattcaaaagttagctgggcaagcacatcattgcaaatcacaaaaaagggtgaaaaaaccaaaacccccaaataaaaccacatgaaatacaaacaaaacaaaacaaaaaggtttaaaaaaaaagtgtgctgaggaatgcacccaaaaagacaaggaaatgagaagtcaaagctagaactctatccagatgttgctgttctttccaagtgcaaaagaaggtggtgaggagagaccagcagcctccaccaccgagttctggctctgggtccaaatactactttaatatcagattattcatcagggaagttataaaaatatcctatatacatgtgcacatttgaggcattttaaaaagtcatcagaaggttaaagttagtgtctcagcagtttcagctacttaaaaactcaattaaagcatctatcatttaaatttggattggctcagttatttgactgcagatgataaaatcaagctgtcatcttagggaaaaaaaagaaccaagtttacctacacat

SEQ ID NO: 3396 - DNA, 570 bp, Homo Sapiens
aattgccttcagcatcaccacaatctttttcctctgggacaatttcaggatcaagttttctcttcttggatggagtgtctttcccacaactagaactttcctttacaagatcatcttcaaactcttttctctttcttgctatgtctacttgcctacagacagaagtcttttcagaaagcccattcccagaagctgttgtgttttcattaatattgaatgaagactctgtttcaaaattcactgacgcttttgcctgttcaagagacatcttttcatattcttctgcttttgcagaatttgccatttatgattacttgaattgatggtaaaacttcatgaaccaacactttcaatgactttgtgaagctgagattttggtatcacagaaaatcaaggtgaaacaggaaatgaggttggtggtgcctatctgatttcgaggcttgaagttgtacagtacccaataggttcacacattcgcgttgggttgtgaagcacagggctaatgcgaagtgaacccatgtcaggggtgggagtgccaattccaccccttcacggcggccgagggacaaa

SEQ ID NO: 3397 - DNA, 390 bp, Homo Sapiens
gactttgaggatccccttcgacggcgttctggaatctggaaagaacactaattaacacaaacctgtaggtcactcacaaattgttcattcacagggacagttacaacaggctcagttccacgggacaaatgtgtcacaaagtccttgcttacaaactcctagctgaagctgccttgggaagaatctgctccctcagcatgatgggcagtagcaggcgactacactggaggtgctaatttttaactgccaatgtctcttctagacgatggccggctgatgtttcatcttcttcagcaaccctgaagcataacagcctttcagctgcctgtagcacgtacctacttgatctctgtgaatccactgaaagatgtgactctacaggcaaaaacg

SEQ ID NO: 3398 - DNA, 529 bp, Homo Sapiens
cggccgccaactttatttttttagtccgtttcatcctggccccgggctgtggcgagacagcccaactcccccagcccagctcccccagcccagagccagggaagaggaaggtggggccagtcccaccagtggggtggccacgcccatggggtcacatgctcaggggtcaccccctgcagggacctgatgccctcgggtgggagggaccgaggtccaccctcgggtcaaaggtcaacgtgcactttctccttgtcgcctgacagacattttattttactaagactgctgtaccgaacaagcatatttatcatcaggagacaggatgggtttaaagcaggatggtgtgtgtgtgaacgggcatgagcagaggtgagcgtgagcgagcgggtgtgtatgtacgagtgtgcacgtgtgtgcgtgtgcacagagggtgtggtgccagcttgagtgggagtgtgtgagtgtgagcaggcgggcgagtgcgtgagtgcacgccagcgcgtggcccatgtatgaggagtgaaggggc

SEQ ID NO: 3399 - DNA, 485 bp, Homo Sapiens
caaaatgttttgaaaactgtcacaaataattcttccaaatgaaacaaactgaattttctcaactcccttgtatattaccatctcagtgtaggaaaattttaacaccttaaaaatgaaacctgacaatgacaaattaatacatataaccattagagtgctgtgacttaacctctgtagctactgtggtccatttttgatgtctggttatattatgacattataactatcaccaaaaaactttttgattactcgctttagaaaagtgtcctgagcagtgcactattcatctttctaataacatgaaagtgaaatagaaaaaaaaaaaaatacatgggccactggcaaatgcaggatgcagactatttgggatgttttatggaaacaggcatgactgcaaacacttggtttgcacttggtttgattcatacaacgatcgagaagtgtggatggtttcttggaagtgccttctaagctgaaaggtaatc

SEQ ID NO: 3400 - DNA, 418 bp, Homo Sapiens
tccagttgtgtgtgtagactggcaagttttggaattttaaaggagtcccactttggccagtaaagtttcagattattttgggtaatttttgtccagagacttagccaattacaacacctcaaaccataattttggctcgtaaatccagctggagtgccagaaggcagctgaccagataggaagaactgaaagcatggcctactcattgcagtgacctgacaaacttgctcctttcagtgcccttactgtgagcatccccacaaaaccttatagactggcatagactgactgagaagcccttcctaaaccctgggccaacagggaaagtcctctccagcgtctggatggagagaactggctggaaaggcttcctcctaaacttggggtcaagaggaaatttcccctttgcagtctagat

SEQ ID NO: 3401 - DNA, 437 bp, Homo Sapiens
  misc_feature (11)..(11): n is a, c, g, or t
  misc_feature (326)..(326): n is a, c, g, or t
  misc_feature (428)..(428): n is a, c, g, or t
ttttttttgcnttattaggtcacacaaaacagaatgaattaagcagaaaaatgtatgttataaaacagcatttactacttcaatttaattttttttactaacaattgtggacctttttgatgacacttatgtatgtttttaataaattatgtacttattaagtacttaatgagcccttcctgcctcaatataaaattactaaacttggagaattacagattttattgtaggccctgatgttagtcactttggagaagctaaaaatttggccaaaatgaatgatccaatgatcctttaagttatctttatatttaatatagtgtgancctggggctacactgatttaaaaacatgctttttgaaaaatgtcttaggtaattggggcaggtaatcttcaggtggtgtttcaaaccacctacttgcacccnaaatcacgg

SEQ ID NO: 3402 - DNA, 303 bp, Homo Sapiens
taaagatgtaaaaatcctttaataaaaagtcagttttgttttgtttttttttttaaaaaagcatgccttcattccaaatccccagattccggctctcaggaatgtttcagggtaaaacttggggcaaagcaaggccgttatgatgggggtggatctaagaagccagcagcagggaggcgtggggtctgtgctctagcgttaaagggagggttctagactaacgagggcgggtcggcccgactaagtgacttaaactcccacctactcctggaataaaggagtcaaagcccggataggcgcagg

SEQ ID NO: 3403 - DNA, 342 bp, Homo Sapiens
ttttacaatccaaaaaaaatttatttccattttggaaaaaaaggaccagctccaatttaacaaatgtttattcttaggcaatataataaaataatattttagatataattactgaaatattagtacattaaaatattataatcttgtcaggatataacaatataaaatattcaatatattttaaatatatttcatttggttatagagtaaatattaaattaagtttagtcgcagtaagttacatttgatacatagagaatctttgtaagttagccatcaagttcaaatgtaagcgttttaatactttcataaataagttacttaataatgtttatcttgcgg

SEQ ID NO: 3404 - DNA, 394 bp, Homo Sapiens
gatgtaaaaatttgtttttaacggaagtaaaatttcccaataattttacaacttgttctacttcactacttacagtgcaccttccatatctgctatattttcttccattttcagagactacatagaggtaaataaagttgtcatgagatcctacagccaggaaggtaccatctattgagtagcgcatcacagagagctgttcattcccgtctgtgtggatagaaactagatctctggtttctgcatccagaacaaaccacctgcctgagtgcgttcctatggccaccactgtgccacttggatgaaaatctgcacagtgtcctggttcatctaccagcctggtccattccagcctgtgttccattgagttccacaggcacacctgcctgtccct

SEQ ID NO: 3405 - DNA, 733 bp, Homo Sapiens
gggtccacgctggaggagcgacgggtggtgaagcgtcgggcgactgctttgggagatgtcttggggctgccgtctgagtctccgctctcctcatcccccatggctttgatgtagctgccgctccgcatcctgcgggcaggggatctccccatccttgccaccggtggggtaaccccccagtcatcttgcggcacctgcagatagtgataagtcctggctttggccttggtctccggacccaggagccccttgcctggcccggcccccgggtatccatcccggccctggctgaccatcatggtatgccaggcacttcgcttgaccgactgtccatccagtgacatggacatgccagtgcaggcaaggcagcggccttccgacccgcccgagcgccccttgaagctcaagtcccggtagacccatctgggacctccaggcagaagggaccaccaggctccccagggggcctcccactcgccaggaagccgctatcactgtccaagttgtcatcggaactcagcagcctgtggacttggcctggtgcgcgcataccccttgcgtacttgctcttgctcctcttgccgttgccggactggtgggtgtggtgatggttgtcgttatggtggtgattggaggtgatgggggcatcagagcccgggcacgggtaggtgtttccttcagaggcacctccttcctcaggccttgggccaatatagtcccgcttcccggcggc

SEQ ID NO: 3406 - DNA, 452 bp, Homo Sapiens
ttggtgagactgcagagttgaagagtatcaagctgttgtgttacttcttctgcccaacgacaatttactagttctcgtagctggagtggagcacggcaatgaggacattgagctctctgctctgtcagccagcgcctaatacagctgaaacaacacagtttggagcaatgaggacacaggcgtgcatcccgcaatttctccatacaaatgaaacatcggaaaacctcagcaatgctctccacgctctgttcatccattgcctccggctctcggcggggccgctggcgacccgcaggctccgcagtctgacctcttaggcgccggcccgaggtcgccagatcaaatcgccgataaaagcccggcgcccacgtcagggggctctgacaaccgccccacctgcgcgccccatctcttcaggtccagcgccgcctacccccatttcgccattttta

SEQ ID NO: 3407 - DNA, 246 bp, Homo Sapiens
cacgaggggcggctacgtagctgccgccggccttggccgcggccgggcgggcggatatgtggcttaaatggcgcaggcgtcggggcctataggctgaagggctggtcgtcctaaaaactcgtggacgtcgcgcacggttacccggacgcaggcccgcccctctggggaaccgcgagctcctcgcagctgggtggggaccgtcctcgcagtggcggcctccaccctgccttctcgcttagccaaggc

SEQ ID NO: 3408 - DNA, 422 bp, Homo Sapiens
gctaccactatttgctgatagaacagcccaatgaataaacacatggctttcaggaatgccgttaacaaccaaaggcggggaaaaagccttttgtaggtgagttaaatttacagggatttccttgggacacacatagtttcctatattcccaaacatagtgtcttaaggcgtttctgttacaaacacaaaaatgcaaagaattctaacagggaaaaagtgttgatgcttgatttaagagtaagtgttatcgtgttcagtttttatatctcgacttaaacaaaaaacaaaacaaaaccaaacaccacatgttctcagtcgtaagagggagttgaacaatgagagcaaacacatggatacatggaggggaacaacacacaccagggcctctcagggggacagggggtaggagaccatcaggacaa

SEQ ID NO: 3409 - DNA, 334 bp, Homo Sapiens
tttttttttttttttatgtattcattgctttatttgtccttttcacgggtcactacattttagggcatttgatctataattggtagaacaggtttcaggcagggaggataggagcatcatcttccatccccatccacctccgctctttatcttgatgtcacaccaagtgtgatagcgcctccagcagtttcttcacagcttcagaagcctctggtcccagctcatttacacacttccttagcccctccacaaggtgctcaacagaaatgcccagagttttcagaagaagctttaatggatccataaagggaagaatgttgtccagaggtaaagg

SEQ ID NO: 3410 - DNA, 335 bp, Homo Sapiens
tttttttttttttttttttttttttttttttttttttttttattttcccaccaattatttattctttcaatcctaaaaaatacagacacttaacagggttctatttacaatgggcgcatccaggcaaaaatttccggacaggctaaaaagcaagaaaatgcgatccacaatcaggagaaaaatgaatcaacagaaactgattcaaaaacaaacaagatgcagatgctgctcacagaagtctaaaacgccaaggggaagcccccactgggttggacattttcttattccttatgtcatttaaagcacaactcccgagattttacgtgatataaccg

SEQ ID NO: 3411 - DNA, 667 bp, Homo Sapiens
aactccttctctcggcggacagtggcgctgaggccgccttgcaggccgaactcgctgaaatccaagagaaatggaaatcagccagcatgcggctggaagaacagaagaaaaaactagccttcttgttgaaagactgggaaaaatgtgagaaaggaatagcagattccctggagaaactacgaactttcaaaaagaagctttcgcagtctctcccggatcaccatgaagagctccatgcagaacaaatgcgttgcaaggaattagaaaatgcagttgggagctggacagatgacttgacccagttgagcctgctgaaggacaccctctctgcctatatcagtgctgatgatatctccattcttaatgaacgcgtagagcttctgcaaaggcagtgggaagaactatgccaccagctctccttaaggcggcagcaaataggtgaaagattgaatgaatgggcagtcttcagtgaaaagaacaaggaactctgtgagtggttgactcaaatggaaaagcaaagttctcagaatggagacattctcattgaagaaatgatagagaagctcaagaaggattatcaagaggaaaatgctattgctcaagagaacaaaatacagctccaacaaatgggagaacgacctgctaaaaccagccatgaaaacaaagc

SEQ ID NO: 3412 - DNA, 492 bp, Homo Sapiens
ttttgagtgtggaaacaatgggattgagcttttatcttagggaaaacttttacaagaaacagttcactgagagggttccagaaagttattgtagacctggaaactttacaactgttcctcatgtccagcaaaagcaataacatctttcatctttaaagctttaattctttaagcaatctactttaatcacttcaaggcggtgatatcattagatgttacaaaattaaagagctgggctacataatttttggaactctgcaccaaagaagccattcacaatggaaactgtggagtttcggtagatggcactcttttctctgagtgacaactcaaggtccagcatgtgaccgtagatgtagaacaggggctttcctgaggagctgtcctttagcctcaactataatcctggtaaactcacagccaatcattcttgatttttaaaaagaagcctgtagataagacatcaatccaggaatctgaagtagttaagag

SEQ ID NO: 3413 - DNA, 558 bp, Homo Sapiens
tgaagaaagatgaggccggagaaaactattccaaggatcaaggtggtcggacattgtgtggtgtaatgaggattggcctggttgcaaaaggcttgctgattaaagatgatatggacttggagctggttttaatgtgcaaagacaaacccacagagaccctgttaaatacagtcaaagataatcttcctattcagattcagaaactcacagaagagaaatatcaagtggaacaatgtgtaaatgaggcatctattataattcggaatacaaaagagcccacgctaactttgaaggtgatacttacctcacctctaattagggacgaattggagaagaaggatggagaaaatgtttcgatgaaagatcctccggacttattggacaggcagaaatgcctgaacgccttggcgtctcttcgacatgccaaatggtttcaggcaagggcaaatggattaaaatcatgtgtaattgtcctccgcattctgcgtgatttgtgcaacagagtccccacatgggcaccattgaaaggatggccactagaacttatatgtgaaaagt

SEQ ID NO: 3414 - DNA, 538 bp, Homo Sapiens
  misc_feature (451)..(451): n is a, c, g, or t
  misc_feature (498)..(498): n is a, c, g, or t
  misc_feature (505)..(505): n is a, c, g, or t
  misc_feature (512)..(512): n is a, c, g, or t
  misc_feature (536)..(536): n is a, c, g, or t
ttttttgctttcttgattttatttcaaaagtacacaaggtcacaaaactagagcaagttgtttttcttaacaaattttgttcttacaaatttcaaaatctgcaccattggatatataagccagaaatcgtacatacaaaatctgaaactgacactgtcagttctatactttgcacacgtgaagtgtcagaatattttcttcagtagtacaggtgtatttatcactaaaattcacaattagggaaaagaataagtgaatcaatgaattgtggttctcttaaaacttgtgtcattaaataagttagcagaaaacacaaagttctgttttgatggagcttttagtctcgatgaccaaaaccaaacccaactgatatgtactatattcttaaattataaaataagataaattataaaagttaaccataatgaataagaggctggggttatctgcnataagataaatgatcagccttccccaaaggataaataaactggaccnccattcnccaatgngggttaataatcctcccggcctcnat

SEQ ID NO: 3415 - DNA, 358 bp, Homo Sapiens
ttttttatgacctgagagactttatttacataagacaatctttgttcaccatgcagttcctctccttttcctctcataactgtcatcacctccccttcaagcccctattcattttatgctatgaaaccttcaaccatctgcctcctcctttgagtctcatatttttctgaggcttccatttgcatgtatgtaattaaaatggtctttctcttcttaatctgtttattgtcagttcatttcagcagacttaattatcaaacctccagagggaatgtttaagcttccctataacccccatgggaaacaacttgtatcaactaggaactgcttacttgcagttccttttgcctttagtctt

SEQ ID NO: 3416 - DNA, 4659 bp, Homo Sapiens
agcggctccgagccaggggctattgcaaagccagggtgcgctaccggacggagaggggagagccctgagcagagtgagcaacatcgcagccaaggcggaggccgaagaggggcgccgggcaccaatctccgcgttgcctcagccccggaggcgccccagagcgcttcttgtcccagcagagccactctgcctgcgcctgcctctcagtgtctccaactttgcgctggaagaaaaacttcccgcgcgccggcagaactgcagcgcctccttttagtgactccgggagcttcggctgtagccggctctgcgcgcccttccaacgaataatagaaattgttaattttaacaatccagagcaggccaacgaggctttgctctcccgacccgaactaaagctccctcgctccgtgcgctgctacgagcggtgtctcctggggctccaatgcagcgagctgtgcccgaggggttcggaaggcgcaagctgggcagcgacatggggaacgcggagcgggctccggggtctcggagctttgggcccgtacccacgctgctgctgctcgccgcggcgctactggccgtgtcggacgcactcgggcgcccctccgaggaggacgaggagctagtggtgccggagctggagcgcgccccgggacacgggaccacgcgcctccgcctgcacgcctttgaccagcagctggatctggagctgcggcccgacagcagctttttggcgcccggcttcacgctccagaacgtggggcgcaaatccgggtccgagacgccgcttccggaaaccgacctggcgcactgcttctactccggcaccgtgaatggcgatcccagctcggctgccgccctcagcctctgcgagggcgtgcgcggcgccttctacctgctgggggaggcgtatttcatccagccgctgcccgccgccagcgagcgcctcgccaccgccgccccaggggagaagccgccggcaccactacagttccacctcctgcggcggaatcggcagggcgacgtcggcggcacgtgcggggtcgtggacgacgagccccggccgactgggaaagcggagaccgaagacgaggacgaagggactgagggcgaggacgaaggggctcagtggtcgccgcaggacccggcactgcaaggcgtaggacagcccacaggaactggaagcataagaaagaagcgatttgtgtccagtcaccgctatgtggaaaccatgcttgtggcagaccagtcgatggcagaattccacggcagtggtctaaagcattaccttctcacgttgttttcggtggcagccagattgtacaaacaccccagcattcgtaattcagttagcctggtggtggtgaagatcttggtcatccacgatgaacagaaggggccggaagtgacctccaatgctgccctcactctgcggaacttttgcaactggcagaagcagcacaacccacccagtgaccgggatgcagagcactatgacacagcaattcttttcaccagacaggacttgtgtgggtcccagacatgtgatactcttgggatggctgatgttggaactgtgtgtgatccgagcagaagctgctccgtcatagaagatgatggtttacaagctgccttcaccacagcccatgaattaggccacgtgtttaacatgccacatgatgatgcaaagcagtgtgccagccttaatggtgtgaaccaggattcccacatgatggcgtcaatgctttccaacctggaccacagccagccttggtctccttgcagtgcctacatgattacatcatttctggataatggtcatggggaatgtttgatggacaagcctcagaatcccatacagctcccaggcgatctccctggcacctcgtacgatgccaaccggcagtgccagtttacatttggggaggactccaaacactgccccgatgcagccagcacatgtagcaccttgtggtgtaccggcacctctggtggggtgctggtgtgtcaaaccaaacacttcccgtgggcggatggcaccagctgtggagaagggaaatggtgtatcaacggcaagtgtgtgaacaaaaccgacagaaagcattttgatacgccttttcatggaagctggggaatgtgggggccttggggagactgttcgagaacgtgcggtggaggagtccagtacacgatgagggaatgtgacaacccagtcccaaagaatggagggaagtactgtgaaggcaaacgagtgcgctacagatcctgtaaccttgaggactgtccagacaataatggaaaaacctttagagaggaacaatgtgaagcacacaacgagttttcaaaagcttcctttgggagtgggcctgcggtggaatggattcccaagtacgctggcgtctcaccaaaggacaggtgcaagctcatctgccaagccaaaggcattggctacttcttcgttttgcagcccaaggttgtagatggtactccatgtagcccagattccacctctgtctgtgtgcaaggacagtgtgtaaaagctggttgtgatcgcatcatagactccaaaaagaagtttgataaatgtggtgtttgcgggggaaatggatctacttgtaaaaaaatatcaggatcagttactagtgcaaaacctggatatcatgatatcatcacaattccaactggagccaccaacatcgaagtgaaacagcggaaccagaggggatccaggaacaatggcagctttcttgccatcaaagctgctgatggcacatatattcttaatggtgactacactttgtccaccttagagcaagacattatgtacaaaggtgttgtcttgaggtacagcggctcctctgcggcattggaaagaattcgcagctttagccctctcaaagagcccttgaccatccaggttcttactgtgggcaatgcccttcgacctaaaattaaatacacctacttcgtaaagaagaagaaggaatctttcaatgctatccccactttttcagcatgggtcattgaagagtggggcgaatgttctaagtcatgtgaattgggttggcagagaagactggtagaatgccgagacattaatggacagcctgcttccgagtgtgcaaaggaagtgaagccagccagcaccagaccttgtgcagaccatccctgcccccagtggcagctgggggagtggtcatcatgttctaagacctgtgggaagggttacaaaaaaagaagcttgaagtgtctgtcccatgatggaggggtgttatctcatgagagctgtgatcctttaaagaaacctaaacatttcatagacttttgcacaatggcagaatgcagttaagtggtttaagtggtgttagctttgagggcaaggcaaagtgaggaagggctggtgcagggaaagcaagaaggctggagggatccagcgtatcttgccagtaaccagtgaggtgtatcagtaaggtgggattatgggggtagatagaaaaggagttgaatcatcagagtaaactgccagttgcaaatttgataggatagttagtgaggattattaacctctgagcagtgatatagcataataaagccccgggcattattattattatttcttttgttacatctattacaagtttagaaaaaacaaagcaattgtcaaaaaaagttagaactattacaacccctgtttcctggtacttatcaaataacttagtatcatgggggttgggaaatgaaaagtaggagaaaagtgagattttactaagacctgttttactttaccttcactaacaatggggggagaaaggagtacaaataggatctttgaccagcactgtttatggctgctatggtttcagagaatgtttatacattatttctaccgagaattaaaacttcagattgttcaacatgagagaaaggctcagcaacgtgaaataacgcaaatggcttcctctttccttttttggaccatctcagtctttatttgtgtaattcattttgaggaaaaaacaactccatgtatttattcaagtgcattaaagtctacaatggaaaaaaagcagtgaagcattagatgctggtaaaagctagaggagacacaatgagcttagtacctccaacttcctttctttcctaccatgtaaccctgctttgggaatatggatgtaaagaagtaacttgtgtctcatgaaaatcagtacaatcacacaaggaggatgaaacgccggaacaaaaatgaggtgtgtagaacagggtcccacaggtttggggacattgagatcacttgtcttgtggtggggaggctgctgaggggtagcaggtccatctccagcagctggtccaacagtcgtatcctggtgaatgtctgttcagctcttctgtgagaatatgattttttccatatgtatatagtaaaatatgttactataaattacatgtactttataagtattggtttgggtgttccttccaagaaggactatagttagtaataaatgcctataataacatatttatttttatacatttatttctaatgaaaaaaacttttaaattatatcgcttttgtggaagtgcatataaaatagagtatttatacaatatatgttactagaaataaaagaacacttttggaaaaaaaaaaaaaaaaaaaaa

SEQ ID NO: 3417 - DNA, 346 bp, Homo Sapiens
  misc_feature (318)..(318): n is a, c, g, or t
  misc_feature (336)..(336): n is a, c, g, or t
ctagtttgagaatacttttaagcctgctggcctcctttggggcattcttttttctcttttcagcacgcatctttcttttccacttactccgtaagcttttagccatgttttacctgagaaacgaacacccacacctcacgctcacgccgaccggcatggacagtacccaatatggatgaaccaaaggcaaagaaaaaggctgaaggcaaagcgagagaaaagaaaggggaaaagcaaagcaaaagcagtggaaagtgggcaaagggtttggcctggtagactcttaaaaccttgggaaaatggccacatggggatagntggacgggttagtatgtnttacacatgg

SEQ ID NO: 3418 - DNA, 352 bp, Homo Sapiens
tttttaatgatatattttgaattttattttcttctctgtaggattctaggtggataacaacttctcctgctacttttttttacaatatggatcactatggtattgggacaaggatagcacagaaaacaactagaaaaagtatattatttgtgactgtaaagtctttgtgaaagttcttttcaattgctcttgcactcattgtagaaactttatcccaaggaaataatcttgatttatgacccctttctccacttaaatgttgaaaatttaatttccagagctcttcatgataaggggaagatatgcctcacatgtattaatcataggtgatttgttaacaggcatattcata

SEQ ID NO: 3419 - DNA, 343 bp, Homo Sapiens
ttttttttttttttttttttttttccatgttctcaaagatgatttattagctatcctcactcatgggaaaaagaaaaacgtaaatgaaatcaaaacaaaacaagatgaaaattgatacaaatggacccctggggctttcacgtctgcagcctacgtacaggaggccccatcaaaagaaatgacgctttaatttctgctaaggtctacggtctaacgtggtatgataaggggattttttaaacaaagaaactagaatgcttactagcccatgagtgacatgtcttccaagcccacatggccacacttgggaattgctgggttcctttttgggtttttttttttt

SEQ ID NO: 3420 - DNA, 266 bp, Homo Sapiens
tttttaaaattacacttcattttaatgttgtatcagtcaaggtccctgcaagagatggatggtatggtacactcaaactgggtaacacaggagagttttcagaaagcaactaaatccaaaatactatcaaggaatcaatataaaaattgttaatatttttctcatactaaattttcaaaatattttgtgtctattacatttacagcacatcttaattaggactagctgtgtgttcacctcacatgtggcttgtagctaccatactg

SEQ ID NO: 3421 - DNA, 469 bp, Homo Sapiens
tttccgttctcttggcccggctgacagagttagccgaggccgccatattgaataagcgacccggcctcctagggggtcgtcgtggtccagacagtttagcagaacagcctccgcggctccggggagaagcaatatgttaaggatacctgtaagaaaggccttagtaggcctttctaagtctcctaaaggatgtgttcgaacaactgccacagcagcaagcaacttgattgaagtatttgttgatggtcagtctgtcatggtggaaccgggaacgaccgtcctccaagcttgtgagaaggttggcatgcagatccctcgattctgttatcatgaaaggttgtctgttgctggaaactgcaggatgtgccttgttgaaattgagaaagcccctaaggttgtagctgcttgtgccatgccagtaatgaagggttggaatatcctaacaaactcagaaaaatccaaaaaagcc

SEQ ID NO: 3422 - DNA, 229 bp, Homo Sapiens
ttttttttttttttttttttttttttttaaatttctcaaggacactttattcaaggaccacagagtttacaccaactacccaaaagccaggaatagcttaaggagagactcaccaccagcagctttttttcaatcaagtttcacttcaacctcacacccaggaacccattcaaattcctacatttcggtatccttagtcgaactaacttcctgggcccggaagcttttg

SEQ ID NO: 3423 - DNA, 614 bp, Homo Sapiens
tgtttgtcaacataattcttcatgagtcacaagtattatagccaagaacaaaacaacaaaaagctgaatcagttgatagttactctgatttaaaaaacatttcacaaataagatgtagctttccaaacaaatccattcgatgaccattatcacaactatattttattctaatttataaacaaaaaatggttagacaagcacatgatgtcaagagtcttcaacacagtggattccattttattaagaaaaaaaatagaaaacaagtagtccttaaattgtcttagctctccatagcatacgttatataaaattaaagttttgcttccaaaaatatgtttccatgtggtcgtggtgttgtccagtgctattagggccaaagcaccaaagacatgagaagtttaaccatcgacttgtcatttttcataaaaactaaacatttccttataggtctggagtaaaatcttctaggcattttagtgctaaaagtcactttaaattaaatgtgaaataaaagctacaaaaagtatgagttctttcaatacaaaaagttgtgtagctgaagttgtgggctcctttgacatacataagcagtttcaataaaatattgctcaggt

SEQ ID NO: 3424 - DNA, 505 bp, Homo Sapiens
cttatgactcgcactgaagcgccgattcctggcttttgcaaggctgtggtcggtggtcatcagtgctcttgacccaggtccagcgagccttttccctggtgttgcagctgttgttgtaccgccgccgtcgccgccgtcgccgcctgctctgcggggtcatggtgtgcttccgcctcttcccggttccgggctcagggctcgttctggtctgcctagtcctgggagctgtgcggtcttatgcattggaacttaatttgacagattcagaaaatgccacttgcctttatgcaaaatggcagatgaatttcacagtacgctatgaaactacaaataaaacttataaaactgtaaccatttcagaccatggcactgtgacatataatggaagcatttgtggggatgatcagagatggtgcaaaatagcagtgcagttcggacctggcttttcctggattgcgaattttccaaggcagcatctactattcaattggcagcgtctcatttt

SEQ ID NO: 3425 - DNA, 604 bp, Homo Sapiens
  misc_feature (511)..(511): n is a, c, g, or t
  misc_feature (584)..(584): n is a, c, g, or t
  misc_feature (601)..(601): n is a, c, g, or t
gagattaatgctttgaggctggatatggtatttctacggatttctacaaatgtaccaaagcagttttccagattatgttgcatcaggctttctggattagtcaacattttagagaataagtgcaagtccccaccccacccccacccccccaagctaaagcatgttatagtgctgtactttagattcaaacaatgcaacatttaaaaaaatcaattatacattctgaaaccatttgacaaccaaactgtaacactccaaaggttattacaactttgaactgaaatggtaccatctatatcatagatggctctcccttcttttgtcttttttaactatttaaaatatagtatgacatatataaaaattaaacttttgcatattcactcaagctactattactatacatactggtcttataaattagttttgggattaaaaatccagttaaaatattggtggaaataagatatttcagtgggtgggggaagtgggatatgggaaatggataccnggtccatggtggtaaggaaggaatataggttattaatgggttaacagccttttttccttacaccaattttatncccctccaaattaaatnggg

SEQ ID NO: 3426 - DNA, 564 bp, Homo Sapiens
ttttttttttttttttggaatcaatccaagttttattagtgctcaaatgtggataaatacattatggtataagtcaatcaacagaatacaataaaacaataaaaatgaataaactacagctacattcaatagtctggacaaatatcataattataatgttaagtgaaagaagccaggcacaaagaagataaattgtttaggtctataaaattcaaaaaaaccatgcaaaactagcctatggtatttggatgtatgcttccacggcaaaaccataggagaagtatggaagtgaatgccataaaattctgggcagtggttacctttgtgtggagagtgaggagactggtattgagaagaaacatgaaagggcttctgggtgctggcaacattccaaatttgacctggttggtggttacatgggggttcattttgcggtaactcagtgggcttcacttttctgtatgtttgtcatgtttcacaatgaaaaagttaaaagcaaatagaaaatgatactccggcgcttaaaagaatgcaacagcactttgaacaacttctaacaccttt

SEQ ID NO: 3427 - DNA, 396 bp, Homo Sapiens
tttttttttttttttgcattcttgaaacaattcttaatcatttattttcaacacgtgtactataaagaacctaagaaatcagacaattttaataacccataaacatgttgaatccatttgcagatttaaattttgtaaaaatagctgtcactgcctccatatatcaagtgtactatgtttataatcacatttatgctaccgatactcctcagaaaaaaacagattctgcttggttctagcttcagtattatgaactccaataatgctttgaggacctccaaaggaaaaaaacagattctactaggttctagctgaaatattatcaactccaaattgaagctgaagtattatcaactccaaataatgcttcgaggacctccaaaaaaaagagattct

SEQ ID NO: 3428 - DNA, 406 bp, Homo Sapiens
  misc_feature (12)..(12): n is a, c, g, or t
  misc_feature (57)..(57): n is a, c, g, or t
  misc_feature (159)..(159): n is a, c, g, or t
  misc_feature (171)..(171): n is a, c, g, or t
  misc_feature (291)..(291): n is a, c, g, or t
  misc_feature (311)..(311): n is a, c, g, or t
  misc_feature (362)..(362): n is a, c, g, or t
  misc_feature (390)..(390): n is a, c, g, or t
  misc_feature (399)..(399): n is a, c, g, or t
tatatctagaantcaacttttagcctattcttactgacctagagaataataagctcnttaaatgacacccttaatgaaaactgtcacataattttcctctaaagtcagcgatattttttaacaatcatattctttatagaattcctaaatctgggtttntgaaaaaagaanctagtgaccatttaaaattgttggctctattcccactgcttctagtggactagcctgaaaaaaatatttttccatgtctgcgtatattttataccttatataatgtcctctctggaaatncatgggagggaatttaaggnaggagaaaattggataatcatgacttacttagtttctttgggaatatttgncattttagacacaacattcagtaggcgnaggcaaggncacaacc

SEQ ID NO: 3429 - DNA, 453 bp, Homo Sapiens
atctataaaggtcagtttcagaaggtaacagcatgagactagtcttcctataggcacattttagtagactgctcttctcatccctggtcaaggagcttctctaactgatggttgatatttcgcagatggctttcggctcccagaagtgttcttgctttaaataacagagctggaaggctggatgaatcatacgtttcctttacgtttggttcttgagcttgaacatctgaataatcttgataaagctgttttaaattagataaaaaatatgctgcattcctaagggaagactttctctctttaagttcatcatattttgtttgtagttgtttcagctgtggctctaacctaaaacaaaaataagtgacaaataataaaatgtaccagcctatcgtggtgaaactgaggttgtcagtacgctgagcgagtgtgaagaaccggggctggccaact

SEQ ID NO: 3430 - DNA, 501 bp, Homo Sapiens
tataaacaatggtcccagaaattttaatgagcaaaaaccactgaacaattacaccccaagtctcaaaaatatcaaggaaatataatccacaaagagcgactccaaatgtcaaaatcaataaagaatagtctctgcagtgcattcattgaattcaaataattcaataagaaatttaatttaacttcattaccaactttctgaaaagcacacccagcaagtccttgattagggttctttacattcttctgctgcatctttagtctcctgctcatctgctattgtattctctggagaactgagtttcagatgttggtcttctgatgaaaggctcacactgataccatacagtggatcatctaagaaggagggccttttcagtctcccaatgccaagagtcttcgacataaaatagtcttttgtgtcactaataataacgtccttggaaaattgaaggcatttcatattctctgcttcagtgacaagagcttctgacatgttatg

SEQ ID NO: 3431 - DNA, 478 bp, Homo Sapiens
  misc_feature (295)..(295): n is a, c, g, or t
  misc_feature (373)..(373): n is a, c, g, or t
  misc_feature (405)..(405): n is a, c, g, or t
cacattatgtatataattagtttatatttacacactagcatataggaaatatttctgcacttgaccctatttgaattctgagcattatttataagtataaaatgatgatatataagtgaattttgtgctcttgtttgtattttattaaggaaaatgaaaataatctggcatcagtttcattttgctaaatatctagtcttcttcaaacagtatcttggtgggtgacttggctacctgaaaaatcttaggaggaatagctcacaatacaataaatctgtagattctgcttagagcnaattatggtacttttattcagacttgtttccttctagttaacagaaatagtgacattagaggtttaatcagaagttangtttttctgattcaggaacatcgtgggcagcntttgtaatttttaacttgagaaccaattttgtgagaataggtagtgggttgccgtagttaaatggatttaaaa

SEQ ID NO: 3432 - DNA, 344 bp, Homo Sapiens
tttttttttttttttttttttacagggttgtcttttgtttatttttcaggttacacggggtgggcacacaacctcattgccattgctcgtcttcggggctctgatctgaaagtgcttgaagtcaccgaagaaagcattgattttgaccaaggtgaactggccgaccaggatgtagatccagtgcataaccttattgagcaggtatccctgggcctgggtcaaccttggcatgcagtcatggacatcgaatcactcagtgtcttcactgaaccaaatcgtcatttttacagagagatgcaaagcttcagtgaagacatttagcttttttttaatgtagaattcct

SEQ ID NO: 3433 - DNA, 1510 bp, Homo Sapiens
ccctactatgagaaaaatgataccccatataggattgccatagacttattattcgcatgactgaaaagagtaattatagctatagagtgataaagctttgctctatatgcatcgatgcatatgcatgcatacgtcatagcaaacgcattttaaggaaacgggcgtaggtatgcgaataaagcataataataaaatacaaagtaattaaagcctataaccccaaatagtatacataatacccataataccaaattcaaatatataataccccccaaaagttgcttatgcaagaaaattcaaggatattatccaataaatatataaatattagatgatgtgtaatatccttagttatatgggaatggtttaaggttagttagcgttttagtaggttaatttgggaccctaatcgagtagcttttcgtgatgagtaatttaggtagttagttactatataaggtagtattagttagtttaccgtattagtttaacgtatacgttacgtatatcgtcttacgttacgtgtatatgcgttactacgtagtagtaacgtaagattagtagtatacgtagtatacgtggaataatgttttggggtttgtgtcgcgcgcgcatatatcgctattagctacgtcgtaaacgtaccgcgcttaagtaggaagagtagctcattacagtattaggacgtatactaattatatgccgtagtagtagctacgttacgtatacgtacgtagcgagttagttagcttacgtacgtgagccctacgtacgtattaaaaagtgtatatagtagtagtatgatatatcgggtattagttatacgtttatatatatatatacgagctacgttaacattagctgctacccgcgcgagagagatatatatacgtatatttgcaggatcgtagtgtagttgcagttacgtacgatacgtgattacgttagtagtagtttttaggtagtacgtatatcgtacgtagtaatagctttttaatacatatacgtgtcaatgcgttagctacggtgaaacacgtactcagcatattaaagtagcgtcgccctagtatcccatcgcccaaatgctatgctcggcgtccattgcatccaaatataatgagatgcaataaaacccccgggggttaaacgtatgtatgcataaattagtgaatatcaaaaaagtaaataatagaaaagtttaaaaatattaacgccaaaggataataaataataagacccataaataaataaaaccataaaataaaatcccaaccacaacgcatcacacccacacgtaactacccatcacaaaagtaacgtaactagcacagttaaaaggatatcgctactcggactacggcggactagactagcgcgatcggctaatcggatcgcgcgcggtcataccgcgtcgcatcggcgctgtatacgcgcgatcgggcgcgcgatatatcgtagcttcgattcgctctacgctcgcatgcgcgctcaggatgatacttctttttca

SEQ ID NO: 3434 - DNA, 256 bp, Homo Sapiens
actggttactaactactttaatgcaggagctcgtggataaaaaagatgagtggataaaaaagcaagtgagtattcacaacagcatgacaaacaacacaggtatactcacatatatggcatttgataatcagagacagcactttagctgcctttcttcactgcctagagaaatgggcagcaatcaaggcattcaaaggtctacctcctttccttcttccaaccataaaaccaccctaactcaaaggaaaggtatttt

SEQ ID NO: 3435 - DNA, 1798 bp, Homo Sapiens
agacttgaacttgaatctcgaaccactgcatctccgactctgcccagactcttcactccgcggcaccctcaaaccccagcccaggccggggcgcacaagccagccagcgcacctgcagtcctcgcccggacgcgccgcgccccctcggaaccaggctctgctccgagcagccttcgcccctcaagccagccacagtccccgccaggccgggtgggcgtcaagatgaaggcggcccgcttcgtgctgcgcagcgctggctcgctcaacggcgccggcctggtgccccgagaggtggagcatttctcgcgctacagcccgtccccgctgtccatgaagcagctactggactttggttcagaaaatgcatgtgaaagaacttcttttgcatttttgcgacaagaattgcctgtgagactcgccaacattctgaaggaaattgatatcctcccgacccaattagtaaatacctcttcagtgcaattggttaaaagctggtatatacagagcctgatggatttggtggaattccatgagaaaagcccagatgaccagaaagcattatcagactttgtagatacactcatcaaagttcgaaatagacaccataatgtagtccctacaatggcacaaggaatcatagagtataaagatgcctgtacagttgacccagtcaccaatcaaaatcttcaatatttcttggatcgattttacatgaaccgtatttctactcggatgctgatgaaccagcacattcttatatttagtgactcacagacaggaaacccaagccacattggaagcattgatcctaactgtgatgtggtagcagtggtccaagatgcctttgagtgttcaaggatgctctgtgatcagtattatttatcatctccagaattaaagcttacacaagtgaatggaaaatttccagaccaaccaattcacatcgtgtatgttccttctcacctccatcatatgctctttgaactatttaagaatgcaatgcgggcaacagttgaacaccaggaaaatcagccttcccttacaccaatagaggttattgttgtcttgggaaaagaagaccttaccattaagatttcagacagaggaggtggtgttcccctgagaattattgaccgcctctttagttatacatactccactgcaccaacgcctgtgatggataattcccggaatgctcctttggctggttttggttacggcttgccaatttctcgtctgtatgcaaagtactttcaaggagatctgaatctctactctttatcaggatatggaacagatgctatcatctacttaaaggctttgtcttctgagtctatagaaaaacttccagtttttaacaagtcagccttcaaacattatcagatgagctctgaggctgatgactggtgtatcccaagcagggaaccaaagaacctggcaaaagaagtggccatgtgaagagggacactcaggacactttacgggatcaaagtgggtctacaccagtgctgcttcctgaatgtttgtgtgtgaacccttgtttcctccaaaacaaacgacagcaacgaaaactccttaatcagaacactgatccaatgaggaatggagcttgtttctgtgacccaggagaacttagtgcaagactacaggagttaacagatggccagctccttattttttaatgtagaataactcctgagtttatatcaaatcctgaagaaataagcctcagttttccatctgtttttgataagaataagaaagggagtgagtgtgaagatggtggttagcagtttcg

SEQ ID NO: 3436 - DNA, 647 bp, Homo Sapiens
  misc_feature (10)..(10): n is a, c, g, or t
ttagagctgncaaagacctttattcagtcctggagtggagctggcctgacagggtgaagcaggggctgcttagggcgggccagaccctcagcccctgagcaggtcaggccggccaggcggggctggtaggtaccaggtgccagcagctgcagggcaaactcagtgatgacagctgtgaggccccagacccggtgtggtccatgcaggaagacgggtagtgtgtagcggaagtggccaccccggcagaagtgggtatagccctgattctgcgtctgcagcaggtgggccagcggcagtgcaaacacttcatctacctcctccgagttgggcctgaggctctggggatccagtgggcctacaccagcaagcactggcaccacggtggccttttgcggatcatacacaggccgcagcaggccccacacgtgctcctcgggcactgccaggcccagctcctcccgggtttcccgcagggccgtgtgcaccacatcttggtcagccgggtcgcacttgccgcctgggaaactgacgtcgcccttgtgcctcccggtcaggcggctggaccgcagcgtgtacagcagcgccgggaccccacgcactgagcagagcgggacgagcaccgcgggcgacgcgggccgcgcgcggag

SEQ ID NO: 3437 - DNA, 483 bp, Homo Sapiens
  misc_feature (405)..(405): n is a, c, g, or t
ttttagggctgagaaaatattcagtttattaaatattgtgaatgggtggaatatcagatacatcatctcaatatgtaaatatcctatcccatctcaacatcaaatttagattacctggatttcttctttgcttttctctatgattacaacagagatcattatgtattttattagtttcttcagtctttaagatattttttgaatgatgttcaaataaactccaagttatctccaactttttctgaacaaaatatttccattcttaagatacaggcttgtaattcacatacttgatgctactcaatggcgtcttatctgtattttcttctcacatttgactccagagtattcagtgcggcaggaacacacattgggaaatatgcatctgcctccataaagacattntgggttgcaaattggtatttgacaccgcactccttcccaggaggaaggacaatggcatatgctgggcgcaatgcattc

SEQ ID NO: 3438 - DNA, 386 bp, Homo Sapiens
gcggccgccggccggggtcccattcagagggcgggcgtgaggggcggcggggctgggccgggcgccccaccctttgttcttggcccgggacctccttcgtcccagggctgcgtgtcccgggctgggatcccccgagccacccggaccgggttgcgctttggagagggaagggggtattctcccggactttcagtccacaaccctgctaaggcccgggcggccggagaggggacttggagcaccggggagggatgcgccccgctcttctagtagctttgttcctcctcgcctggggccgtcaccccactcctacccctcctctgactccgggacctcctgagaaacttcgcctcccggttcagcccttcgtcttgtgaaggtctcgc

SEQ ID NO: 3439 - DNA, 443 bp, Homo Sapiens
  misc_feature (192)..(192): n is a, c, g, or t
tttccttccttttaagaagaaatgctaatgtcaacctcaaaaaccagaaagagagaacctgcttgcattatgctgtgaagaaaaaatttaccttcattgattatctactaattatcctcttaatgcctgttctgcttattgggtatttcctcatggtatcaaagacaaagcagaatgaggctcttgtacgantgctacttgatgctggtgtcgaagttaatgctacagattgttatggctgtaccgcattacattatgcctgtggaaatgaaaaaccagtctcttatccctctgctcttggaagcccgtgcagaccccacaataaagaataagcatggtgaggagctcactgggatattgcacgggaggattaaaattttcccagattgaattaatgctaagggaaagcattgtaatccttgtgaccacaccggatggaggta

SEQ ID NO: 3440 - DNA, 368 bp, Homo Sapiens
  misc_feature (13)..(13): n is a, c, g, or t
  misc_feature (39)..(39): n is a, c, g, or t
  misc_feature (41)..(41): n is a, c, g, or t
  misc_feature (55)..(55): n is a, c, g, or t
  misc_feature (59)..(59): n is a, c, g, or t
  misc_feature (62)..(62): n is a, c, g, or t
  misc_feature (169)..(169): n is a, c, g, or t
  misc_feature (173)..(173): n is a, c, g, or t
  misc_feature (299)..(299): n is a, c, g, or t
attcggcacaggngcgttcacccgctgcccgggcgcgancngccggctcagcgancggnctntctagaaccgggtgattgaactaaaccttcgccgcaccgagtttgcagtacggccgtcacccgcaccgctgcctgcttgcggttggagaaatcaaggccctaccggnttcncgttagtcacctctctatagtgggcgtggcgaggcgggcctgagcttgctcaccttcaaagtctatgcagcaccaaaaaaggactcacctcccaaaaattccgtgaaggttgatgagctttcactntaattcagttcctgagggttcaatcgaagtatgtgggaggaggcaaggagccagttttgaagaaagctt

SEQ ID NO: 3441 - DNA, 385 bp, Homo Sapiens
  misc_feature (18)..(18): n is a, c, g, or t
  misc_feature (213)..(213): n is a, c, g, or t
  misc_feature (221)..(221): n is a, c, g, or t
  misc_feature (276)..(276): n is a, c, g, or t
  misc_feature (293)..(293): n is a, c, g, or t
  misc_feature (317)..(317): n is a, c, g, or t
cgggccaacatggtgcanctcgtctttactaaaaatacaaaaacaaaaattagccaggggtggtggtatgcacctgcagtcccagcaacatgggaggctgaacaggagaatcgcttgaacccgcgacagggaggttgtgatgagccaaggtcatgccactgcactccagcctgggagacagagcaagactccatctcaaaaacaaaaacaaancaaaacancaacaaaaaaagaagttaaataacttgtttaagatcacacagctagtgcagttancccctctcagtaattantgtttggcaaatatgaaatacaangatctggcaaggttagggaaggaggttaaggattttcagtgaccagtactcttgaggcatcttgggga

SEQ ID NO: 3442 - DNA, 7585 bp, Homo Sapiens
ggtctcgatctcctgaccttgtgatccacctcctcggcctcccaaagtgctgggattacaggcatgagccacggcacccagcctcatttgctgttaaactcatttattgagtcacctttttcttcctcacactttttagtcttagaatttttgtgtgtttttatttaccctaacctgtcaatttcatagtttccactttcttgttgaagtttccaaacttgacctcatgcctttgaatatactaattctattgctttgacacatttttttcccgaaaaaggtgtaaatgggtcaataaatggaagtaatacatcatctgtaattggtatcaacacatctgtactatccactactgcttcaagttccatgggacaaactaaaagtacaagctcaggtggaggaaatcgaaaatgtaatcaggaacaaagcaaaaaccagcctttggatgctagagttgacaaaatcaaagataagaaaccaaggaagaaagcaatggaaagttctagcaacagtgatagtgattcaggcacatcatcagacacctcaagtgaaggcattagtagcagtgattcagatgatctagaagaagatgaagaagaagaagatcaaagtattgaagaaagtgaagatgatgattctgattcagagagtgaagcacaacataaaagtaacaaccaggtgctattacatggtatttcagacccaaaagcagatggacagaaagcaactgaaaaagcccaggaaaaaagaatacaccagccattacctcttgcgtttgaatcccagactcactcattccaatcccagcagaagcagcctcaggttttgtcacagcagcttccatttattttccaaagctctcaggcaaaggaggaatctgtgaacaaacacaccagtgtaatacagtctacgggattggtgtccaatgtgaaacctttatctttggtaaatcaagccaaaaaggaaacttacatgaaactcatagttccttctcctgatgttcttaaagcagggaataaaaatacctctgaagaatctagtttattgaccagtgaattgagatccaaacgggaacaatataaacaggcattcccatcacagttaaagaaacaagagtcatcgaagagcctgaagaaggttattgcagctttgtcaaatccaaaagcaacctctagttcaccagcacatccaaaacaaacattagaaaacaaccacccaaatccattcttgacaaatgcacttttaggtaatcaccaaccaaatggagttattcaaagtgtcattcaagaagctcctctagcacttactaccaaaactaaaatgcagagcaagattaatgaaaacattgctgctgcaagtagcacccctttttcctcacctgtaaatctgagtacaagtgggagaagaacccctggcaatcagacacctgtaatgccttctgcctctcccatcctgcatagtcaagggaaggaaaaagcagttagcaataatgtaaacccagtaaaaacacagcatcactcccatcctgcaaaatctttagtggaacaattcagaggaacagattcagacattcccagtagtaaagattctgaagattcaaatgaggatgaagaggaagatgatgaagaagaagatgaggaagatgatgaagatgatgaatctgatgacagccaatcagaatcagatagtaattcagaatcagatacagaaggatcagaagaagaagatgatgatgataaagaccaagatgaatcagatagtgatactgaaggagagaaaacttcaatgaaactgaataaaacaacttcctctgtcaaaagcccttccatgagtctcacaggtcactcaacacctcgtaacctccacatagcaaaagccccaggctctgctcctgctgccttatgttctgaatcccagtcacctgcttttcttggtacatcttcttccacacttacttcaagcccacactctggcacttccaaaagaagaagagtaacagatgaacgtgaactgcgtattccattggaatatggctggcagagagagacaagaataagaaactttggagggcgccttcaaggagaagtagcatattatgctccatgtggaaagaaacttaggcagtaccctgaagtaataaagtatctcagcagaaatggaataatggatatctcaagggacaatttcagcttcagtgcaaaaataagagtgggtgacttctatgaagccagagatggaccgcaggaaatgcagtggtgtcttttgaaagaagaggatgtcattcctcgtatcagggcaatggaaggtcgtagaggaagaccaccaaatccagatagacaacgagcaagagaggaatccaggatgagacgtcggaaaggtcgacctccaaatgttggcaatgctgaattcctagataacgcagatgcaaagttgctaagaaaactgcaagctcaagaaatagccaggcaagcagcacaaataaagcttttgagaaaacttcaaaagcaggaacaggctcgggttgctaaagaagccaaaaaacaacaagcaataatggctgctgaggagaagcggaagcaaaaagaacagataaagattatgaaacagcaggaaaaaattaagagaatacagcaaatcagaatggaaaaagaacttcgagctcagcaaattctagaggctaaaaagaaaaagaaggaagaagcggcaaatgccaaattattggaggccgagaaacgaataaaggaaaaagaaatgagaagacaacaagctgttcttctgaaacatcaggaacgagagcgaaggcgacaacacatgatgcttatgaaagctatggaagctcgtaaaaaagcagaagaaaaagagcggttgaaacaagaaaaacgtgatgagaaaagattaaataaagagcgtaaactagagcagcgaagattagaattagaaatggcaaaggaactaaagaagcctaatgaagacatgtgcttagcagaccaaaagcctttgccagagttgcctcgtattccaggacttgttctctctggaagtacattttcagactgtctcatggtggtgcagttcttacgaaactttggtaaagttttgggctttgatgtgaatattgatgttccaaacctgagtgttcttcaagagggattgctaaatataggggacagcatgggtgaagtacaagacttgcttgtgaggctcctctcagctgctgtatgtgatccaggtctaataacaggatacaaggctaaaacagctcttggagaacatttgctgaatgttggtgtgaatcgagacaatgtttccgagattttacagatatttatggaagcccactgtggacaaactgagcttactgaaagtctgaagaccaaagcttttcaggctcacactccagcacagaaagcttcagtcctggctttcctgatcaatgaactggcatgcagcaagagtgtggtcagtgaaatcgacaagaacattgattatatgtcaaacttgaggagagataaatgggtggtagaaggtaaactccgcaagctcagaatcattcatgctaagaaaacaggcaaaagagacacttcaggtggcattgatctgggagaagagcagcatcccttgggcacacccactccaggacgcaagcgaagaaggaagggaggagacagtgattatgacgatgatgatgacgatgacagtgatgaccaaggggatgaagatgatgaggatgaagaagataaggaagaccaaaaaggaaaaaagactgatatctgtgaagatgaggatgaaggtgaccaagcagcaagtgttgaagagctggaaaaacagattgaaaaactgagtaaacaacagagtcagtacagaaggaagctctttgatgcgtctcactcattgcgttcagtgatgtttggcccagatcgttacagacgccggtactggattcttccccgatgtggggggatttttgtagaaggcatggagagtggtgaaggactagaagaaattgcaaaagaaagagaaaaactgaaaaaggcagaaagtgtccagatcaaagaagaaatgtttgagacttctggggacagtttaaattgttcaaatacagatcactgtgaacaaaaggaagatcttaaagaaaaagataacacaaatctattccttcagaaacctggctctttttccaaattaagcaagcttttggaagtagctaagatgcctcctgagtcagaggttatgacccccaaaccaaatgctggtgcaaatgggtgcacgttgtcttatcagaacagtggaaaacattcactgggcagcgttcagtcaacagcaacgcaaagcaatgtggaaaaggcagactctaataatctgtttaatactggttcaagtggtccagggaagttctacagtcctctccccaatgaccagttactaaaaacgctgactgaaaagaatagacaatggtttagtcttttgccacgaacaccctgtgatgacacttcacttactcatgccgatatgtcaactgcttctttggtgactcctcagtctcagccaccatctaagtcaccttcacctaccccagctcctcttggatcttctgctcagaatcctgttggcttaaatccatttgctttatcacctcttcaggtgaaaggtggagtatctatgatgggacttcagttttgtggatggcccactggtgtggttacttctaatattccatttacattatctgtacctagtctaggatcggggttagggttatcagaaggaaatggtaattcattcttgacttccaatgttgcttcaagtaaaagtgaatctccagtaccacagaatgaaaaggccacttcagctcaacctgcagctgttgaagtagcaaaaccagtagattttcctagtccaaaacctattccagaagaaatgcagtttggttggtggagaattattgacccagaggacctaaaagctttgctcaaagtgctgcatctcagaggaataagagaaaaggcattacaaaaacaaattcagaaacatttggattatattactcaagcctgcctcaagaataaggatgttgctattattgaactgaatgaaaatgaagaaaaccaagtaactcgagatattgtggagaactggtcagtagaagaacaagcaatggaaatggatttgagtgtccttcaacaggtagaagatctagaaaggagagttgcatccgcaagtttgcaagtgaagggttggatgtgtccagagcctgcatcagaaagggaggacttggtatattttgaacataaatcatttactaaattgtgcaaggagcatgatggagaatttactggcgaagacgaaagcagtgcacatgcactagaacggaagagtgacaaccccctagatatagctgttaccaggctggctgatttggagcggaacattgaaagaagaattgaggaagatattgctccagggctcagggtgtggagaagggcattatcagaagctcgcagtgctgcacaggtagctctgtgcattcagcaattacagaaatcaatagcatgggaaaaatcaattatgaaagtttactgccaaatctgtcgaaagggagataatgaagaactgcttcttctttgtgatggctgtgacaaaggctgtcatacctactgccatagacccaagattacaacaatcccagatggagactggttttgtccagcttgcattgctaaggcaagtggtcaaactctaaaaatcaaaaaacttcatgtcaaaggaaaaaagactaatgagtctaagaaaggcaagaaggtaactttaacaggagatactgaagatgaagactctgcatctacaagtagttcactaaaaagaggaaacaaagacctccagaaaagaaaaatggaggaaaacacttctattaacttgtcaaaacaagaaagttttacttcagttaagaaacctaaaagagatgactccaaggacctagctctttgcagtatgattctgactgaaatggaaactcatgaggatgcatggccttttctacttcctgtaaacttgaaacttgttcctggttataagaaagttattaagaagcctatggatttttccacaattagagagaaactaagtagtggacagtatccaaaccttgaaacctttgctctagatgtcaggcttgtttttgacaactgtgaaacatttaatgaagatgattctgatataggcagagctggccacaatatgaggaagtattttgaaaaaaagtggacagatactttcaaagtgagctgaagttataataatctctttatttttttccttctaaacaaggacaaatgagaccagcaatgtgaactgtatttacataaacgtgcaaggcacatacataatgactttctttttccttaagtataaaaaaaaagtatcagaagaatgataccatttttaaaggcttcattcctacaacaaccaaggccctcggttattggtttgtgtgatttatcagctaatttaggtagaacagggaagcacacccaaagaattttcaaaggaaagggtgttatagtgcaatagcaattaaaatatatcaaatcgcactgaatactcaacaccagagctctaatgtgggaaatggttctcctttccctctcaataaatatctatttttcatttttttactttgtagtttattttttagtgaatgtatttaattttatgaattatttatgattaaaccacatccagaatcttcgttttctgtgaaaaggaagaactagaaaattgctttaaatcttgaaaatacaaggaatgttttaaaatataaaacaaagccaagttaaactgtttacactgatgtgctataaaagcaccaaaaagaaactttactgtagagttacaagtacatttatatatatatgttgctgcatcacttgtgtagttaaattgtatttcaaaacagtgaaaaaattgacatgtatatactgttcattcttgtttatattaagtcttgttttaaatatgtattatgtgtatatattgtttgcagacattattgttcatgccttagaggattgtagcattttattttcgtctgaaggtaatgatagctatacagtctgtacagtaattatcctctaccaacactgtggcgtctccttaatcttggtagtgcctgcctttgaaacagggtgtaggggatattagttttccatttttctattttgttatataattttaagccaccagggcctaaattaaagtataatcatttgtatccatgtggaataaaattgtgacaatttcctacgcacacagtattttttcatagaaacatttccctcccatttgccttgcctcagaaataaatttaaaagacgtttgtaaccactgtgttttatctactgtgtgttgtggtggcctgttggaggcaaatagatcagattttttttgtacctacgtaagagtacttgaagttttatttaaaataaaatgttgtggaaaaggtagcattctttttttaggagtgttatttttcactatgtgtggcacggatacaataaaagacttttacaaactaaaaaaaaaaaaaaaa

SEQ ID NO: 3443 - DNA, 678 bp, Homo Sapiens
aatttatttcgactgatgtacaagaagaaacattcaacttaaggattagaaataaaagtggcaattgtctacttcttttgtggtagggaatagatcatacaagcctgactgatgagagtaatagctttgtgaaaactgtatattcgagtacatgtgaactcatacttggcttatacagaatttatccaattctagcaaagtcagcataatttaaataaacctccttgagttttacaccatggctctcaagtctgaaagcttagatttgattataaccatggcaaaagtgattatctttattttctgaaaacgtaatcaacttttaaaataagttaagcaaacatcagttttacacagaccatatgaagggtaggaggaaactgcaattgttcctctaattgcagagcctaaaccataaattcaaattgtactgctatctctactgttaaaacaagtcaagaaagtcttttacagtctaagagaagtgaatgtaattatgcagcatccactacaaagatattttgaaaacctaacatcatgttagtactcaatggctgtacagcaattattttaaagtacgctcccagggtcaacctcttgctgaagcaattaactccaggaagtcgagttacaagtatcacctacattttataggacaataaaggcaaagattttagg

SEQ ID NO: 3444 - DNA, 638 bp, Homo Sapiens
  misc_feature (548)..(548): n is a, c, g, or t
ttttttttgccaaaggaagcaagctttattgaatttacaacgtagaaaatatttgtagttccttagacatttgcattgctataaaaattacactttatggtataattattaaggtttgaagagaaataaacagtataaacgaaatatggcccacacaatgaaaatgtaaaccatataaatcaaaatcataaaacaattattcaatactcagaggcctacttaatatatacatatgaaatttcttacacacacacaataaatgcccacaaaaaccatcactgaagccgatcactgtacaaatatgaaaataaatctttatctttaacctcaattttatcttcagcaggagggttgtgcaacttgggtttatgcagatcacatcaagttgtttaaataatcaaatgttcacatatgttcatataaagccagcaagttgaaaaaaataaattatgaaaatgcatgggctaaaagtttaacagtgaaaaaatatctcccttatcccaacattattttcccacaatgaaaatttaaaatattttacaatgttntccaggaatacattttaaaaaaggactggtagttataacttatgaattttaaaatatccttaaaagaaaaaaaaccggggaacaagggtg

SEQ ID NO: 3445 - DNA, 392 bp, Homo Sapiens
ttttgagatggagtctcgctctgtcacccaggccggagtgcaatggcataatcccggctcactgcaacctccacctgctggattttcctacaggtgcctggcacaatgcccggctaccttccttgacatattaagagaaaactgatctaatctccctttctagtccacccagtcttgcaattctggtttcacattttctcagaaagaagagactataatggtatgttgggtaatctttcagcattcctagatccctttttctctagaagaattctttctaaggacgttgataaatgacatgttgtattttctccttccagaaatatctagcaggaaagtccttagaggcatctgatttgaggggaaatccacaattgctccattatatattt

SEQ ID NO: 3446 - DNA, 350 bp, Homo Sapiens
  misc_feature (295)..(295): n is a, c, g, or t
  misc_feature (321)..(321): n is a, c, g, or t
  misc_feature (326)..(326): n is a, c, g, or t
  misc_feature (335)..(335): n is a, c, g, or t
ttcatgcctttatcattttgaagcaaatatgtttatatatgtctgaccccaggaaattatttacccacaaacactactataactactatactctgttgatatgtttcattatcaacctccccaaattaaacatctgacaagtcttttatatatgtatgctgaagagaaaaaataaatcactttcttccacctttgaatctttaaaaggggtttgtggtaatgataaaaaatttatctctttccacacatttaagacctcatactgtgcaaaatcatggttatatgaaagttattntctgaatagctggatccatcaccttnaagcntaatactgntaaacaggcatggtt

SEQ ID NO: 3447 - DNA, 441 bp, Homo Sapiens
gcccgcacctgccgtacccggtggagacgctcctagcctgagtagcgccgcggtcccgggaacgccgagtgcgcgccgtcggggaggcgggaaccggggcccggcgcggacgtttgcactttgaatccagaggaagatgaatttttaaaatctccatcaaacgtgccttaaagctaaagcattttgacaggagtatttaaacttagtccaggatattttcgtttgtgttttataactttacagaggaccaaagcaattcttgttttagtttctttgcgacgctgctcctccttcccttcataaggactttttttgtctttctttaacgcccaggcttcgtcttatttctactgtttttgtcgcaacttccattgatttatgtcccttccctcccccctaagtacatcagggaacctttccacactataaatgatatgacta

SEQ ID NO: 3448 - DNA, 2719 bp, Homo Sapiens
gagcctaccaaacctttggttcgcagggctggagctaagtctcgctccaggagaaagaagcagaagaagaactccaggcaggaagcagtgccctggaaaaaacccaaaggcatcaattccaacagcacagctaacttggaggatcctgaggtgggtgatgctgaaagcatggcgatctcagagccgatcaagggcagcagaaagccctgtgtgaataaggaggagttggctttgaagaagcccatggcgaaatgtgcctggaagggtcccagagagccacctcaggatgcccgggcagaagccgagagcccaggaggcgcctctgagtcagaccaagatggtggccatgaaagcccaccaaagaagaaggccgtggcctgggtgtctgccaagaaccccgctcccatgaggaagaagaagaaggtgagcttgggccctgtctcctacgtcttggttgactcagaagatggcaggaagaagccggtgatgccaaagaaagggccaggctcaagaagggaggcatcagatcagaaggcccctcggggccagcagcctgccgaggcaacagcctcaacctctaggggtccgaaggccaagccagaaggctctcctcggcgtgccaccaatgaatccagaaaggtttgatctgggggaccacccatactgaggagttgaaagaacaaggaagacgtaccaagtcaaccaagttctctcttgtcactgaataagactttggactctcttagggcccctgttgatagagatctggccctgaggtaaacgataggtgaggtcttgggtgggagggagttggggaagggaggtggatctctatgcccttttctctaccaggcctgccgtttcaccgccttctctactcaccttctcttcggaggcaggagagttggtaagaggattgggaaaattctagaacattcattcccctttatgcatgagcagggtcactgttacactcatccatgttcagcttttctcccccacgccttgctccctcctcggaatggtcagcgacctctgcaggccctggcatttggaagagctgggtggccctgccatattcttcctcccgccttcctcttgtgtaaccagcggggtaagttaagccaggaccttcgctgcaaacctggttttattgctccttcagtctccagcttccatcctccagttatctagccaggaggtcccaagagttagttttagggaaaaagaatgtctgcctagacctcaaagtctttgagttttagagtctgttagtaaaaatggcactttgattcccatttgggatgagccctctcaggaatcctgtggggaaggggggtgattatagggaaggacgcaggcattcctaggtccccagctctaattccatccatctacccaactgtcaccatctttgcaccaaactgtcaccatctttgcagcagaaggtcactactcacattatagtaagaggggaaaaaaatcttttaaaacttggctgttggccgggcacggtggctcacgcctgtaatcccagcactttgggaggctgaggcaggtcgatcacgaggtcaggcgtttaagaccagcttgaccaacatggtgaaaccccatctctacaaaaattagctgggcgtggtggcgcgcgcctgtaatcccagctactcaggaggctgaggcggatgaattgcttgaatccaggaggcagaggttgcaatgagccaagattgtgccacggcactccagcctgggcagcagagtgagactctctctcaaaaaaacaaaacttggctgttaatgtctgccctctgaattcagacacactatattagaccagaccaccatgtgtcattgtgtgtgtgtgtgtgtgtgtgtgtgtttgcgtgcgcatgtgtagaggagagagcagggtccctgagataatggtttccaaactgtatcgtagccgtccacaaagatgtaatccaaatctatttttctcacgtgtttaaaaaactgaaaagtgactactcagatatgttggaagtcacatcgaagactatcagaatattaccttgtgttcataggttaacttgtttttgtacacgtcttagttatttcaggcatctctttgcttaaaattgagtttcttgtaaatgtgactgatgagcgaggttagaagtggaagaaattcctgtgcatgttctataatctgacaccctgaaagcaagtttcctttcgtcattcacatgctcttgttctgccgtgactgttcaggtgtatggtagtaagtaaatgtattaacatggtgaacagtagtaatattctatcatagagtattagcccttgcaagttttcagggcgtcttttccgacttcagtttttgtgataaagaatgtgaacagttgttagatgttctcagtgattcaactttaaaacaaatttctcgtgatgattcatttcaaaatcctgagtgagtctgactgaaaaatacgagagaaaagagagtggtttccgtttgcagctacacagctgtgtgcatcgacgttctcctggggtgtgtgccaagcgaaacccaggggtgaattggattcttgaagagaccaaagcctgtaactgtccagcttctaatttcaaaacgggtccattagggcttcgttgtgttaacaagttgacaccatgactagtaaatgtaaacgtgtatgtataaaataaagtttagcaaattaagtgtcctgtt

SEQ ID NO: 3449 - DNA, 2337 bp, Homo Sapiens
aattattatgtggaatctcttaagtgagcaactaagaaaaagccttatagaaagactacactggatttataagtgtgtttatgtttctctaagaatgggagcttctgttaacttaggggtggagttgttctgaggaaaccagtagattggatgactgactggagaatccagaataacaaatccattagccagacatgtttacttttatattagaagtttgttgattaggtcttaattttcaaatgcaaacaccaagctttgaaaatattgcatatacaatgtattggtcagcaatttaataatatttaatttgaagttaattattgttaatccttctagaaaagttttttttctttaaataaaagtacatatatatacttttttatttagaggttaccagaagctctggttttgttttgttttgttttgtttttttgtttttttaatcattttcagatgttatccagaaatctgcaagtgtacttttcctgttttaactccttccttttatcacctgactatcagggaagcgaggttgaggctgccctgacctgacatgtcatgatgtcgacttgctaggtggggttcgctggggacgataaccagtggaattgttggtaagaacttttttttcctatttttttttttatcagtagtggggcattaagtgtgggagaatgcccatatcctataagtgggcaattatgtcagccttgtagaaaaataggactttaatattaaattattttgttcttaataggaacatataataacacttcacttacttttaaattggtagcagatcagcaggaaaggcctgcaagtatgaagtaatgaaatactcagggtatattttaagtgagcaaaatagacaccttataatcttaaaaagtctgttggagagacaataaatttgctttaactgtcatttcagtctagtactatattttctatattttgttggatagattaacatataatgcatcttaaagagatatttattgcacactaattttagtgaaaacaagaagacattgatagaatggagggcttaaacaccaaagatactatttttaaaaatcttccaaagtaatcttaacactgtaaaatgaaactttaaaaagttttagcagtttgacaataatggcctcaatttagagatatgttgagacaatgactttgggtcaagaggaaattacatagctgaaatattaagaccttgaacatagcagaaacataaacctatgaacaacttgtgttttgtgtgaaagctagggtagctgataggattagcagatattggtagaattaagagtcaatatttaaattattgctaaagattaaaatccctcatcttatagtttgtaggggattccatgatggtaaggtatagattgaaattaaatttagtaactaggcatttctgaccataccatataaaaaataattgtaatatggtataaacactgattaaaagtaattatggattttcatgcctgaagaaccttctcagtattcttacagcactgtatcttctttattggttgagaatatcagtctagaaagactttcctagatgttaaatgtgctagtcagtgtcatgaatataaacccttacttgtaagtttgctatagactagttgtacaacactagaatgaaattatgtaatacttttaagaattgtagtgattgcagggttgtgttaaggtaacattttatgcatgtgtcagtgacagaaaggatcagggtataaaacttagcactaaatagcatgctccttaggaagttttaaggtaagcagtaggaatattcatgtaattctgatgagtttatgtaagttaaggaaaatgcaatgccagtttgttgactttaaacactaaaaacaaaatacattttgtggaaccaacaaaggagacattctggggaaaaacttaaattgctcaaatttaaataagggctctcactttatatagtagatttgtcaggatcccatgaacattgcttttcttgatttctcacatatgagggttgggcaaaagggacttctctagcctcttcgataatgtaggtagacttgtacttagtgaatcccattataatgttaggtactatgttctaagactatttctataattggactgaaggctcctgcaaacataaattgctgatatggatatagtaacataagaaataccaaaatagggacatttgcaagaccttttccatttaatcatcagtttaataaaaatcatgcttttggtacagtgttcatgtaccataactgtattggaatatttgtacgatgttaaatatttttaataaaatttaacatgttc

SEQ ID NO: 3450 - DNA, 751 bp, Homo Sapiens
ttagaatgaagtaacctcaaggtaccaaataccccacataaggaaagtactacactaaattcactcaactattgtatgcctaccatatgccagattttatcactagaccctgaggatatagctttttaaaaccccctcctgtttcagagcttatattctagtggaggaagttagacaagcattttaagtaataaatgtatagagagtgtcaagtgatgagtaccatgaagaagaataaatgagggtaaggggctagtgtgatagggagaggggtgggatgccatcatattaggggtggttgggaactgtctactgctttagcatttgtgtcttcaaatttctctcctttggttatataccttgcgttattccgcacattgataaagtttctttcttacagaagttctgatatgaattaaggaatgggtcactacttaagactttatcatttcagctacacataaaaggtttctctcccctatggattttgctaatggttgagtgatacctaaaggccttgttgcatttttttacaccttgggggtttcctcttcgggtttgaattctctcatggttaccaaaactctgttaagggactcttcaccagtcgtcaatgtgtattggctctttcccaatattgaattttttgatgtactaaggctttaaacttagttaagactgtttgctctgctgctaataggttgggctgtgcgaatatgtcgtgattagggggacccgcacaagcttcttt

SEQ ID NO: 3451 - DNA, 634 bp, Homo Sapiens
agctcaggcctagggatgcagtgccggccctcaggtgagatcagaagagtcccgtctggtaggggtatgtagaagaggtaattcttggtccgccagggccagttttgcggcagccatgggtgtcgggatcaggcaggggtgtggtgggaaaccatggggtctctcagggctcggccagggtcagcgcacgccacagggccagttttggctggagaggcctgaagcagagccagagcaggtccaggtgagttctgaagaggagccaggacaggagagggacccataggtctgtgaattccagaggagaggcaggtatttagaggtggttctgtcaggtgaagtctgaggagccaaagctatgtatgtgcatatgtcagccgggctctgtgggaggtggtgtagacctatggcatgggacaggtgtgcacgctgggatctctggccggttccgaaaagtgaggatcaggtagtgggtggctgattgcacaagtttagaacccaggattagggacacacaggtcagcacctgcttctcagcatcctgactgggtgtgatgggcagagctcagggcgtcagaggcctctgagaatttgtgactgaagtccaagtctgtggcatcagggtctgcagagc

SEQ ID NO: 3452 - DNA, 329 bp, Homo Sapiens
tttttttttttttttttttttatctgtaataattgccagtttattcctctggctaagagatccagaggtaatttgaggtttacatttctttttaaagttctttcatcaagagtttaggtgcccccattgccctcataagctggttgcaaattatttgactcttacttgtaaaaaaaatccttaattctttttgtgtgtgagacacgtgttcattaaaaagtacatataagcaaaaagaacaaaaagaagaaaacaaataaaatttcacaccacacagaaataagcttggttaagtttgtgatatatgttatatggatgtatgtatacac

SEQ ID NO: 3453 - DNA, 446 bp, Homo Sapiens
cgacgtctccagccgtgaaccggtttggtacccggttggtgggagccacggcgacttcttcgccgccgccgaaggcccgcagcaatgaaaacctcgacaaaatagatatgtctttggatgatatcatcaagttgaatcggaaggaagggaagaagcagaattttccaagactaaatagaagactcctctagcaaagtggtgcccagcaattcaggatgagagtgcgatgtggaatccaacagaattctgtttttggtaagactaggctgaatcatagaggaagagtaatgcctggaaagagacgctctaatggagttatcactggccttgcagctaggaaaacgactggaattcgaaaaggaattagtcctatgaatcgtccacctctaagtgacaagaatatagaacaatattttccagtgttaaaaaggaaggcagactctttt

SEQ ID NO: 3454 - DNA, 459 bp, Homo Sapiens
ttttttagtccgttttattcagtaccataaacattcactaaactatacagagctaaaatcatgcaaaagattgcaaaacaaactgccttgggaaatttccagtctaagctaaatggaccaagtataggattgaattttaagaagttggtgggaagattccagctcttgtactcacaggtaaggtcctaggattctatttgttgaagtgtctgcagaccctctccctacagcaggggcgtggagcaaatgtgcattcaggaagtgcttattagtccccccaaaacctttttcgtgacgacagacggatggaggcctcagacgactccggcagtaggaccctgaaccaaatgcctgagctgcgctcgaaaggctcgtctcgcaggagctggcgagtggcacgggcttctgtggccgggctcggggctcggggctcggggcccggggccggggggggggggg

SEQ ID NO: 3455 - DNA, 445 bp, Homo Sapiens
ccgtgacaagcccaaccggacggctggagagggcgagaagggcagacgggacatgcagcctcttccgcctgagccccggaaggtgtatgtggctgcggcatcgcggcctcgctatgtctgccattttcaattttcagagtctattgactgtaatcttgctgcttatatgtacctgtgcttatattcgatccttggcacccagcctcctggacagaaataaaactggattgttgggtatattttggaagtgtgccagaattggtgaacggaagagtccttatgttgcagtatgctgtatagtaatggccttcagcatcctcttcatacagtagctggggaaaatgccagaatgtagttgccatcagatttgattgtgaacaaggactgactgcagaaaataatggaaaggatgtttaactcttttatctccgaacattgaatgaga

SEQ ID NO: 3456 - DNA, 354 bp, Homo Sapiens
  misc_feature (55)..(55): n is a, c, g, or t
  misc_feature (63)..(63): n is a, c, g, or t
  misc_feature (253)..(253): n is a, c, g, or t
  misc_feature (273)..(274): n is a, c, g, or t
  misc_feature (282)..(282): n is a, c, g, or t
  misc_feature (310)..(310): n is a, c, g, or t
  misc_feature (322)..(322): n is a, c, g, or t
  misc_feature (328)..(328): n is a, c, g, or t
  misc_feature (330)..(330): n is a, c, g, or t
  misc_feature (349)..(350): n is a, c, g, or t
gatctcagtttccctcactcaggaactctgtttctaaagtcttcagttaagtttnagtttatnactgagtggcctgtactgtcagacgtgaatgggcctgacgggcaaatccatccctctctccctcacagttccaggagcggcttccctcgtctccccttactccacagggagcctcccttgccaggaccagggctgcgacggccatgctggggcaggtgagtgctctgttagctgctcccagtgctgtccncaggctgcagttctggtccnnggggtgtnagggtagggaagggtgcacttgaagganggtggttcaatnttgggntnccttaacgtttatagtctnnacaa

SEQ ID NO: 3457 - DNA, 1821 bp, Homo Sapiens
gcacgagcccctctgctgggcgcgcggtggacggtctgaaagggagtgttcgggtttcgctggggcctcgcggctccagagcccagcatggcttcctcgcgagcctcttccacggcaaccaaaactaaagcacccgacgacttagttgctccggtcgtgaagaaaccacacatctattatggaagtttggaagagaaggagagggagcgtctggccaaaggagagtctgggattttggggaaagacggacttaaagcagggatcgaagctggaaatattaatataacctctggagaagtgtttgaaattgaagagatatcagcgagcgacaggcagaagtattggctgagtttgagagaaggaagcgagcccggcagatcaatgtttccaccagatgactcagaggtcaaagcttgccttagagccttgggggaacccatcacactttttggagagggtcctgccgaaagaagagaaaggttaagaaatatcctctcagttgtcggtactgatgccttgaaaaagaccaaaaaggatgatgagaagtctaaaaagtccaaagaagagtatcagcaaacctggtatcatgaaggaccaaatagcttgaaggcaagactatggattgctaattattcgttgcccagggcaatgaaacgcttggaagaggcccgactccataaggagattcctgagacaacaaggacctcccagatgcaagagctgcacaagtctctccggtctttgaataatttttgcagtcagattggggatgatcggcctatctcctactgtcactttagtcccaattccaagatgctggccacagcttgttggagtgggctttgcaagctctggtctgttcctgattgcaacctccttcacactcttcgagggcataacacaaagaaggagcaattgcattccattcccaaatccactgtctccttggacccaaaagatgtcaacctggcctcttgtgcggctgatggctctgtgaagctttggagtctcgacagtgatgaaccagtggcagatattgaaggccatacagtgcgtgtggcgcgggtaatgtggcatccttcaggacgtttcctgggcaccacctgctatgaccgttcatggcgcttatgggatttggaggctcaagaggagatcctgcatcaggaaggccatagcatgggtgtgtatgacattgccttccatcaagatggctctttggctggcactgggggactggatgcatttggtcgagtttgggacctacgcacaggacgttgtatcatgttcttagaaggccacctgaaagaaatctatggaataaatttctcccccaatggctatcacattgcaaccggcagtggtgacaacacctgcaaagtgtgggacctccgacagcggcgttgcgtctacaccatccctgctcatcagaacttagtgactggtgtcaagtttgagcctatccatgggaacttcttgcttactggtgcctatgataacacagccaagatctggacgcacccaggctggtccccgctgaagactctggctggccacgaaggcaaagtgatgggcctagatatttcttccgatgggcagctcatagccacttgctcatatgacaggaccttcaagctgtggatggctgaatagatgacaatgggaaaaggacttgaacctcaagctctctctaaggagctgttttcctcaaacgagaagaattgaagtgtttagttctatcatgttttctgccaattaccatgcatagaccctcagtagaattggatttccatgtcagccccactccaggaagggacgcccaat

SEQ ID NO: 3458 - DNA, 521 bp, Homo Sapiens
  misc_feature (302)..(302): n is a, c, g, or t
tttttttttttttttttgatctgcataaactttttaatgtaatttaagaaaaatcagtgccaaaaatgatacttcaaagataacagaagattcagaacgtaatgggttacaacagttccaaaaagaccacattgtaaggttatcttactagaatacggtctctgacacatttaattaacattctgttttatttcagtggggttacagtggagaggattacaaataaatgccctcgtccactaacaaagagcagcattgaggcttattctgaaaatccagtcctgaatgggctgacacacctnaaacgatctttggaatacacctcaagttaaagaaaaacccagaagtcatttggccctcccctcaataagctctgcggcattcatatgacccccaggcaatactcccatcttctttcacccaaggggaagggtcatggagggaaccggtgtctgcttcctcatctggggagagtggccccaccttgggcggtaggtcatttgacaccgtcatgaaagggg

SEQ ID NO: 3459 - DNA, 3394 bp, Homo Sapiens
ggatccccttatcaaagctgatgggggtcgctggggaccccccagccttttgctagagcctgcacggctgtgggagcttgaaaagaaacatgaaggtgggctggccaggtgagagctgctggcaggtgggcctggctgtggaggatagcccagctctgggagcaccgcgggtgggagccctccctgacgtggtgccggaggggacactactcaacatggtgttgagaaggatgcaccggccccgaagctgctcctaccagctgctgctggagcaccagcatccgagctgcatccaggggctgcgctggacaccactcaccaacagcgaggagtccctggatttcagcgagagcctggagcaggcctccacagagcgggtgctcagggctgggaggcagctgcatcagcatctactggccacctgcccaaacctcatccgagaccggaagtaccaccttaggctctatcggcagtgctgctctggccgggagctggtggatgggatcttggccctgggacttggggtccattcccggagccaagttgtgggaatctgccaggtgctgctggatgaaggtgccctctgccatgtgaaacacgactgggccttccaggaccgagatgcccaattctaccggttccccgggcccgagcccgagcccgtgggaactcatgagatggaggaggagttggccgaagctgtggccctgctctcccagcgggggcctgacgccctgctcactgtggcacttcgaaagcccccaggtcagcgcacggatgaagagctggacctcatctttgaggagctgctgcacatcaaggctgtggcccacctctccaactcggtgaagcgagaattagcggctgttctgctctttgaaccacacagcaaggcagggaccgtgttgttcagccagggggacaagggcacttcgtggtacattatctggaagggatctgtcaacgtggtgacccatggcaaggggctggtgaccaccctgcatgagggagatgattttggacagctggctctggtgaatgatgcaccccgggcagccaccatcatcctgcgagaatacaactgtcatttcctgcgtgtggacaagcaggacttcaaccgtatcatcaaggatgtggaggcaaagaccatgcggctggaagaacatggcaaagtggtgctggtgctggagagagcctctcagggcgccggcccttcccgacccccaaccccaggcaggaaccggtatacagtgatgtctggcactccagataagatcctagagcttctgttggaggccatgggactagattccagtgctcatgacccaaaagaaacattcctcagcgacttcctcctgacccacagggtcttcatgcccagcgcccaactctgcgctgcccttctgcaccacttccatgtggagcctgcgggtggcagcgagcaggagcgcagcacctacgtctgcaacaagaggcagcagatcttgcggctggtcagccagtgggtggccctgtatggctccatgctccacactgaccctgtggccaccagcttcctccacaaactctcagacctggtgggcagggacacccgactcagcaacctgctgagggagcagtggccagagaggcggcgatgccacaggttggagaatggctgtgggaatgcatctcctcagatgaaggcccggaacttgcctgtttggctccccaaccaggacgagccccttcctggcagcagctgtgccatccaagttggggataaagtcccctatgacatctgccggccagaccactcagtgttgaccctgcagctgcctgtgacagcctccgtgagagaggtgatggcagcgttggcccaggaggatggctggaccaaggggcaggtgctggtgaaggtcaattctgcaggtgatgccattggcctgcagccagatgcccgtggtgtggccacatctctggggctcaatgagcgtctctttgttgtcaacccacaggaagtgcatgagctgatcccacaccctgaccagctggggcccactgtgggctctgctgaggggctggacctggtgagtgccaaggacctggcaggccagctgacggaccacgactggagcctcttcaacagtatccaccaggtggagctgatccactatgtgctgggcccccagcatctgcgggatgtcaccaccgccaacctggagcgcttcatgcgccgcttcaatgagctgcagtactgggtggccaccgagctgtgtctctgccccgtgcccggcccccgggcccagctgctcaaaaagttcattaagctggcggcccacctcaaggagcagaagaatgtcaattccttctttgccgtcatgtttggcctcagcaactcgcccatcagccgcctagcccacacctgggagcggctgcctcacaaagtccggaagctgtactccgccctcgagaggctgctggatccctcatggaaccaccgggtataccgactggccctcgccaagctctcccctcctgtcatccccttcatgccccttcttctcaaagacatgaccttcattcatgagggaaaccacacactagtggagaatctcatcaactttgagaagatgagaatgatggccagagccgcgcggatgctgcaccactgccgaagccacaaccctgtgcctctctcaccactcagaagccgagtttcccacctccacgaggacagccaggtggcgaggatttccacatgctcggagcagtccctgagcacccggagtccagccagcacctgggcttatgtccagcagctgaaggtcattgacaaccagcgggaactctcccgcctgtcccgagagctggagccatgaggaggggctgggactggagctggagcaggcacttgcagccgggaaagccagggtgtgccgggccaagatactcacaggctggccacagctgggcaaggctctccgtggagtggactcgagtccctggagcaggcagtgtggaggcagccatcccctgtgatgactggcagctaaggaggacctcggagtggaccaaagccaggaataacgaatgaccaagggccaaggaagggaggacagagaggccccaggagtgggtggagagtggagtgcgctgggacgttgtgtgcaatagagaggtctccacaccagatgtcttccagattctgtgcctctggctttgttgtccagccaggcctgcagtttattttcacagtggacagagagagagagagaggctgcatgtgtgtaccgtgtgtggcaagggcagggccttggcctggggcaggggcccctgctttctttccacagctttcttccaacagcaggcagtggggctgcgggcctgaaaaaaaaaaaaaaaaaaaaaaaaa

SEQ ID NO: 3460 - DNA, 1147 bp, Homo Sapiens
cggcggtcggtcagcgcacagggcacggcttcctctgcttctcccaccacttagtctcaacccgggtgtgtttgcactactagagaatgaaatatgactgaggactctcagagaaactttcgttcagtatattatgagaaagtggggtttcgtggagttgaagaaaagaaatcattagaaattctcctaaaagatgaccgtctggatactgagaaactttgtacttttagtcagaggttccctctcccgtccatgtaccgtgcattggtatggaaggtgcttctaggaatcttgcctccacaccacgagtcccatgccaaggtgatgatgtatcgtaaggagcagtacttggatgtccttcatgccctgaaagtcgttcgctttgttagtgatgccacacctcaggctgaagtctatctccgcatgtatcagctggagtctgggaagttacctcgaagtccctcttttccactggagccagatgatgaagtgtttcttgccatagctaaagccatggaggaaatggtggaagatagtgtcgactgttactggatcacccgacgctttgtgaaccaattaaataccaagtaccgggattccttgccccagttgccaaaagcgtttgaacaatacttgaatctggaagatggcagactgctgactcatctgaggatgtgttccgcggcgcccaaacttccttatgatctctggttcaagaggtgctttgcgggatgtttgcctgaatccagtttacagagggtttgggataaagttgtgagtggatcctgtaagatcctagtttttgtagctgtcgaaattttattaacctttaaaataaaagttatggcactgaacagtgcagagaagataacaaagtttctggaaaatattccccaggacagctcagacgcgatcgtgagcaaggccattgacttgtggcacaaacactgtgggaccccggtccattcaagctgaacgcacccgctggttgtggaccgtctgccaggcaccacagtgagcattgtgttcttggcatgtgatctgggaaactgattgaataatacacttttcttgctttggtgctcaaagtggtttttttcccccaataaaattatttaattgaaaaaaaaaaaaaaaaaaaaaaaaa

SEQ ID NO: 3461 - DNA, 473 bp, Homo Sapiens
ttccaggtaggacttttagaattttaatatgaactggcttaaacaatacaggaaatttgtggttcacaattctggatagtctgtaagatggccttgctcacaatcccgaatagtctatagaatagtccatagaatcaaacaagtgaggtttgatactgcagctcaaatcatgccaccaaacacaaggttcttctccatctttcccgcattcatttgacagtactgacttcaaccccaggctctacttgttgctgtccctctaaactcccatccctctagggtttccccttataggaggaaaacggttgccacatttccaggcatcatatacttacaccatgctagaggagcaaggaagctacagtttactggaagcctcagccccagtctttgtgggttcattgtttctgactgggcttgtgaccatctctgctgctagagggaatggttatgttgcctggcttaaatggaag

SEQ ID NO: 3462 - DNA, 407 bp, Homo Sapiens
gtttatttctttaattatataatttgcaattttctgtattataagtgctaccaggattctagatagttgatcttacatattcagatagtatagtttactcttataattacccgttacgttatctctaaaagtagtttgatctgtgcctttaacttttagaattcatcttttgacttgtttgccactgtagagttttcagttttctctgtagattcagtgtgacaaagagggaatacataatttgtgaccatttaagatgctgatattttctggaaaaggatatagatagtagtagtgacccgcagagcctcacaataatgtctaaagatataacctgagtaggtccctaagtactcttctctaaattataaaatgcattacctgggctttaatagttaaggctggga

SEQ ID NO: 3463 - DNA, 316 bp, Homo Sapiens
ttttaaactatacggggggtacactggtgttcttttattgttactctttacacacaaagaacagataggtcctgaagggccctttgatagtctcgcagcactgatgagtgatcagctctcccctctttctctggaactcggtagcttcatgttggcacctatcacagacgctgaaggcatttaaattttattttaaatcaaccaagagcccaaaaacccaacccatatttcgaaaaaactccaaggtgtactactcttgtttggttctgccatcctgccaccttacagtccttttgtttttcctattcttgcaggc

SEQ ID NO: 3464 - DNA, 1893 bp, Homo Sapiens
atttaccgccgcgcggagagtgagggcccaagtccgccctgctccgccacttaggccgccccagacgcttccctcggggctgccaccgggtcgggcgcggctgccgcggctagcgggccttccccgcaccggcgcggcccaaccgccaccgaaccttctggaagcggcggctgcctgggcccccacgccgccagaatcgtacgcccgcgcgagctctctgcagccttggcggcctgggaggcggggctcggggtggggccggcgcgggggcggggtcggcgcggggaggccgcgttcgattcgcccccggcgcgcaggccccgcctcaccagccccatcgctccacctctgccctccccctttatggcgcggcccgggctcattcattccgcgccgggcctgccagacacctgcgcccttctgcagccgcccgccgcatccgccgccgcagcccccagcatgtcgggcccagacgtcgagacgccgtccgccatccagatctgccggatcatgcggccagatgatgccaacgtggccggcaatgtccacggggggaccatcctgaagatgatcgaggaggcaggcgccatcatcagcacccggcattgcaacagccagaacggggagcgctgtgtggccgccctggctcgtgtcgagcgcaccgacttcctgtctcccatgtgcatcggtgaggtggcgcatgtcagcgcggagatcacctacacctccaagcactctgtggaggtgcaggtcaacgtgatgtccgaaaacatcctcacaggtgccaaaaagctgaccaataaggccaccctgtggtatgtgcccctgtcgctgaagaatgtggacaaggtcctcgaggtgcctcctgttgtgtattcccggcaggagcaggaggaggagggccggaagcggtatgaagcccagaagctggagcgcatggagaccaagtggaggaacggggacatcgtccagccagtcctcaacccagagccgaacactgtcagctacagccagtccagcttgatccacctggtggggccttcagactgcaccctgcacggctttgtgcacggaggtgtgaccatgaagctcatggatgaggtcgccgggatcgtggctgcacgccactgcaagaccaacatcgtcacagcttccgtggacgccattaattttcatgacaagatcagaaaaggctgcgtcatcaccatctcgggacgcatgaccttcacgagcaataagtccatggagatcgaggtgttggtggacgccgaccctgttgtggacagctctcagaagcgctaccgggccgccagtgccttcttcacctacgtgtcgctgagccaggaaggcaggtcgctgcctgtgccccagctggtgcccgagaccgaggacgagaagaagcgctttgaggaaggcaaagggcggtacctgcagatgaaggcgaagcgacagggccacgcggagcctcagccctagactccctcctcctgccactggtgcctcgagtagccatggcaacgggcccagtgtccagtcacttagaagttccccccttggccaaaaacccaattcacattgagagctggtgttgtctgaagttttcgtatcacagtgttaacctgtactctctcctgcaaacctacacaccaaagctttatttatatcattccagtatcaatgctacacagtgttgtcccgagcgccgggaggcgttgggcagaaaccctcgggaatgcttccgagcacgctgtagggtatgggaagaacccagcaccactaataaagctgctgcttggctggaaaaaaaaaaaaaaaaaaaaaaaaaaaaaaaaaaaaaaaaaaaaaaaaaaaaaaaaaaaaaaaaaaaaaaaaaaaaaaaaaaaaaaaaaaaaa

SEQ ID NO: 3465 - DNA, 336 bp, Homo Sapiens
ttttttttttttttttttttttttttttttttttttttttttttttcccccttgagcataaatgttttattgccacctcagggctttcaggcagggggggctgttgcatgccagttagagggaagggcctgacttttcacactttaggaaactggggcccatgagcggtaaaaaaatgtcctaaaggcataccgagtaaatagcaaagttgggaccacccttaattgttccctttggcctccccatccaccctccagttgtttttccatggttgggggggggggcaaggggggtccttaataaactgaccttggggccttcccaaacgggtgtttt

SEQ ID NO: 3466 - DNA, 614 bp, Homo Sapiens
ggttacttttaatccagctgcatagcccactggttgtggggcaatattggactgtcagcttcccctacaaccacagctaagccaaagacctcctggaagcatctcggacagcagcaacttttacttctttatttgaggtcactacaatatccagttcacctccagatttgatatagggagccatgccagggtccagcgttgtaatcatgctttctactgaatgttttgtcttatcaagcacagacttcaccataggattcccagccacacccttaataaaaccccagattccaccagcagatgcttcatcctgacctctagtaattctagggtcttcttgctcctctgggaaagtaatggctgatgtggttccagttccctgtgccagagatgtcaaactggcttgctgagtaataggagttggcaaaagacctgttcctgaaggtgcagaaaatgatggcatcaggggtgtctggggagctctcccagcatgtccccttgtaatgtcataagttgaaccaacagaaaatcctgatataggaggacccgaagggggtgcaggtaaaagagtgttgcggcagaagtgaaggtggaagtgagatcaggagataccg

SEQ ID NO: 3467 - DNA, 411 bp, Homo Sapiens
tttttaatgttgagcagatatgagcagatagtagctctggagtcctcaggtatccagcatgtgttgggaaatgtggatttccctgggtcaatgctcccaccatggccacttgaaggctaccagtatgattttcctgaaaacagatttaagaagagatgtcaccatcagcttcctcaaaccatgcgatcaatcctgaaaatgagtgtcctgtgttgactttgtcctgccaaatagcatgcccacccagaacctcagaatgtgggtttatttagaaatagaatctttgcagatgtaatttagttaagatgaagtcatcctggattaaggtggtctctgatccaatgactggcatccttttacaaagaataaaatttggacacagagcatctcagaaggaagatgacgtaaagg

SEQ ID NO: 3468 - DNA, 498 bp, Homo Sapiens
cacgagggctggcctatattccatcagtttacccaacaaatacaatttctcttttgactactatgcattcctgattctaataatgatctcctacattccaatttttccccagttatacttccacatgatacaccagagaagaaagatcctttctcatactgaagaacacaagaaatttgaatagttcctgctttctgcacctcccaccaaaacaaacttttcaatgatcaaaaaatgctgcagattttttgagttcccaatacgtttcatagaaaataagtaagaactatttttaaaatattcaaacaaaactaaaacaaaaatccagtgtcacatgggcctgagattttattttagaaaaaggttgttacataaaacaccctggccagttcatttcagcatgctctttcaaccagaagttcttaatatttatgatggcactagaaagggatttggcattttatgtccttctgtgtccttcatgtatctgatcaatga

SEQ ID NO: 3469 - DNA, 581 bp, Homo Sapiens
  misc_feature (245)..(245): n is a, c, g, or t
  misc_feature (580)..(580): n is a, c, g, or t
ttggctcccaaagtcattttatttaacaaaggggtcaaggcagaggaaagtttcccttaatatccccacaactgctccacatgtcttctgtggaaacacttcaccaggaactagctcaacactcttgctaacaatttagtgtctatacaggaaggctcggtgtctctgttacaggtggcccgttccttaaagcctttagggttaatcgcagctgcactgagtggccaagcagaccctgttgggantgtgaaagcagtttgttaacagggcccctggcggcgcccacgacggctgtcagactcagcaagtaacactgaatgtccaaaaatacggctgtgttaaactaacaagccaatccttctgctcagatctctggatagaaatgatttttcttttatctatggggaatgcaatttcatcacagccccttacataaacgctcctgaaaccctttcagtagacagcatttcaattcagagaccaaagtgaaactatctttgaaaacagggacgtggctgggaaaccatgcacacctcggcgaacaatttttcacccacacgagcttggactttctgggaant

SEQ ID NO: 3470 - DNA, 283 bp, Homo Sapiens
tttttttttttttttcatgtttatatctgcattttactgtgacttttcagtttgtgttttataaagtgtgcaataaacttaacatttggaggcatgaatacgtatttgtcggggggatacatagtcgtttttgtaaaccaatgggatgtgagttcacagggggtgggagcctgtggggtgggcactggctcggtcttccagctccgagctgctggctgaatcccggggagagaagtatcctggggctttctgctgacctgccgagtaattgccattttcaaat

SEQ ID NO: 3471 - DNA, 298 bp, Homo Sapiens
  misc_feature (8)..(8): n is a, c, g, or t
tttttttnttttaaaatgttttaatatttaactttatttttcaaaatcacgagagaatagaaagtaacattaatacacaattgatatctcaaaataatggaagtccagcactgaatatgcatatcattctgtatatgctatgtcagtcatataactctaagttttttctacatcttttataggagaggtggcccaaaggtacctagacatcacctctctcccagtccctctctactcctcccgggtgaagctcccaccacagaccatcactcctgggttcttcatgaaaatctaatgg

SEQ ID NO: 3472 - DNA, 505 bp, Homo Sapiens
tttttttttaaaattaaatattgttttattcatgtgaaatacaaatgtctctgggaaagaatacaggtttaattaaaggactgacagactgtatggaaactactacagagattgtaaaatggacttgtgagaacttaggagttttctgaggttaatagcatgcttacctttacatctaatttatttccaaacatgatgagctaaaacatattagtcttgcctgctgggtcacaaatataataataaaaggaaaaaaaggctataaaaacaaataaacaaaagtttcctgaagtatctggacatgagtttgaaggagaaaacagaaaaatgcactagagaatatacactgtgctgggaagatcacctgggtttgaatcagctgaactacagcagtaacagaagactttaaatatgaaaagtctgggataaacataatctgctttatggttagaatggtgataatggagcagagatattggatctacatcttctcttctcaatgaag

SEQ ID NO: 3473 - DNA, 433 bp, Homo Sapiens
tttacagctgcattagaaagttaacatgggggcaggggtgggggaaggagtccgagagcctgaggcctgagaacaagacgggaagacattgctggacatttattttatgacgtgcctcatcagcagaacaaagaagggcatggacttatgtttaaaaactgtccagaagtgaccaaagaaattcaccagtgatgcagatgagctcctaataatcatgccatcggagcaggctgtgatagcctggaaatcctgcctgaaaccaaactgcaacatttccaactaagaaatcaagcggtgataaacctcagtatctgaaagggttaaatattgtgcccacgtgactactgttctttctttctgtgaattaatgtgtgtgccagaaaatatttgtgaataaaaaacaattacataatctcattgtcatgaatgtggt

SEQ ID NO: 3474 - DNA, 367 bp, Homo Sapiens
tttttttttttttttttggattttagtatgccttgcaattttttccctttattctgatgcatgaagtacccactaaaagtgactgctgttagtatagcttcagtaatgaggtgatgaggtgacagggcaggtgatgctctcttagtctctttaggctactattacaaaatacttcagactgagtaattcataaacaacagagattattgttcacagatctggaggctggaaagtacaagactaaagggccagaatatttggtgtttggtgaaggtcaaacattcagacactctcaacgactatagcgacagcagcagtcttcaggaatcctatgtgagggacaaacactcagaagcccctcgtgccg

SEQ ID NO: 3475 - DNA, 493 bp, Homo Sapiens
cacggtaccttccaagctcatcaacacctctgactttgagttttttcgtgaaggtgggaatgtttagctcgggagagttgatttataagaaaaagacacgcttactgaaggcctccaatggaagagtcaagtggggagagactatgatttttccactcatacagagtgaaaaagaaattgtttttctcattaagctttacagtcgaagctctgtaagaagaaaacactttgtgggccagatttggataagtgaagacagtaataacattgaagcagtgaaccagtggaaagagacagtaataaatccagaaaaggttgttatcaggtggcacaaattaaatccatcttgaagacttcacacattaatttggtgaagaacttgacattcttttagaagacttatgatttcaatttgctaccaatgagaagaggcaaatcaacaaatttgtcaatttatgggggctataattatggtatataatgtatctgatag

SEQ ID NO: 3476 - DNA, 229 bp, Homo Sapiens
  misc_feature (7)..(7): n is a, c, g, or t
ctaaganctatgaagactactactagaaccaatagtctcaaagtaaaaacaaccaccaccatccaacaaaaggattacgtctgcatcttttctaacttactattttctaaaacacttgtggagcatcaagcagtttgctcagttgatttaatcttttttgccttttggctgtcaacatcataaccagcttttacatccattttagaaatctgcacaaattaagagagct

SEQ ID NO: 3477 - DNA, 906 bp, Homo Sapiens
gtaaactactagcaagttcttacacagccataaccttacagacccacataaacctctctcatattttttcttttagctcatcttgaatattgtaaagccatacatgtcgtataaaatgcccattcttccaatagatttcttcaaactattaagcaagttaaatgtggaaggaaggagggcctagttatactggaaccggggtttcaggtaatctgtgatgtcttacggtaatcacaaaacaggttactcagaaagaaggaaaagaggagctacgtccacggctagctttttgctcattacaagtctcaccattgtatcaccaagaactcattatgcgtggtgacagattcagaagtaatttctggggaacatatagaaacactatacataacttagaaactagatccaaatatttcaaaagtacatcaactttgatatacaaatagtagtcagaggtggttacaacatagtttgttttgctacagtgcgtctatgtatccatgcgcagttactcgggtagatgcataaataatacaggttcatctttcttctgacaatagcaataataaacgatggaaaacatatatttgtatataacggatcaatgctggtcttaagaatagtgtcatcagaaagccttaaatctgagaggcgacactaacgaggttttgctactcttgtaaataaataccaggaaagtcaccagttttatgattcacatggagggaggtgctcacagcccctcaatattaaacttgcttcatttgtaccatcacttagcaccatcaacttagaagtgtgcaaaaattgtgtaagttaacacatttatcctgcagcctaagtaaggacggaaaggcggctttgacccgcctttgggtctgggggggcatcactggttgatttaaa

SEQ ID NO: 3478 - DNA, 167 bp, Homo Sapiens
aattcaattcgtcataatctgtccctacacagcaaagtaattcgtgtgcagaatgaatgaactggaagaagttcttggtggatgctcaatacaaagggtggagagaactggagatctactatgagaagatctgcatacattgacaagcacattgagattgctaagag

SEQ ID NO: 3479 - DNA, 524 bp, Homo Sapiens
tccaacattacaaccaattcttcctcttttgaaaagtgggctgcaccttccctccccgccagcccccaaacagtatcttgaagcctgaatagagaacttaacatcaacccactacctcagactaattacaggtgagtagtggacatcatgtatatgttatcacattgcaaacatttccccatattataatctatgcaaagcctaaaacctcacttcaggctttagatttttatataatgattatcaccaccacctaatgaaatgtcttaagtatgtgccccaattttgtaaaatagttaaaaagaaagtttaggattttcctaggtgaggtacaaagcacacattaacaactgcttcacctcaaatacaatgagtggtgtgtgtgtgtgtgtgtgtgtgtgtgcgcgcgcgcagtcgactaagagaaagagtatgtctgtgtccttgatctctcagcatacttcactttgagttaatcaaaattttcaatctgtactactcaaaatctgtccatcatttatcat

SEQ ID NO: 3480 - DNA, 163 bp, Homo Sapiens
  misc_feature (109)..(109): n is a, c, g, or t
  misc_feature (118)..(118): n is a, c, g, or t
ggcacgagccttctctcactaacgctcttcctagtccccgggccaactcggacagtttgctcatttattgcaacggtcaaggctggcttgtgccagaacggcgcgcgcncacgacaangcacacacacggggggaaacttttttaaaaatgaaaggctagaag

SEQ ID NO: 3481 - DNA, 424 bp, Homo Sapiens
  misc_feature (30)..(31): n is a, c, g, or t
  misc_feature (51)..(51): n is a, c, g, or t
  misc_feature (54)..(55): n is a, c, g, or t
  misc_feature (58)..(58): n is a, c, g, or t
  misc_feature (60)..(70): n is a, c, g, or t
  misc_feature (74)..(74): n is a, c, g, or t
  misc_feature (206)..(206): n is a, c, g, or t
  misc_feature (249)..(249): n is a, c, g, or t
  misc_feature (260)..(260): n is a, c, g, or t
  misc_feature (365)..(365): n is a, c, g, or t
  misc_feature (404)..(404): n is a, c, g, or t
  misc_feature (422)..(422): n is a, c, g, or t
tttttttttttttttttttttttttttttnnttttttttttttttgacggnttnnttnannnnnnnnnnngggntgcccagagagatgacactatgtgcactcagcaggctgcagggccacctgccgcccaaacagctcaaccaagactgataacacagagggagggcgggcatctgataacacagagtggagggcataccttttntttcacaaatgcagagcaagtgagagagaggcaaccgacccgnatcccacaggncgcctccccaccacccggtgcatgagcagagctgggggcaagcatgggtacggggaactgaatgccctcctagaactgccggccacttgggatgggtgccctttngccagccagagttcaagctgcctccctaaaaggggacancccacagttttggggagntt

SEQ ID NO: 3482 - DNA, 618 bp, Homo Sapiens
ggcacgaggcaggtggggtactcgggaagctggagcgggccggcggtgcagtcacgggggagcgaggcctgctgggcttggcaacgagggactcggcctcggaggcgacccagaccacacagacactgggtcaaggagtaagcagaggataaacaactggaaggagagcaagcacaaagtcatcatggcttcagcgtctgctcgtggaaaccaagataaagatgcccattttccaccaccaagcaagcagagcctgttgttttgtccaaaatcaaaactgcacatccacagagcagagatctcaaagattatgcgagaatgtcaggaagaaagtttctggaagagagctctgcctttttctcttgtaagcatgcttgtcacccagggactagtctaccaaggttatttggcagctaattctagatttggatcattgcccaaagttgcacttgctggtctcttgggatttggccttggaaaggtatcatacataggagtatgccagagtaaattccatttttttgaagatcagctccgtggggctggttttggtccacagcataacaggcactgcctccttacctgtgaggaatgcaaaataaagcatggattaagtga

SEQ ID NO: 3483 - DNA, 505 bp, Homo Sapiens
cggccgccgagtccgcatgcgcaggctgcaaaggcccttttgggccggtcccgccgcgctaggttggcgagtgggactatttgatcctttccaggttcgccagcgtggtgttacgagaggaaagcgcagccgcagcgtacgaatgggaaggccaaacacggtcccggggagtctgagggaagctgcagggcgcctggaattggggtctcgagtgagccggtaaaaaccgcctcccgctgagcgtcccggaacaaatactgtctgaactgagccgtaagcaagaaacggtcaggagaagctggggcgatctgatgattagaacatttcagggactaccagagagaagtgcgtaattgctctaaggcaggtaggtaattggcctggaaacttgggaacgccccgcccccccaccccgactttcagcaaaccaccgtgcccaggaaaaagagcgattgtggaagaccctgtgaagaagagaccaggaaagcactgtggcttaagagag

SEQ ID NO: 3484 - DNA, 976 bp, Homo Sapiens
agacattaatatattaggagatatcaatgtatgagtgccattattgttgtatagctatgaaacagatcatcatcttttacctcattacatttcctcaatataaagttcccagtgactatccgatcacatccaatttctcccatttccaaagaagccgaataagggaacactaggaaaaaactttctaaatgcatcagcctcaacattccccttggctctgtaatactgaaagcccctgccaacgcatgcaaacatgaagccaatggtgttatgctctggaatgttggccgctttgaggcgctgcatcgcagcctcagcagtcttctcatcactgacgtcctcgttgaggagcacagtggcactctggattcggtgtccactaaatgacagtccaaccacacccgaggcatcaatatccagagggttcttttcagaagtcagtgatgacaggttgtccacctggcctccagccaagatgatattcatatcactgaaagtgctgactacttgctgcagataattactggctcccaccttacagcaattataaccaaagacaaggaccacacgaagttcagggttatctaaaagacctacttcagtgagttgatgtctttctaatgttaaattctttggatccttaataaaatgaaagggttgtatttttattccttcaatttgacgggaataatacaagcaaaaccagatactccaattgtcttatttccctgaggttcgatcggctaacctgatcccatttgggagtcactacaaattcctggggtcacaatcccaaggacttggccatagtttggggaatgctccccaaggggcaagttgctgtttccatactagtctttcctggctctcttttgcaccaccttttccgaaaatgaagttctgattactgtaagactcgtttggaagagccacctcagtcctgtacagcaaccacatcctcgggcgccccgctgaa

SEQ ID NO: 3485 - DNA, 692 bp, Homo Sapiens
aggctgggtgtgaatcggccgaggctccttcgtcgcggcctctagtgcactttcggctccttccccttcccgggcctttcagcttggtctttccgggcctcgcttcccccagcccctgcgcccggcccgaacgagaggttccggagccccggcgcgggcgggttctggggtgtagacgctgctggccagccctccccagccgaggttctcggcaccgccttgagagcttcagctgccccagggtgtgcagattagaatcccaagaaaatcaaatggcatccggggatttctgctcacctggagaagggatggaaatacttcaacaagtgtgcagcaaacaacttcctccttgtaacctgagtaaagaggacctgttacagaacccatacttcagcaagcttctcctgaatctctcacagcatgtggatgagagtggcttaagcctcaccctagcaaaggagcaggctcaggcatggaaggaagttcgactgcataagacaacatggttgaggtctgagattttacacagagtcattcaagagttgcttgtggactactatgtgaagatcaagacacaaatgtacttctgaggacaaaaagttcatgagacccttgaacagcggctgcttgtaactgaactgtgcggctcttaggtcctagccaggagaggggatcctccatgctggggctgg

SEQ ID NO: 3486 - DNA, 469 bp, Homo Sapiens
ttatagtaatgacaaatgacttatcagtgttcatcatctgaaagctaagtggttcgttcaatcactttttcaaagttgatagtagattgcatggtttcatgtttcctcatattggtttattaattctatttaatcaaggaaaataacttcagattccataaagtttcagtttatttttagtttactactaggtgagatagcacattacatacttttactatcaaatattattttagcagcttcccatagtaccaaatgatttgattccctactctcatttcttaaagcatataaatatttatgggcttaaaaagggggtttttaaaaactgaggatatcagtaataaattgcagaatattttgcaaagctttcttttggaaagcaaacttttgtgcctgcctatatgcaaagtattttatcagggacttgaacaaagacctcactctttttcacttgtcttatgtcgag

SEQ ID NO: 3487 - DNA, 364 bp, Homo Sapiens
  misc_feature (286)..(286): n is a, c, g, or t
  misc_feature (291)..(291): n is a, c, g, or t
  misc_feature (334)..(334): n is a, c, g, or t
tccgaagaactcctggttgttattggattttgtattttaatacaaattattgaattttataagcttgtacacaatatttaattagtgtgaaaggaaacaaagaatgcaggaaaaataatttaatatcaacctcagttgacaaggtgctcagattattcaattcgggatcctccttttgttaggtttttgagacaaccctaggacctaaactgtgtcacagacttctggaatgtttagggcagtgctaggtaatttcctcgtaatggattctgttatttactttccnattcnttattcccctttcttctgaagggttaatggaaggtggaaaatngagggtggggtaaataccaaaagggtggtg

SEQ ID NO: 3488 - DNA, 459 bp, Homo Sapiens
tttttttttttttttttaattttcatctaaatgatcagtttattgaattttagtaatgtaagttgagatcatgaaacatacaatctaattcaaaagaagaatcataggtaccaattcaacaccattagcactactttcacaatagtgacaccccacttataacactcttttttgggtctctgactgtgaacaagattgtggaaggttggttgaggttaggcctaggcattacggttaagaaataacagatgctaattagttagtggggaagtgaagctcatgtttaggccttttcataatgtctttatgctaaataaattaaatgaagtaaacagccatggctattgaactacagaatacataaaaatacattctgtgattcacctataaacaaaagagtaaagcagaatgtgtcaaattttccatagcaggtaaagcatagaaaaaaaatctagctga

SEQ ID NO: 3489 - DNA, 418 bp, Homo Sapiens
  misc_feature (296)..(296): n is a, c, g, or t
  misc_feature (328)..(328): n is a, c, g, or t
  misc_feature (394)..(394): n is a, c, g, or t
gtcctgagcagccaacacaccagcccagacagctgcaagtcaccatggacgctgaaggcctggcgctgctgctgccgcccgtcaccctggcagccctggtggacagctggctccgagagactgcccagggctcaactacgcagccttggtcagcggggcaggcccctcgcaggcggcgctgtgggccaaatcccctggggtactggcagggcagcctttcttcgatgccatatttacccaactcaactgccaagtctcctggttcctccccgagggatcgaagctggtgccggtgncagagtggccgaggtccggggccctgccaacntgcctgctgctgggggaacgggtggccctcaacacgctggcccgctgcagtggcattgccagtgcntgccgccgctgcagtggaggccgc

SEQ ID NO: 3490 - DNA, 357 bp, Homo Sapiens
tttttttttttttttttcacataacaataagcatttatttcatacaggcttattggagaagtcagctggtctaggctgggctcagctggatggatcttcttcaatctgtagacagcagaggcagccagacaacttttttctttgtctctcatcctcctcttcagaccggtgggtgacctgcggtttgtttttaggtttgatgtcttagaatagttggagtagttgagggttggcaaggaatatctctccatgtctttccatgtggttagcttgagcctctgcaaaccatcgcagtctctatgtatttgaacttcttaacatgggagctggcttcctcctgagatcgacgtgcagaac

SEQ ID NO: 3491 - DNA, 564 bp, Homo Sapiens
ttatccaccaatatctatattagagtatgtggcaataattaatatatttatatggaaattgtctcatgccttataagctcctaaaataaaatcaaggtcattatgtgactaatgatagcactaggaggaaaagaaaatactgaaagtaaaacagtcttcagccttggtttcagctatctcttcaaatcagcattaagtatttaatatcagatataacatttttggcttgtcagaccagtaaatcatgtttttccactggacaaaggaagctgaagaaacaactgttgaacaaactaaatgctgtgacatgaagcatctgacttctaagtctgagtatttagttaaaatgattggtgaacatttaactgggcaaaaggaatggcatccatcatccaaacaggctcacttcccccagcccccaaaatgaacagtagttttaatagcaaaagaaataaaaagtttttttcttttgattctttagagccaactgtgaaagaggtcagcaatacattaacagcagcaatggacaaggaagagcaaaatagaggattaaagtatcttgct

SEQ ID NO: 3492 - DNA, 318 bp, Homo Sapiens
gcgcggtgggtgcggaggggcgtgtgtgccggcgcgcgcgccytggggtgcaaaccccgagcgtctacgytgccatgaggggcgcgaacgctgggcgccactctgcctgctgctggctgccgccacccagctctcgcggcagcagtccccagagagacctgttttcacatgtggtggcattcttactggagagtctggatttattggcagtgaaggttttcctggagtgtaccctccaaatagcaaatgtacttggaaaatcacagttcccgaagaaaagtagtcgttctcaatttccgattcatagacctcgagagt

SEQ ID NO: 3493 - DNA, 553 bp, Homo Sapiens
  misc_feature (25)..(25): n is a, c, g, or t
  misc_feature (456)..(456): n is a, c, g, or t
  misc_feature (464)..(464): n is a, c, g, or t
  misc_feature (475)..(475): n is a, c, g, or t
  misc_feature (511)..(511): n is a, c, g, or t
  misc_feature (522)..(522): n is a, c, g, or t
  misc_feature (534)..(534): n is a, c, g, or t
gtacacattccaaaaagagattgantacacttgcaatgaagggttcttgcttgagggagccaggagtcgggtttgtcttgccaatggaagttggagtggagccactcccgactgtgtgcctgtcagatgtgccaccccgccacaactggccaatggggtgacggaaggcctggactatggcttcatgaaggaagtaacattccactgtcatgagggctacatcttgcacggtgctccaaaactcacctgtcagtcagatggcaactgggatgcagagattcctctctgtaaaccagtcaactgtggacctcctgaagatcttgcccatggtttccctaatggtttttcctttattcatgggggccatatacagtatcagtgctttcctggttataagctccatggaaattcatcaagaagggtgcctctccaatggctcctggagtggcagctcancttcctgnctgccttgcanatgttccacaccagtaaattgaatatggaactgtcnatgggacagantttgactgtggnaaggcagcccgattcagtg

SEQ ID NO: 3494 - DNA, 387 bp, Homo Sapiens
ttttacatttaatcagggtgaattaaaatatttaatttaaaaatggctttactgaacctcaattcagttaggtaattaatcaattcagttaggtaatagctactaagtatgtaatacaatgttaggggagagacatataacatccatagtttcaatctcattgagtttataatctactaaggaactgaagataagtgctaaaagaactgtaacacgaggtaaaacctgtgacaagatttaggagcagcacaactatatagttgtgaaactaaaccagcctcaaggctgaaaggcaggggagaaaagactacctaccaaagtaggttttttttgtttgtttgtttgtttgtttgttttaacatggattctccaaagataggtagaaaa

SEQ ID NO: 3495 - DNA, 813 bp, Homo Sapiens
  misc_feature (86)..(86): n is a, c, g, or t
  misc_feature (780)..(780): n is a, c, g, or t
  misc_feature (808)..(808): n is a, c, g, or t
taacgcccccaaggcgtaaccccttttctcaccgccggggatgttgattgtttagggaccgggcccccccccacccaaagagcttntttggtggagtgtctgctcaaatctgttgcccactgtacaaaataagatgtttttgtattagtgagctttgacagttttttgtatgttctggttacacgtccttaatcagctacatgactggcaaaggttttctcctggtaacttgtcttttcattctctaaacaatggttttcacatagcaagaaggtttaattttattaaagtatgacttgccaatttttttccttttataggctctatttttggtgtcatatctaagaaatgtttacttaacctatagtcacaaaacttttttcctatgtttcatagttctgaatctcatgtttgggtctatgattcattgagttaattctctatggtgtgtgaggtagggatcaagattacttccattaagttttgaatttcaattattacatttttcatttttagacgttctatttggttcatttattatctgcttagcctctgatactctcttgcttatttatgctccttagcttctcctttgtttcttcaaacacattaaacatatttgcatctcctattctaacatctgagtctttgcaggtgtgctatctttcgccataacttctgaggccccttctctaggtgtgctgtgattttcactatgagctcatagtctagggatcctgctcgctggaaattcctgacgactagcgttggcgtttctcnctgaaagacatacattacattctaccanagccc

SEQ ID NO: 3496 - DNA, 350 bp, Homo Sapiens
ttttgttaataaatcctttatgaaaatcatataaatattagccaaaagaaagcaagtggggctagattaatatcagataaagaatatttaaggcaaaagtattatatctataaagaagttacttctaaataaataaatggtttaattcactaagaagatatgacaagtatgtatcagtatataacctaaggaaatagtcccaaaatgtataaagcaaaattaacagaacctagccaggcatggtggcatatacctgtagtcccagctagttgggagactgaggcggaaagatcgcttgagcctaggagcttggagtgtagcctaggcaatataatgagaccctgtctctt

SEQ ID NO: 3497 - DNA, 384 bp, Homo Sapiens
  misc_feature (39)..(40): n is a, c, g, or t
  misc_feature (263)..(263): n is a, c, g, or t
  misc_feature (316)..(316): n is a, c, g, or t
  misc_feature (361)..(361): n is a, c, g, or t
gcctggtcctttttgggctctttaaatatgcggcggccnngaagggagcccggggcaggggctacggggagcctggttccccgcagacggggtctaactcgcccagctaaggggcgttgaaaggagtgtccaagagagtgcagggtagccagggtcgcttccttgtcaggggcccggtcccccttttgcccctggatctcgcgcctcagagctgcagccattaaatgctcttctccaaggccagtggcgacgcggttgagtanggggacgatcgaggggcgcccgggaccctgcggagttggaagggttttgtctngcggatgaaccaattaagcgtgcagccggcgcttgcagagctgcntcagccgcaggggctgggggttt

SEQ ID NO: 3498 - DNA, 381 bp, Homo Sapiens
  misc_feature (231)..(231): n is a, c, g, or t
  misc_feature (306)..(306): n is a, c, g, or t
cttcgacctggcctggcggctgcgtatcaacttcccctacctctacatcgtggcttccatgatgctcaacgtccgcctgcaggttcatattgagatccattgaaggccctcccagactgacgaaggcgtgacctcaggcccaccgtatccaagaacacgaagcatgagggacagaagagggcccctcggcacctgcctggcacaagtgcagcaggccggaggaggtgactnggacaaactatcatgcagccttaagaaaagaatgccggagggcccttggactgcagatgcaccctcctggatgantaagcctgtggttgatggaaattcacaaagtgaggcattatcactggaaatgagaaaggttccgagcggggctgg

SEQ ID NO: 3499 - DNA, 581 bp, Homo Sapiens
ttttttttttttgctgagtaatattctattggatggatgtaccatagtttgtttatcctggtatatatttttaatttttacaatctatagcttccttgaaggcacattacttaggctgaagtttcagatatttcctaatctgaccctcgcctttcatcccaattttattctgacctcactgttccctgaacatgaccttcatttctctgagcttttgcttggagaacattccaggaatgttcaagcatggatagccatcaccccactgccatacggcaggtgcggaacctaagaccagacttaaacccattactgaattgcatttcccaggggattgatttaggaatgagaatgttacctagtgggaaccaatgaaacctgcattgagagttcataaatttgaagctgagagggtatgaggagcagtggcagctctattgtggcccaagggagaatgtgtctgagaacaggatcatttgtgggagaaatgaaaaagagaaattaggtcataaggatataatatacacccacaatcaaactgtattcatgtgcacctgtacattctttttcattcaagtgta

SEQ ID NO: 3500 - DNA, 349 bp, Homo Sapiens
gaaatggagaagcatcatgtgccaagtgacttcaatgtcaatgtgaaggtggatacaggtcccagggaagatctgattaaggtcctggaggatatgagacaagaatatgagcttataataaagaagaagcatcgagacttggacacttggtataaagaacagtctgcagccatgtcccaggaggcagccagtccagccactgtgcagagcagacaaggtgacatccacgaactgaagcgcacattccaggccctgggagattgacctgcagacacagtacagcacgaaatcttgcttttgggaaaacatgttattccgagacccagtctcgttactccttgcaagctcc

SEQ ID NO: 3501 - DNA, 696 bp, Homo Sapiens
taggctaggtagcgaggcctgggtggtgctagaggggcggaaagtaacaaggaggtgggggtacaaatcctcagctcctgcttccgcaagcactaacctgctctgaagtgagccaggcagctctggccatcttttcccagccacagaatcaggtgatggtccagaattaagagctgtcacctgtgtcattcactcacaatggaagaaatgaagaagactgccatccggctgcccaaaggcaaacagaagcctataaagacggaatggaattcccggtgtgtccttttcacctacttccaaggggacatcagcagcgtagtggatgaacacttctccagagctctgagcaatatcaagagcccccaggaattgaccccctcgagtcagagtgaaggtgtgatgctgaaaaacgatgatagcatgtctccaaatcagtggcgttactcgtctccatggacaaagccacaaccagaagtacctgtcacaaaccgtgccgccaactgcaacttgcatgtgcctggtcccatggctgtgaatcagttctcaccgtccctggctaggagggcctctgttcggcctggggagctgtggcatttctcctccctggcgggcaccagctccttagagcctggctactctcatcccttccccgctcggcacctggttccagagccccagcttgatgggaaacgtgag

SEQ ID NO: 3502 - DNA, 329 bp, Homo Sapiens
aaatgcagttccaggaaagcaactgctttggttcctaaggaagaaattctaaataatgcaaacttttaaaataagcatctaggtttttgataattctgtctacttacaacaaacttgttagtacataaccactattttaataattattttctctacacaaatgtgtaatatcatatttgactttgcttatgcaggccataagttccaaaagataatttccctgcccacaaaggcataaacttgaaaacacatgagattgaatcaacatgctttaataggaaaagatgtatggtctatatatgtatcaatctggtgaatcctcgttctat

SEQ ID NO: 3503 - DNA, 607 bp, Homo Sapiens
ttttttttttttttcaatagaaaaaacatttattatatatgcatgcaagaacactacaaagagtagctctctgaacagcaaggggtaagggtttacagatcagctttatggtgtgtgtcttaaggcttcagaatgaaactacaaaaagttctgataaggcttatttacaataccttgggaggtcctagtgctaagtgcccttataagaggaacactcagaggagggttttggcagctgaattctcggtaagacctgctttactcatcaaagtttagctaaggctttttgtctgcagctgctgtttgttcagatattctcaaagtagacttgtgtcatattgatgggttgttagtcccttcattgccctatttgaaacttgacatgaagtttcactgacaaggagctgtgctgattgctgtggagataaggctaggttcagaggttgggagttaagggatctgcgagatttgcgaaagacacgaacatagattaaaacaaagatgaataagcagaaaagaacaattaaaagcacatagccccatgatctgaaccagtctcccacttttgcaaatatgccttgccaatcaagtaacggtacattcttca

SEQ ID NO: 3504 - DNA, 505 bp, Homo Sapiens
  misc_feature (2)..(2): n is a, c, g, or t
  misc_feature (440)..(440): n is a, c, g, or t
  misc_feature (486)..(486): n is a, c, g, or t
  misc_feature (498)..(498): n is a, c, g, or t
antatctaattaattatttaagtggaagaggctgcatcacaattgaggtaatgtagagcaacatgttaaagaatgatggttagcagaagctgttgtatacaatcttcatgaaaatttcagtgtgtatttttctttttctataatacctttaactgcaaagaaaaggcagtttcaaatataagaaatttatttcaggtaagggtaatattttaatagtagtcaataatctagcttaaggctgtaactcttctatcggggctaattgtatgaataggtgtcagtatgttgaagattactttcttttgtgactttcttctacctcatgccactgtttaaaagtaaaatgtattttaatgatgttaggaataagactaccattctaaatatcacctacttatggaataacatgtaataatttttaacctttaatggattccctnaaattggtattattggggattaggaatgtgtttttatggaccgggntaggtgtttccnctgcggc

SEQ ID NO: 3505 - DNA, 328 bp, Homo Sapiens
tatggacaaaaatacttagaataatttattctttgttaagcattagactgaagttatattgttttggtatattgagtttttatatcaatatagggtgctgcaaagctgtgtacaataaaggtcaagggtagtgatttgctgacaacaattaggaaaagagaactatagaatgcacaggaacattttcagaaatgggttttattatatttcataggcaccactcactttacttttggtgggttttaatacttgaatcaaaataaaataatacatgagttaagtattaaaccaacagattaaaaccccaggcccccgagcccctcatttt

SEQ ID NO: 3506 - DNA, 633 bp, Homo Sapiens
tgcagtgaaaacagactcagatgaagtctaaagacactggactctagagagtggattacataccaacgaccaagattcaagtgtggggggaaaaaaataccttagacagtctatgtaggcgtcaacactaaaataaaaggcaaacatgcaggactttcaaagcttgattagataatggttcttggttttctttccttcaaatttgtgctcataattaatattcaggttccctctccccgctttcatagatcccaaagtttgagaaatgcagcaattcaatggtgaaaaaaacattcttctccccagcttctgttttcatatgtactgtgtagtggtatcagtgttaaaaatggaagatcattatgaagaaacaattggtcattggggtatatctgtttctataggacaaggatttgtgtctaaatattccttacttgtatctcagaggactatctgttaaataattgatcttaatgccagcataagaaatcaagggaactatttctcagacatttctttctctaaattaagtagggtcccaggttccaagtttacatggagagaactatgttacctgggagagaatgtaattttctaattccaaagaaaccataattctaggaacattattgg

SEQ ID NO: 3507 - DNA, 349 bp, Homo Sapiens
  misc_feature (65)..(65): n is a, c, g, or t
  misc_feature (80)..(81): n is a, c, g, or t
  misc_feature (123)..(123): n is a, c, g, or t
  misc_feature (128)..(128): n is a, c, g, or t
ggagactagtctgtctcagactgatgctgttctcactgatttgaatatttctgggaaattggatnctacagtcacaaatnngaacagtaagcctatagaagtttttcagggagtaaatatttnctatngcagtgtcctgaattggttctcccttgcaagactgaactgtaggaacttagtcctagtttatgatacagccaagtaacatagtcacatgggaaaaagagcttgagtcagatttcttaatgtgtgttgttaacttggtagaacattgagaattatttaagtcagagaacgatctgttactggggcagaaattctcaaccttttcagttctccaaaatttaag

SEQ ID NO: 3508 - DNA, 421 bp, Homo Sapiens
ggagagggtcccagcaaaggctatatgctgtagtagcaaaacgtcaatgtgtgtatgtgctgtgtcgggaggggcagggttctgggcctttccagtcacagtgaagagcttacactaaagcaaagaggggtgataaacagatgcttctccagcatactccagcccaatgctgccccacgcaaatacaatgtgagcttcaaatgtgagccccgtatgtaaagttaaattttccaacagtacatttaaaaagtaaaaagaaatgggtaaaattcattttaataatatatttgattcaacccaatatacccaaactactatttcagtatgtaaccattaaaaaaaaaagattttacctttttctgtactaactcttcaacatcagtattttacactcaacagcacagctcaatttgaacaaatc

SEQ ID NO: 3509 - DNA, 314 bp, Homo Sapiens
agcggccgcccttttttttttttttttaacgtagactttcagctgcatgacctggtcccagccctgtagctcggaagccccaggaggtgaggttcacacccttagggctgggactctctgagccctaaggatgagattctaagttcagagatgagttgagggcttccctgaagggaccaaggaagtccctgtggcagaaacaataggagacaagaggtcagtggtgcggaggggaggggatggtacagaggggcctggggctggatcggagggttttggctgggaggagaagagaggggagggcaagaattctt

SEQ ID NO: 3510 - DNA, 280 bp, Homo Sapiens
  misc_feature (203)..(203): n is a, c, g, or t
  misc_feature (255)..(255): n is a, c, g, or t
  misc_feature (260)..(260): n is a, c, g, or t
  misc_feature (267)..(267): n is a, c, g, or t
  misc_feature (277)..(277): n is a, c, g, or t
ggtcgattgtcctattctcagaatgaattatcttctatgggtaatgaagaactctttggcttagtcagaaggaattaacgaacctcggtaggaatgtatttccatcctcccaccctacagatataagaggttaaaataacagttcgcccaatttaagcccagtagtgtcagttttcctaatctcagtccaggtaggaattaantaagaaatatctcaagtgttgatgctatccaagcatgttggggtggaaaggnaattngtgcccncgaaaaaatnggg

SEQ ID NO: 3511 - DNA, 132 bp, Homo Sapiens
ttgagtaggacggttaaaacaattataaaatttcctacttgagctcaggtcccttagttgggtgggaaatgagaggaaacactgttctcttttacagaacatatcccatgtgaagcttttcttacccctgag

SEQ ID NO: 3512 - DNA, 267 bp, Homo Sapiens
ggggcccggccggactgagaaggggagcgcgctgcgcgtcgcaggagtaacctacttggtctcctgctttcgcgacatggccttcaattttggggctccctcgggcacctccggtaccgctgcagccaccgcggcccccgcgggtgggtttggaggatttgggacaacatctacaactgcaggttctgcgttcagcttttctgccccaactaacacaggcactactggactctttggtggtactaacaacaaaggttccggattcga

SEQ ID NO: 3513 - DNA, 895 bp, Homo Sapiens
aaagctgtatgagactatattattcaaggtccaattatgcatcaaacattgaatggcacagcaatggtttacatatgcaagtaaataggacatacaaacacttagattccacctctaccaaataccttgattaatgcacagaggagggggaatactgacacaggaaacctgcccagaaactagactggcagagatgtcaggttaacaaactgctaaaagttacatctccaaaaaggcacttatcattgttataaaagtgcttaaaatctaaacttgaaccttgtgcctggtttataaatttacaagaaactgcaaagaaccacagactagtttataatatcaagtttccatacaaaattgtccaagaatttatttgcaataccttacatgtgaactgaaataaactttgcaaactacaattatactaaagttttatactgaaaattcaaatcagcttactcataatctccagatagctcttccatcattattttaattaagtattacattgcccaccaacctttgaattatgatatgtgtaagctggacgcaccacttacccttcgggcagaagaaatcaggagaaatcagtctcaactgtgacaactaattgtaacataagcgcatacatgggatgagagacatcaaatctgcaataaattacctaatatttaccacatggtatttacaacactagtgcctgaaactattaaaaattcaactagtatgaatgctaatcatacccgttgagtttaacaaattagaaggtctctctgaaatcaatagatctagtagatactcctaatatggtaccatgctacggattaggtactccacccagaatagaatgttcataacgaattcagatagaaaaggggcagaccgcataagcatt

SEQ ID NO: 3514 - DNA, 466 bp, Homo Sapiens
  misc_feature (463)..(463): n is a, c, g, or t
tttttttttttttttttttaaaagtcattttattgcaaaacatgaaggactgcctctcattaaaaaatatgtttgcccttccaaagttggtgtaacatctattgagtgcctattttgtactgggtcctctgccaggtgggggatcttaacaatttcttaaattagataatgtgttaaaatacagtgaagatatagctttttaacaaaattctgccgtcaaccattccgtcaaacaagtatcatacttcctcagatctaagatgctgccaattatagaatgcaccatcattttttgtaatcccaagaaagaaaaaaatgctgcccgttaaactctgacatcaactgattaaaagacacaccctaatttcaaagatgttgatttctaactgtatcttagactcaatggaatattctaagctatttctactctaactgaccatcttttaaaatctaactgcaaagntca

SEQ ID NO: 3515 - DNA, 409 bp, Homo Sapiens
gctattaccaaagcatccaaagcgtactgcaaacattcttaacatgtcttctggaaaatgtacctactttggtttctcttgggtaaatgcctaagagtgaaactgttgagttttaggttgtaccagcaaaggtactggtaggaacaagatcaaattgtgtaattgaggaaagtttaaaaaaagaactattatgggacaacaaaacatgctaggactagcaagggcaaggatccttaaacatccctagccctaacaaggcacaaacagggagctattacttaatctcaaaagggtagctgcagctttaaaagattactcaacagagctctagctttcagtagaattcagttaacaaactggcagagaaagagtgatctcactaagaaccttgacctgactctctaccctt

SEQ ID NO: 3516 - DNA, 443 bp, Homo Sapiens
ttttttttggtaagtgaacgggtaaattttgatttattcctaggactttattccccatacagataaatttgcattctcatactgaatgtaaacacttaaagatggatttaactctacagctagaattccatattaaattatatttcactattccctaactaaaaacttttttttccctgagtaagggatatgttgagatttacataaacagcacttcacatgataccgggatttcaaatttttaaaaagatgcagagttcacttccaataatggcaaagtagcacacagatatcagaccaaccctcctgctgatagcaactgcaaactctgaacaaatatattttagaaaaaactaaaggcactggaaacaactataaacaagtggaaagtagagggaagttggcacttaaaaagtgaacagcactggctcaatgtctcattt

SEQ ID NO: 3517 - DNA, 398 bp, Homo Sapiens
  misc_feature (10)..(11): n is a, c, g, or t
  misc_feature (18)..(18): n is a, c, g, or t
aatgggaatnntacaagnaaaaatattaacaaaaataaaagaaaatgctctataatggatattctactcagcacacaggatcgcatgagactgtctttgcttttatttaacaagaggcgaaatgagtatatgctgtaattctgcacctgttctatgtatcttgcctgcggggagatactctctataaaactatgcactccatagctcctgtgatgaacagcattcaaattctgcctgttatgaggtgtaattcaataagcaccttttgctgagcagctctttgcagggatacgtgaagggctgagctaaggaataaaagcccttttggcaatctggatacttcgccttctcttccactcagttctcaggtcgatctcaccatcaggataccctgccaa

SEQ ID NO: 3518 - DNA, 601 bp, Homo Sapiens
gacctccctcgacgccgacagctgctctgggtactgtttccgggtcagggtgactctggggtgaggaaactgcgactgggagcgggacccaggcgtgcagcattcgccatgctccgtcacgcgtgggagactggctgtggggtaccggcccggaaagcacgcagctccaaagccgcttcctcagggaaatttgcgtgaccttactgccctccgtctacaggccttgtacctctccaggccgatttttccacaatttaaatcccagttcacctggtatccagctccagcaacttagagcgtttcacgtcacgccgggcgccaggcgtcggcttgtataacctgaaaagcgctcctgtttttctcatctgtgcaggtggcgtttgattcccaccatgggcatcacccagtttcggttatttaaattttgtacctggctagcaacagtattctcattcctaaagagattaatatgcagatctggcagaggacggcaattaagtggagaccaaataactttggcaactacagttgattattcatcagttcctaagcagacagatgttgaagagtggacttcctgggatgaagatgcacccaccag

SEQ ID NO: 3519 - DNA, 452 bp, Homo Sapiens
tttttttttttttttttttttttttttttagaggcagtatttggttttattattttgaagtaaaatttatacatagtgaaacgcttacgtctttaacatactatttgaggagttttgacaaatatataaactcttgtcaatatataaactcttgtcaatatatagagtattccaccaccccaaaacatttcctaaagtctctacccattactggctctactccacctggaaacgcagagaggcacagccctatcttttgcacccataaggacactcacagcatagactgggcgagggccagcatctctggactgactgcccatcagggagggcttaggcctcaaccaacttgttgagcaacgagagagtcccatagagggcagacaggggcatctttgcttctacatcccaggttgacctggggttatccagctccatcctaaggccacact

SEQ ID NO: 3520 - DNA, 410 bp, Homo Sapiens
catcatcatcatgatcgctcgacatggatacgacttttttttttttttttttttttttttttttttaacaaagccatggccatttgaaaaaaaaaaaaagccttttaacaagtatcgtttaaaatcatggttatattctacacagtgcattgaatttaaggttctcaaggctgtcttccatatactcagttctataaagagcagcctcctctctagaaagttgtttaaaactaggagacttgagatgcaaaatgctgagagattcagctcaaacaaatatatcacctcttgccctttaccttgtcaaggctgaacagtcttgaacaggcctccaggttcccagcccatgccctgctactctccttttatgtatcatgccgatcaaatgctggaagattctttccccttct

SEQ ID NO: 3521 - DNA, 328 bp, Homo Sapiens
tatcatcatcatgatcgctcgacatcgatacgactttttttttctttttttttttaatggcttatggtatttattgccaaatcaccatagaaagttggtgttgattcttcacttcctccaatagtgaatgggagtggccatttcctgacctcttgacaatacctggcacaatattcaccattcagaaaaatcttttccagttatttgtttgagcacgttcaaatgttggagcctttttgtgttctttgtctagttttctttggtgatgcttttttaaatttatttgtagtatcacagcccttttccccttctgtcgtcttctcgcagc

SEQ ID NO: 3522 - DNA, 213 bp, Homo Sapiens
ttttttttttttaattttgtaatcgtgttattttactgaatgcaattaacccagttggttcgccctgaatcctttctaaggcacttgtaaggaatggcaggtttttaaggaccacgctattgcatgttctccgtcaaaaccattgccaatcattttctgctgtcagggatgaaatctagcatataaaaaagaaaaccatgcgtgtgtgcctgt

SEQ ID NO: 3523 - DNA, 3171 bp, Homo Sapiens
gaattcgcggccgcgtcgaccagatctgaggcgaggctaggtgagccgtgggaagaaaagagggagcagctagggcgcgggtctccctcctcccggagtttggaacggctgaagttcaccttccagcccctagcgccgttcgcgccgctaggcctggcttctgaggcggttgcggtgctcggtcgccgcctaggcggggcagggtgcgagcaggggcttcgggccacgcttctcttggcgacaggattttgctgtgaagtccgtccgggaaacggaggaaaaaaagagttgcgggaggctgtcggctaataacggttcttgatacatatttgccagacttcaagatttcagaaaaggggtgaaagagaagattgcaactttgagtcagacctgtaggcctgatagactgattaaaccacagaaggtgacctgctgagaaaagtggtacaaatactgggaaaaacctgctcttctgcgttaagtgggagacaatgtcacaagttaaaagctcttattcctatgatgccccctcggatttcatcaatttttcatccttggatgatgaaggagatactcaaaacatagattcatggtttgaggagaaggccaatttggagaataagttactggggaagaatggaactggagggctttttcagggcaaaactcctttgagaaaggctaatcttcagcaagctattgtcacacctttgaaaccagttgacaacacttactacaaagaggcagaaaaagaaaatcttgtggaacaatccattccgtcaaatgcttgttcttccctggaagttgaggcagccatatcaagaaaaactccagcccagcctcagagaagatctcttaggctttctgctcagaaggatttggaacagaaagaaaagcatcatgtaaaaatgaaagccaagagatgtgccactcctgtaatcatcgatgaaattctaccctctaagaaaatgaaagtttctaacaacaaaaagaagccagaggaagaaggcagtgctcatcaagatactgctgaaaagaatgcatcttccccagagaaagccaagggtagacatactgtgccttgtatgccacctgcaaagcagaagtttctaaaaagtactgaggagcaagagctggagaagagtatgaaaatgcagcaagaggtggtggagatgcggaaaaagaatgaagaattcaagaaacttgctctggctggaatagggcaacctgtgaagaaatcagtgagccaggtcaccaaatcagttgacttccacttccgcacagatgagcgaatcaaacaacatcctaagaaccaggaggaatataaggaagtgaactttacatctgaactacgaaagcatccttcatctcctgcccgagtgactaagggatgtaccattgttaagcctttcaacctgtcccaaggaaagaaaagaacatttgatgaaacagtttctacatatgtgccccttgcacagcaagttgaagacttccataaacgaacccctaacagatatcatttgaggagcaagaaggatgatattaacctgttaccctccaaatcttctgtgaccaagatttgcagagacccacagactcctgtactgcaaaccaaacaccgtgcacgggctgtgacctgcaaaagtacagcagagctggaggctgaggagctcgagaaattgcaacaatacaaattcaaagcacgtgaacttgatcccagaatacttgaaggtgggcccatcttgcccaagaaaccacctgtgaaaccacccaccgagcctattggctttgatttggaaattgagaaaagaatccaggagcgagaatcaaagaagaaaacagaggatgaacactttgaatttcattccagaccttgccctactaagattttggaagatgttgtgggtgttcctgaaaagaaggtacttccaatcaccgtccccaagtcaccagcctttgcattgaagaacagaattcgaatgcccaccaaagaagatgaggaagaggacgaaccggtagtgataaaagctcaacctgtgccacattatggggtgccttttaagccccaaatcccagaggcaagaactgtggaaatatgccctttctcctttgattctcgagacaaagaacgtcagttacagaaggagaagaaaataaaagaactgcagaaaggggaggtgcccaagttcaaggcacttcccttgcctcattttgacaccattaacctgccagagaagaaggtaaagaatgtgacccagattgaacctttctgcttggagactgacagaagaggtgctctgaaggcacagacttggaagcaccagctggaagaagaactgagacagcagaaagaagcagcttgtttcaaggctcgtccaaacaccgtcatctctcaggagccctttgttcccaagaaagagaagaaatcagttgctgagggcctttctggttctctagttcaggaaccttttcagctggctactgagaagagagccaaagagcggcaggagctggagaagagaatggctgaggtagaagcccagaaagcccagcagttggaggaggccagactacaggaggaagagcagaaaaaagaggagctggccaggctacggagagaactggtgcataaggcaaatccaatacgcaagtaccagggtctggagataaagtcaagtgaccagcctctgactgtgcctgtatctcccaaattctccactcgattccactgctaaactcagctgtgagctgcggataccgcccggcaatgggacctgctcttaacctcaaacctaggaccgtcttgctttgtcattgggcatggagagaacccatttctccagacttttacctacccgtgcctgagaaagcatacttgacaactgtggactccagttttgttgagaattgttttcttacattactaaggctaataatgagatgtaactcatgaatgtctcgattagactccatgtagttacttcctttaaaccatcagccggccttttatatgggtcttcactctgactagaatttagtctctgtgtcagcacagtgtaatctctattgctattgccccttacgactctcaccctctccccactttttttaaaaattttaaccagaaaataaagatagttaaatcctggaaaaaaaaaaaaaaaaaaaaaa

SEQ ID NO: 3524 - DNA, 427 bp, Homo Sapiens
  misc_feature (344)..(344): n is a, c, g, or t
tttaggtagaaatcatttcctccgccaccccaggaaaacatagatacattatcacaaatgtattctccaaaatcagtcgtaaacttaggtcttacaaattaaacagcatttttttttcacacatcctgagctgttaaatgaaaacaattatgagtcatcaattccaggctcgagaattccactttggtttacctggatcaaggttactgtcaggccagctacctgcctagattccagactccagcctttctgagggcctttccttcctgagttccattagcaaaagaggtattgccggatgtaattttcccttgaaattacacaacctcatccacttgaaactngaggactaaagctactaaatcccacctctgtgaagagcgaagatctcaatgcatgggcggatttgagagcccccttctgtcct

SEQ ID NO: 3525 - DNA, 441 bp, Homo Sapiens
tttttttttttctaattccattttttaattcaatcatcacatctgtgtattgtctcagggtcaatttttcagtaagaattccagacatttctcttcgttcacattacagtaaactatttttcaatacatttcctccttgactttcaaggcttgaaagtcaaagactttcctttcactagatctcataagtcataactgctctcaaccagatgcaggagtaattttgtataaaagaacaagctttttaaagtccaataactgtatctttgggggaaggttaaaagaatgtttaaatacaaaaaagaaagtaaaaaaaaaaagagagagagacaaataactctcctctagaaaaaagggcttgggagccctggctaggccaggcagggaggaagcaataaatagggggagaaaatggcaataagacgttatatagcccttcta

SEQ ID NO: 3526 - DNA, 3125 bp, Homo Sapiens
ccgcgcccctcccctcacgggctctggccttaaccagagctcgcggactggcggggacaggtcccacctcctggctcccaggacgggtctgcaccaacctcagtttcggggctgcggctcacagaagtctaacctgcccgggacgcccgcaccaactcctgcgcgcggtccttccaaccctcctgctaccatgaagattgcagtgattggacagagcctgtttggccaggaagtttactgccacctgaggaaggagggccacgaagtggtgggtgtgttcactgttccagacaaggatggaaaggccgaccccctgggtctggaagctgagaaggatggagtgccggtattcaagtactcccggtggcgtgcaaaaggacaggctttgcctgatgtggtggcaaaataccaggctttgggggccgagctcaacgtcctgcccttctgcagccaattcatccccatggagataatcagtgccccccggcatggctccatcatctatcacccgtcactgctccctaggcaccgaggggcctcggccatcaactggaccctcattcacggagataagaaaggggggttttccatcttctgggcggatgatggtctggacaccggagacctgctgctgcagaaggagtgtgaggtgctcccggacgacaccgtgagcacgctgtacaaccgcttcctcttccctgaaggcatcaaagggatggtgcaggccgtgaggctgatcgctgagggcaaagcccccagactccctcagcctgaggaaggagccacctatgaggggattcagaagaaggagacagccaagatcaactgggaccagccggcagaggccattcacaactggatccgcgggaacgacaaggtgccgggagcctggacagaggcctgtgaacagaaactgacatttttcaactcaacgctgaacacttcaggcctggtgcccgagggagacgctttgcccatcccaggagcccatcggccaggggtggtcaccaaagcaggactcatcctctttgggaatgatgacaaaatgctgctggtgaagaatattcagctggaggatggcaaaatgatcctggcctcgaacttctttaagggggcagccagcagtgtccttgagctgacagaggcagagctggttactgcggaggctgtgcggagtgtttggcagcggatcctccccaaagtcctggaggttgaagactccactgatttcttcaagtcaggggccgcgtctgtggacgttgtgaggctggtggaggaagtgaaggagctgtgtgatggcctggagttagaaaatgaagatgtgtacatggcatccacctttggggacttcatccagctgttagtgaggaagctgcgaggggacgatgaggagggcgagtgcagcattgactacgtggaaatggcagtgaacaagcgcactgtccgcatgccccaccagctcttcattgggggggagttcgtggatgccgagggcgccaagacctctgagaccatcaatcccaccgatggaagtgtcatctgccaggtatccctggcccaagtcaccgacgtcgacaaggcagtggccgcagccaaggatgcctttgagaatggacggtgggggaagatcagtgcgcgggaccggggccggctgatgtacaggttggcagatctcatggagcagcaccaggaggagctggccaccattgaggccctggatgcgggtgccgtctacacgctggccctgaagacccacgtgggcatgtccatccagaccttccgctactttgctggctggtgtgacaagatccagggctccaccatccccatcaaccaggccagacccaaccgcaacctgaccttgaccaggaaggagcctgttggggtttgtggcatcatcatcccctggaactatcccctgatgatgctgtcctggaagacagctgcctgcctggctgccgggaacacagtggtgatcaagcctgctcaggtgaccccactcacagccttgaagtttgcagagctgacattaaaggccggcattcccaaaggtgtggttaacgtcctcccaggatctggctccctggtcggccagagactctcagaccatcctgatgtgaggaaaatcgggttcacaggctccacagaggtgggcaagcacatcatgaaaagctgtgccataagtaacgtgaagaaggtgtccctggaactgggcgggaagtcacccctcatcatctttgctgactgtgacctcaacaaggctgtgcagatggggatgagttctgttttcttcaacaaaggagagaattgcattgcagcaggccgactctttgtggaggactccattcatgatgagttcgtgcggagagtggtagaagaggtgcggaagatgaaggtgggcaacccgctggacagggacaccgaccacgggccgcagaatcaccatgcccaccttgtgaagctgatggagtactgccagcatggcgtgaaggaaggggccacactggtctgcggcgggaatcaggtccctcggccagggttcttctttgagccaactgttttcacagacgtggaagaccacatgttcatagccaaggaggagtccttcgggcctgtcatgatcatctctcggtttgctgatggggacttggatgccgtgctgtctcgggccaatgccacggaatttggcctggcttctggtgtcttcaccagggacatcaacaaggccctgtatgtcagtgacaagctccaggcaggcactgtgtttgtcaacacgtacaacaagaccgacgtggccgctcccttcggaggattcaaacagtctggatttggcaaagatctaggagaggcggctctgaacgagtacctgcgggtcaagacagtgaccttcgaatactgaagaaaggtctttgtgagaagaaagtccctgcccctccctcgtggctggggccccctccctcttgagcctgggtgcacagcacctcccacctggggggctagtggaagccctcctgcctgcacaccatgtctgcatcttggacgccctctgtccagtcagaagcagcccttggctgggtgaggtgtgcccctcccagggagaataaagcttctgaagagagaccgtc

SEQ ID NO: 3527 - DNA, 484 bp, Homo Sapiens
ttttttttacatgtggtagcgcatttaatattcacagcaacacaaatgggaagtaatattcttatcgccattttacaaataaaaagaccaaggcccaaaagggttgaatatcttgctcaaaatcacacacattttgccaccccccattccaagtcccataggcaactcagactcagcatgtccatgatgtaacttatcttcctctccaaaccatttcctcacttgtgccctactctcagtggggacatctccaatccccaggcccaagctggaaaccggaagccatttctgactcctccctctccctcacccactccatccaaatggaacccaagtcctgtacattgtacttctccggtattgatcaatccccgctctcgtctccacgcccacggtgctgacccattgttaggtgcccggctgctgctcctgggtcatcactttcgcaggcccatctccaccatttccagcatcctacacactg

SEQ ID NO: 3528 - DNA, 2119 bp, Homo Sapiens
cgggaacccaggcggggcgagccgcgggagagtggagggcaggcgcctgggctgggggcggggaccaggcggggcagggggcagggagaggagggcggcgggagctgagccggaatcgcagcgtgagcaggtggagccgcggtgggagcccgccgggtcgagctgagtaaggcggcgggctcggcgggggccatggagctgctaaagctgaaccggagcgtgcagggaaccggacccgggccgggggcttccctgtgccgcccgggggcgcctctcctcaacagcagcagtgtgggcaacctcagctgcgagccccctcgcattcgcggagccgggacacgagaattggagctggccattagaatcactctttacgcagtgatcttcctgatgagcgttggaggaaatatgctcatcatcgtggtcctgggactgagccgccgcctgaggactgtcaccaatgccttcctcctctcactggcagtcagcgacctcctgctggctgtggcttgcatgcccttcaccctcctgcccaatctcatgggcacattcatctttggcaccgtcatctgcaaggcggtttcctacctcatgggggtgtctgtgagtgtgtccacgctaagcctcgtggccatcgcactggagcggtacagcgccatctgccgaccactgcaggcacgagtgtggcagacgcgctcccacgcggctcgcgtgattgtagccacgtggctgctgtccggactactcatggtgccctaccccgtgtacactgtcgtgcaaccagtggggcctcgtgtgctgcagtgcgtgcatcgctggcccagtgcgcgggtccgccagacctggtccgtactgctgcttctgctcttgttcttcatcccgggtgtggttatggccgtggcctacgggcttatctctcgcgagctctacttagggcttcgctttgacggcgacagtgacagcgacagccaaagcagggtccgaaaccaaggcgggctgccaggggctgttcaccagaacgggcgttgccggcctgagactggcgcggttggcgaagacagcgatggctgctacgtgcaacttccacgttcccggcctgccctggagctgacggcgctgacggctcctgggccgggatccggctcccggcccacccaggccaagctgctggctaagaagcgcgtggtgcgaatgttgctggtgatcgttgtgcttttttttctgtgttggttgccagtttatagtgccaacacgtggcgcgcctttgatggcccgggtgcacaccgagcactctcgggtgctcctatctccttcattcacttgctgagctacgcctcggcctgtgtcaaccccctggtctactgcttcatgcaccgtcgctttcgccaggcctgcctggaaacttgcgctcgctgctgcccccggcctccacgagctcgccccagggctcttcccgatgaggaccctcccactccctccattgcttcgctgtccaggcttagctacaccaccatcagcacactgggccctggctgaggagtagaggggccgtgggggttgaggcagggcaaatgacatgcactgacccttccagacatagaaaacacaaaccacaactgacacaggaaaccaacacccaaagcatggactaaccccaacgcacaggaaaaggtagcttacctgacacaagaggaataagaatggagcagtacatgggaaaggaggcatgcctctgatatgggactgagcctggcccatagaaacatgacactgaccttggagagacacagcgtccctagcagtgaactatttctacacagtgggaactctgacaagggctgacctgcctctcacacacatagattaatggcactgattgttttagagactatggagcctggcacaggactgactctgggatgctcctagtttgacctcacagtgccccttcccaatcagcactgaaaataccatcaggcctaatctcatacctctgaccaacaggctgttctgcactgaaaaggttcttcatccctttccagttaaggaccgaggccctgccctctccttccttacccaaactgttcaagaaataataaattgtttggcttcctcctga

SEQ ID NO: 3529 - DNA, 572 bp, Homo Sapiens
gttcttattggctactgtaaaggcaatcttagaagatgcatgtaaatataatataaatcaactttcttatcaattagacattttccccactcacatctcttagtttttagggtattcagtcccagcaaccaaaaaaaaaaatgtaaatcatattttgtttctggctaatgttcaatcagtttttcttttataagagcttttgatgtactgtttctacggttctttaggcacttacacataaaaacattcagagggttttccccttaacacacaacttttaattctcatgaaaatgttgcacagttagaatttgtcttgcataggtaaattctgtttataacatggactctgataatccaaatattaacattcctaatatagggaaaaataagcaccattcatagctaaaaataatagaatcctgtcataacccaatatcataattacaaggatctggatatattctagaccaaatcacactccctgaaacattaccatgtacaataaagcctgaaatagccaactaattgaatgttattcttaatcctttacactggcactaaaaatagttc

SEQ ID NO: 3530 - DNA, 391 bp, Homo Sapiens
tacgaaatagagtcgcccaggctggagtgcaatcacgtgatcatagctcattgtaaccttgaacttctcatctcagactcccaaatacctgggactacaggcatgagccactgcagttgcctattttttttttttttttttttgtagagacgggggtctggctatattgctcaggctggtctcgaactcctggcctcaagcaatcctcccaaagtgctgggattacaagcatgaaccttcacacccagcccctagatattcctggaggccagtttgcattatatccagaggacaaccacaaaattctcatgccatgcccttcccaaacccctaggggatcttattttcctccactacaggatggagtattcctacccaaccagaggatgag

SEQ ID NO: 3531 - DNA, 160 bp, Homo Sapiens
  misc_feature (68)..(68): n is a, c, g, or t
ttttttttttaatcacattttgaatgcaactgagaaactggttttgtaggcctaccttttatttaagngtacatctggctccaatgttaccccaaacatgcaaaacataaggcaacaattctgatcattttataggctcccaagcccattagcaatatct

SEQ ID NO: 3532 - DNA, 432 bp, Homo Sapiens
tgaccctagggcctccacccctaatgtatcatcattgccacccatttttatggtacttattgttcttaagcttatcctcttaatcttttcatgtaagcaaagctcattaatttctgtcttggaaatgctactactctctttaattactcaccaaatccaactttaacttttgacctggtttctctgccacaagttctgtcccactggagcccatactcacctaccgctttgccatcacatttaacagaaaactcttatcaacttacttcctgcttaacattagctccttcctatctatatccaaatttcttaaattcaaattttttagctggagtaaaaatggtcccagtaccatttcctgttcccttcactataacctacatttttgtcacattaagtttttccctattccaggacaggtcaggcccttta

SEQ ID NO: 3533 - DNA, 559 bp, Homo Sapiens
  misc_feature (476)..(476): n is a, c, g, or t
  misc_feature (482)..(482): n is a, c, g, or t
  misc_feature (492)..(492): n is a, c, g, or t
acataccattctgctttatgaaagatcagcaaaaatacataaacaaggatataactagtacatttataaaatacatcataacaatgaaaccaaaggatcccacacaataatcttcacatttgacatgctggttacagctgaggagagccagtgtctttggcaagtgattcatatacataagcgatgacactgactaatcctaacacttctgaaatgttcattctttaccagttaaacctaaaataaatcagcaagagtactgaaatataacaagaatgaaatccaaaatttgtcgaaaggggcaatgtttaatactaggaagaacactgaatttggggactaattcttgtccccaagtacatttggattcttgtcttcgttcctggatgatcttaggcaagtaatctgtgctatgaatccttcacttttaaaatgagagagttggttggctggttctctaaggtctttctagattntaactntccatgattntaaaatctttgacacaggcttatttttgtgttgtaaaatgaaatctctaacaatactaacttggcag

SEQ ID NO: 3534 - DNA, 439 bp, Homo Sapiens
tttttttttttttttttggggaaaggagcctgcagtgaaaggatcagttggattttttgtcattgttagtttgtttaaataaattataagacagtatattaagctttagtctctgtaactcttatgtttgtgccccattattttagtgctttagagcaacaccttgtttttcctctattttatactagttcttgctccagaggcatggctttgaggctagaatcatgagcaatctctcataaacaagtctgttatgcacctggagatactcaagatttgcctctgttagcaaggccacttagagattactctgttctacttcagagaccctccactatggcatccatgcagggggtgtgcttggggactaagcaatcttgttcagtttaattattgtacttttttattaataaaaaggtcttaaacttccctcgtgccg

SEQ ID NO: 3535 - DNA, 399 bp, Homo Sapiens
tagttagtgaagatcaactgtgtgctgagctcgtgttgggtggcaagggacacagacgaaaagggcacggtggaacccagctacttctcacctgctccagcgcagtgcaggcttgtctgcttttggagccgagcctggacacctccgtgtccttcccccggcagagtgctgccagcacgctgtctcagactctccagcatctcctggttgatgtgcatcatggggaccacacaagattattttataggctgcacaggcaaagcataaaatcacctcgggtcacatagcgagagttattctctctgcaaattctttacagtctttcctttatatccagaagagtctctgtgtggtgctaacttgcctcgaagaccaaataattgctagtctccctttgtg

SEQ ID NO: 3536 - DNA, 329 bp, Homo Sapiens
ctgggatgtgacgggcaccagaatgctccctctccaaaggttctaaggaccaaagctgacagtttctttacttggtagctgacagcatctactcctgaagaccggaaatatggcttgtaccatccaaaaggcagaagcacttgacggggctcatttgatgcagatcctctggtatgatgaggaagagtctctctacccagctgtatggttgagagacaactgtccgtgctctgattgctacctgggattctgcaaaagcacggaaacttctagtgggaagctcttgaatgtgaacattggaattaaaggcttgataatttgacagaaaa

SEQ ID NO: 3537 - DNA, 366 bp, Homo Sapiens
attgggtacaatggtgagccagacagacacagcgcctgtccttttgtaagaatatttatttttataaacagctgagctaattaacacccatcacctcacatagttactgtcttgtttcttaatatggacatttgcagctatgaatttccctctgcacactgttgtcatcacacactctcagttttggtattttgtgtttttgttttcattcatctcaaagtattttctaatttcccttgtgatttcttctttgaccccttgattgtttagaaatctgttaatttccacacatttgtaaatgttccaatttttcttttgttattgccagcttcattccattgtgttcagagatgatacagtcagtgc

SEQ ID NO: 3538 - DNA, 1126 bp, Homo Sapiens
agccgagacggtgcagggccggagaagcaccttcactcccagcctgcgccccgatgctgcgcgttctgtgcctcctgcgcccctggaggccccttcgggcccgcggctgcgcttccgacggggcggccgggggctcagagatccaagtgcgcgccctggcgggtccggaccaagggatcactgagattctgatgaacagaccttctgcccgcaatgccttggggaatgtcttcgtcagtgagctgctggaaactctggcccagctgcgggaggaccggcaagtgcgtgtcctgctcttcagaagtggagtgaagggcgcgttctgtgcaggtgcagacctgaaggagcgggaacagatgagtgaagcagaggtgggggtgtttgtccagcgactccggggcctgatgaatgacatcgcttcctcggcagtcatgggactgattgagaccacgcgagggctcctcccgggggcaggagggactcagaggctgccccgttgtctgggggtggccctggcgaaggagctcatcttcacgggccgacgactgagtggaactgaggcccacgtactggggctggtgaatcacgctgtggcccagaacgaggagggggacgccgcctaccagcgggcacgagcactggcccaggagatcctgccccaggcccccattgccgtgcggctgggcaaagtagccattaaccgaggaacggaggtggacattgcatctgggatggccattgaagggatgtgctatgcccagaatattccaacccgggaccggctagagggcatggcagccttcagggagaagcggactcccaaatttgttggcaaatgacccccattttaaccttcagcatgggagatgcatgccctgaagagcaggatccagaaggaagatttgtggccagattgccttcatcatttcacctctccagacttccatttcttcacaaggatgatgatggaaataaaatgactggcgtgatgcctggaaccaaggtgctgatcctaccacctactgctaccttccttagcttcaccctggctagaaataatcacgagggttgggtttgctttggaaaatgcctgtctctctacttgaatgataaagaattaaattag

SEQ ID NO: 3539 - DNA, 300 bp, Homo Sapiens
  misc_feature (81)..(81): n is a, c, g, or t
aggggtgcgaggaaagtcagtgagcaaatcgcggactaccggggctgccagctcgcctgactcccggcctcttgcgctctnatgtgcggagaagggtgcgggctcttcgccctttgtgtcctccttctttcactaacttctggactttccagctcttccgaagttcgttcttgcgcaaagcccaaaggctggaaaaccgtccacgatgaccagcatgactcagtctctgcgggaggtgataaaggccatgaccaaggctcgcaattttgagagagttttgggaaagattactcttgtctc

SEQ ID NO: 3540 - DNA, 364 bp, Homo Sapiens
ggggtttcgccatgttggccaggctggtctcgaattcttgacctcaggtgatccactcgcctctgccttccaaagtgctgggattactggcatgaaccaccatgtgcagcccattgtggaatagtctttaaacatatttgctcctgcttttttttttttcaagtatcatcacttcaggtatcccttatggcattttccctgacttgtacttaagaaatataattatggtttcttacagtttgtcagggagccactggtgatgtggatggggcacagattgtctttaaagaagttcagaaactcttcaaaaggaaaaacaatcagattgaacagttctcggtgaaaaaggcagagcgatttcgga

SEQ ID NO: 3541 - DNA, 479 bp, Homo Sapiens
tttttttttttttttttaaaaagttgatttaaaaaagaaacaacacaagtttagaatccataaaatgtcagcaatgctgatgtgcactggactgaaacatcttgatcatcttctgatagaagtaatattccatacaaaaagattcttagattccattttttgcttcattattgtttgtggcttgctttctttgagcaataaaggggtacatacacttgtccgctcctaggaaccgatacatgcacacaactgcttcaaatggtaggatgctcttcatgaaggtcacgatgtacatgaggcggggagtgcagatcatgggctggtcagtgaggatggccttcatggcctgcttcacacagtaatcaggcttcagaggtggcagaaaaggctcaatttctttcctgattcgggagcctctgaacatgccagtgtctacaagataagggcaaaccaaggttgttttaattccatccttttca

SEQ ID NO: 3542 - DNA, 399 bp, Homo Sapiens
ttttttttttttcgattttttttttttagtttaataaagtttgaaaactttcaaagctcctgtacaattccattaataccagacttggcaaaacgctaattctgtttgaaaaggtgtttttttaaaagtagtatatttgaacaatgtctaagtatgtggggtggggagaatccatatccgaatatcttcataaagcaagttcttaaaatttgcaaagctattaggttagtgcaaaagtaatcatggtttttcttttgcaccaactaatatttaccactgaacacgctggcatttagatcccttccttctttcagcatgctagacagtaaagagaatgggcatgaggtggcaggacagaaggaaagagtgaagataatggagttaggtcagtgagggata

SEQ ID NO: 3543 - DNA, 501 bp, Homo Sapiens
tttttgactttgcaatgtactttaaaacatttatcctacagatcacatatgtacataaaaatacatacatacatattcataaagatacatagggatttttcattacagcaatgtccttattagcaaaagactataaataaactaaatggtcatccatatgggtctgaacaaactatggtgcatcccaaaatggaatattatgataaaaacataatccccaagatagtcaaaaagcaaatcaaaaagcaatgtggacagctctctcattagtgtttgtatgcagagaagatttctggaaggagacacaagaaatgagtaacagcagttgccctgaggagcaagactgagagttgaaatcaaatggagatttgcttttcactgaacatcctgtaaacatgaaattttttccatgtacattactttttcaattgaacaaaaactggttaacttttaaaaatgagtgcagtcatcatttatcattacattcctatcagaaaggca

SEQ ID NO: 3544 - DNA, 813 bp, Homo Sapiens
  misc_feature (618)..(618): n is a, c, g, or t
gcggccgccagcgcggtgtagggggcaggcgcggatcccgccaccgccgcgcgctcggcccgccgactcccggcgccgccgccgccactgccgtcgccgccgccgcctgccgggactggagcgcgccgtccgccgcggacaagaccctggcctcaggccggagcagccccatcatgccgagggagcgcagggagcgggatgcgaaggagcgggacaccatgaaggaggacggcggcgcggagttctcggctcgctccaggaagaggaaggcaaacgtgaccgttgatccagatgaagaaatggccaaaatcgacaggacggcgagggaccagtgtgggagccagccttgggacaataatgcagtctgtgcagacccctgctccctgatccccacacctgacaaagaagatgatgaccgggtttacccaaactcaacgtgcaagcctcggattattgcaccatccagaggctccccgctgcctgtactgagctgggcaaatagagaagaagtctggaaaatcatgttaaacaaggaaaagacatacttaagggatcagcactttcttgagcaacaccctcttctgcagccaaaaatgcgagcatttcttctggattggntaatgggaggtgtgtgaagtctataaacttcacagggagaccctttacttggcacagatttctttgaccggattatgcgacacaagaaaatggtgtaaaaactttttacaggctaatgggaattaatctttattaattgcaccaaactggaggaaacattccccaaagttggaccattggggtagtaacagatgg

SEQ ID NO: 3545 - DNA, 463 bp, Homo Sapiens
tgacctggaaaagcaattttatcttagcatttatccctgaaaaatgaaacactgcattttctgtcacaaactgtttctgagccttctgtcctcaataatcatcagctctcaggggataagaaatgctacagcaatgggaaacgaaacatacccagaagctcgtattcctgacaggtttctttagatgggacagcggtgcactgtctgagcacggggaagggtctgagcagaagaaaagagctgccaaagatgcatggaatgagcaacagcaaaacaccagtggagtctgtaagtccctcctcagcaaacgaggtcccggaaggcaaggcagcagctagttctcctccgaactggacaggcggcatggggcttctgttgtccagctgcagccaggagtgcagacatctatttcctcttcccactggcccttccagcgctgggatggaggagccatgtcaattgt

SEQ ID NO: 3546 - DNA, 459 bp, Homo Sapiens
aaacaatccaaatctaagcttagaagaaaagtttagcgttaacacctttatcttcatgaataagcttcacttgctcttggcaagagaagagtgcttgagttacagaaggcataagtagtttgaagaatgcagcagcctttttgtaaacttcccagatatcaaaatagactttgatatataaatggttttctgagatgacactgcctctatttctataaccatttcacctggactatctaatcagtcctatgaatgtatccctaaatgtggttattgaaaacctaatagctgcctcatgacaagtacatgttatttaaggaggaaaaaatattaaattttgaattgagtgtgtaggctccctatcattatatatagagtttctttttccacggtagtcagtgacttaacctgaattgtaaatgtttgtaagggttaattgtctacatcaacttagttaat

SEQ ID NO: 3547 - DNA, 333 bp, Homo Sapiens
tttttttttttttttttccaggcaagaatgaaaaagtatacgtttaatatcaaagccacgtcaagtatcattgatagtaacgacactggagagtggctctaggacgttcttactcggagtgaaccccagaggccctggcctgtgtccgaggaagggcattcatgctggagactggagcctcacggtccccagggcctgggggttcctcaaaatacccctcagaagggacatcctgccagaggccaggtggaaggcggtctccgctcgcggggcggcccccttgcccgcctggcctgagtggcctgccctgggtggcctgagcagtaccaccag

SEQ ID NO: 3548 - DNA, 399 bp, Homo Sapiens
ttttctgtcatctgtcacccagactggactgcagtggtgccatcatgtcttactgcagcctcaaactcctgggctcaagtggtcctcctgcttcagcttcccaagtagctgggactacaggcatgtgcaccacccccagccaaaacatccatattttctcttagaatggtttacattatgatgggggatggggagctgggggagggctgtacattcccaaaagaaagtagtgttataggaaatccaaatgcacttcagtgattcactcctgaaaagcagcctgggtatgttggcagattttgtttgcatttgtcttgcgtatttaaagtctcaggaaatctagtcttggtccaaaacactggagaaaaaaataacaccagacaaaacacatttgagtaa

SEQ ID NO: 3549 - DNA, 791 bp, Homo Sapiens
  misc_feature (16)..(16): n is a, c, g, or t
  misc_feature (18)..(18): n is a, c, g, or t
gacgggggaaccatananccctttaggctaggtacgaggccccgtggttagctgctccgtcatcgtgcggccgacgcttattcgcgctcgtgtgcaggcccggctcggctcctggtccccggtgcgagggttaacgcgaggccccggctcggtccccggactaggccgtgaccccgggtgccatgaagcaggagggctcggcgcggcgccgcggcgcggacaaggcgaaaccgccgccggcggaggagaacaagaacccccaccgccgccggcccccaggatgtggagatgaaagaggaggcagcgacgggtggcgggtcgacgggggaggcagacggcaagacggcggcggcagcggttgagcactcccagcgagagctggacacagtcaccttggaggacatcaaggagcacgtgaaacagctagagaaaggcggtttccggccaaggaggccgaaaattcggtgcggcgggccccgtgcgggatgctgccttccaatcacgccgccttcaaccattatgttcgtgtatcaagggctgtgcaggggcttcttcacgttcaaataatgccactcgagactttttgtgctccccttcctggaagagcccatggacacaagagcgcttgatttacagttccgtccccgcacggggaaaagctgcgtgacaccccttcctgcctgaaggtgggaaggctattttccaaatcctcggtggtcatcttcatgatgaacagcaagcgctacaaagaggcacagaagatctcgtgatgatctgatgcaaaagatcag

SEQ ID NO: 3550 - DNA, 259903 bp, Homo Sapiens
gatcctccttgcttagtgccctgcaaataagcaccttcatttctaccactgcaaaccttggtgtggatatctggttttactgtgccaggtgagcggaccccagttcagtttgataacaaaaggataaacttttcaataaattgtatggaaacctgtatatccacatgcaaaaaagagaaattagacccttctcttacaccatacacaatagtgaattcaaaatggattaaagacttaaatataagccctgataccacaaaattcctaaaataaaacccaaggggaaagctccttgacattgatcttgacaattatagtttgaatatgacaccaaaagctcaggcaacaaaagcaaaaataaataagcgggactacatcaaaccaaaaagcttctgcacagcaaaggaaacaacaaaatgaaaaggcagactacagaattgaagaaaatatttgtaagccatgtatcagataaggagttactatctaaaatatataaggagctcatataactcaatagcaaaaaccaaataacccaattataaaatgtacaaaggacccaatagacattttttcatagaagacatacaaatggccaacaggcacatgaaagggtgctcagcatcactgatcatcagggaaatgccaatcataaacactgtgaggtatcacttacatctgttaggatagctattatcaaaatgtcaaaagacaacatgtgttggtaaggatgtggagaaaaggaaactcctgtacactgttgatggggatgtagcttggtgcagccattaggaaataagtatggaggttcctcagaaaattagaaatataatggccatatgacccaacaatccaacttctgggtatatatccagagggatttatttttatgtattagttaatggtgcagcatatctgctggcatgctgactactcctgtcttcacctggatatccacaccagcttctcagactctttgtctcctttcttgactggggaaattgaggttcatggtggtgagttacacgctcttatggaattcagtgaccagacacttgtctcttgtaacatggtactaaagagttttattctggcaaaacaacttttctttgcaccttccatgaggcatcttctattgttcctaggctcccctaacctgggcattttgtgggaatttcattggctacctggtacctggaaactgtgcaaggagattccctccactcttcaacccagagattgagaggggttctcttggctttctgaacccagagattcgatgggagggttcccttgcctctctgaatctggaaatcgagaagggtggtagtgggtcccttggctcttggaacccagaaattggggaggggatccttaggcttctgaattcaaggactgtgtggggtgttctcttcgttctcagacacagggagtgtgaaaaattaagtaagtgggactactttctggtcacttacaagtttttcttctcttttgtttaactatttgttaattccatgggtaattcttactgtgtcagtcgccttttctcctttcttccccgctgtttacatgcttagccataaaggcactgactcagttcactagctccagaaatggcaaaattttacagccaatttggaactgcaatggcctctttgagaactcggggtctccctaaaccggcttatctaagatttcccgcttcttgtcactctccccctccctcatccctcctccctcctgttcaccaccttggacctttccttcagctccctgaattttttcatctgtccccttcaacacctctacttcctgcacccctctatccactcttcagcaggcctttccattcccactcaggcctcttagctgcctatagtcactagggcttcaggcacccttcccccatcgagggctcgccaggtgctcagggacctcaaaatcaatcactcaaggatgaaaaggctcactgggaccactgtggatattatatccactcagatggatttttgagacatccagacatccacttgatgtctctttggtccctcacccaaaatttagtctatagcttcttattggattatacatcagggcaaaagaaaatcttacaaatctcctttacaaatattagtgggatgcttcagccttcttattgagcaggtaaccccgtcttgtcccatctaccaaaaacacaatcttcgtcaaaatttaaaggtgtgggaggctgaggcaggagaatggcgtgaacccgggaggcggagcttgcagtgagccgagatcccgccactgcactccagcctgggcgacagagcgagactccgtctcaaaaaaaaaaaaaaaaaaaaaaaaaaatttaaagctgtgtcaaagatgaaagccaattaaaaaaattaaaccgtgagttttgtatttttgtgtttatgcctgagtcctggctgaaaatttagaaataaagccataagatctgtatttgtatctgtgtgtatgtttatgtatacatgtatgtatgtatatgtgtatgttatgtatatgtgatattttcctgactatagatggtattaccaaacaaacttataaatcctttaaaggagctccattctaggtatcctggagataaataagcacttatataaattaaactaaaactctcaagaatttagaaactaacccaaatgctttaaaaactcaacatcacatcatttagtaaatctttgataaagaagagttagcttaaggccagacccagtgggtcatgcatgtaatcctagcactttgagaggccaaaacaggaaggttacttgaggccaggagttcgagaccagccttagcaacatagcgataccctgtttctaccaaaaatttaaaaagtagctggacatggtgttatgcacctgtagtcctagctgctcagaaggctgaggtgggaggattgctggaacccagcctggatgacagagagaaactccgtctctaaatagatgtagatatagttgtaaatagatatctgctttaataaaaacagctatgtctctgagttatcagcattaagcataatacaaacatacatatttatattacctgggtatgttcttactaagcttatataggcttcctagtcaaaaagttaacactgtatctgttagatatttaagatttcacagaatataaatttgagtttaatcgagtcattattctgatgataacttttatttcaacaatatttataatatggttaaaaacagtttccaatttttaggggataacttacaaccttatgctatgctaaattaagtaatagatattcattaaatggctagattatttctaagtaaaaatactgaaatattaattactatgcataaatttatatttgtatttatattatttttccttctggtctttatatggtacagagaggctaaatattttttggagctgggtgcggtggctcatgcttgtaatcccagaactttgggaggctaagacaggaagattccttgaggccaggagtttgataccagcctaggaaacatagagagacaccatttctaccaaaaaaaaggaaaaatatctgggcctagtgacttgggcctgtgttcctagccactcaggaggctgaggcaggaggataggttgagcccaaaaggtcaaggctgcagtgagctgtaactgtatccctgtactccagcctgggcaacagagtgaaaccctgtctcgaaaaaaaaaaaaaaaaagactatgatactgacatcaatgaaatagaatttagagtctataaataaaaccgtatatatattgtcaagtgaacttttgacaaggacaccaaaaccattctatgggaaaaaaaaatcttgtcaacaaatggtgctaagacaactgtatttccacttgtaaaacagttaattcagacccccacctcacatcctatataaactcaaaatgaactaaacacctaaatcgaagggctcaaactacagccctcttagaagaaaacatagatgttgatcttcatgaacttggattaggcaatggtttcttagatatgacaccacaagcaaccaaaggaaagaatagataaattggacttcatacaaaacaaaaacaaaaacaaaaacaaaaacgttcgtgcatctaaggacactatcaagaaaggggaggaaagggttgcaggtcttctgccctctgggcaagctcagtgcatatgctgatgacagcagccagtggggaatgatgactgatatcctttctactgctttgggcttggaggaatggctcttccttgctcagcctgggatgagctacacttttaccacaggtctcagtgggtgcaacatgagtatcaaaggagccacagtccccccacttcccacagagggagagagccatggagtatttcctcctcgggactgggtgtagtgaagttccagttcttaggagcttatatgtattattttccatgtgcaaaccgtggagccataccactataccaagttcttaccacctactcacttctgttatatcactatccactgggtcccttatttctgtcagctgcttttgttacctttccccaggtgccaccatgtaagctgtgatagcactgcagatagaacagaaaatgtttctgtgagcataagtatgtccagtcttgctggtctatcaccatgtggtatctccaggagagactgatacatactgtggacaattatggtaataaatatggatacaaaattcctctgtgttttaggataaattttgttactgaacactcaattgcatatgcaccttgtccactgaatccaaattaactcctcgagcctagttgtgcaatatcccattgttctagcattctacattacaatgcaatttttgttattaatagcagatttgggatgaggttatcacctcacttggtgataacccaatatacatctcagaaaaatgtccagtgaaccaggtctacacaactttcccattgacaaacctggcacttaattgtgtccacttgttatttgtaaagccagggagcaaaagtaagccaccaatatgaacatccctagctctacagaaatggaacttagggaaattataaatccactagggtcaccttccctctcaagtcaaaatttcaagtgcaccgaatacccctaccacctagtttctaggattaaaagagatcacttaaaatgtctcaagaacaagaactccagacccatttctttgtgggtttggagtagacttgttctggttaggatgtaggtcatgacagagcattaatctcattgtaacaactataaaaaaatcagttggtcaaaaatctcatatatattgagacagtgtctcactctgtcacctcagctgtagtgaagtggtacagtctcagctcactgcaacctccgtctccctggctcagaggatcttcccacctcagcctcctgagaagtgggactacaggtgcacgccaccatgcttggctaatttttgggtttttgtagtgacgggtttttgccatgctgcccaggctggtctcaaactcctggactcaagtgatccggccgccttggcctcccaaagtgctggcattacaggcatgagccaccgtgccctgcctgaagtctaaagtaactaaatttcagagagagacaaacacatatcaatggccattgtcctctccggtaagaatggtcttacaaggcagaggattgtgccggccataggtgcaataattgctgggataaagacagttaatgactgtgtggcctgggtagacacattggaatctgtaggagccccaaatgcatagctagttctccccatcaatggattctcctaatgagtcttttttttttctgagtgcgtggtgacagaagtaatatggcaggctggggtgagacagagagagagagagagagagagagaatcaatcttgtatttaggccccaaagttctgcttgactctagcaactggaggaagcagcctttaacacaaatcctaccttcagggtgtttgaaatctaatactaatactaactaaagatgtatgcaagccatggtacagctcgaattctgattggattgaagttatatacctcagggaaactatagtacctaaccaaggaaagagtgtactctaatccctatggttctttgaagcacaatgcctgacatgcaacttttaaaaacccagaacatgtgaagtaacagggaaatgtgacccatgatcaacagtaattggcatctcatcacttctctcatgttccattttccaaagcaagtctctaggccagcctagattccagaggtagggaaactgactctaacttgtgatagaaggagttttgaaatcatattacaaatggagaaccagggacattaaaaaatcaatcccaacactttgggaggtcaaggcaggccaatcacgaggtcaggagttcgagaccatcctgactaacacggtgaaaacctgtctctactaaaaatgcaaaaaattagctaggcgtggtggcacgcacctgtagtcccagctactcgggaggctgaggcaggagaatcgcttgaacccaggaggcggagcttgcagtgagccgagatcacgccactgcactccagcctgggtgacagagcgagactccatctctctctctctctctccctccctctctctctctctctctccctccctctctccctctctctctctactctctctctctctctatatatatatatagagagagatttatatatatatttttatatacgtatatatatgtgtgtatatatatgtgtatatatatgtgtatatgtgtgtatatgtatatgtacccttactctcttactcttcctgttgttcctattggtggctggggaagtgacgtgagggcagtggtgcctgtgcagcagtgctcaaggatgcatcaagggttcactctcaggaaactcccaaagctgctggccagatgggtagccagtcctagacatggcagagactggctgagtttcccaaatgcctctcttgaccaaggcctgcagaaacagaaagtcatattttcacattggccaatccttgcattcctcaggaaaatggttccaatgttcccactcacatcctgctttttctcagagctcagacctgggaccactgagctggctgcaacaaccagcctccaatacccacaccattcttggccacaccaccctttttcattcctgtgcccttgtggttatttactgaaggcttaccgtgtgtctaatagaaggtaaagctccatgactcccctgcaagaaaaatgttcttattgctcatttacagatgagaaacagagatgttcagtggtttgtgcaaagccacccagctgctaggtgaagccagctttgcctgcttccaaaggccgtacacactctttccaatgcaatggcttcctaggtggtgaaggctggctttgtagcctaagaactatgatgaggctcttgagtcaggaacagctagcctcttcctgttgtggagattcctggaatgaggaggtaggcctgtgaatgtagtgatttgggggacctagtctggagtcctagtacctggctgtccaccaactcccagcttccagacgctgcccctaagcataagcttcctctctgccagtttccaatcccctttctctctcaacacttccactaggccattttgatggttgggcctgttgcccccggaggcacatcaagcccttaccgcgcaggtcccgatcccagggcaacacggatgcctccccctgtttagctatttgcctcccacagagactctgagatttttctccctcatctatctgaggcttctgggagaagttggaagcccacgtgcccttagtacagctggcctgagatatccctgccctgtgcagtcccagatgggctgctggggcgcgatcttccaccttcccattccagggcctcaaggcggcctccagagtgggctccacagcctgaaggtggcatttccccgtgggtggttgcagtgtctgcagacagtgagcaggcaccagcgggaccccagagtggctgagggcacactgggcaggagccagatcgctgtccccccaggcagtaggtgcgacagcgggttgtggtctggagcctgaggagaggggaggagggtctccttgctgcaggagtctgggtggggtgagctcctggctgcagggcacctctggctacagaaggggacgatgggagagagaggggctctggctgtgggggaaggggactcctggctgctgatgtgggaggcgtgggagggggttgccaggttgcagggaggatggcattagggagagggctcctggtcaagtgctgggaaaaagaggaggtgggcacatccagctgcagggttgcacatgatggttggaggggctccagctgtaagttttgtgatcaggggctgttcaccaggtgaaagaggcgcttcctgctgtggaggtggggggtgcagtgaaggactctgagctgcagcagtaggggtgggggagcatgggctgtgacactgggcaggggagatgcttcaggccctgcatttgggagtggctggtctctggctgtgcggtgggggtgggctgactggcagcaacgtccctctctcccctttgcactcacaggctgcgtcagagactgcaacagtcagcacacattcctgtctgatcaggctccctccctcaagtcctctgcgatggctctggcgatgcttcgggactggtgcaggaggatgggtgtgaacgcagagcgctctctgctcatcctggatatccctgacgactgcgaggaacatgagttccaggaggccgtgcgggctgccctgtcgcccctgggcaggtaccgagtgctcatcaaggtcttcagaaaggagctcggggccagggcagccttggtggaattcgctgagggtttaaaccaaagcttgattccccgccaaatagcaggcaaagggggaccctggaaagtgatctccctgccccaggcccttgatgctgagtttcaggatatacccagtttccctgcatagccccaggggcaagcagtggccagaggtgcaggtgaggcaggagctgcaggtgaggcaggatctgtaggtgaggcaggaggtgtgaatgaggaaagatctgcaggtgaggcaggagctgcaggtgaggaagaagaggcaggtgatggaggagctgcaggtgcagcaggagccataggtgaaacaggagctgtgggtaagggtgaggcagaagccacaggtgagggaggatctgcaagtgaggcagaaggtgcaggtgagggaggagctggagatgagttgagagttgcagaagaggcaagagagtcagatgagggagccgcaggtgatacaggacctgcaggtgaggcagaagctgtgggtgaggcaggagctgtgggtgaggcaggagctgccggtgaggcaggagctgtgggtgaggcaagagggacaaatgtaacaagagcctgggtgcagcctcggcgctgcaccctgcaggctgtgctggaaaacagggcctaccaggaactgagacccttttcagggagggagcagccaggctgcaaggaagagtcctttgagagctggatggagcacgccaaggatatgctgcagctgtggtaccatgcgtcggaaagggagaggaagagatggctgctggagagcttgggtggcccagccctggacgttgtgagcggcctcctagaggaagatcccaacttggcggcactggactgccaggtgctgctggactgctgggcggcggtgctggggcaggcgtttggaaaccgggaccctcgaatgacttccaggctgaagttcctgacctgaacgcaggggccctttgccttcctggtatgcctggaaggcctgctgcagatggccctggagaagggggccgtctgcccggccctggccaaccacctgtgactgcggtaggtgcagcctcaggcctgccctggcgaagcactccagaataccctgagggggatgcactggagaggaggccgccctacttcctggggctgcttcagctcatccaggagatggaggcgtgggcggcctccccagtgaggagccagcatgttgtggcctggccagtggccacagtggaaagtgaagatccagttgccgcccaggcagctcctgcctgtggagatgctgctcaggcctcctcagcccaggaagacaccagccaggctgaccctggcgtggaagatgctgctgagactgctcctgccaccaaagaggccgccaggagcacccctgccattagggaaggtgaaaatgcccctgcaggcctcgaaggagccagagggtcttgtccaggcaggaggccaggaggctgaggagccccccgacccaagggggtcttatgttcatactggaggagttggaaaatgaggatggggccaggaaggttggtcagcccaaatcctccccaggcaaataggctcagagggccccagggcctcctctcctctcaggccgcagcatcctggaggcagtggggaggccaggccagggctggtccctcatcccacatcaggatcggggccccccacctccctccaaagggccctggccaccaccatcagcccttcccggtgacccagatgaccacgttgataccaaatggggttgggggaggcacccctgctttgcacccagtgctgcacccagccccagccccaaaccctgccgtctctggggggctggccaggagggagccctgagtggccagctgcgacctgggtgggggcacctgaagatgtctgtcccccaccccttgtcctgggttgggagagacaggggaaagaggtcctctcaagggtgccagctgcctgggtctcccaagagggttgccccatttgccgtccccggggcaggctgccccctgttctgggaagcccaccctcacctgtttaggccccgtagtgacccacgcgcccagcagacgcccacccactgctagctgtcgttcctgtgcaaagttgtgtgttgtgcacccacccgggcggccgccactaggcccggggcatgtgctgtgagcttcctgtgagcccaggttctgctcactgctgtctgtcctgcatcttaaacaccacctctgctttcctggtgtagatctaggccagtggctgcttgttctcgtggagctgtgtgtgttcttctctgagctgctcctccccggaggcccccagcacagacccaggagatggccggaaggaggaaccagggcgcggccaatgctcaccctgtgaccacgatggtaaccatgactgtgggaggaagagccggacccgggacggagtggggctgccctgcctgaggctcccaggagagctttatgctttggcattccacccctgttgttacttgtgactgtttcctcgccctggtgggctgttccctgctgtgtttactggtgtcctgtgactgtctgtgatgactatagggcagggccctgccccagcagatgggcttgggagggggctccctgaagccggtggacactgccagagtccaccgtcctggcaagaggcgggccctggggccctcgggaaggagggaggtggcagtggggtcggcagcaggacgggggtagacgaggcgccttgccaggaaccccaggaggagggatcctaggacctgtgtcctgtagtggctgtttgcagtttctctctgtgttgtggttcccttcttttcagtgatttcggtacacgtttctcttcaataaatttcattccattttccagccggtctcgcctctgctgtgggaaactagtgggaaaggtctctttgggataaaatggaagttgggggacaacagtggcctggaattctgaccctattgtgctcactgggatacggtcagggcatagtaggccagcgattgtagagaatgacctaactgtgatggtggttccaacccagagtcagtggcttatgaggatgaggaaagaaaccaagctgaacatgctggatggtgccagttgacggaacactgccgtgcgagggcaatgtgtggcttgctccccagggcatgcatggaggctcccagaacgaagtgcataagacgtggaagggcaggcaggggacagcaggctggggcggaggcctgggttgaagctctagcatagacatctttttaactgttcctcagttcctcatgtttatcctgtgtgtggagctttcaccatctctttggaaagacagaagagatggataaggaaaaggagtagaacagagcggcaccccttgccttccccagagtctgggtagcgggcgcaggacgtgtcgcctgtccaaatgcgcaactttcaccagtgtacgctacgcgtgcgcgcctgtgcaccttgacgagcacgcagccgtcatgagtgcgcctgggcacgccgccatttcctgcagccgcgacagcacggtcgtatatttccggttgtcattttattctttttgagaaatggtctcgctctgttgcctagggtggagtgtagtggcgctgtcatagctcactgcaacccagacctcctgggctcaagcgattctcccgcctcagcctcccgactagctgggaccacaggcgtgcaaccaccatacccggaaccacagtcacagtcggtcgcagtgcccgctgggaaaatgcgaccgtccacaaagcgaaacggccatcggggcgagttcggcctcggcggggattctcctgaggtcacgcccgctctggccgccagaggacgcccgaggatcacgaatgggcccgaggagctggctgccccttcccacgctcaaggtctgcagccgtggccagagtggccttggggtgaccgcgcgtggaccgtcgccggcgggagggagcgcggtcccgcgggggccgaacggggctcctgtggcctgagcttgtttcgcagggagccctggcggccatggctctgggacaccagacaacggtcgtcagggctgtccagggtaagggggtgtggacgtgcagacagggagggcagctggaccctccaaccatgctgggccctcgggctgaccggggctcgtctgtggggctcagtgaggagggactttgttccctaggagtttgatgagggagcgccatgggggtggcgtcatcctgacatcctgcagggcagtggagccttactttccctagccccagagatcatgaagtctctctttgtttaaaggtagaaaccaaggacaagagattggtgggaattgctctggttacaaaattgcagaaccagacttcttaattctgggacctgtgctgctttcattacactctaccgcttccagtttgtgatgtgctccttctgtcaacagttagcaagcctgctggctctgttgctctggcatgagtccaaaggtgaaggatggggggctgatgcattttgatactcaaaatgtctcctaaactgtccagtatggtataccatctcctgcctccttgatgcttgtgatggcaccccaaacagtatatttggaaatctaacattcttactcctgcctggacaggccctcagtatcattcaacgaaagctcaattattacacagggagtgacagcacagtcgtgactttcccgttgtcatttttttttttttttgacacagtcttgctctgttgcccagtctggtctatgtccacagtatcttcctggtctgcttatacgaagtcaagcaatttctgtgctggcatgggttccaagcacctgagaaagcccaatgtcatctcttttcacagtggttttgtcttttggccgtactttatattccttctagcatataaccccttcctgactgaaggccaggcagagcacgggccactttaaagtttaactttcaagtaactaagatcctccctttcccagagcagcagcagtgcttggagaagcacctgcctcagtctttattctccctagaaactgacctttccttttcccattgtaacttacctctgagcaagttggcaaaaaagcctgcatgctcccttctttgctgcatgaaggaaattcaaaccatgcaatttcctgtctccatgtgggaattctcatcttggccccccgcttctaacctcagtgaaaacctaggccactctccttcctttgcttccagaagccattttggaattgctggagatgactgctcccctctcctgaaaaccctcaattacataagtagtgaaacttttcttgtcctcttggtgtgtatgtggtgtcatcagtcttaacatcctagccgatttttgagtggggatctatctgcctctgaaggtgaccttaaaaacaattttgcaggaggcataatggaggttagagccactttaaagacctctaggatgtattaacaggtatggtggtccccatcatatctccattttatccgccagttctgtcccctgtagaaattggatgaattctggagaatgagtgtacactacctcatgctttatcaagtagtaatcccagttgcagatgctgtgtaccagacacagtatcattgctcaaatagatttataaggccttaggtgcatagtatgtggccattggtttgatgaaggcattcctttccatttcagctggtcaaggaaagaggataagaagctgctgtggtttgaatgtttgtcccctcctaaacctattgttgtgggaaattgaggactggagagaccaatatggagaacaggaggattgtttattttagctacacaccagcttagtggatttgtattcaagaagctgagcattaaataaagacagagcagggtttttataagcggatttacaaaagtaaaataaaagtagctaattatatgataggttatataatttatagcatagcataacttgtggccttgcatagccagtggccttgtagttgcgttgaaagaaaaataagaactggctaaatacagatatttgtaaaacataggtatgcttaagaagccagggaaaggagtaacagtaaaggaatttgtgtttctctcttttttttcctttaaccttgttttggaggggaggggtgtctggagcccattcctttggccttggctccttaaacagcgttatcttataactgtctttgaagttagcttgctaggcagaggaaaacccctttttttcttcttaacccttgccttgcctgttactttttttttttggagtgaatgaatgcatatttatttttaaatttctgcctcactatgttgaaatttaatccccagtgtgacagtattgagaggtgtggctttaagccttacacttttcaagtgtaagggaagcagatgaagttccccagtcattggtttttttttttttcacttgttttaaaactaacaaaaagtattcattctacttttgaattgtccccaaaatgccaagtcttccccttctcagccaggcaggatttgggagaatgccttctaaaaacacactgctcctttctggtattgggccactaaatcccttaccttacttactcccttactcattggcaaggccctcatgagtagattagtgcaatcattgattaatgggttaatggattaatgggttatcatgggagtgatactggtggctttataggaagaagaagagagacagagagaccggagcacacgcagccatctcaccatgtgatgtgttgtggcacctcaggactcttcagagagtccccaccatcaagaaggccctcaccagatgctgcccctttaccttggacttctcagcctccataactgtaagacctgtttttttctttataattacccagtttcaagtgttcgattataagcaatggaaaatggactgacacagaagcatttcacgatcacgtggacaaacaaaaatctttatttacaatttgtctcaggaccatgttaacgcttctgccctgtgttatacctatcctgtggcataatatagttcaaagagatgtggatcatctagacagtgcatagaatggcacgtggatctgttacactgacatcatcattctgattggacaggacaagtaagaggcagcctacacactgggaggccttggtgagacacgtgcactccagagggtgggcaataagccctatgcggattcagagatctgctacatcagtgaaatttttaggggtccagtgttcggaggcgtgccaggatgtcccctccaaaggaaaagacaaattactgcctcttgaatcctccaccacaaagaaagtagtgcacctggtggacctctttaggttttggggagaaaacattccacccataagataacttctatggttcacacactggttgacacagaaggctgggagatttgagagaggctgggagcaggaaagggatctgcagcaggtccaggctgcagtgcaactcttgaaccgtcacatctgacagaccctgcagtgtcagaggtgtcagtggtaagaatggaggcagggtagggtttaaggccagtccccatgggaggatcgccacacaggcccctagggttctggagcagggccatgccacccgcatcagagaatcatacacctttttagaaaacagcttctggtgtgcttctgggcccttgcagagacaacgcttgaccatgggacaccaagtgactgtgtgtcacttataagctggaatttctccttataagctgggtctgtcagaccacaaagtgaaaagtcagatgaccctccagcaatccattgcacgatggaaatagttcatctagtcaggaacagaagtgtgagtgagctatggaagtagcagccaagatacctgtgtgacccatcacagttacaccagtgcccctcccttagctcacacctatggctgtgcgatctcatgtggctagatgaaggaggaggaaaaggcctgaatattgcttatgaatggtttggctcagtctctgaaatggacagcagctatattccagccacacccacctagggacgtccctgaaagacagtggggagggaagatcttcctgatgggtggagctttaaggtgtgcaccttatcatccactttgtgtggaagaagtggcccagggtgggaatatgcacagatttctgagcagtggccaatggactagccaaaggtctaaaaaggaaaggactggaaaactggagacaaggaggtctggggtagaggcatatggataaacatgggagtgagcatgaaggaaaagcttacgtcacatacaagtgcccaccagaaagcatcaacagtagaagaggagctgaactgtcaagtgcacaaaatgactcagcaagttggatattagccacccttcaccatcagccagtccagaactgacacaatgggcacataaacagatgggccacagtgtgagagatggagactgctcacgggcccagaagcatagaatcctacttaacaaggcctttattgctgctactagctctgaaggtccagtcttccagtgaaagagaccaatgctgagaccccaatatggcaccatttctccatgttgggtccattatctcttagaagagacatccattctttcttacaaggacagaaacctattctgagtatgggttttcctttcctcctggcagaacttcagctaacatcactatccaggggctttcagagtgcatgacctgcagacctggaatcccacacaagaaggtatcctaccaagggacacacttcagagtgaaggaggtatgtgcatgagcccatgagcatgggatagtctggtgtcacactgtgccacccagaagctactagcttgatagagtgttggaatggccttctggaggtgtagctggagcacaggcttagaggcaataccctacaaggatgaggcgccatcctccaggatgcagtatatgcactgtgtcagagatgtccatgtggcactgtgtccccagtaggaagaatacatgggtctggaagccatagggtggaggccaaagtggcctcactttccatctttcccagtgacctactcaggggccaacattgtgcttcccatctccttaaatctaggctctgcagggtagaggttctggttctttgcactcttatcaggacatacagcctgggttccagttgtacttatagccaccactgctgcctggcattttggggttccttgattccagacaccagcaagcaggaagaatcatcatggtggtgggagtaatagagaattatcaaggaagaggtaagactgctgttatataatagaggcagagaggaatatgctcgggactcagatgatcttttctagtgacttttggtactcttttgcctcattggctgtaagtgatcaagtacagtgtgagtggcctaagaagggtatggatacgagggactcagaccactcagggatgaaggaagctgccaaaactgcagaggttatagttgagggtgagggaaatctagaatggatagtggaagagggtaatcataaatacctgttgcagttgcaggaccaactgcactgatggggcttgtactttgtcccgccaacttctctcttcttctttttcttttttttttttttttttttttgagacagagtctcgctctgtcacccaggctggagtgcagtggcgcgatctctgctcactgcaagctctgcctctcaggttcacaccattctcctgcctcagcctcccgagtagctgggactacaggcctgccaccatgcctggctaaatttttttttttttttttttttttgtatttttagtagggacgggatttcaccgtgttagccaggatggtcttgatctcctgacctcgtgatctgcccacctcggcctcccaaagtgctgggattacaggcgtgagccaccgcacccgaccgccaacttctaagtttaccttcagaaagagtggcccacaggagccaaggaggaactgcttcccgagcagctatggagtagtggatctgtgtggcacaaaggatggcctgtggcagctatggaagtgcactgcttggatgtcactttaagagagggcctgttatgaggagtgcaattagttgacggcattcaggtggaatgtcttcagggtccaaggcagcatttgaggtgagaccatgctagttccaggcagctccctatcagaggcttagcacagcagggtactagggtcatttttgctcagtgtgggactcctctatgggccatctttgcatcagagctccccgttgggctggccaagactttttgaaagctgcaccactgtctgagactcttccttccaatccttccttctccctctctttccacttgtgttagacccgccctgtggtctgaaggttcttcctgcctctttctgtgtcctctcccctttatcttctgtgataatttttttgcacttctaactccatcttgacttcctggaggacctgaactgatgcatttgatttggttttagagacagcgcctccttatcctccctcctggggagggtaggagaaaagccaaagcactctttgctcctaaaaatttcctttaaaaataacctctgacatgtttaatctcttcaatagcctcgatggaatggtgtttgctgaatgggctttgccatcatttagtaaactcagggagtttgttgaaggaatttgagggctgatcaaggaaaaagatatgactgcaaggggcagtaacacaacaagctttattcggtggcacttggacagggttgcataagagggaaagtcctcacagcacaagactatccagaggtttatggatgggctaagaggccaccacctggaagggaaggaaggcaaagggactcacagggcagaggaggaacaaagagggagcttatgtgtctgggtgaggtcaatcggtaccacgttggagagtctctgcatatgcaaagcaagcaggctttaaatggctaaaaaactgcttatttgggatgttttaaaaataatcaggctgggtgcggtggctcatgcctgtaatcccagcattctgggaggccgaggtgggcagattgcctgagctcgggagttcaagaccacccagggcaatgtggtgaaaccctgtctctactaaaatacaaaaaattagctgggcgtggtggtgtgtgcctgtaatcccagcaacttgggagaatgaggcagtagaatcgcttgagcccaggaggcggaggttgaagtgagccgagaccgtgccactgcactccagcttgggcgacagagtgagacttcgtctcaaataataatcataataatcagacgtgtaaatatatgagttgggcaccagtgagcttttcagctaacaggtctcagccttcagtgaagaaataaaaaacataggggccaatacacagaggccatctttggttcatttatataacaaacaatgtgtgatgtttccattgagaatgtagatcgtacagggacttagcacctcttgtcctcagatttgggctaaagttctgtgaaaataggcaacatttcatttgccatcctgttatacattcaatactcagcaactatgccctgctgtgccttgtggcagatgctagggacacaatggtccagggttcctgctgtcacagagctttgatgtgttgaaagaattgcacaaatgcatatgtgatcactgggttaagtgctaaggaaggcaagtagtacaagagtgctataagaatgtcttaaagagtgacctcagaagagggtgcgggtgccagaggaagtatccttgatgaagggacatgaatgctgggacatggaggataagtaggatttagccaggcaaagagtagaggtgggggtggaaccatgctcaggcaacagagacagaatatgcagcaggccttgaagcttcctctacctaagctacctgcccccagtcagtcacaccccaggctttgtcatctcctaaaattgtcccatcttgagaatcaatgactcaagtatgtcactttctgacacagactccctactgtgatcctttttcaacctctttggggccttcagatgttgactcctctgtttcttccaacctatcagccctcttctttccctcctagtttctttttgtttgaagagctttactcagacacaattcacacacatatatttaaagtgtaacatttgataaatgttggtataggcatacacctgtgaacccatcaccacagtcaagattagcgagtgtattcatcattcccagaaagttcctaattcccctttgtaacctctgcttccctgtatcctacaaccttgctaaactctaaactcccttattagttctaatagatcttttgggtagattctatcagatttcctacacagaaaatgttacctgcaaataaagacagttgtacttcttcctttctgatatgaatgcttttatttattttgcttgtcctattttcaaaaggctttcttcttggctccttagcttcttactacatacagcttcataattcaatattggtcttgtgtggcaagccaacagtgtgacagacacagtcttccatctctcacttctcattggaatcttggctccttaggccacgaagtttgtctctccagccctgtgagactgtggaaatctctgctgggtgtttgacccccagccgtggccatctaggtaaagcctcaattctcagcctccttccctgcacctggaagtgtctgtagcgccacctcaccctctcatggttctcttctttcctgcatgttggcccctcaagtattcatcattttaataggtctccagtgcctttaaactgatccttttgtcatgtttcatcgggcttttcttgttgttctctataggagagtttgtctgccaaaagctactctttcatacccctaagcagaagtcaaatcaataaaattgttactccttaaatgttctcaaacacttccacttctctttatctcttccaccaccatcctagtccaaatcactcctctgtgttagtgcaacgacctccttcattgctctccttgcatccactcttgcctcccacttaggcattccccatatagcagtaagaattcttttttaaaaaacagataagattatatcacttcactgctcaaaacccttaaattgttttcgatagttttcttagcataaaatgaaaaataaatattattaataacagtaaatggtacttgctgaactgtggtcatgctcaatgtgcatcagtaatgcaaatggtctttcctgtgactcctctcgttaatacagagaagtaagcagacattcatcaagttcaacttaatcggtcaagaacacagatagggtcactaaaggcagcatttcaagccaggtctcttcagctcaagagcatgtctttgaagcagagtcctgaatggaaaaatgactccttttctatgttctcatcttggtatcagttagggctgtccagagaaacataatcaataggagagatagatgtatctcctgttgaggcagagagagacagagagagagagagagagacattaaggaactggctcacatgattgtgagttgggggctggcaagtctgaaatctgtagagtagggcagcaggctggagacccagggaagagttaatgttgcagcttgagtccaaaggctgtctgaacacagaattcctttctattcaagggacctcggtcttttctcttaaggccttcaactgactggatgagacccatccacattgtggaagagggcaatctgctttacccaaagtctgttgatttaaatgttaataatatctttaaaaaatagcatcacagctgcatctagatagtttgaccaagcaactgggaactatagcctagccatgttgacacgtaaaaccagccatcatacttcctgactacattttcattgtaaagaattcaaacaacagggagatatatagaagaaatactgaaagtcacatttccactccatccctttccttccccagagatgaacactgtgagttcctcagtcagcatccttccagaactctgcctattcctttaacactcatacatgtaaatatatgcatatataatttggttttattttacttaagtgagattatcctgtaagtgctgtctggtgtcttgtttttttgtcttaaatggtaactcatagaaatcattctgtgttagtgcatacgtatttatcttgtgttttcagttggacaaacaaaacattcattcaatgtttacaaaattaaatcaagtaaaaataaaaagttctctttgatcacttcctaaacctcactgtccttctcagcagtaagtggttttaaaaaatatattatttttttgagacagggtctcactctgttgcccaggctggagtgcagtggtgtggtcacagcttactgcagcctcgaactcccaggctcaagtgatcctcccacttcaatctcccaagtagctgggggcacaggcacatgccaccacacccagctaattttttatttcttgaagagttgggatctttccattttgcccaggctggtcttgaactcctgggctcaagccctcctcctatctaagcctcccaaattgctgagattaccggcatgagccaccatgcctggccagtgaatactttgataagtttggtgtacatctatctaattagacacaatattacataaagaggtgaagatggcagggtggtctctgtatttccttcaggttctcttttcctctctgttctcacccctgtataacttgtatcaagaatttcatgctataacagtgaacttatatcatgtgacatgaactatattaataagagagaagattgtttgtctttcaagtgtgccactatgaggcatgtgaaaaatctgagcctattcctatggagggctgttagcaacagacagctgtaaaatccaaccttttcatccaggctggagccaggaactattagttcttaggttggagagacatataagggtcaaaaagaatttttcaaccagaaagccaagactgtgttttattgtgagagtttcttagataagtatctgcaggaactttccaaaggaagcgatcaggggaagggaggctgtggagaggactctgtaagctggtaggatccactgctaccctacgggtgggggtgggcatcgtgggttggaccagagccagggcacaaattgggacctgtggtaggttgaataatggcccccaaggatagcaggtccaaattcctggaatctgtatatattaccttatttgggaaaaaggtctttacaatgtgattaagctaaagatcttgaggtggggagattatcctggattatcttggtgggctctaaatccgatcacacttgtccttataaggaggtaaaggcagattgtctgcacacacacccacatacaggaggaggtgatatgatgagggaagagagagaggtttgaaaatgctgtccttaagaccaaggaatccaggcagccaccagatattgaaagagctaggaatggatcctcccctggagcctccagagaaagtggggccctgctgacatcttgtttcagcccagtgatactgatcttagacttccaacctccagaactgtgagagaataaaattctgttgttttaagccaataatttaacaaattattacacacaggaaactcatacaggacctaatcgaactcttcaggtgttaaccacatacacatagttcccccagctccttcctcccagagcctgtggatggaagcatggagattttgacgttggggagtcttcctgttactgaggaatggaaagagaacatgaggaggaagctgagtgtctggatcaatgtttactcccccgtgagtggtttgtgagctaggcaaaaggggggcaacagagaatacagtttacatggccctcacgttttagggagcactctaggggaatgctcagccagaggtccatgatcccaggaacaatattaagaaactcttaattaatggcgctctaactgaatcttagagttggagtgcatccgccttcacagtagtgcaagagaaattcaggggaggtggggtggctgggtatggcaagatgctggataaatggaggcagagactggctagggaccaagacatcctagatcaccctggaggctgcctggggctatatgtatggctcaggggaaggggagaaggcaggcagagaagtatcagttgctatttgtactttgtttaatttttgtttatcattaatctcataaatttgaaagcagccaattaataacaataataatagaagacaaatggccaagattcatctgaatgcatattctatgcatttaacaaagtaattttgaggtaggagatcagcaggacttgttttctgagcactggtcatgaccccactgataaaaacaagatctggtcaaaatatgttatagtaaagaaaccagtcataacagctaaaaccaagatggggatgaaagggacctctggttgcccccactgctcattacaggctaattgtcatacatttgcatgctaaaagacactcccaccagtgccatggcagtttacaaatgccatgacagtgcctggaagttaccttatatggtttaaaaggggaggaactcttgattccaccccttttctagaaaatccatgaatcacttatgccttatttagaatataattaaggagtagctataaatatagctagccagcaatccacgagggctactgtgcttatggggcagccctgctctatggagcaaccattttcctgtactctgttgctctgataaacttattttgctttcactttactctgtcggctttcttttgaatttgttcatgcatgaagacaagaaccctcctaggctgagccccagtttggagatttgcccacatcaacttcccacagaccttcaaatattggccttatcagccaaacatttccaaacatttaatgaaaattacctgcctatcatatgagacactctttagtgtttcaaacaccttcaaaagcagaccaaggtggcatctcaggtgcggtggtgatctcacaggtggcagcagaggggaggtttaacctgtcagagctcacaatggcctgggcctagaccccaaggcatgtgcccatgctaggatttcccaccagcagtggatggtcctcaagatagctgagcacctagacttgcagttggtggtgaagggggggtatggggaggagggttcagaggtgttgggcatgctgctgttccttttgcagcccccaagcctggatggttcaggaactgctctccccagagaatgctaagaaacagatagggctccccagatttatgccaggagtatgtgtgcatggtacatatacagtccgactatggtcagatcacagcccatcctgatgtcctaatcagagtttaagggggttcagccaagttacaacgttctgcaataagtttttacctgctggagaacacagaaggaagacaaagaagtagaaacgagcatgtgtggtccactaaagcagtgtgtggctgggaatgtgtggaggaagggtgctgtccccgggaccccctcatgggaaggggaaaagggtctgtccccggggccccctcatgggaaggggaaaaagtggcttcctttttcctctgtaatctcttttgggaaattctgttagtgctcttttccttatgttcgtttccacttctttgtctttttgcattttctgggagagttccttgatctttaactttcagatctgtgatttagtcaactgtcatcagctctactattgaactttttcttattttgggcaatgcagtttaagaatttcaagaattcccattacttaattttgaaaccagcttctagtattttacaggtttacataagtagatctaaccctagtttgttgttaggttttaacaaagatactgctcccaaaaggctctctgatctgagcattggcttgctgtctacctagaagagactccgtgatttgacattggatcccatgcagatataaggcactgaagctgccgctgcagaggattggcagctaatggtgctgttgcatttaatatttcagctctttaactattccacccagggaccagaagctctctgcctggttccctagtggcttcacggacacaagtatatgtggccatagaatcctggcacataaattgcaaaattactataaaaaatgctgaaagtatagtcttttggaggtcaactagattcctcacatttccaaaccctgcatttcaggaaatattgtagttttggcaaaggccacccatacccacaccctggtgaattcctgaaccaccattcagtcacccaggaaaatgccccttatgcttccaatcatcccttagctccaccctcatgtcactgggactgaggttttagatataattattgtaaattattaggggaaggatgctttagattcctgttacggactattggttacaaaagatattttcattttctttaagggatattgatttaacccatttatgcctgaggttgcaattttttgaatttttgcaatcagaccttggtgatgaccttgagcagtaggatataaataactcccacatgcttagcattccaataatggaacactaggcataaattggtaattttaagctagcactgaagtatggagtttagattttgtgaatcattcctttataggagcaaggaaaccttgtatactgaaaattgtgctggggcaatcaagaggttgtatgctgggatgaccaatctccctgggtgtgtttctttctccagcccccttagttgctaagaaccactgttgatattagacgtgaaagacagggtcaggcatggtggctcatgcctgtaatcccagcactttgggaggccaaggcagttagattgcttgagcccaggaatttgagacgagcctgggcaacatggtgaaaccccatctctataaaaaatacaaaaaaattagccggccatggtggcacacacctgtagtcctagctactcaggaggctgaggtgggaggattgcctgagctcaggaggacaaggctacagtgagccatgatcacaccactgtactccagcctgggcaacacagcaaaaccatgtctcagaaaaaaaaaaagtgaaagacaggaaggtttagaatggagatgctaagctcccaaaggacatttggtgagaaaactatactggtccatgaatttgcactctttgacacctgacatctataaagtgtgaaatggaaggccttccttagtgactgataggaaacctggtatttctgaaatttccaagagtactacaccagagaaccaaaaacaaaaagtcaggtaccagctactaacacatcgccaccaccctgcccaccctgcccacatgcacacatacataagatcattgcataaggctgggactcatgacaatactgtgtaggcatggacagaacctcatgtctccatgagttgactggggtttccaatatagcgattacctatataaactgatggccaatatgaagataacccagctggtcataatccaggcctaacgttattgatttcaaaggggaagtatctgacattttgcctccacagaccaatcctctttgccatcctaaaggcaagctagacaacactctgaagcctacaccatgtctgtatctcctgtgtcttccccggaagtgtcaaattcaacctcattcatggagaccctcctgttatcatgtagtctacagtggcattatggtgaccccgactggccaagtcaagtaaatgtgtcagccagaaatgaggaaaagctcaccttcccccaggacaaacaccaagggggctccaatgtcaaaaagcttaccgtataaaaaggtaaccctacaaattgaaatgcaatggaacgtgaatattatacaacatttctagtttgtgattttcaagagggcccaaatatctaataaataaagccatgtcctcttctgccatgtttctcttccatgaaactattgcccactttcttcctacttagaagcaagcaagttccattgctcactcttatcttccacttatttctccttgtgactgtttataattttcaatagtacctccattcaaagcaccattctattacaggctccagttaccagcactggaatattacaggttatgtgctcctcctcaatgtctccagggcatgtcagaggtcttcatggcagcctctcccatcacaggcccagaggcctaggaggaaaaaatggttttgtgggccaggcccagggaaccattgctgttttgtgcagtctcgggatttggtgccctgcatcacagccatggctaaaaggggacaatgtagagctcaggccattgcttcagagggtgcaagccccaaggcttgaaggcttacacatgctattgcacctgcgggtgcagagagtcaagaattgaggtttgggaaacttcacctagatttcagaagatgtatggaaactcctggatgtccaggaagaagttttctgcaggggtggggccgtcatggagaacctctgctcaggtagtgcagaagggaaatgtggggttgggtgggagccccaacacagagttcccactggggcactgcctagtggagctgtgagaagagggctaccatcctccagaccccagaatggtagatccaatgaaagctttcaccatggcaccaggaaaagccacagatactcaacaccggcctgtgaaagcagctgggaagggggctgtaccctgcaaagctgcaggggcagagctgcccaaggccatgtgagcccacctcttgcatcagtgtgacctagatgtgagacatggaggcaaaggagatcattttggaactttaaggtttaatgactgctctattagatttctggacttgtgtggggcctgtagaccctttgctttggccaatttctcccattttgagcaggtgtgttttcctaatgcctatatccccattgtatctaggaagtaactaaattgcttttgattttataggctcataggcgaaagagacttgccttgtctcagatgagactttgaacttggacttttgggttaatgctggaatgaattaagactttgggggactgttggaagggcatgattgtattttgaaatgtgaggacatgacatttgggaggtactaggggtggaataatatggtttggctctgtgtcttcacttaaatttcaccttaaattgtaataatccccacgtgtcaagggtgggactaggtggagatgattgaatcatgggggcaatttcccgcatactgttcttgtgatagtaagttctcatgagatctgatggttttgtaaggggcttcccccttcacttggctctcattctctcttctgccattgtgtgaagaaggatgtgtttgcttccccttccaccaagtcctccctagccatacgaaactgtgagtcaattaagcctcttttctttataaattacccagtctcgggtatttcttcatagaagtgtgagaacagactaatacagaatcctaattaaactatggactgtgagcaacaatgctttgtccatgtattttcatcagttgtaacaaatgtaccactctggtgcaggatgtcagtagtggcaggggttgtgtgttagcagtgtagaggaggtacatgggaactctctaccttctattcagtgttgctggtaacctaaaacagctctaaagtttttaaatttaaaatgctgcaaaatgatgactctgactttttaatattgggctagataattttctaattctggactcacttgattgttcccagaaatttaactttgattgactaaaattcattttagcccaaatgttttacaattctgtaaagtaacaaaggtgtgatttttttttttcctgaatgggaaataagtgccatggccttattgtctcaaggagtaaatcagttttgaatttaacttagcaatttacctcatcatttctttcccccaaaactataagtccttcaaatcttttcgaaccagctcttcattctgctcctccctcactgattagttaaataaaactttgacccataatcactatctgtttgtgtgggaattttatgattaaaaagaattggtaattgtaactttacatcatcctacaatcaaggacggcctgctcttgtgggggccctggccttctgttggtcaggaacaatgtaaaagttcttatttagagcacaatgaggcaaatgaaaagggaacagacagtgaccaactgttacttaaatctaacctgtaaaagaaagattctttttttccccaagccaaactgtatctagctttattaaagatactttccagaaacaatcatggtatttcaggcaggacatgggcagtcattcacagtataaaacatttcaaattccctacttcaatggactaccaaaaatcagaaagccactgtaaaacccaatgaagacttcatctgatgctctgaacagggaaagtttagagtgaaggttgacatttctcatttagcatgttgttttaacaacctttcatgagttgaccctgactttcaggaagtgaaatgaaaatggcagaatttatctgatgatccacaatctagaaacagaaccgctgctcttttgaggggcaccatctcagtggcatcacaggcaagtccagattgcctgacacactggtaaccaattatttgggttcaggtcccaacaggtgtctgggtttgagtgagttaagtctatgatgaaaggtggaaagggagaagaggacataaaaacaatttgtttttccataccaaggcttttgtgccaaggtggccatgtgtgtcaaagtcagggaatctctcctcttgggaaccaataggaagtctctcaaacctagaagggaaatgtgttttccccacatcaatccagcttcatagacattctattagtgacctatgcccctttccccccaaacaacaatgaagtgctctgcgtgctaacagcatagcttaaaaaaagtaaaacaaaattatgaatttttataaaactcgataaaaaatagtatttcaaactcttcagtcaccagaagtacagttatcaaaaatgcagacacttcacgtggcatctccaggaccttcagctttctgtgcctggtctgttttgtcatctccattttctgcagggttattcccctccctgccagcattagcatttacccttttccctatgggtaccttcactcacttttttgcaggggcctctttaggcttagactctggctttggagaagcaggtttagcagacaacctcttggatcttttctgtggtttgtccttcatgttggatttatctcctttagcatccccttcagcctttctcttggggatggtggtgatagtggcgggacataggctctgggggagggatgcagtggtgcacgggctttggccactccggggagtcgttcttgtctctttacttccagattcttttttttatttttttattttttttatcttataagtaattcctttgctctcctctggctctcatgtatcctcattactaaatagttatgccatctagtccagattccatttcagaaacctttcagcatttttaccattcgaagatttgcagtttaatctttttattagttttctagagtgactgtaccaaagtaccacactaggtggctaaagcaatagaaatggaatgtctcacatttctggagtccagaagaccatcaaagtattgtcagtgttggttccttctgagagtggtgggggagaatctgctcagagacctttctcctagcttctggggctttactgccaatctttggcattcactggtttgtggaagcatcaccccaatctctgccttcatcttcacatggtgttctccctgagcatcttcatgtttctgtgttcaaatttccttgctataaggacacttgtcacattggattaggggcccacaccactccagcttgatttcatgttaactaagtacatctacaatgaccctattttcaaataaggtcacattctgaggtgctaaggattaggacttcaccatatgaattgaggtatggggagacataattcaacccataacagtcttaaattaagaggtgtaatttctgtccatttgtgtattttcccagagaaatttcttaaagtccaaataaaaaacttaattggtccaataatgatgattcagaggagctattgttatctgagcttctataaaaattagcgtgctttgggctgcaagtaccaaaagtgtgactcaatgccagccatatgaatgaaccatcttgggtgcccagccctgttgagtctttagacttgattctcaactcatatctcaatgcaaccacatgagagatcccatgagtgaactgcccagctaaaccttctctcaatttctcacttacaaaattgtgagcagaataaaatggttgttttaagccagtatgttttgggtagctggttgtgcaggaatagtaacttaatgggaagaaatatccaaagtaaataaataactcctatgaaagaattaaaaaagagaagcaccccagttgagaattgagacaaaaataggaatttcaatcaagaggaataaaaaatgcccccccaaccaaggtattaaatctaattcataatcatagaaattctacataaaagcataataacaattgacattcctcaggattaacaacatttaagtcacacaatatgaaatgttagtgatgatatggagcttgatggaaacataaatttgtacagcaacccagaagacaatttggcaatgtctctgaatactaaagatagtctttgattcagcaatgccatggctaggtacataacttagaggaactctccaagaatatttaaagcagcattgtttctgatagtaaaaatgggaaacaacttaaatatctgtcaatgggaaaattgataaattttggtacacacacacacaatggaatactatacagaagtgaaaattgaggaataaaatttgcttatatcaaaatggtgattctcacaaacaataattagttaatacagtgatgactatgaatagtatgatatcatttctgccaagtgtaaaagagacaaagacaattttttagggatatagtcatttgcagaaaaagcacgaagaaatgcacatggaggacaagagtgggagacaacagggaaggaatctgcaggcgcttaccctcactggcagtgttttatgtcttcatccagttactacattcaggagtactggatgtactttttaagtacgttttgtatgttaaatattgcagaatgtattttataaagtatttaattaccagaaactctttaaaaaattcccaggcctgtttcagactcagcagatcagattgcagaggtggggcccatgaatctgccccttttgtgaccccgatagtcactactggtctaagccagggcaaggccaccccggtggaggttgcttccttcatgctgtattatgtttttcactttacaagtaataatgtttatccatcagttccccaactttggtgctgctgtgttatctaccatgcaaggagatggggaagcaaaagtaattaagacatttccactggtttcaagggcaaaggttaactccaatataaaggagttctaaaacttttcaaattggacatattcacatctattgtcttgataccagtgtttccaaatccttttttcccaatgcccagaacatccacagatcactgcgtctgtctgggaacttcacaggcttctttccggagacattccagacacgcccctctgccttggcatgaatacttggcatctccccttgacatctcaagctttgtcatttactcactgtgtgaccttgggccagtagtgtcccttctctgaacctctgtttccacccctgcaagttgggcagatgaaggttcagtttgaagctggttgagcccttggagtgacaaagcaagggactgtgaatggacaaaaatgagagaaataaattctaataggcatgaagcaaccaggggagaaatagtcccaattctacccaaagactgatgggcactaatttagaatccagtctcaattctaccttcaatacggtgtgtgaccttgaaaatgtctcttaatctctctgagcctcatgagtcaaatcaggataatgttaatacctgcttcagagttctggtgaggagcaaatgaaataactcctgtaaagatgtttcaggaattctgtctgaccaggaaaaagcccttggggccatttcttcttggtccctgacaagtgccaggctgacgagcagaactcagggtggggcaggaagtcagtggacagttttgtgccccactcactgcaaggtggcctcccagacttggctggatgggtgaacctggcctgaaaatcaaccacaagccccttttcgttgtgtttggagaggagctgaagctgtgtgaataggagttgagcatgcggctggcagagcaggcaggacccacagaacacctgggcccactgcctgagggacagtcactcccttcttcatttggctgctgccctgggatcaaacggatacaatagaacccacggcgcacggctgccaaggaagggcaggcccaagggattgggctccaagtcctggaagtggtttcccaagtcactagatttgcagcgcacaaaaccggaaaggtcccggtaaacctgtccactggcacctgggcagcgaagcgctttggccggagggcctcaggtcccagcagcgggatggacagcggggagatggctgaccctccttggggtggtgtgcgtgacctgcatgagtgcctggggcatctcctgcacggaatggcacccgcaccaggtgcccctggcctcgccagccagaggaccagtcctggacggggagggggaggacaagagcaggtgaacaggccccagaacccggctccctgaccctggccataatgcagagctgcctggcgcacctcagaccactccctggccctctggtgggcacgccggggtgcagacccctcgccccgctggcacctccgtggcacgtgcgggaggggcaggagccgggaccaggaaccgctgtggtgagagccaaaggcacggggactggccgccacagacctttggccaccgcagtggggatgggggtgggcgggcgcttgtgtgcccgggggcccgggggcccccgtggcgggggggctaggggagaggagcaggtgacgtcacccggggacctggggcccccaggggcggcggcgagagcccgacctcgtgacccgtccgcgccaatggccctgcggtctcccggacgacgcggaggggtccgcgctgcaccgccgccgcgcccccgccccgtgtccgcactgcagagagccgcggcgagcaggcgccggcgcactggcccacgtgctgcgcgagcgagggagagccacagtctgagcgaacgtccgcgctgggagccaggggtgcccgacccccgtccgccgccgccgccgccgccgcgcatagcccccggagagccctctggggaccccgaccagaagggaccttgccctgggagaaggtaacagacccacctggggagggagacgctgggccccgggagactccgccgcccctcgcctgtccgccctatcagaactgaagcagcctgcagggcaggggtccagggtcctggggcagcgcggggagggggctgaggcccgcagagaccccacggggggtgggggtggggggctgggcatgggccgggcctggctgcagaggcgccgcacggggaggagggcggctgggggtgggggtgggggtgggcgtggatgtgggcgtgcggagaggtgggcattaacctcgctctcgccctgctcgcattcacaggctgtggagacctgggccttctgcgatcaccctaggagttgatccagatatgtgcctcacgccctgatcactccccccaaattagtatccgcagagattcgaggacatgccgttgaccttgttacaggactggtgtcggggggaacacctgaacacccggaggtgcatgctcatcctggggatccccgaggactgtggcgaggatgagtttgaggagacactccaggaggcttgcaggcacctgggcagatacagggtgattggcaggatgtttaggagggaggagaacgcccaggcgattctactggagctggcacaagatatcgactatgctttgctcccaagggaaataccaggaaagggggggccctgggaagtgattgtaaaaccccgtaactcagatggggaatttctcaacagactgaaccgcttcttagaggaggagaggcggaccgtgtcagatatgaaccgagtcctcgggtcggacaccaattgttcggctccaagagtgactatatcaccagagttctggacctgggcccagactctgggggcagcagtgcagcctctgctagaacaaatgttgtaccgagaactaagagtgttttctgggaacaccatatccatcccaggtgcactggcctttgatgcctggcttgagcacaccactgagatgctacagatgtggcaggtgcccgagggggaaaagaggcggaggctgatggaatgcttacggggccctgctctccaggtggtcagtgggctccgggccagcaatgcttccataactgtggaggagtgcctggctgccttgcagcaggtgttcggacctgtggagagccataaaattgcccaggtgaagttgtgtaaagcctatcaggaggcaggagagaaagtatctagctttgtgttacgtttggaacccctgctccaaagagctgtagaaaacaatgtggtatcacgtagaaacgtgaatcagactcgcctgaaacgagtcttaagtggggccacccttcctgacaaactccgagataagcttaagctgatgaaacagcgaaggaagcctcctggtttcctggccctggtgaagctcctgcgtgaggaggaggaatgggaggccactttaggtccagatagggagagtctggaggggctggaagtagccccaaggccacctgccaggatcactggggttggggcagtacctctccctgcctctggcaacagttttgatgtgaggccttcccagggctaccggcgccggaggggcagaggccaacaccgaaggggtggtgtggcaagggctggctctcgaggctcaagaaaacggaaacgccacacattctgctatagctgtggggaagacggccacatcagggtacagtgcatcaacccctccaacctgctcttggtaaagcagaagaaacaggctgcagttgagtcgggaaacgggaactgggcttgggacaagagccatcccaagtccaaggccaagtaggctcgggagaacagggcaacatttcctaccacaggccaaggagacaaaagagatattggaaggaggggaaagagaagcccagacaaacagcagatgagttgagtggggcagagggacagggcagccagaccaaggccaagccttctcacccttggccagctggaagggacttcagcaaccaagaccacctggcaacaggctcagtgggggtcaggtccaggtccccgaagaggtgctggagaggaaagcagggagccactgcatccagcacatggggtgcctgggcctcagatggggaccccaaagaagcagaagctgaagaaggtacggctgggggttctgtcctgctcatccaaccacccctaaatacccaccctgtggactttgagctgaacatgcccactggcccccaggccacatgggacctggaggagcctacctggggcctgcccctgccagcaggtgccagggctggtgaggaagagctggggggcagaggtaaagccctgcaggggaggccacagggtccatcccgtcttcaggatcatctacactgcactaggggagccccaggaaggcagcaccctggaggccctgtgccagtgaggacaggagaccctaaggccccgggagcccagtgccagccagaggttgtgcaggcaaggagaccaaagattgatgagaagacccccagcaggggtactgggtacccggcaggccagtgccctcacagttgacttggaccagggtggctgtgaagggaagtctttgttgcaaaggaggaggaggaaaagggaggacttggtagggttttgtttcttctgcttgtttctgtacagggccaccagactcctggagagatcaagcaaggagaacctggggctgccatggccaaagcaactcaacagatgccaatgccaattccaaggccagccacaaccctgccaccttggggaatccagcctggaggcatcccctaagcagccagccatggcctgggtggaggcacctgaagacgtctgtcccaaactcccccagccctgagctgggagatgacagggggaaagaggccctctcaagggtgccagatgcctgggtctcccaagaggggtcccccaactcaccgttcccgggacaggctgccccctgttccaggaagctcatcctcacctgtgtaggcccctgtagtgacccacgcgtccagcagacgcccacccaccgctagccgttgttcctgtgcaaagtagtgtgctatgcacccacccaggtggccgcctctgggcccaaggcacatgctgtgagcttcctgtgagcccaggctctgctcactgctgtcccgcgtcatgagcaccacctctgctttccctgtgtagatctaggccagtggctgcttgttcttgtggagctgtgtgtgttcttctctgagcagctcctccccggagtcccccagcacagtcccaggagatgacaggaaggaagcaccagggcaaggcggacgctcaccctgtgaccacgatggtgaccgtgactgtgggaggaagaactggacccaggacggagcggggctgccctgcctgaggctcccgaggagctttgtgctttggtgttccacccctgttgttactcatgactcagtttccttgacctggtagggtgttccctgctgtgttttccagtgtcctgtgactgtcctgtgcgggccatagggcagggccctgtcccagcagatgggcttgggagggggctccctaaagccagtggacactgccagagtctaccttcctggcaagaggcagaccccggggccctcaggaaggagggagttggcagcgggggctgcagcaggagtaggagcagatgaggcgtcttgccaggaacctcaggaggagggggcccgggacctgtgtgggacctgtgtcctgtggtggccgtttgcagtttctctctgtgttgtgattcccttctcttcaacgttttcagtacgtgtttctcttcaataaacttcattcagtgttccagccggcctcgcctctgctgtgggaaactggggatgaggttggctggggatggggttggggtggagtgagggccacagtggctttgttaacactggtgtatacttggggctcggtctgcaaggcattctagaatgccctatctgcgcatgttggtcatgagctagggttcacggcccacggacccaggcaaagaaacccagctgagcaggctggatagtcccagtagacaggacactggtaggcccaggcagtggctggttgggtcctcagggcactggttgagcttctcagaaatgaataacatatttaaggaagggtgagggacagcaggctggaccagtggccccaggatcccttgtatcactattgggcttccacacctggagcatcaaaaccaggcccatctctgtgagtgtgtgtgagatggtgaatatgtgtgagtatgcgtactagtgattgtgtgagagtgagtgtaggagagtttgtgtgtgtcatgtgtcagcgaatgtgtgaatatgtgagtgtgtgagatggtgtgtgaatatgttaatgtgtgtttgtatttgagtgtgagtatgcatcagtttttgtgtgtgagtgaatgtgtgttagtggtcaaatgtatgtttatgtgtttaatgtatatgtgtgttagtaaaagtatgtgaatatgtgagagtgagacggtgtgtgaatgtgtgtatgacagtgaatgtgtgggtgactttgtgttgttgagtgtgcacatgagtgaatgtgtgtttcagagtgtgttaatgtttatgagtttgtgtgtgcatatgcgtgaatgtgtggaatgggtgagtgtgtgagtatgtgtgttagtgtgtatgagacagtttatgagagggtgtgtgaattttcgtgtgagtgcaaatgttgggtgattgattttttttttatttctttaagggatcaagagggttggaaagaaggcagagagaggtagaagtttctttgccaccaaacagcagtgagacttttgttgcctctaggctgatggccctagagctgggcctactagctaatcatccatttctgacccctggcacattcctatttttaaggttcacatggcttcttggccttttggctacgatcaagtgcagtatctattttaaggtccctaatctaaaaatagatatgtgttacagttattgtgtgattaaagctgatagaaacatcctcgtatgaatctctgtggacttttgttttcctttctcccgagtaaatacctaggaatggaatggctgggccacagggtagtggtatatttaactttataagaaacttcacacagatttccaaagctattgtgacaatttatactctaatgagcagtgctcgtttcttagggtactccaaaaaatcttgtattgccagctttaaacttttaaccattctgttgggtgactcactgtggtatctcactgaggcattagtttgcatttctgtgatgactaataatatcgagcactttttcatgtgcttattagctatctgtcttccttagtgaagtgcctgttcaagtcccttgcctagtttttacctggctttttaaattttttattagagttgtgcaagttgttaaaatactctggatacaagtactttgatatgtgtgctgggaacactttttaccagttgtgtctttcttatgcatattcttaatggtgtctgttcataagctgatgggtttaattataatgaagtccattgcatcatttgtttctttttacaatgaccactgcctgggtcttgcctaagatatctttcattggcccacatttgcaaacatattgatctatgttttcttctagaacctctgtagttgtagcttttgcatttaggtcttagaatatacctatattggctgggtgcagtggctcacacctgtaatcccagcactttggaaggccaaggtgggaggattgcctgaacccaggagtttgagaccagccttagcctcaaaaaacaaacaaacaaacaaccccaaaagttagctgggtgtggtggtgcatgcctattatcccagctacttgggaggctgaggtgggaggatctcttgagcccaggagattgagcctgtgctctagcctgggcgacagagccagctcctgtctcaaaaaaaaaaagtacctaaattagtttttggtgtggggtcaagatgcatttgaaaagactttcctttcgacattgattttatttagagtgttggtcaaaaactgtttgactttgtacctgtgggtctatcacagggctcctctcttctacatgtttcacttctaaagcttccatttgattctccattatcggtgttgtttttctgttgagatccttccttaatcatttcttcatcattttcatgtttctctttcaattctggaacaacacatttacttctaataactgtctttaagttctcatctgctaatcccatcgtccttgccatttctgggcctattgaaacattttctccttggtgtgggtcacgtttttctccttcccatgtctagaagtttttgtgtaaaatctggatattttaggttaggatgtaaaatatcttggtcttgttgtttccattaattctgtgttgagttgttccagcaggcagtttgtttacttacagagcagcataagcctttgaagccttgtttttaaactttgttaatgtgggttttcattctaccttagacttgctcccgaggtgtggcatttctaggctctgtactgaatgcccagctatttcaatgtggtctctccactgtggctggtgggaaattgaacatctctgaacactgtgtgagctttgacaattgtccagctcacagctttggaggtgttctgtgctcaaccttgtggtgtctctatctgagcagaacttagtatgcagccaaagactcagtgggaactttgtgaggtgctctggagctctttctttgctcatttcccttctcttctgtacagtgactgcaaattctagaaaccccagtggcattcaattgcacaactcagtgagaatgccacatgctgtttgcattcttcctttgctttgccatagactgtaagtgcttctaagctgatatctgggctgatctttggccctacatcatttgtttcccttctctcaaaacttgcagtcctggtgagctctccacagccaaggcactcactctttgatgaatggggttgaatgatctgtagatatttggaggctgtagtgaaagttagtgtggctgggtcccagggtgatggacagagaggcaaggagaagacaatagctccatagggaggtcagacagggccacgaagggtctgtaatgctaagtactttgctaacaactttggacttctgccctagaagtgcagcaaggcacctgggtcttcagggaatgaccactgccctgatatttgtgaaggataggaatgacctgctcatgtctgtgaactagaaaagtcagcgaggaagcagtgttagggatagcttggagggggcattcgtatacaccagaggtggctacagaggtcgagatgttggctaaatccagggactactgagtgctctcatctgctgaggttggagagacaccagagccaggagacaaggagatttctgttggacagggtctctttccagtcttgagccacacttccccttgggaaactagagttttgactgatcatcaaaaagcccctagaggtagctcttgtcagctagcactactcaccttcttcccatccccccatccaaaactccaggccatggggtcacattgtgtcacaagagggacggcctgggatcttccggaggccatgtgctgctggctgccttctctcctctgagctgacacccttaaaagccttatttctaccagaaagtgtggtatgtcctcaaggaggcacagttcagcccagctcagtgtgatggttaatactgtcaacttgattggatagaagaatataaagtattgttcctgggtgtgtctgtgagggtgttgccaaaggagattaacatttgagtcagtgggctgggaaaggcggactcacccttaaactgggtgggcacaatgtaatcagctgccatcgaggttagaatataagcaggcagaaaaatgtgaaaagagacactggcctagcctgtcagcctgcatctttctcccatgctggatgcttcctgcccttaaacatcggactccaagttcttcagttttgagactcaggctctccttgctcctcaagcttacagacagcctattgtgggatcttgtgatcgtgtaagttaatacttaataaactcccacatatattatatatatatatatatacacacacttaataaactcccatatatatatatatggttataaactcccatatatatatatgggagtataaacacttaataaactcccatatatatatatatatgtatatgtgtatatatatatagtttatatatatgtatatgtatatatagtttttatatatatatgtatatgtgtatatatatatgtatatagatcccattagttctatccatttagagaaccctgatatgctcagttccaacagactttcacagcataggcccatccttcaagcaggcaacttgcttgctgtgagctatgactatgagctatcctattggtttgctcctaaagtcttgcctacagggaaaatttattgtggcatcccccagggaacttgatcactgcccagtgctcacaaactcatgatttgagaaaaccatgggcatctttttcttgtggctaactagaccaacgaggaaactatcttccacagaaccaaccaaaaggacacagacgaatggcctgaacttcacggagcaatttggaagcaggcaacagagaaacacagcacagaacacttatggggccaactccagccaaaccttgatatttccttggcaaccatggtcccaaaattcactctgatatgtgatatgagacaccgttcaacacacatagcacctgggaagccaggaccccggagtcctccaggagaggacagggacacgagtccctggaaccagggtgcagccatctgcaggcttctctcccagaaaccgtggccctgcccctgaatgctggttgactgctgagtcaccatccaaactccaaagtcaaagtgaggagggccggcaggctcgagggcagaaagagcaggagcaggggcctctgacaggaatccctggactcctggcagaaagggccagccatgcccagatgacactgcctccttgggaggagagtgagtgtgccccatgggttggaagagccagtggcacacacaggaaggaagggagctggaaggcagctgtgggaggaatgatgctgatggcatctagctgcaggcaagctcactgggagcaagcaccgggctgagcttgctatgaaggccatttcaatcccaaaccaaggcagagaggactgatcaccaatgcagttgtaccctgagccccatggaaccacccagcccactgccaccggcctccacaaccaatgccccaccaacgctcctccagagggacttgacttcaatgagttgaagactgtgccacaggcaaccagctgtgtcaaggaccaacgcagaacaagctcacacttattcagcccagcaggaccctgagtctgggaagcatggcgtgccacatcgggttgtccctcagaaaaaccctgctaggtgggaaggagccacctgcacctgtgaggctgcggaggacaggctaggggcagggcaggttgtacgtgcatgtgcatgcgtgcgtgtgcgtgcgtgcgtgcgtgtgtgtgtgtgtgtttcagtgtgtgtgtgggtggggcacagccagacagaagctgaggaagtactgctccccccaccccaggtaggggcagccagccagggaatggcagggtcatatggcaggaggcaggtgctagcctggcagcccaaggacctgtcgtgggctctgggcagggcagagagccgtcgggagcagaatcaaagagggcattggaggaagaagcttctgagcagtcagagcaggccgcggccggtggggagctggcccgaagccacagactggggagctttggccctgcctgaggtaggacggtagggaggagccccaggctctccctggaggacacaagggggcccccgttggctgtgcagagcctgggccctcggacattgtggtgcacagcaaagaagcccttcttggttcaagagcagacaatgctcccactcaacctgtggaggctgtaagggacacgtccgaggtcagccagctgggaggcaaccaggtggggagaaacacacacggagacctcctctgcgtcccggcctgcgttggaggcactcagcaaggctggctgtccttgggacttgtttctcaagagccagtactacagcaggtgctctacggaggcgtctggtcaccaagcaacccagagccttctgtgaatcttgattgcagcatctccaatcaagtgccacctcacagtacagtgcttccgtgtttatcccttcaggtgtccaacatctgctgggcacgctggctctgtgcagtgccttctgctggcaatcagggggaccaagccaaaaagatggaagcctctgggagccaaaccaagcaggggccacctatacaattcctctacctttaccagggagtctgcctgcccacagggcagggctgggtgctgcggggcagggtggggagggacgggaagatggagagtggcaggctggcgggagggaggaagagggcagagcgaatgtctacctgggtgtcacacgagccacttgaatgtgaccacggccacaggaactcatccccatgcccgtcacccctctttccacaaaaggcaagaggaaagacaactgccagcatgatccccatgtcagacaagggtcctgccttccacccggtccacacacaacaaggaacccgggaccctgcctgagccctccccgggccttctccctctctagagcctgtatcttctgctttcccttagaccctccttgcccagccccggggtcgggggggcctggacttgggctgcagccccctcgctgctccaggcttcccatcctgctgattagttcccccagacgtctggccggccggtctcagcatcaccacctcctggcttcaaacccatcggggctccccacagccctcaggataaggtcccggtaccctggcaggctggagcaggctgacagattcaggcacttgctggaaagaaggcaccgagagcctcctctgggccacactctgttctaggtgctggggatctcagggtaggaaacgctgtactacggtttgaacgttgtgtccctgccaaaattcatgttgaaagttagtccctaacgcagcagtgttaaggggtgagacctttaggaggcaatgagaccatgggggcagagccctcggggatgagaggagtcccttgtaaaaggctggaaagcactaggtaagccccctttttgctgttccctccccacgaccatgtgaggacgcaggcacaagacaccatcttggaaggagagactgagcccccaccagatgctgaacctactggtgccttgatcttgggcttcccagcctccggaattgggaacaagaaatttctgttcttttgtaagtttcccagtctccagtgccttgactttgagcttcccagcccccagaattgggagcaatacatttctgttctttgcaagttacccagtctcaggtattttgctatagcagtgcaaatgggctagacacacaggcaagtccaccccaccttctggggctctagcttgccacctggggagggagcccctgatacccaaaagcaaagactcagaccagcatttctcacgtgccgacacatgtactgatgccgccaataagaatataaaccgagggcacgtgatttgtgtgtcccaccagagggggcctatgggaggaggggacagttcagctgagacatgaaggaggaggaggtgcaggaggagggggaggaggaggagggggaggaggaggaataggaggaggaggaggaggagggagaggaagagcaggaggaagctgctgccacagaaggttcttgggcctggatggctcacacagaggaaggagggatggcaaaggccgaaggtgggaacaagccctgtgctttggggccagctgaacaggccagatcggcaggaatgtggtgagaggagctgggggcatggcaacatggggtggatttcggggaaggaaggagagcatcagaggaagccagatccccaggagcagcgtggggggtgctcttgaccaggatggggactttgagattactctaaggagatggggtgccacagggaggagcagggtctggtggtgttgcaaaaagatcaccctggctgctgagggggtgttggtggagcagggaggaagcggagtggaggcagggagaacaggaggcagggcgggccaaggaccacggagatgagaagggtagcagtcttggagcagagtcaacaaaatccaatgatgggttagatttgggagtgaggaacaaaggagaggggagagaatcttggctgctttgtttgagtcaccaggtaggaggcagagccctttgcacagagggggaagcccggggacagtgtaggcatggtgaaggggacgaagccctccggtttgaacatcttagctctgaaatgtctgcggggcatccacgtgggcagatggatgggtacgtgcggagcttggaagagaggtcacgtccagagacagagcattcatcggaggtgccgtatgtcccagggttgaggctgggagcccgcccccaccacgcttagatccagcaaagtaggaggaggaggaggaaggtccaagggcagagaggcaggtagagagggaggaggtcagcccaaaagtggggtgggggagaggaagaagctgagaaaggaaatggttttgagaaggaaggagagtcaactgtgttgagaggtggagacaatggggacagaggactgacaaaagaaagacagttgacgtgtcacagcccagccttgcccggggttggcggggggcaatgggtgtcctgcagcgtcctggacttggagtcagcaggtgcagaaggaaggagagtgggaagagacaaggccgaaaacaggaaattagttgcgagccggccggtgggctggctgggccagttggagacaccagacccacagatgttcccagggcgggggcggccgaggcggggggggggagggggggggggtcggtgccctttctgaagaaggactccagaaaaatcacggctgaaaacaagagagaggacaatatgtggtataagccgtgacaagtctaacactaaaggttcgatagacagacactctcacagcagaggtaaagagcagcagtttgcctgaatgagaacaagcagtcttggccctcaagggggagaagcggtggggggcaggggggcggggaggactggacacacgagcccaaccggggaggctgctttgtcacagaagacatgcgtttcttcgctgaccccacgtttactacctgggaggtagaaaagcctggggagcaagaccatgccaacctaagtaccacacagagagggagcctccctataagaagatggtattcagaaataggcactgcagtggggacgcgtgcgccctagtgaactatgtgcatattcaggcaggggaaggcagacaaaggtttttcaggacaagtgaagaggattacataattgttttgacataatgatctttggctacaaggatgaataacaagggtagcattggtcaggggcttggacaggaagttgctgggcaggtgtcctcacagaagtattatttgtgtcaggttgcaacagcctttgtgcaaatttgtgggttttgcagtcttccgtgatagcttttgttatcaggcattcgtgcatgggaaccctgcctaggtggccctccacagctctatttgtcaggtttttggatttttgtttgcttgaacaacaagtgactccatcttgattctgaaacctttcacaaccatacgggcaagccaaagtctaattgtgaggcccactccaatgcgacctgcttctgggcaacgtgatagactggccatggcttatatcacaaaaggagaaaggcttcgatcttgacgctaggaactttctcctggaaacgggccgatgacgcctgtcatctgcgagatgaggaggaaaggagcaaaggagattcacagaagaggaaccaggaacggccagtgagaggatgcacgacctcgccaccgctcggggaaacgcaaggcacacagcgatgaggtggtgtctctccccgtgggatgggcaagcaggcgaggctggacaggaccaaaggctgctcgggctgtaggaacccaggaccgctcccacgctgccagtgcgagggaacatgggttcagccacgcaccggaggtcacagatgagcaatgcttggttgtggcgttgataggcacagcccaagtcccagcagagccactgcctgctgtgcaccccagagtctttctggctgacggtggtggctcagacaggcatgcgggatgccactggcagcagtgtctgcaacagccaaacagtgggaaggaccggaatgtccatccccagggtcatagacaaatactctggggctgtgattcagcaaggagcttgggcgagctggacgcttgggggaaaccttggccagcaagttgccaaacaggaggtcaggcaaggaaagagaaggggatgagggaacgacacccagaggtgtgaccccgtgggaacctgtttgccacctgcctggtggagatgctgttcacatggccccagcctcccatgatgggtcaggtgcagggtggtcagatccacgggcgcagaatctctgttttgagcggaggctgctctgccctggcgcagtgtctagccccggcaacagaggactggggaaggacctatggaaggctgactcaggccctgacagacggaggtctccagggaggtacgacacccatgctgccctcagggccaagagagcaatgtcccagagcccatcaggctggtgagggcacagggggcaggggacaaattgagtagcccactccgcgcggactacctttccaggcacacactcaggcagagacccagactcgggacttgcggctgcaaaacggacgaggcccgggcatacttgggtgctgggtcaccctcctaggtgctggctcctggcaccagggcagcaaagtgcttcggccggagggctgcgggtccctgaagccggatgggcagcggggagatggcagaccctccgtaggatggtgtgcgtgagctgcgtgagcgcctggggcatctcctccacggaatggcacccgcaccaggtgcccctggcctcgcctggccttgccagccagaggaccagtcctggacggggagggggaggacaagagcaggtgcacaggccccagaacccggctccctgaccctggccagaacgcagagctgccggacgcacctcagaccactccctggccctctggtgggcacgccggggtgcacacccgtcgccccgctggcgcctgcctccggggcacgtgcgggaggggcagaggcctggaccaggaaccgctgtggtgagagccaaaggcgctgggacctgcggcccacagacctttggacaccccggtgggggtgggggtgggctggcgcctgtgttcccgggacccgcggcgcgaggggagtgggggtggggctaggggataggagcaggtgacgtcacccggggtcctggggcgctcgggaaggcggcgagagccaggccacgtgacccgcccgcggcaacggccctgcgctctcccgggccggcgacgcggaggggtccgcgctgcaccgccgccgcaccccggccgcgtgaccgcactgcagagagcggctgcgagcaggcgcctgcgcaccggcccaaacgccgagcgagcgagggagaggcacagtcagagggaacgcccgcgcggggagccaggggcgcccgaccccgccgccgccgcagcggcgcgcagcccccgacgcgccctgtggggacccggaccaggagggaccctgccccgggaaaaggtatcagacccacccggggagggggacgctgggtcccgggagactccgccgcccctcgcctgtccgccctaacagaactgaagcagcctgcggggcagcggtccggggtccggggtccggggtccggggtccgggggcggcgcggggatgaggccaagacccgcagggaccacccccccgggggggcggggcgggacaggggcggggcctggctgcagaggcgcggccaggggaggagggcggctgggggtgggagtggacgtggacgtggacgtgggcgtggggaggggtgggcattaacctcgctctcgcccgctcgcattcacaggctgtggagacctgggctccgaccccagttcatccccccacacccccgccgccccgtgccaccctggtccgcgctgggaaccctatcctgcccctcgtgtcagcccggcactggccagaatcgcgggcatggcggtgaccatgctgcaggactggtgccggtggatgggggtcaacgctcgcaggggcctgctcatcctgggcatcccggaggactgtgatgatgccgaattccaagagtccctcgaggctgccctgaggcctatgggacactttacagtgctaggcaaagcgtttcgagaggaggataatgccaccgcggccctggtcgagctcgaccgggaagtcaactatgctttggtccccagggaaatccccggcactgggggcccgtggaacgtggtctttgtgccccgttgctcaggcgaggagtttctcggtctcggtcgcgtgttccacttcccggagcaagaggggcagatggtggagagcgtggccggcgccctgggtgtggggctgcgcagggtgtgctggctgcgatccatcggtcaggcggtccagccctgggtggaggccgtgaggtgccagagcctgggcgtgttttccgggagggaccagccagccccaggggaggagtcctttgaggtctggctagaccacaccaccgaaatgctgcatgtgtggcagggggtctcggaaagggagaggaggaggaggctgctggaaggcttgcgtgggaccgccctgcagctcgtgcacgcgctcctggcggagaaccccgccaggacggcgcaggactgtctggcggccctggcccaggtgtttggagacaacgagtcccaggcgaccatccgggtgaagtgtctgaccgctcagcagcagtcaggcgagcgtctctcagctttcgtgttgcggctggaagtgctgctgcagaaggccatggagaaggaggccctggccagagcatccgccgaccgcgtgcgcctgaggcagatgctcaccagggcccaccttactgagcctctggatgaagcactgaggaagctgagaatggccgggaggtctccaagtttcttggagatgctggggctcgttcgggagtctgaggcatgggaggccagtctagccaggagcgtgagagcccagacacaggaaggggccggtgcccgggctggtgcccaggctgttgccagagccagcactaaagtagaggcggtcccaggaggtcctggtcgggagccagagggcctcctccaggcaggaggccaggaggctgaggagctcctccaggaggggctcaagcccgtcctggaggaatgtgataactaggttggggctggggaggcagcccagcgcgagtcctccccgggcaaataggctccgagggccccggggcctcctctcctcctctcaggcagcagggccctggagacaggcggaggcggggccagggccggtccctcaccccacatcgggatcggggccccccacttccccccaaggggccctgcccaccaccaccttcccggtgacccagatgaccacatttaataccaaatggggtggggggaggcgcccctccagtgccaggggcacgtgctgtgagcttcctgggagcccaggttgtgctcactgctctcccgtatcgtgagcaccacctctgctttccctgcgtagatctaggccaggggctgcttgtttttgtggagccgtgtgtgttcttctctgagcagctcctccccagaggaccccagcgcagtcccgggagatggcggaaagaaggcaccagggcacagtggacactcatcccgtgacagcgatggtgaccatgactgtgggagaaagaacaggacccgggatggagtggggctgtctgagtttccccagtgaactttgtgctttggcgttccacccctgttgttacttgttactgagtttcctagacctggggtgggtgttcccccaggaggaggggggtcccgacctgtgtcctgtggtggccatttgcagcttctgtgttgtgattcccttctcttcaacggtttcagtacatatctctcttcaataaatttcattcagtgttccagccggcctcgcctctgctgtgggaaactgcatggggtgcggggtgcggggtgcagtgttggctggggacaaggtgaggtgaggtgccacagtggctgggctaacatcggggtgtgtggggtgcttggtccctgagggtctgtgtggtcccctgggctgcacgggatggcgtggtagtcttgagcaggggctgattgggttcccagggcacgctgatcacctcccaggagtaggtggtttggacgttgcagacaggcagagggacagtaggctaggtcctggtatccaggatccctgacagcactgcggggtggggtggggggggcggcgctcagggctttcagaagggtcagagtggccacatgtgtaacctcaggctggaagccaaggtcagggaagagccccaggagggcctgggcatgaagtcagaggcccacacgggagccatgtggaggactccgcgggtgggggaccgctcttgggagacccaggcagctgacacccttgagagggcctctttccccctgcctctcccaacccaggacaaggagtggggggcagacatcttcaggtgcccccacccaggccacagctggccccgatcccgatgtggggtgagggaccggccctggcccggcctccgcctgtctccagggccctgctgcctgagaggaggagaggaggccccggggccctcggagcctatttgcccggggaggactcgcgctgggctgcctccccagccccaacctagttatcacattcctccaggacgggcttgagcccctcctggaggagctcctcagcctcctggcctcctgcctggaggaggccctctggctcccgaccaggacctcctgggaccgcctctactttagtgctggctctggcaacagcctgggcaccagcccgggcaccggccccttcctgtgtctgggctctcacgctcctggctagactggcctcccatgcctcagactcccgaacgagccccagcatctccaagaaacttggagacctcccggccattctcagcttcctcagtgcttcatccagaggctcagtaaggtgggccctggtgagcatctgcctcaggcgcacgcggtcggcggatgctctggccagggcctccttctccatggccttctgcagcagcacttccagccgcaacacgaaagctgagagacgctcgcctgactgctgctgagcggtcagacacttcacccggatggtcgcctgggactcgttgtctccaaacacctgggccagggccgccagacagtcctgcgccgtcctggcggggttctccgccaggagcgcgtgcacgagctgcagggcggtcccacgcaagccttccagcagcctcctcctcctctccctttccgagaccccctgccacacatgcagcatttcggtggtgtggtctagccagacctcaaaggactcctcccctggggctggctggtccctcccggaaaacacgcccaggctctggcacctcacggcctccacccagggctggaccgcctgaccgatggatcgcagccagcacaccctgcgcagccccacacccagggcgccggccacgctctccaccatctgcccctcttgctccgggaagtggaacacgcgaccgagaccgagaaactcctcgcctgagcaacggggcacaaagaccacgttccacgggcccccagtgccggggatttccctggggaccaaagcatagttgacttcccggtcgagctcgaccagggccgcggtggcattatcctcctctcgaaacgctttgcctagcactgtaaagtgtcccataggcctcagggcagcctcgagggactcttggaattcggcatcatcacagtcctccgggatgcccaggatgagcaggcccctgcgagcgttgacccccatccaccggcaccagtcctgcagcatggtcaccgccatgcccgcgattctggccagtgccgggctgacacgaggggcaggatagggttcccagcgcggaccagggtggcacggggcggcgggggtgtggggggatgaactggggtcggagcccaggtctccacagcctgtgaatgcgagcgggcgagagcgaggttaatgcccacccctccccacgcccacgtccacgtccacgtccactcccacccccagccgccctcctcccctggccgcgcctctgcagccaggccccgcccctgtcccgccccgcccccccgggggggtggtccctgcgggtcttggcctcatccccgcgccgcccccggaccccggaccccggaccccggaccccggaccgctgccccgcaggctgcttcagttctgttagggcggacaggcgaggggcggcggagtctcccgggacccagcgtccccctccccgggtgggtctgataccttttcccggggcagggtccctcctggtccgggtccccacagggcgcgtcgggggctgcgcgccgctgcggcggcggcggggtcgggcgcccctggctccccgcgcgggcgttccctctgactgtgcctctccctcgctcgctcggcgtttgggccggtgcgcaggcgcctgctcgcagccgctctctgcagtgcggtcacgcggccggggtgcggcggcggtgcagcgcggacccctccgcgtcgccggcccgggagagcgcagggccgttgccgcgggcgggtcacgtggcctggctctcgccgccttcccgagcgccccaggaccccgggtgacgtcacctgctcctatcccctagccccacccccactcccctcgcgccgcgggtcccgggaacacaggcgccagcccacccccacccccaccggggtgtccaaaggtctgtgggccgcaggtcccagcgcctttggctctcaccacagcggttcctggtccaggcctctgcccctcccgcacgtgccccggaggcaggcgccagcggggcgacgggtgtgcaccccggcgtgcccaccagagggccagggagtggtctgaggtgcgtccggcagctctgcgttctggccagggtcagggagccgggttctggggcctgtgcacctgctcttgtcctccccctccccgtccaggactggtcctctggctggcaaggccaggcgaggccaggggcacctggtgcgggtgccattccgtggaggagatgccccaggcgctcacgcagctcacgcacaccatcctacggagggtctgccatctccccgctgcccatccggcttcagggacccgcagccctccggccgaagcactttgctgccctggtgccaggagccagcacctaggagggtgacccagcacccaagtatgcccgggcctcgtccgttttgcagccgcaagtcccgagtctgggtctctgcctgagtgtgtgcctggaaaggtagtccgcgcggagtgggctactcaatttgtcccctgccccctgtgccctcaccagcctgatgggctctgggacattgctctcttggccctgagggcagcatgggtgtcgtacctccctggagacctccgtctgtcagggcctgagtcagccttccataggtccttccccagtcctctgttgccggggctagacactgcgccagggcagagcagcctccgctcaaaacagagattctgcgcccgtggatctgaccaccctgcacctgacccatcatgggaggctggggccatgtgaacagcatctccaccaggcaggtggcaaacaggttcccacggggtcacacctctgggtgtcgttccctcatccccttctctttccttgcctgacctcctgtttggcaacttgctggccaaggtttcccccaagcgtccagctcgcccaagctccttgctgaatcacagccccagagtatttgtctatgaccctggggatggacattccggtccttcccactgtttggctgttgcagacactgctgccagtggcatcccgcatgcctgtctgagccaccaccgtcagccagaaagactctggggtgcacagcaggcagtggctctgctgggacttgggctgtgcctatcaacgccacaaccaagcattgctcatctgtgacctccggtgcgtggctgaacccatgttccctcgcactggcagcgtgggagcggtcctgggttcctacagcccgagcagcctttggtcctgtccagcctcgcctgcttgcccatcccacggggagagacaccacctcatcgctgtgtgccttgcgtttccccgagcggtggcgaggtcgtgcatcctctcactggccgttcctggttcctcttctgtgaatctcctttgctcctttcctcctcatctcgcagatgacaggcgtcatcggcccgtttccaggagaaagttcctagcgtcaagatcgaagcctttctccttttgtgatataagccatggccagtctatcacgttgcccagaagcaggtcgcattggagtgggcctcacaattagactttggcttgcccgtatggttgtgaaaggtttcagaatcaagatggagtcacttgttgttcaagcaaacaaaaatccaaaaacctgacaaatagagctgtggagggccacctaggcagggttcccatgcacgaatgcctgataacaaaagctatcacggaagactgcaaaacccacaaatttgcacaaaggctgttgcaacctgacacaaataatacttctgtgaggacacctgcccagcaacttcctgtccaagcccctgaccaatgctacccttgttattcatccttgtagccaaagatcattatgtcaaaacaattatgtaatcctcttcacttgtcctgaaaaacctttgtctgccttcccctgcctgaatatgcacatagttcactagggcgcacgcgtccccactgcagtgcctatttctgaataccatcttcttatagggaggctccctctctgtgtggtacttaggttggcatggtcttgctccccaggcttttctacctcccaggtagtaaacgtggggtcagcgaaataacaattatctaaatttccttgtttgaaacaggagcagcaagagttggcacttatttgattgcatcttcaacctctgttactctgatgactgaagaaagaacttgaacctgtgttatatctgctgagacattccaaagggatttgtgtatgaagcaaaggggtttgggatttgggagttgttttacaggtctcagggaaccaacatacaaggcaaaacttattagatggtaaaagagtattaaaagggcgaattttattgtacgtaaattatacttcagtgaacttgacttttaaaagaaagaaaacaatgaggttgaagaaaggaccttggagactagcaattcagaagtttttggtgatgctggcaaaaaattgtttaattagaaaccagattgtaatggattgaggaataaatctgagtttaggaagcttgaaggtggcgcaaaagaggaaaaggtaaggtctgttaaagatggtttattgtttgttagtttattgtggttgttattgtttctttagatgagaacagctaaagcatgttggtggccaataggagcattgaaaatacaaaaggaagaaggagtaactgatacaataagatcatcagtgctagacagaaggatctctgagatgttactggtggattcattgacagaggtggagtgatggagtgatgggaaatgccatttgatggcctctgttttctcgtgtaaaaggaggcaaggttaatagcagacagcgatgggtaacaagttaaatagagtgataaatgaaactgggaaatgaaggaggaaactgaccagaaacaaatttaaacattttgaagtaattctgaatttccaactcaagctggaaaccataattctggagagataccaaactgtatagttttgtgatttttctccagcattgctcagcagcctgggagctgaggagaacacacatgattgggttcttctgggctcaaaagctaggtagatgtagttgagggaattgatggagctgatggatatctctaaagttcaccatgggcatccagactggtagagaagaaactggaaattagtagtctgggagaaaagagaaaaaaaaaagaaagccaaaaagtcatggtgagaagatggaatacttgttttctgaagccatttatgcccccataaggagcctgcccctaccatacaactcttttgccacagctctcggggataccacagaaagtagattgaatacattcgagggcatagactggattcagaaacatagcctggtggtcagtgtttcattctgaatttgccactaatttaaggcagctgtcattaccaccattatcacagcatgctaatccttaggcaaggaatattacttgtgcattcaagagtagaagaaatgggaacctcccatggggcaatgacaatagacttggcaagaggtaaatcatttcactttttgcctcagattccaaaagtgtattgatgcttccctcaaggcatgcccttttacttctgttatcttaagattgtcaatttaattctgttagagagtctacagaggtggcacccttctttgggctcttactcttcctttctgcattttctctttccttgcttcctcctacctttaggtattaaatgttatatgtctcagcaaccttcccccaccaagtgaccaaataaagtattcctataagcttagtattagatatttttttgtgtgtgcctaagaggactaggctaagaagttggtgcttagttagagaacacctttaggtactttgcagataacactgtaaagctaatccctcatgcactgtacatgcagttgaacctgggtgtctctctggtattcataagaaaagccctgctcctataggccctatctccatatgtcagcctagtaaagtaaccaaccatgttattcactgtgagataccatgttctagttatcctttacttgcttgagtgctgagatgaacataatacacaaggtctagtagttcctaaaccctgtgagaactcctaagctccttttcttgttgttgtctacatatataagttcaaaaaatagtcttgggggaatttcaacaaacaattctaaataagtccttttttctttgcaaatataaatccttgtaaaattcctttttttcctatctgtttcctattcctgattctattatagctctagcaatactaaacactagctggtttggagattaatataaccagacataccatggcttttttgtttgttttttttggaagacagagtctcattctgctgcccaggctggagtgcagtggtgtgatcttggctaactgcaatctccacctcctgggttccagcatttctcgtgcctctgcctcccgagtagctgggactacaggtgtgcgccaccatgcctggctaatttttgtatttttagtagagataggttttcaccatgttgcctaggctggtctcgaactcttggcctcaagcgatccacccactgtggactcccaaagtgctgggattacagatatgagcaactgcgcctggccatgatgaattttttaaatctcaaaaatcccagtttatctttcttggcaaatcaaatatattaatatgttttacgcacacacacacacagagtatattatcatgtcttctctaaattatttttttgtctcactgtctcctaaaattgttcctaaatgcttctttgttacaaagaggtagaagaaaaaaaaccccgaagaatggaggagaaaagaatatgaagtgatggaagatggaaaaagaaagtatgctatggaataagcgaaaccaatgaggagatggaatcagtagtgatttccgttttccttagcccccttagactgatttggagtttggctttgatatttctctcatctaatgccccccaagtgacctcttcctagcaatttgttccacaaaaaatattcctttcactgccagcaaatatctcttacctgaccagcaggttgaaatatcctgccccagcatctaaacattctctccagcctgccaagcccctaatcgcctgacccagaggacttggacccattgccattagttccacccaccccttaccccgcattagcatggagagtgttgatggctgttgtacatctgacacaacttaagcaataatttggttttacttgattaaatcgccttcaaaatataagcaggtaaactacatgttgaattcattaaattcttcctccactctttagaaatacgttttttaaaaaggaattgataggtgtcatgtacatatttgttcacttctgttgatgcaagataataagattgttaacatgaaggtggaatgatggtatttatattttcatcaacactgtttacataagaggaaaacatctgaaagcaacagggagagaacatttgctgctctgtacatatattaaattcttccatttttgtttataaagcatatgaggaggaaaaacaagtttaacaaattgagaagcccacttggatttctcctgtgtcacctgtgagccatgattgaagccctcttaggaaacttgaacatctctctgagttctcacatctgcggatatgtccccgagtgaactgggaggcctctgtccgtggttcctgcctgagcacagagtgaccagcagaagaatgaggtggggctgccctctgtctcctgcacaggcttcccccagggtctcgctccctgaatacagacgcactgagcaaaattccgagaacggctgcttgttgtaaaaaagcgatttctgggtccaacttttcttctggtatttggtttttccttttcctcattttggacccacacccctggccacaccccctccctctcatcactcctgaccactccccgtcactctcattcttgactatgcctcattctcgcctcattcctgaccacaccccctcactctcctcacccctgaccacacccccatctttcatcactcctgaccactccccctcactctcattcttgactatgcctcattctcgcctcattcctgaccacaccccctcactctcctcatccctgaccacaccacctcactccttcatcattgaccacacccctcgctcttgatacccctgaccacgccccctcactcaccgcacactggccatgccccctcactcctgaccacgccccctcattcctgatcaggctccttgctctctctccttcacctctgaccacatcgcctccctctgcactcctactctgggtgcaaatggatttgctggcatctgctaaagtcctgatccttacagaggagcatttctgcactcggcccctcccagctgcacaccaagcttctgaggcagaaagccaggtccttggatctcagcagcccctcactccccattcctgcattcctctctctccctggtctttgtgcccaagggtggctttgcagggggcaagcctccatgctatctgcgaccaccattcgcacaaggactctcctccttccaccctccctccagcctgtctctgaagctgccttctcccccgagcttggtcaggtaaactgccctgccccctgacccacctgctccatggctcacttcttccccagcactccttccttctggcctgcattcactccttcagcagcatcagcaccaattcatgtgcccaggactgtgctggatgctagaccagacagacagacagatgtcaccacaccacggggccagcactgtggagacacaccaggggtcaagggcccagaacggtcctcacacatccgggtctcccaggaaggcccgaggaggttcttacccatttactcatctaagtggatggcaatctgttgacagaggccccgagcctcctctctgtatcccagtgcaaattattggccctgggtgtgtcggggaatgtgtcctgagccctgcagaaggctctagcacccacactctctgcaggtctcccagggctcctccaagctgagccaaccacagtaaggtgggtgcaaccatacttcccagccccagcagctgataggtgcctattcaagtatgtttgcaaaactcttgagttaaagttaaccagtctcactgctgaaaggtttttcaactgttcagacacttacggccattgtggttttccacaggggaagtagagagcggcatttttcttggttttgttgttgatattgtttataatactcacaggcagttttaaaacaataacatcccataggattggtataacattgtaatggcaaagaaaaataacaacaactgctgacatcattaaggaagcacatttgcaatccaggcacggtaccaagagcttcaggtgtatctcctcccttaacactcaagacaaactcatctcttaggtgctacctggacatccgcagtaaaggtgaagaaactgaggtgcagaaagtttcagaaacttgctgtgatgatggtaaggtcaagagttgagctcaaggaatggggtccccaggccttgttcctactcccatccacatggccccctggaacactgggggcgaggttttgttgtccagctcagtgcaccatgactcacagggaccttctgtctagagagaaatgaacacatttattccaattcactgatgttctctctgaatttacccttttaattaaaaataggaggccgagtgtggtggctcaagcctgtaatcccagcactttgggaggccaaggcgggcggatcacctgaggtcaggagctcgagagtagcctgaccaacatggagaaacctggtctctactaaaaatacaaaattagctgggcgtggttgcacatgcctataatcccagctactcgggaggctgaggcaggagaatcacttgaacccaggaggtggaggttgcagtgagccgagatcatgtcattgcactccagcctgggcaacaagagtgaaactccgtctcaaaaacaaacaaaaaaacaaacaaaaacaggagtcagtacaccagtgcatgagctgagcccaagaccctgattccaaaacagaaagcagactgttgtgttctgctactataaacaaccattgcagcctgcatttctctgcctgcactgctgaccaaaagcaacgtgcacaataggaagcatggcatcgtgtctacctgagccaggcattctatagaccaagggtccccaatcccaaaactgggccacacagcaggaggtgagtggtgggcaagtgaagcttcatctgtactcacagccactccccatcactcacattattgcctgagctgcatctcctgttagatcagaggtggcattggattctcataggagcacacaccctgttgtgaactccacatgccagggatctgggttgtgcactcctcatgagaatctagtgtctgatggtctatcactatctcccatcattcccagataggacaatctagtttcaagaaatcaagttccaggctcccgctgattctacattagggtgagttgtataattatttcattatatgttacaacataataatactagaaataaagtgcacaataaatgtaatgttcttgaatcatcccaaaaccatcccacccccagtcaatggggaaaaaaaaatccatcctccccacccctgtccatctttcatgaaaccagtccctggtgccaaaaaggttgggaacaactgctgcagaccatgtgtctattgaggagtgcagatcctgcagagaagggaagggagaagtcaggtgggatctgggaagctgtgctagcttacccactctcctctgtcccattcccctggtgtaaatacccctgccatggctgatcttgagtgaccatcgaagcatcactgaccttatcattggctctcctgagctcctacatgtgggcttcaatgcaccaccaagatgtgagtgctggcttcttgtttctttctttcggttttctttaattatttatgtgtttttgcaaaaggagatgcacagctctgaagtcacagcaattgtgctgcaattgagattccagtgccaaattaaagacaacttcaaaatataagagttgttacatatttatttcaggcctagcacaacagctcaacagttggacccacattatagaagcttttgtgtaagtaaatgaaaggtattattgacaataaatttaagatatctgactagaagggctttggttagagaggattcacagcatcaccatgagatcctatgaaggaaacgaagtggctgaatttggccaacatcatgaaggtctaaagcagcagatatgctgccttcttctgcttctattttgttcttttaattgtccattcattttttgattcatcagttgttgtgttcttgccatctatcagtcatggtattaaatgctatgacttggaggtgaagactgaggcacaatgatttattctgtcattgagcttgtcatcttggagcttggtctccccacccaggaacctcctacaatgaactttccatatttagagcgcccaagttgagggtatgattgtatgtatgtgcatgtgagtgtggaggggtaccatgacaactaatgaatcttagaatcactgtaccggctctatcataaattatcttaaaatttcttttttcatattcatattacgaagctaagctatgcctagctggcattgaattctgataaaaatctcttggttttatgtcagcaatgagcaatcttccttgggagtagatagtccaaactggtctttggtttctgtgcagcccaaactgagcagaaaatcttgaaatttctgagactgtagggggttgtttaagcccatctgagcatggtgcacacagatgaaagcaggctggccttcaaaggactactctgagaaggagaaagcaaaggcttcaggctaaacgtcagggttagaggaatggctcccagcccagtagaaaagaatctgtgtctctagaaacaacagaaaggaaacaagaaaggaaaaaaaaatccctgacacactccaatctcagagagagggatggggctgagctccactgggcagtttcaggtgaagggatgggaacatgatcctcttcctggaaaaagtccaacaagacaacaggccacacagccagccagctgccctgggcacagcacagagcttcccaaggacccctggacactgagaggcttgctcaggaaggggcccagtggacaaaggtggatttgaaatctgagaccctggtttcattccaaggcctctggccctcagcctcaagaggaacaaagctcactcttccccagttgtatgtggacaggaagctactgatgccctgttcagtgagccaccctactgcccatgggctggggcagcagctttgtctctaagccaccaggcaagattcccctagataagggctgaccacagcctgaagccatggccccaattccctggactctgaaggatgttgttcctcagataggtgttttaggtagactgagacaacttagtacagttaaaagaaaacaggattgaaaatggggtggagctctgttcaagtcctggctaaacatttccaactctctggccttagagaaccaattactatttctgcatgtgaatgttttcattggtaacatagagatgccctgatttcccctgcagggctgtggcagaaatgggaggccaggtatgcagagagactttaggtatcccagatacttcacaaacccttgaaattaacacttacaagctagttagctgaaagaaacacaaaattaaggccattttctctggtcttttgacccaaacactgtaatacctggaatactcaaagaaaataaatattgcaagcacaggagcaatagggggggtctggaattgcctttgaatgatctgaaaaaacaaaattcctttcctctcttttgcttggctaaggagcctggatcaaaggtccccatactccccacaatgccattctctggggacatcattaccatggacacaaccgtttgttggtttcagtgctgcggtgtttacacagaatgactttattagctatccctcctcttgtcccaggaaatgtcttttgttttatcaggcagagcaacaaaatcatatgatgaaataatcatcctgataattaatccctttcatcaagagagctaagaacacacatttaagggccacatattagcagcaataatatttagaaatggaagaagtgattttattgctttagtaaggcatgtggattaggttgacccctctaattgatgctctgctgagtgtgaatctgcgagttgggcagcacacagacattaattagtctgtgcttgggcacacaccagctccagtacactcaagtttcatcccaaattgctgctataattccccactttcatcttggtagacaatattacatttgtgatgattcaaatagattttctgcaggcattaaatttttagtaaacagacccaaattaatacctgtttatgacattttactccagggattaaatcaaaagaactaatttgatatataaatatctcttctctgcttttaatgaacaggtatttttgttgctgttgttgttgttgagagcaaaattagacacatgcctcactcctccaggctgcctaatcatatgcgctccatgcctcccattgagagagtgttattacctttaggagtgaagacagaagcatgttaattttccataattcagtgaaacaaaacatagatctgaaatctccctcggtggagttcctttctcatctatagtaatggggttgcattttaatgaaaacaattcagtccgttctaatgtaaccatcagggcaacaccagcctcaccagatcctgatttgagaagatggtcttttcattttgcttggtgttgtgcaggtgataaagaaactcaagtgtctacgagtgaccttgatggcaatgttgcatttagtgctaatgagggtggcttcacggtccaaggatgaacgggctggcagtggggtttcggcagcctcaagtatccgtccacttcccacactgacggtaagtgctcacggcttatttacggcctgcaaagatgaaatactgtcatacctgggcaaagctaactttggcatggagaccaacttttagactccagtaaactttgcagaatcacagatgacaggtcagaactgtgtttctttctccttgatgaggtcgctgatatcatgatgattgagaaatgtctcctggctaaagatggcaaatttgacacactcacttagctctttctcttctcaaagcctaattatagtcatagtaaaaggacttttcaaaaggcctaagcccacacaacaaagggaacagacagggacaacacaattttggaaatggggaaggaaagactaagcaaaagtgacttagcagactgtcttggtttggagcctcatcaaggagagggttcaagtgcaactagcttattcaaaaggtgaagggaacacctacagcgacgtgggcaagtgagacagggagaagaaggcaccaggaatgggtgtatcatcaagccagttaccaccaggggcaacttgaacctgacctgctggggagattctggaagccaaggtagaacacctaccttcattagatgggttcaataaaattctgagggaaactttcagaaactaagagcacaaagaaatggagaacaggagaggtcatttaaaaaaaagaagaagaagaaaaaataagacctgtccagttttctcttgaccccacttttcccaccaactactacatattttttactgttttgcaacaaagatgattatctgttgcttgtccctcattctcttctaaactgacatcagtgaggcatccagtcaccagtaactttcatattgctagaccagtggccagttctcaggtgccatgtggtttgctctcacagcagagcctgcatgtgctgtgttcgcatggcttcccgacctcactccttcttgcttgttttggcttctccctcccgcctcactgattgctctttctcagcctcctgttctggcccttcttcttctctttgagctttaaatgctgagtgcctgaatatgggacattctccctgaggtccaaactcactgtctccgtggctctcatccagggtgaggtcttgaagatcatccctactttgaggactctatgtctgcagattagaactttcctcctaatcccagactaatctgtccagctgcacttgtcacatcctctggatgtctgtcatctcagactcaaaatgtataaaattagatgcctcaccatccccccaaattccacttcaccacagcctttctcatctcagcaatgctaggtctttccttttagttgctcaaaccaaaaatttgcaatcatcttaaactcctctttttcttttctctttccacctccaatataacaggaagtcccactggctctcccttcaggaggtattcagaatgtgaccgtttctctccttcattgctgctgctgtaccgagagtacccacctcatctctcgtgtacactgctacggatattcccaacaggccttcctgcttctacactcatacaggccgtccttaactctggagtgagagtaagactgtaaagctgtgttaactcatcatcaccgctctgccgagaggcctgcttgggtccctccatgactcagatgaaaagccaaagcaccccatccccaccccagaaatggataagggccttgtgatctgtctgcctcatcacctacgactctccctagctgtcagtctactcctgccactctaattccctgatgtttcttcaacatgccaggaacatgcttacctcagagcctgctgtggactgaaaagtgtaccccaaaatccatctgtggaagccctcatccctaatggaagggtatctggagatgaagcgtttggaggtgattaacttaagcttagtcaagctcagagggcagagcctcaggatggcatcaatgccctggtaaggatgaacactgagacctggctgtccctcgctctccactgtgcaaggacacagtgagatggtggccacccacaagccaggaagcaggcactcaccagaaaacaaaccctacggggccttgacactggcccttccagcctccagaaaggctaggaataaatgtttactgtttaagtccctggtctgtgggactttgttatggcagcatgaggggctgattgagagcctttgcatggctcttcattcctcccaggatgagatttccaactcttggcttcctcaccccctcacatcatcatttcatgttgcaaccacccacccactacccctgtctctcgcattctcatttactttttctttaatttcataaaacatatcacaaagccatttggttatgcatgatgtttattgtctattttctgcctccctgctagagggtaagatgctcaagaacactgctctgtctgcatcccaggacccagaaaatgtttgacgcatggtaaaacttagatacctttgtgtttaataaattaattgaaggggtctgcagactcttcagtacaattgattataaagacccaaaccagccccatcattactaaactttaatgaggcaagtaggagatcatttttcagtgggaaaaatcaggttcattcaaagtgttggggaatctaaatgctgtcaaacttctcaacagcaaccttgaaagctaggagatagataatgccttcaaatgtctagaggaaaagatctctcacatagcattttctactcagcccaacttttgttcatgtaggagggaagaataaaggcattttcatacatgcatgtcgacttgaagcaggtattacccattcacctttttgggggagagtactctagtatatgatttaacaaaacacatctataaaccaagtagctccaagaaacagtgacttcacccaggaaggaaaggaagaggccgtccaggatggcgatgacaccagcagtgaagcagcccagagagcaccgtgctcaaactgagcctgaagacgaaggatcccagagtggcgcccatgaacacgcaagaaagaaattatcagacaaggggacacccattgacggggaagtgtgcatctgcaggggagttgcaagatataccagtcctaagcacattaaaaacgggcaaaaaaaaaatgatttcaacaagatgattactgctgaagaaaacaaagttcattaaaggaaatgtaattatagtgcattgtgtgttctagccaagagcactatttacataatcatgatgctataaatatgtaataatcatctgccacaaaataagatgtaactaagttggggaaaggtgaagccagtgtgagtgtgagtgtgtcaatgtgtgtaagagtgtgtgtgagagaatgtgagtgtgtgaatgtgtgtaagagtgtgtgtgtgagagaatgtgagtgtgtgaatgctagtgtctcaaatgtgtggagtttgtgtgacagtgcaagtgtgtgtgtgagcagatgtgtgtgagacagtctgtgagtgtatttgagtgtgcaagtgtgtgcgagtgtgtgagtgtatgtgtgatgagtcacattcataagctgaatcatcttcaaaagataagatctaaacctaaaaattcaagtgattggatgaaagcatttgattttaaaatatggagttaaatatcaaaaaaaggtccttgcatctggggagcaagaatcaaaagtggataagaagggtcgcaattttaatttttaattttaagcactgtagtatccttgtttttaaacaactgtttacatgtatacgtgtgtgtgtgtgtatgtgtgtgtgtgtatcttagagaaaattaagatttttttttctgctttttttccctgcttttctcaagggatccacaatccggagggaagacccataggcttcccagcatccacacagcatcattctctttgcctctggtctctgccaatggcgcatgactccactggccgtccaggaggacaggcctgggactctctgttactccacacccaccccacctcacaactcctttccctagatctctgcatatctcattccttcttgtccttcaaattcagggcacacctctatcctgctccctcatagaaaggtcgtccctctctctccttcccttccttaaactgttactgtgcttgctgtatgtcttccatggtctttgccgttttctaaatgcagttatatccatttgtggctgtgtcctattcacttctggtgagttcttcaaagtcagtttgaaattctagaacatatccacatagaggaacactattctattagtacttttaaagatccactcttcttttaatgttcctattcaatgtctgttttttgtaacttctattgtcatcataatatatcctcatctctgttttgtttggaaatattcttctgtacctcttataactacttaattggacactgagatcattagtgtgtaagtttccttattttccagattatgcatttaaagcttaaatttttctctccgagctgctttttctggattatgttaatattttgtgtagtatttttagcatttactttgaaatgttttgatttccctaatgaattctttttgacttgtaagctattattaataggtatattgttaaatgtttgaatattgttataagcttaaaatatttttgtggtttgaaaaaatgatccttatgatagcaactctctgcaatttcccagacctagcacatggcctgtcgtggtctatgccccatatgagcttactttctctaataagtggcagcattgatctagttaatgaaacatgctttaatttcatttttaaaataatttcaacatttgatattttatttatttgatttgttgaaaattgagagaggaatgttaaaaactcacactatgattttatatatatatattaatttctgtctgtagttttgaattttcttggtttatgaattttaggtgtgttttattaagcacaaatgagcttagaaatgtcatatcattcttataagtagtaactttaatcattttatatacatttttatccatgacaattattttgactcaatataaactttctgcattttatagagccgtctcctcttcctttggttcttattgcctgctgtattttttcccatctgttttattaatagttgtttacagctgcataacagataccctaaaattctgtggctttagtacaatctaaccttgttctacagtttctttgggttaggaatctgaatgtggcttagttgggtgcctctggttagcagtgtctcatgaggctgcactgaaagtagtggctgtggctgcagtctcatctgaacgtgtggctgggggaggacttgattccaaactcactcacctggttactggcaggactaagcatcttgtaggctgttcactagggacttctctcagatcattgacccatgggattcttttcagaacagcttataaaatggcatctggcttcaatcagatgagcaaatgaggaagtgagagtgagcaaaccagtaacctaatctcagaagcagcatccctccaacttttctgtattccgtgcattagaatcaagtctccaggtctctgggaccagcccacatacaagggaagggaattgcaaaaggatgtgaagattgcagggaccatttaagctgttctttcatttgttacaactgcaggtgtctattgtgttgtatttctttctgctctttcactttggaaagtgcacttgggaaatcccattttagggtggtgactttgaggtcctggaagatgacaaggtcctctcgtcaaaagccatcagttttgtccaggcttctgaggggattgggctgggcaggggtgtaagcgatttttaattccctgaagtggattaaaaatgtcctcagattctttgcaggtctttcacccaaaaggagagtctatttctccaccccttcacttctggggtcatttgctttgacaagtagaatgggtctttgcaaaccttctaatcagcatctccagagcctttgcaacttccaccctggtacaatcactgtatgtgtgtttattaaattatgtgactctttgccatgcatggtggtggctcatgcttgtaatcccagcactttagtaggatgaggcagtaggattgcttgaggccaggagttcaagacaagcctgggcaatatagtgaaacccgtctatacaacaagtttttttttttttttttgagacacaatccgagattgtgtaacaattattcaagccttacggaagcacatagagagtaacagtttctgtcacctcagtgatggtctgtattagaaatgtgatagatgccaccggaaagctctttcctgccctgtccgtgtgctaatgttgatctcgcagtggtgtgagcgtatgttgctctgtagcactgtccacttaacagtatagccagacagtgatttcatcatggaactgaaggtggagatgcatgaagcctgtagataagtctgcatcatctgtgcttcatacagcatcagctatcctccccattcagaaatgtgattgacaaaccccttagctactgattgccctacttctttagaccggatgtagctgaaattctggttcctcaatgatcacttttgtgaagtcttcattttgaggagcaacaatgttggattatagggtaaatctgagtgttcaaatttatatttaatttaagcaccactgaaagattcaaaagaacaatatgcactactgattttattaaaaagtatctagcctgtatttaaagtgaattgatttttttcttcatattacattattcattttattataatcattaatacaatattatccatcttgttgtcccatatattatggcatttcccccatatgtgaatatattaccacatagaaggaaatgaccccatattcctaatacataattagatacatgagttgatctctttacaggcaaaaatgtacctcctccattaaatattaaagggaagggaacaatataatactccacacttgaatcttgtagctccaaactcagacagaaatgttgctaatttgcacattttatatggtactgaagactgccacattaaggagtgtttttattgtaggccactgtcatcaaatcaactttgcataagaaaacttatgaaaatacaaaccgttctgtcctcacaacttcagtccaccacactggcaaatggagtcacacctgcatgctcatagtttatcaccagaaactaaaaagctactagaagaaaactgtggggaaatgcttgaggacactggtctgggcaaagattttttgagtaagccgtccaaagcacaggcagcaaaagcaaagtagacaaatggagtcacatggagctcaaaagcttctgcacagtaaaagaaacaatcaacgaagagacaacctaaagaactgaagaaaatatttgcaaactatacatccaactagagattaataaccagaatatataatgaactcaaacaactcaatagcaaaataatagtcataataatctgattgtaaaatggacaaaagatcagaatagacatttctcaaaagaagacatacaaatgagcaaccggtatatgaaaaaatgctcaacatcatcaatcatcaggcaaatccaattaaaaccacaatgaggtatcatctcaccctgggtagaatagctcttatcaaacaggttgaagataacagatgctgatgaggatggagagaaagggaagagctcttacactattggtgggaacacagagtactacagccatcatggaaatagatgttcctcaataaactaaaactagaagtatcatatggaccagcaaccccacggttgcatatatatatctcagagaaaggaataagtatgtcgaagaggtatctacactcccatgtttatcatagcaccattcacaatagccaaatgatgccatcgacctgttgttgcgggaagtcagggaccccgaacggagggaccagctggagccacggcagaggaacataaattgtgaagatttcattttaacatggacatttatcacttccgtaataatactcttataatttcttaagcctgtctttacttcaatctctgaacgtaaattttgaagatttcattttaatatggacatgtatcagttcccaaaattaatacttttataatttcttatgcctgtcttactttaatctcttaatcctgttatgttcataagatgaggatgtacatcacctcaggaccactgtgatgattgtgttaactgtacaaattgattgtaaaatgtatgtgtttgaacaatatgaaatcagtgctccttgaaaaagaatagagtaacagcgattttcagggaacaagggaagacaaccataaggtctgactgcctgtggggtcgggcagaatagagccatatttttcttcttgcagagagcctataaatggacgtgcaagtagggaagatatcactaaattcttttcctagccaggaatattaatagttaaggccctgggaaaagaatgcattcctggtgggaggtctataaacggccactctgggagtgtctgtcttatgaggttgagataaggactgaaatacgccctggtctcctgcagtaccctcaggcttactaggattgggaaaccccaccctggtaaatttaaggtcagaccggttctctgctctcgaaccctattttctgttgtttaagatgtttatcaagacaatacgtgcagagctgaacatagacccttatcagtagttctgttttgtccttgtcctgtttcctcagaagcatgtgatctttgttctcctttttgccctttgaagcatgtgatcttgtgacctgctccctgttcttgcaccccctccccttttgaaaaccttacgaaaacttgctggctttaaggctcaggtgggcatcacagtcctaccgatatgtgatgtcacccccagaggcccagctgtaaaattcctctctttgtactctctctctttatttctcagccagccgacacttatggaaaatagaaagaacctatgttgaaatattgggggtgaggtcccccaataacctgtgatcatcgacagatgaatggataaaagaaatgcactatatatcacaatggaatattattgagccataaaaagaatgacatcctgtcatttgcagcaacatgaatgcaactggaaaacactacgtttagtgaaataagccgggcacaggaagacacatgtcacgtgttctcactcatatgtcagagctaaaaaaaactgatcttatagaggtagtgaatagaatggtggttaccagaggtggttaccaggaaagacagggaggaaggaacgttggacaacagatacaaacatacagttagacagaggaaatgagtcctagtcttcaatagcacggtagagtgactatagttaaccagaattatcacatatttgaaaatacttggaagatttgcaatattctcaacaggtagaaatgataaaagtttgaggtgctaaatatcccaactaccctgattggatctttacacagtgtattcatgtatcaaaatgtcacacttaccccatatatatttacaactattacatagcagtaaaaatcatgacaatatcagtaattaacagctaacttttatttgacatgtatgatctgtctaagcttttcaccatcattgtttcctctgacactcacaatattcccacgacacagataccatcatcactgtcagttttacaaataagaataagaagaagtgattccaatgtgctttggttgagcagcactgagagagccccgattcatctggataagaatgcaatgcactgcttggtttaattttacacctcagagcttttgtactgtgagtgcaataaatctggtgtgtgcacagaaatcagggcagagttaaggtcctcctaaggagtgagtcaagtattttttgatttggccagatcagctttctttagatatctgcacaaaaatactaacctgccaatcccagatggaattttaactaacatcagggagacgagatggccacttccctcaggtgtaagaagacccctctccaacaggcagaggcaacagactgcatttattctgggtttcagttgctgaaggaaacgatttgccactggtttgtgggcacattttcttggaagctaactttgcccgttacctctaaattttgttcagtgcatcgttgttataaagacatacttagatttttgtgattgtacatttcaataattcagttgttgagtgagacaatcttaggagacataatgttcttgatgtcagccatttttcaaaggaggtgtttattatggaactaaaggaaactatgtgcttcaatctatcaactagactataaaagagctaactgcaattttcaagaatatgtatttagtaaaaggtatttgacttaccatttctgggagagaagtaaatttttacatttgttttattgtgacttgtttctgatattctgacttaaaatttcatggtcacaaaaaagtataaattaaatgttctctttatgaaaaataaagtactggctacgcacaggtgacatgagaaaaatagtcactaaaaagtggtaaccaagagggaatcctgaagtaatctacggacttggggtgataatgatgtgtcagtgtaagttcatgatgggtaacaaaggtaccactctggtgggggatattgacagtggggaatgccattgtgggagaacaggggcaaatgggaaatctcaggactttcagatcaatttgttgtaaactgaaaattattctaaaaactaaagtcatatatatgtgtgagtgtgtgtgtatgtgcacgcacatgtctatttacaaacacacacacgtatatatgtatatatacatattatacacaaacttacacacatccctaataacttttcagagcaaaaacttcttcctttcagaatatctgccaaagtgacttcaagtatgcagttactcatctgaggtagcaaggggtggcataaatatcaaccattccatcattaagtacactgtgtcctaactcttgtccttccactgtagaataaatatttacatagctcagtatgaatatcagaagtctcacaaggacctctggagtgcttattttgcctctgtgactactgaaaaagttctcaaataatgatcttcttagaaacttgatgtagtacttatatatcaatacacgctttggataaaagaaaaatcctttaccaaaatgcactttaggaattaaatgaacctcataatgtccaatattggatcatgacagaggactcatttttcctatataagtgatataaaactaaatatatatgtgtgtgtatgtgtgtgtgtaaattcatgtctatttacacacacacacatatgtaaatatacacattatacacacacatacacacacccctaataacttttcagggcaaaaactgcaactttaggaattaaatgcccctcataatgtagaaaaacagaatctgtatgaacttggttttttaaaacttgggaaaccttgaaaagataaaagtggtatagcagggccaattaaaatgaaaatcacaaagaaaaatcagaggaagtggctcctctcctcccaatgggagtatggggttttgaatgattcatgaacacaatttcagaaactctgcaaaagaatacgtttaactgacttactccaaaattattctgaatttcatacttactatataaaatgtttccaaatgaagattttgtatgttgttacatgtaaaaattgcacattgcaaaaagacaggtagacaaattgatgattcaagttttcagatccatgtatacctaaacttccatgtactccatgaatattaaacttgaaagacaaagcactctacataatttatcttgccacagatgagaaatacttgtaatcataagtaattaagtatacatacatgttaataaaatactttcaatcaatgctcaggggaggtatcattgaatggtgaaccaaaacaaattaaatggcattttgatgtctttgtggaaatgacatatccacaaaccagtggctcagcactgataaacatatatcttgttcagttgtcttaatcatttgtagtaaagtttttcaagaacacagactttaacttactttagtaattttgataaggctacagagtatttttaaatcatacttttattggaatgtgctgtttaagctaatgagtaaatacaaaagaatgcacagataatatagtcttcttttattgttgtccgtaaaagagaaaaatgtacccttccatgcccgtgctttccacattttgagactgatacagacccacagaggccacacctaaaagtatattatctttaatgttacaacttaattaaccattatataactgaacaattgctgctactcacataactgtgtttagggttcattccacagaaacgaggttttgcacttaacaaaccaattaatgataaatgaggtatactggtttgtacaagaattatcaaaacactgtcagtgtggtttagtgtagctggagttatgcttgtatcatataacatgggttcaagttatttcttcagtcatcagaacaacagaggttgaagagacaactgaataagtgccaactcttgctgcagttgtttcaaaaaaaagaaatttaaggaattctgatacatattcctacaaatacagtattccagtgcttacatcaatcctgagtttttcagattaaatatgtactacttacagtctccgacacaattttattttggaacacggcgatttattttttaagttgactttcttcatcaaaaagagttgtttcataatactcttccgaatcctcgatgctctaaaacaaaaagcctagtttactgacaggccgccactttacatttcacgttgtaaacagggtaaattaaatgtcaaaaggaaacggtttgtaataaaggatgctgtttatttacttcaaatttaaaaactgtaatcaatacatggagctccaaatgcccacttaagctttttaatgccagatttcagtgaaatattattacagcaggtacaacagtcatgtactttgcctgaaaaaaatgggttgatgaccatcttaaggtcgaagtggagcaaagacagaaaaagactggcagtcttacgtcatgaaataccacattttttcaccaggtagtgatccatttattatcactaatagtccatataacatggtttccattgaagggataaaatggtctgtgatatgacttcatcaaggtagagaaaacataactatatttgaaatacaccctattcactcaacaaatagttcaacagttcctactccctaaaatgttgtatgttaatgctgaggaagaagtaaaaagcgaatacacaatctcttccatattcctgtggcatgagcaaatgcacgaataaaaaaaagtaatacaaaaattgtgtaactgccatggaaggacaactcactaggacatgtagccaaaaataggggctgatgtcgacttagtttgctaaagatttcaatcggtcaaaaaaagaacaaaaagattttagaagcatggtgagggaagagcaagagcaaagcatgggagtaacggtgagttcattcagagaaggctgtcaacctggagagatgggaggaaagacagaaggcaagcctaagaaggggtcacgtaaaggggagtgtctctgaatacctaagaactgagaagtatgagaagtagacaccactgtcagactgggaagagggaagagctaggaagcattttagaaagggaagggaagggttttaggaagataatattgccgatcaatgaaggatggctcagaagagaagagagaactcagataacagcttagtagtacaagcaaggaagaatgaggtcttgaactagggcagctgcagtgggaatttaaagaaagaaattaaaggaccattgcagaggtaaaacttgcagggcctcgtgacaactgcacgggaaagataacagaccggtaagagcccaagatgataccaaagttcctaccgtctaagtggtaacatatagcataagcattgacaggaaaacttttctagtctcatgttcatatcaattaataaatggtttctgggaaacatagcaacatgctctctgcttgtgacttctatttaaataacagttttgtgtatagataatcctcaagttgcttgaaaattttattatcaaactcttttcccagtttatttaacacatctaagttagtccagaagagtgacttacgaacgtatattttcacaaggttattaaaaagaatacctcccaaaaaagaattccatggtttcctaaataatatacatctagagcaagaagaggtcattgtccgatgacaattcgctaatgtgctgtatgacagcagttaattctcaatgcacaaagtgttaataatctgcaggctttcccattctgttatacatctgaaccatctcttttgattacaaattgtcatgtaaaaccattactagccagtaataattttgagagtaaatatgccataaaacactcctatattacagcaggaaataaaagagatactcagtagttatacttgcctacttcctgtttaactaaaactgttgaaacaagacaagcaaaaaagacacccagaaaggatttatggacttcctgctttccactatagatttgtcgctgatctcctaaaaactgaaaataaaatcttaattaatgtgttaataaagtgtcgactttatacacaagatgcgtatttctaggtaaaatttccaatttaccttttcctgttctcaatagctcccacaaaactattcatgaatcctaaaaatacatttaccaattatgttaaatccagaacaatacatccaaagtgaaaatggtaagtaatttaaaatgtataaccaaaatatctttccatgcattcagaaacaagcagattgtcttctatttttatgcacgctttgtatttcataagaatgtattgtataaccaaatagaacagaccttcatgaattgctcatgtagcagcttaatctctttcagttgctgtctgctaacgactctctcttgttgccatctcttttgttgctctctaaatattttctagaagcacaaaacaaaaaagtgaaaagaaatggggtaaatgttaatacttacaaagcataattctgcattagctctaaaagaatactctttaaaatcaatacttctgaacattttcttttcggcaacgtttatgaccagttttaaacaattatgttcaccactcatacgctaaaacaatgtaataacttttttcatcagtcattgagtaaagcatttcctttcttatacatattcaacacgtatgtcctaattcttgatttcagatgaagagtaattgatgaccctgcctataatttgtttaccacagataggtaagatctatacagaaattaactaagaaacattctttcttactaagattttaaacatgtgtaaaatcttggtcatttcaatatgcacatagatgaacctcccaataatgctggcttttctacactttgacctaatctccaataacagtgttttctctcctctatgtgacactcactcacacagtcatcccctagattttgtcattcccaatgactacaacatctaagtaacattaataatagcaatgataaagagcaaccatcggtcagattgcatcccgaagatgttaaataaacccattgcataggaaccctttaatcctccaaacagctctgaggtaggtactcttaccatgtctccttttatagataaggaaactgagacacagagataaatactttgcccatggtttctgagctagcaatggtcaaactggagttggatcccaagttgggtggttccagagtcctggtccttgaccactgcactcagctgttcctctatcttcccaacatacagccactacctccctgccgttgtaggtcacttacttcagtactacagctcaggagtctatccggacctgacacccattgaatggagcccttttcactgcccaacgccccacccccatgtgctcgggtaactcagtctgaaattccacaaccagtcatcataaccccatccctgcgtctatgccctgcccaactctccctctatcaacgtgctcagctacaccccaacccagaaaattccaaccctacagctgctcttgcacaaatacaccaactgagctcactttaacttcttaatcactatgatgctgaccccacttgggcccctaatgctgcatggcacttacattcccctcatccattagtcctctaatgggaaccctctctgggctcatgctctcttccttctttgctggatttctgcatgaactattactacctcagacagtgatgcaataggttaatcataaagctaagcctgatgccaacaatttgtttttcttattcttcctcagtcttctgcatgtgtgtgttatattcttgaagaaaattcagcaactgcagagaacatctacaattacatttctgcctgtaacacataataagtaacatggtcatgcttcatagagagatgaaaaatcaatcctattcaagccaaaactgatttgacataatttatactacaaatagaacaacctgggtggcaaagtaacaagggagtaatagcaactgaaatcctctcattgggaaaaggggaaatgagttactctcattccaaaaggatttcttcctaactgactactagatcagctgtcttatgttctttacgtactgaaaacaaaggagggtttactgcactaaaaatttaccagaaacattcattttctctaagagcagtttacttttcctttcctcttactgactaacgtgggggttcccataagtaaattcaagactatcatggccagtcatcccgtaagattttccaaaagaaatatttcactgaactatttctccactctgacacaacagtgattttgtaaaagaaatagcgaaaacaattgcactaaaatagataacttatttaaaacataaggttatccctttctacataatggaatatcgttaaggatctaaaactaaacgttgaagacatttacctcacatttagctagcatatttctagaaattgataaaaattaattatacaggaagactattgctatctggaaggcgaaaagaggtcatcttcattggcttctacgtaatatctcataattttgttaaactgaggttataaaactaaagaaacttacctgcttagggaacaatcaagtgaaatacgttgttcactggagacgccaataagtacaggacactgaaatgatttgcaccaacgaatacaaagaaatgatataaatatcattgtgcaaaaaagccagcaatcataccttttcagttgttgtgttttcaaaatatgttccattctgttcttggtgttgctgcaagcttttgtatatgtttcaagcctttttctctttgcagaaagaccccgtttcatgcatgtcagctagatagtaagtgaaaatgcattaaaagttaatgttgaaaagtagttccttggaatatattcaaatcgatatgggacatgatggttcattaatattagaaggacatttgaaatgtaaaatgcaagaatcatttcaaaaagcaagattttcccacttattttctgtaaaatctttcaggtattaatattagtattccaattccaaatggtaaaactgcaaatcacttttaattgacagatgatgaaaagcaaataattaaaagcttctatttttaaaatgtacggaaagggttacaaacacagaatttaatttctacatttagaaaatgtcctacaattcaaaggacactttgccgtgaagtactgtcacgactcattatgtaaagcacacaaaagtatcttatttaataagaccatcaaaagggtagaaataatacacaataagaaaactatttttaagcactctagtgattaatgctattaactgtattgtaataaaagaagcaatgtccatgtgtataaaaatttaagtttaagaagtcaaatacattctcgaacacttctgaaatattttcttggagcttcttatgtgacatttttatccatagtgccgtgtctcagaaaactgtaatactgcaaggaatgctttcctaaacctggtttcacatcagagatctaccatcaattgctattaatagttttcagcaatcataaaagatctgcaccgtaatacaaatattttttacatacagtacccatctataatactcaacttattaggcagctcacaaaaccagcactttgtcaccacctagcagagcaaagctccccaaatacactgcttgtatgagttatctctatagaagaacaaaaaaaaaaaggaacaaaacattttaaatataagagtattgtctccatagtctctacagaaattttctcaaacgtttttggaaatatggtcctgtaacagtcagtgcaaccaggctttcacgtggcaatatacactttatgagtttttggatccaattacatgtttctcactggtagaaaagttgtatttacttttctactacacagtttatcagtgcaataataatagaaaatacccactttagagaattcaattttctctggtactttaaagcaaacaaaatcagaaggctatgacaatagaatagctaaattaggaatatgaaaaactcatatttaaaactctgagtacagatggacacgaagaggggaacaacagacacttgggcctacttgaggtggacagtaggaggagggtgaggatcaaaaaaccgcccatcaggtactatgcttgtaacctgggtgaaaaaataatctgtatgccaaacccctgtgacacgtaatttatctgtatcacaaacctgcatatgtatccccaaacctaaaataaaacctaaaaaaagaccactgatatgtgacttaaactgggtacactgaaaggaatgaatagagctgttcctcatccatctttactcagaagtcatcaaatttctcctctattttctaataaagattttgaggtattattttgcatttttaactctgtgtttatctacacttgattttttgttccccatgtcaggtagagatccaattctgctttcctttttcacgtggaaatttagttgtctcgtcctcattagttgaatactgtatagttttcccattatcagcttatttactaaaaagtccttctttgtccctgctgatttgaaatgctacctttttcatactctcaatttacacatattattgggtctgcttatcactttctagtatgttgccttggcctgtctgtccattctcatgccagcgaatccacagtgttttaatgacagaagctcaggtgtatactgtaatatgttttaggccacttattcctcatagctcttccttttcggtgattttgtagctatacttgcctttttaaataggcattataatatcatcttgttctctccagggcaaaagaggaattgtaataaacttaaaactcacttagggagaagtaacatcttgatgatgttagttataatgtcctcacacggaacaagggatttctacccactagtccaactctacttttgtgtctttgtaaaaggcattttatactgttttgaatatgtcttaattttatgcctatttttaaaaccgtttttgttgctcttgtaaatgaagtttgttttgtttttaacttttgtcttctaactggttatatttttgtgtctgtggaggctgttggtttttgtgtgtcaattttatatactgaaaactttctgattttttttaatgttttagttacttttacccctgattctctagggtactccaagtatattatgacgtcacctgcaactagagataattttagttgttttccaattcttttgcttctaatttctttgtcttgctccttgcatatgtgacaaccttcaggacaatgataggtaataatggacacattaaacatttttgcctgcttctttactagaatgcctcaggatttctccattatttagcattcaattttgattataatttttttcaaattttgccattttttagtatctgtgaagatagttgtacaatattttccttatgcctattaaatggcaaagttttaaaattgctaatattccactttgtattcctagaataaatcctacttggccatggtgtaccattttctcattgtgatttttgaatatgtttggtaatattttatttaggattgccacattaatgttcagaagcaacattggcccatctgtgatgctgccattatcagctttagggaatattgttctacttcctcctaaaaaagaagtccaatgtttaccttcattttctagtcttcaaagcaatattaagtgctgcaactatttggccctaaaggtttggagaaagtccctgtgaaggaatcggtgcctgatggtctcctatggattatttccttcacaatgctatttcctttgtagaaattgtcttttaaccttttgggcgctattgggatcaataaaatgtattttgacaagaaattacattgttcatagagtgttacaaatgtatccacatagagatgcgtaaagacatccctttggtttttacaaatttcctctttattataatttacaggcatacctcaaagatattgtggtgttcagttccagaccatcataataaagcaagcaacacggattttttggtgtttcttgggtataaaagtttaagtttacactatgctatagcctattaagtgtgcaaaagcactatgtctaaatttatataccttaacttaaaaatattgaagtattaaaagtgtttaatatcacctgagccgtcagtaagacataatcttttagctggtggagagtcttgccccagtgttcatggctgctgactgatcaggatggtggttgctgagaattggggtagcaggggcaatttctgaaaataagacaacaatgaagtttgacacatagagagactcttgttttcatgaaagatgtctccatagcatatgatgctgtttcaaagcattttacccacccagagtagaacttctttcaaagttggagccgatccttttaaaccctgtcacggctttttcaactaagttcatgtaatattctaaatcctgtggtgtcatttcaactacattgctgcatcatctctaggagtagattccattttaagacacacattctttgttcgttcataagacgcaactcctcatccattcaagtttgatcatgaaattgcagcaaatcagttccttcctcaggatccattactctttctgattctcttactgtgtccatcacatctgcaattatttccctcactgacgtcttgaacccctcaaagtcattcatgagggttggaatcaacttcttccctttaatgttgttgatattttgacctcctcctatgaatcaccagtgttcttagtggcatccagaaaggtgaatcatttccagaaagttttcaatttctttttctcaaatccatcagaggagtcaccatctgtagcaactatagccttatgaagtgtgtttgttaaataaggagacttaaagttaaaactactccttgatccatgggctgcagagtgaaggtttcatgcacgttagcaggcataaaaataaaaaaatctcctggtatatcttcatcacagcccttgagtgaccagacacagtgtcaatgagtggtaatattttgaaaggaatctttttttctgagcagtaggtctcaagagtgggcttaaaatcttcagtaagccatgatgtaaacagatgtgctgtcctccaggcttcgttctttcatttctagagcacaggcagagtagctttaacatcattcttacaggctctaggatatacagagtggtaaatgagcattggcttcaacttacagtcaccagctgcattagcccctaacaagagagtcagcctgtcctttgaaccttggagtcaggcattgacttctcctctctaactatggaaagtccaaatggtatcttcttccaatagaaggctttttcatctggaaggaaaatctgttgtgaacgtagccaccttcacccatgatctcagatagatcttctggagaacttgctgcagcgcctccatcagcacttgatgctccaccttgcgattttatgtgatggagacagcttctttccttacaccttatgagtcaacatctgccagcttctcacatttttttctttttttctgcagcttcctcatctctctcagcctcagagaactgaggagagttaggagtgtgctcttgatgaggccttggcttaaggtcatgtggcggctggtttgatggtctatccactaaaactctctccatatgagcactaaggctgttttgccttatcattcatgtgtttgctggagtagcacttttcatttccttcacattgttactaatggtttcatgcagaaagcctatctcagctgtcgacatgccttccttactaatcttaataatttctagcttttgatttaaagtgagagatgtgcaactcttcctttcccttgaacattcagaggccattgtagggttaggaattggcctagtttcaatactcttgtgtctcagggagtagggaggccagaggagagggagaggcatgggaaaaggccagtcagtggagcagtcaaaacacacacgttgatagattaagtttcaatcttatagggtgcatttttgtcgcttcccaatgtgattacaatagcaatatcaaagatcactgatcacagatcatcataacagatataatcctagcgaacacttgagatgttgtgagaattaccaaaatgtgacccagagatatgaagtgagcacatgctgtgaaaaatggtgcccacagattgctcaatgcagcgtcaaaaacaagctgtatctgtcaagtgcaataaagtaaagcacaatcaaatgaggtgttctggtagttctatttctgctgtgcaatacatctgactatctatctatctatctatctatctatctatctatctatctatctatcatctatctagccatctacctacctacctatcatatatagaaacactatctctatgactttgattcatttagctgctacttcatctgcttcaatgatttaaaaagaacatcttgacttcatttcttgatctcatctttctgttttctccctcaataatgtctgctgtttatattaatgttatttctttcttgtgctttcttttgtcttactaagccaaaagaaataattttctttctaaattttatgtcttgtccttgagttagaaatttccctcattcattgtcatgggtatgagtattcaaagctgcccatatttctctgatcgcttctttaaatatgtctcatagattttgatctgtagactttattttaatttatcagaaattatataatctcatctcctatctccactggcgtccaatattcttttaacagatgatatttatgagttctagtctagcggggagaggtttttattgcttttagttgtagtatactatgacgatggcatgtaatttgtgatttctttatttcgtggaacttactgatgttttcttagtgacctcatatgtgatcaacttttgtaaatgttccttgtatgatagagaaggtgtattttctggtatcatgttgtagtttgtttatttgtttatttgttttgagacagagtctggctctgtcgcccaggccggagtgcagtggcccaatctcggctcactgcaagctccgcctcctgggttcacgccattctcccgcctcagcctcccgggttcacgccattctcccgcctcagcctcccgagtagctgggactacaggcgcccgccaccacgcccggctaattttttgtaattttttagtagagacggggtttcactgcgttagccaagatggtctcgatctcctgacctcgtgatccacccgtctcggcctcccaaagtgctgggattacaggcatgagccaccgcgtcccggtctcatgctgcagtttttatacatatacattagtgctacattttcaaaaatgtttacagtgttacgctgggctggttgtggtggctcacacctgtagtcccagcactttgggaagccgaggtgggaggatcgcttgcacacaggagcgcaagaccagactggataacaaagtgaaacctcgtttctaaaaaaaacagaaacaaaaagaaaaaacagtcacgcatggtttgtgcgggtagacccagctacttgggaggctgagacaggaggatcgcatgagcctgggtggtcaagctgtaatgagctataagctaccactccactgcagctggggcagcagagggagactcaatctcaaaaagaaaaacaaacaaacaaacaaatctcatgtaccctctaaatatatatgccggctatgtacccacaaagattaaaaattgaaattaaaaacaatttacaaatttcactgttatttctttttggccgtttaactggttgtggcaaattgcattttcaggagttggccacaacaccatcttctctcccccatgctcttctttccatgtgaccttgacactgcttttatcaaggagtggagcccatatgtccttctcttgaactgaggcagcatctgaaactgctcagactgagagaggaccacacaagtgatgatttgtgtctggagagactaggtcataaaaatgctatgaaatcccaccttccagctcgcttagccctgtgatcccactagacttctactccatctggactgctactccattgaccttttccctgttcctctatccttgagaatttcctgtcttctcagattcaaagtccaatgtttctgtcagtcacctcccaataatttcttgtgcattcactgcatttgtcaggaaaagtcttatttctagaaaaaaaaaaaaacttttgcattgctggcccctgtccctgtgcctgtggaaaaattacttaacatggccagtgtttaccctcttgactgtatttgttttccaccctcaattaggccctcaaaatggtccccaagtgtcctgtttccacctggtcaactcattctcccaactgtgattttttttttctgctgccttttctgctgtgctcacccttcaagtcggctatctacattcccaacgccctgttacactcaccctttgaccctattcctgtttttctgacaattcaaatggaaacccccaaaacttctgccatcaaacctacaagctacctgcatctgtgcctgatctattagaggagcagagatgtccctgcccctgtgttctacatgttccatggcctcctgtcttccaggaacctcatgtcatccattggtttatccattatctttctccttcctctatcttcagtatgtctttctttttgcgtctttcttgtttccattagcacatacttgaatctccttcaacttgaaaacacctgggcgttattcacaaccaatgtaattcccaccactctcttactctttgtggcagagtttccaaaggattatctctacttggtgcctgtattgcctcacctctcacattttctgtaacccgctagaaaccaacgtgggcccacacatctcttcaaaaaaaaaaaactctccctcaaaagtcactggtgacctccatgtgactatagctaatggacattctctggccctcatctcagttgattctcagcttcagtcaacactgttgcacactctcctctttttctctttcctctccttttgtcttcctttgtcttccataacaacacattctcctgttattctcttcattttggccacttctcaatatctttactagcagcacctcctccacggggccttttcaagatgggattccaagcgatttggttttactcaattctcttccaagtttatactctctctctaaacatttttatataatatatggccatggctacaattaccattgacatcaaagtttctcaaagtatggctcgtggaccagcctgtatcaggatcagagtgaaagggaaatggcaaagttcagatttcatggccctattcaggcctaccaaatgaactctgtgggagggaacattaaatctgcattggaaatgttatccaggttgttctcatatgcccgcacactatttgtcagggactgcctggttgacattagcagtggcagctcaactcctccatctggtgactttctgacaccatcatcttctttttgcaaatacagtccatggaggttagtaaagtaaaatgtgaaaagtgagaaagcaataaagaacataaaatatggagtatctgctccatgagtaatccagattgcattatatcattttacgacatatctagcagcaaagtagaacttgtctatcttaatgttttgagagtaaatccaatggacacctttccattctcatctaagggcaggaaaacacaggtattgaatgactccccctctacagatcattacaccaagtttctggcttctaacaatggtgccaagggcattaatgaatttgtataaagttagtcttccagaggttagctaataaaaagccctgtactttccactaatacaatagtatgggttttgattctcatttctctgatgatgagtgatgtgaagcacttttttaatatacctgtccatcatttctatgtcttctttggggaaatgtctattcagaatctttgctcactttttaaatgagttatttttctcctgttaacttgtttgtgttcctaatgtattctggatattagtcccccgttggataaatagtttgcaaatatcttctcccattcaacaggctgtttctttactctgttgattatgtctttttctgtgcagaatcttttcagttgaatgcactgcatttgtctacttttggttgcttttcttgcctgtgcttttgaagtcttgctcaggaattctttgcctagaccatgtccaagagattttcctctaggttttcttctagtatttatattttcacgtcttaaatgtaagtcttcactctattttcagttgattttcatatacagggagagataggtgtctgctttcactaatcatcagagaaatgtaaatcaaaacctcaatgaaatatcatcttaccccagtcagaatggctgttatttcaaaagaaaaaaataacaaatgttgacaagtttgtgcagaaaagggaactcttacaccatgttggtgggaatgtgaactactacagccaccatggaaaacagtatggagattcctaaaaaataaaataaaaaattgtactaccattcgatgaggctatcccactactgggtatctacccaaaggaaaataaattgatatttcaaaaaatacctgcacttgcacgtttactacagcactatccacaatagcaaagatgtggaatcaacataagtgcccatcaatgaataaatgttattcttccacaaaaaaaaagaatgaaatcatgtcatttgcagcaacatggatggaactagaggtcattaccttcagggaaataatccaggcacaaaaagacgaatatcacatgtcttcacttatatgtgggagctaaaaattctagttgcatggtggcacagagttgagaggtagagaacagagattaagaagagtgagtcaggagggggaaggacaaagagaaatgggtcgaagggagcaaacctgcagtaagatagaagcaatgaattcattgtttgatagcagagtagggtgacagtccttcacaaaaaagtattgtactcaggtgatggacattctaattaccctgacttaatcactacacattatatacatttaacagtgaattagtactataggtaagtcatgtacctaagtaagcagtaaaatagagacaacaaggatactaagtggaatgcaaaaaatagggaacctgttcttgtcaaatataattttgtcgttgtcgtattaataagttcgacttaactgggttttcccaagaaacttgttacatagaaacagctaccaatcattacatttccaagtgaagcctgatcctgaaaatcatgctctctgcaactcacatttgatttattagttttagtggggacaagagcttagaacttcaaaggacaggtgctgagtgttatataggaaaaaagttatggaggataactgtagataacttgaatctctgtgtgatgccaggataaggaaaaaccttctttatcattctattattttttgttgggataataaattaccacagacatctgacagtaaacatgtatttagtaacctaaagatatcaattagttatggcgaaaactgcaataacttttacaccaacctaataaaaacagccagaccaagtaattgatctcaggaagctaaagataatgggcttatgccagagagttgaataaccgtttttctccttgccaaatcccaacctagtgttacaaatattacctcatacaatagatatctattttaccaaggtgaataattaagtagagataactagatgaagccagtacctagaataaacatattctcctcagtactacttcttatgtcttagtgaaataattccagaccccccagtcatacctggcaaataattgaataaacaattcccaattacctggaaatctggttgaacgtacaaagttgagtaaccatctttgtcaactctgtgttcttatcatctttaggattgttgactaggtgccatgaatatggtaagtagagttacatgggtaagagttaaatacagaatcctccataaaactagaatagctggttgagggtagaaagaatgaaattgcattcttttcaacacttctgagttcttgttggaataattagttagttctgtcaatgggcagtagtacctaggttattacatagcaagaaataaggagagataattagaataaatatttgatggcagggtggttaaaaaacattattttcaattagaaacacttatttcttgtaggattaataagttagaattaggtggtactgcagatatctctatatgttgtggatttcatttctggggagaatgcatactcaaccgatggatttctgggtcatgtggtggatcaatttttattttctgaggaactgttatactgtttttcataacgttgtaccaatcacattcctgccagtggtgtggaagggttccctttcctgcatgccctaaaaaggttccattttctacacacccaaatacccttccatgggtgttggttaaactgtgctgcatcttacaatggtatactgctcagcaacaaaaagaagaagaacatactaatacacacaacttggatcaaactctaggttttgctgacaagcgtattcacaataaaatagcgaggaaatactcatgattattataattctcatttctatcactggtcacaatatggtagctgggttttataagcatcctcttctgctacacattctgtatacctttagccctcagcaagcacctcagctggtcggggttctgtacttggtagggtaacacaaaccttcattcctaaagggtctagccattcacagttctgcctggattgggttgtggtaatttctcatttagtttaatcacagggtatagtaatactaagagacaccctaaggcatcccctgttttccagacatattcttccttaccttcatcgtggagtcatcctccaatgtcccccgtttagtcgacatcaatgactgcatgcaacacacttactcccttcttaccctcttgactcagaggcaccagaagcccaaagtggctgggtgtcagtcttaatttctagttccatgaaatcactgttgtgtctcctggtggcaacattccttcctctagaactaagacctctagccagcagagcataaagttgttgtggaaacaggaagcaaaacatttactagtgagcctctaggggtgatgctgaatgttgccactccaatttccacccctggattcctggaccagtgaatcctggctatgatagagacgacatcatatgttgaatgctgattcagagcacatacagccttcaagaggactttgctccagctctgcaaagtattatcagctagctggggcagtcactgtgacttcaaaatgtcatttcactgttattttattatgagtgtgtgtgtgtgtgtgtgtgtgtgtgtgtgtgacgttaagcaaagatctttgttttctttcctctcatatttccttatcaggtaacgtaagacgcagtgacttttcatcggtatttaagtattattaattttacatgatgctatgttcatgttatgcgatatcagctgaaaaaaacatcatttaaggattttacttcctctcctgagaaaaggattggtattggttgtaggcaggatagttgtatcatgttagacagaattatgatgttggtatggtctttgtttgatgagtaactatggtttaagaagctgcacatgggtgccaaggtgacataaggtgacatggggtagagttgtgatgatgaattgtatgtgtgaacttgggtaggctgaggcagcaggggtcccccacatgtttggcaccaggaaccggtttcctggaagacaatttttccaaggactgggggtggggtgagtagggaggtgggtgggtgtggggagatggtatcagaatgaaactgttccacctcagatcatcaggcattagttagattctcataaggagtgagaaacctagttccccggcatgcacagttcacaatagagttcataatcctgtgagaatctaacgccactgctgatctgacaggaggtgaagctcaggcagcaatgctcccttgcctgctgctcatctcctcctgtgtgctggttcctaacaggccaccaccaaccagtactggtccacggcccatgggttgggaagccctgggctaaaggatgcccagatagctgacaaagcattatttctggtgtggctgagagggtatttctgaatgagattagcattccaatcagtacacttgagtaaagaaaattgccctcaccaatgtaagcaggcctcatccaatccattaaggacccagagagtagcaaaaggtggaggaagggtggatgagctctatttctgagctatttctgagctgcaatatccatcttcacctgccctcagacattggaactcctggttcttgtgccttcaggctccaggacttacaccagtggctcctttcctagtccctattatataggttatgtattatataaaaacataacgtattgcttctatttctctggagaaccctgactaatacaagcatgtgggccacaatctgcacaacagtctgtttaatctaaacctacggcctcagaccacccttactgatgcagccaaacctaatgtcctgccctggcccccatccaaattgacagacccattttcctactgctcacgcaaaggctccatctggacaggcacagcacctcctcatctacatactgcacatggaccccgtcctccacactcttcctcatcaaatcaccaccaacttttcctccttcactctcaactaaggggacaacttcacctagtcagcagcctcagaagtcagatcaatagagattgtctccatcagttcacagtccctcacttcctaaaacactcacgtggctttccacctcaccatctgcccccaccctgacagactgaactaagaacattgccactttcttttgttttcatgacttggtgtttcctcagcatatgttcaataaatggatgaatcaatggatgaatgagtaagtgagtgagtgaatgaatgaatgaatgaatgaaattaccagggatgggaattcactgattcaaatcttggagtctgccccatctgggcctcctgcctccataaagaaatgcacagttccctcacctgtgctcacctgagttcacagttcccgtggaaacttctattgagagggctactacggacgcctcctcaccaggcccaaacactgtcatggaggtgaggatgttcccagcaggatggtgcatgatgctccctgcattgaaccctgcacatccccatcagtttaacaagggaaggtgccaactccactgggtttccatccaacctgcctatgtccacaccttgggccagccctctatcccagccagtgtgtgagggcaacacaggccagcaatcacagcgccgggacacctgctcccttgtgcgccaagagctcagaagccacaggagtccatctgaggcagggtcaccacctggatcattttcagcgcacgtccacacccagcccttcatctgcagagtctcgactgattagtctcagggcactcttcctccaatttcccctccatgtggccacatgcccccttcaacggctcattggcattcctggcccatctcggcagttggtcatcagtcagcaacccactcacatagcccagcctctatggacggtccccaggggataaaactccagcccccagcaggcatgaagacagcttccagccctggaacgctggcaaaggtgcacaggaccactggaggggtcaggagagggagctagcccaggatgatgcagggagccagccaagctcttgctgagagaaggaaggggagtctgaggcagggtggggtgtccagcatgccgctggtgcattcagccaataggcctgcccattcggatcacacgaccccctccagctggtgatgatggtgcctggatttcccaagactatttctgttcattgtcctgtcctccctcctcccttccgccttgccttcctcaggtccctgcccccactgggctgaactctggattcacagctgtgaatgccagcctgcctggggctctgtggacttggtttcacatgtggtctctctcatggacgctggcaattgctctcccctggatcctcccagtgcccctcacgggctgaggatctcctgtctgctgtccttccctggcacctgttcagtctgccacccttttcactttaacccgatgtccatgttatacatctttcttataagaaaacactcatgcttgcccaaaaatttatactcaaagatgttgatcttattctagtcatcatatagcaaatgagaaacaacttatgtgtctttcagaaagaaagagtttaattaattatggtgtatgcctactttagaattatagaatgtaatttgaaaagtgagatagatctatatatgtattgtttagaaagatcccgcatccattttataaactgacaaaggttagttgcagttcaatatgtacatcactcttcttgcatgttaaataaaaacgacatattgctgtactttatctgtccatgaaaagcctgtagtcagctgtaaaataatacacaagactgatcattgtggtgacctctgaggagcgggttaaactgtggaggaactttgtaaaggggaaatttgtgtattatctatatttctatattttttgccctaagaatatacacagtacaaccttttaagtaaaagtatttatacctaacaacagaaagagtagctctgtcagtttaagtaactactagttaatgcaacagacaagtcctgaaatgtgaatagcctgacacaactcaagtgtattatatgcgcacctaagttctgatgcggtttggcaggggctcctcactctcacatgacccagggatccgggctgcttccaccttatgattccatcatgtcaaaatgaagctgccctgtttaccattgaaaggagggagaaagtgtggaaatggcacactggctctcacatgccgggatgtgacaaacacctctgttcatgttttggtggcaaggaaaagtcacgtgacccttcctaactgtaagtgggccttactgttcccatgtgtccagaaaggggaaggagacaagatgtgggtgagcattatagtctcccccataaactgttacttagtagctgcacaacgaaaagctaaggcaggtggatcacttgaggtcaggagttcgagaccagcctggtcaacatggcgaaaccccatctctactaaaatacaaaaattaggtgggcatggtggcgggtgcctataatcccagctactcaggaggctgaggcaggagaattgctagaacccaggaggcggaggttgcagtgagctgagatcatgccactgcactccaaccggggcaacagagcgagaatccctcataagtaaataaataaagcaattatgattatttggtagtatttggcattacactacccttctcatttctcaaaggagtttcggaaaaggccacatttggcttgaagttctccaacttgtttccagtgcctaatatgtgaacaatgctttcaaatataggatcacaactaactgtccaagaatcttgaaagtctcagcaggaagccttccctttgcatgaccctttgaatcctgagtagactgcaatttttttgtccatttgattccaggtcaaaatcttaacctgtgagtttctgctaccctccacatgtctgaactcgtgtcaggtgtctctaggcacactgaaagccagtattttcctgcgaggcagttaaacagacaagcagcagtagaaagctgcttaattattcgttttccatcagagcagaagtgtcttcaaggaatcagggcctccagggatttaggagttcagtaagtagatgtttgttccactgatttccaaagcttcccctcatctaatactcatgagggaggctttggttttaaagcattcatctgtgtatgtgctcagaggtaaactccaaataagacaccctgataaagtccaatttcaagtatcaaggtggttccaaaaccttctaatttcatggcgacatcccaagaacgcttagataatatggcgaatcagactctactcagcacattcataaagcacttggacagtgtactgaagataagcagagtggtaaccaggtgtgtaaacatcactatcccatgggaattcaaaaggggtgttgatatcacatagcttcctgggtgagagatgggacatccagaggacttctacaaggaaaaggaatgtggcctgtcatggggtgagcaggtgattctgggctgttctgtggggactagtgacaagctggtcagcaacccgtgttccagagtgagacaggacacatggaagtggccaggggaaactcactgcaattcgggaaagtgctgggactgacagaaatgcccacaccttggcagagtcagctgtcaaggaacccagtgcacaccagcctcaaatggtgtttcattctcactgtcaccttccccaggcctgtttttagtacgctggcctcggggtccttctttttgtcaccagagacatacggcacagtgttgagaagagaaaggaagtattactcaggaggtgggccacgggctgggaggagtgggaacaacatgggctctgcaggaattcaggtccaggatccggttccagccctgtcccttactaggcgtgtgatcctgggaaatacccaagccttgcgtgcctctggttctacatctgtgtagtaggtgtgattagacccttccgctaggactggtggagtgtgtgccatgcaagtgaagcacctggctcagggcctggagtaaattacaagtttaatggctagcaggtggctgttattgctaatattatttgagcccagactctaccactctgggattttgttgttgttgttctccaggacttatcagagaatatacaacttaataggacatggaataattaaccaaaaagggaagtttcatccataaaattcagtaaagtatttcctcttagagaatgaacttcaaaatttgggtatgtgagtttccctagccagatgcagctcaaagatcgtagaatttgagtcaaaaaccaactcctttcctctctcccacagacctttccatccaaaccactattttcattcattttgtcaccacacgaaatcttgcttacgactggccaaattgcacgtgagataacctcattaggatgcctttttaatagagtcagccctggtcctcccagccaggcagaaaagtgcctggccagtggcttctgggtctcccttccggggagattcacgcttctctctcaggaaatgctttcggatgatgagtgtccatcacgcagctcttgcgctgtgttcagaagcactggcacaaaagcataggacactttccaatcctgctcaggtggagactcctctgttcatccaccatccgaaagaaactcctcagagcagctttccattccaggcttttctctcaccgtctgagaatctggccctggatccacccaagatcattacaatcagctcccccagaaggaactgcagtttcccaaagcccaaaatgccccagctcagggcattgacactccaccactctcacccggagccccacaccctcacccctctctcacttttccctacatctttagaggacatcttgccacctcgattacgtgactgcagctcctagactctacgaccctatgggtgggtatgagtctggcttaccttagcatctccactactaacccagggccttccaaaaagcagatgctcagtgcatggagaagaaaagagccagtgaacaggaagaattctttattcagatttaatttctcttacattctcaaagaagccaaggaaatccaggtatgcatatatctttaaaaattttacagaatagactgaggtataaggcaagaattgactatctcttaatttctttagttctttatctcatctattttactgctcatttttcacatttctaagtacttattccactgctgttattatcccaattcacaaaatagaatggatttcccaatctgaataaaacacaagactcttacccttaaactatatacacagaactgtgtgactgctgtcattcataaacttggatgctgaagttcattcaaccatcccttaaaaaaaaacatttgaacaattccaaaagagaacaaagataaatctccaagtcacccaatagaacagaaacctactactgagaacactgaccgctctcttcagagtgaagaatgggcctcatgtcacacgaggcaggggaagctgctggacgcggccctggaaggtgcactggcccagtccccctcccactggccttggctgcaactcatgctcagactccctcttcctcctctctcaaagctgcttcacgcagggatgggaagaaaaagcgaactcttgcactgaccttgatcacatactcaaggactttcacatagctggtttcagcgagggcccttggaccccacaggaactcatagcgtgcgggatcactgtccggcacctgccggtactccaggtacttttcctgcaccaaatcttgggtgagcagcttcctgggctccccataggcactgtgctccctcccatcatacacctccatcacactcagctcctcccagatttcctcctcaggagcatggccgccctccattgcaatcatgaccaggacaattatcaggaagcctgtcttgggcatgatctgattatcacccagcaggccatcataggagagacctaggcaggtgacaaggacataggagtggccggtggggtctgcttccttcacgtcaatgccaaagaccagctgcaaggactcagaggctttgccgaagatctcaggaaaacagtgcttgtaatttttgatgacactctccagcatttctgcctttgtgactggctccctggctcgatatttgaggagcagaaaaccaaccaaatcagccaccttcttagtgattactgctcggaacaaggactccaggatacaagaggtgcttggcccctcctcttcacggctgctggaaccctcactgggttgcctctgtcgagtgaagttgatggtagtgggaaaggcggaggctccctgaggactctggggaggatctgttgacccagcagtgggcacctcctccagggtgcccaggaccagaggagaggaggaggaggtggcagcctgcacacacaccaggcccagggcctcttgttgggcctcaagggcttcctcaggcttgcagtgcagactcctctgctcaagagacatgatgactctcgtcagggcagcaggcaggagtgtgggcaggagctgggcaatgaagacccacaggcctggggagagagggagtgtgtgagaggcctcagctgagaactgaaccttggagactctaacaaaggcctacttacagatcttctccttggtgctcctctgtggcctccagggaatcctgtcctctgggttggcctgtcccctgaaaacctgaaggaggaagtgagagggtactcagggtacagccggccagcagaggtcgattctacaggactgacagtagggaggtgaggccagactctgtggagtcctatgtgtcctgtggcaggtggggcccttggtgtgcattcagggcaaacattcactgctggcacaccctgtgcatcctctgctctgtgacctgaggatactgtctcagaccaaggcctcactgcctggttcctggagctccaggaagaggaatccacgggccctcagggtgcagaccgcaagcacagccctggcttctcagtgctaccaggagggtgggctggactctgtgacatccccactctcatgcagtggatgaccccctctgttctcacgcagggcccttatatttttcctggcagggcctggatcctgcccttttgctggtctgagaaatccaaatcaagagttcacatccatgataaggaatggaaggacaggaggggacaaacatctggccacacgtgcctaggtccttggggaagggcagcaagagatatcaaaattcattggaattaatgtgtcctgggtgaggtgcccgcttggtcctcaccttgactcctggcagggcctgggacgctccctctactgacctgagcgcagccttctcagaccaaggcctccccgtccctgacatcaatgatcccaggataacggaaggacctcggcagacggcccagcccatgctctctggggtgacagcaggggcagggctgatttctgtgcagtctccctcagtgttctggtcctggggtaccctcagtcctccctcatgttcctcacccgaacgcatggcagatcctgggaccgctctgtctttagaccagatgggggtccctacgttgacctgagtcaccctctgagaatgaggtcctcacctgccccagatctggaaacaggagtgaaaagaagccacatcctgggtgaggtgtccagggctgacccctttggttctggggtgaggattccaatagccttgtctgtctcactcatctttattcctgccagcgcctgtgcttcctcaacccccaattccctgacatgagtagacatcccccctttaccccaagaccccatctccctgagggccccccaacttcctgcctgtggtacaagtgagaatggaacataccgccatccctgatctggtccccctagagctactaaaaggggacagccagactgtgtggagtcccttctttctgagccggggatatccccagtcctcatgaagggggcacatcttgggccatatggatcctggaactcctccctctgttgacctgaggccccacttctcagaccacagctctgtcctgtcacctcaaagatgcaggaaatatgggccatatgtggccaccgtgccctggacctctcagggccgaggtccacactgatctggattccaaggtcccctgagtcctccctcctcttcctccgcgtaagccttgcaggcctgggtcccacccccatgctaatctgagtccccatcattctgattcttgaggccagaagtggcagcctcagtctcagacaggggtgcggtgtcctagggtgctgggtcctctgaggcctccctcatctcgcagtagggccctccctctgctcccctgaggccctgttcaagccccttccctccatcagccctggatggggacgtcaagatccgagtgcctggccgccattcccgtggcttccgtgggttgacagcagggattctgacaagatgaggttgggggtagggggtaggtatgggaatgtgagtggggtggcggtggagatgaggagacaggtgtgggtggggaaccctcagttccctcccagggtcctgaccctaatgccgggcggatgcctggaccttgatgcctgggccctgccctctcctgaccaaccctgccccggtcacataagctatgactacagattgccctgtgggttaagtggcagtgggacgggacggggggtggtccagctgagacatctgtcctggccgggtggtccagggctggcagcaggggtggtactggatcattttggggccatctacctggggtgtgtgcctcctcagtcctccctcagcatctcaccttgcctcctcacagagcctaaaaccactcccctcagtggatctcaagccgcccctcagaaccattaaatgaacctggcttctctcagatctgtgaggttcaagtcagtggtttcacatcgggccatccagggcttccctgggttgagagcaggggcaaaccggattctgccagaatgggggaggcgatgggagtggggcacatgagagagatgagggtggggttgggggcagtgagggtgaggtggcagaagggttggggctggtgctggggctggagggtggtggtcaggtgacggagtaggagtagggatgggggtggaggtgtagctgaggagatgggggttgggtggggaatgggaatgcgaatggggtgggagtggggattggagtgcagtcttgggggcccacagccctccctcttgggtgctgatcttgatgcctggcagagcctgtgccctgccctctcctaaccagtcctgccctggtcacagcaacctctgattccagagcttggggagaagaacctggtgtctctcaaggcttttggagcaggggtctgggggcagcccaggctgagacgtcttcccgcgggtgggccagggctggcagcaagggcggcgctggaatatttggggctctctatttggagtggcggggtcctcagtcctccctcagcctctcaccttgcctcctcacagagcctgggtcaggttccttcggccgaactctacgccgtccctcagaatggaaacctcgcttctctctgccccacaatgcgcaagtcagtggcgtcacatccgggcacccggatgtttcctggcgggaaccggatcctgcctgggtgggggtgggagtgggcgtgggggtgggggtgggggtgagggtggaatggctgggcggatgggcatcagggttgagggatggggtgggggatgtggggtgggggttggaatgacaatgaagagggggttgggtcacgggagtgagcattggagtgggggttgggtcacgggagtggggtcttagggaccctcagccctccttgagaatcctgagcatgatgtctggcagagcctggacgctgccctctcctaagcagcccttccctgatcacacgagctctgacttcagagtccccagtggtttaagcagcaagggggctgggggtggcccagcctgagaagtccaccaccagatggtccaggactggcatgaagggattatttggggtcctctatctggggtaagtgggtcctcagtcctccctcagcatgtcaccttgcctccttacagagcctgggcccgcttccctccaccgatctcaagccgcccctcagaccgaaaacctcgcttctctctaaccactaatgctcaagtcagtggcgtcacatctgggcacctgggcttccctgggttgagagcaggggtggaaccggattctgcctggcttgggctgggggtgagcgtgaagatgtttggatgggtggcgtaaagggagggattgggggtggtagggggagggatgccagtggtgccccggggcttaagtcgtcgtgttggtggtagtggggttgggcgtggggttgggggaccctcggtcacccctcagggtcctgactttcatgcctggcagaatctggacacccatattctctgccgattgtgtctgcttctctcccaccaagtctctggcccccagtcccatgaggtggcaatgggagggggggtgtggtcgtggtaacattgccagggtcttccagggctgacaggaggggctgagctgcattctgtggcccatctacgtcgggagagtggaccctctgtccccactcaggaaggtcctcctcccagctcctggcactttgttgaagtcatgggcgggagatgctgtttctgccatctctgagcatttgcccagctgcacccattgcagagaatggctgcaggtcccaggccaggtgctccctgcagagtggcagctcccgcgattgtagtgacctctgggagaagacgcacaccttcccacgggggcttctctccagccagagctacacttggcaaaccttttgtcctcaaagtaatatgttttactcccaggcacggtggttcacgcctgtaatcccaacagtttgagaggccgaggcgggcagatcacttgaggtcaggggttcaagaccagcctggccaacatagtgaaaccccgtctctacacaaaatacaaaaattagctgggtgtggtagtgctcaggaggctgaggcgtgagaatcgcttgcacctggaggcggagtttgcagtgaggcgagatcgtgccattgaactctagcgtgggcctcgcgacagagtgacactctgtctcaaaaaatttaaaaaatgaaaaagaaatacacttttcgtatcttccaaggatatatgtaggtagctgtatatatatatgtatttatttctaggaaagaatacctaccagtagtatgcatgattcactcttatatcctattctacttcttttccattctttacgttctgttgaaataattttttttgaaacacaatttctcacccactatgttggtgtctggttgttattagtggaactcttgatccatactgtcttaaccagccctgtttaactggtgtcctgctgttgccctagggctactagcatcatgttttgaggagctgcctcagactgtgtaatgatgtgaagtggaaatttgaaaactttcattgtaaccattttgtcaactgcagtctaggcagggtacagacctccccagtatccctgctgccaccccccctccaaccgagactgcaagtgtcaaacacaattaccagttcaaccgtcttcagcatcacccagggctttctctattttgttgcttagactttgttgctgatattgtgtctttctccttctttttcccttctataattttccagggttgatttgtgaagcagagaacagcagcccaaatttgattgtcacgttggcagccacaggtaagacataatttgtacataattgtacataattgaagcacatttgacatttttacagtgttctctttctcatcaatgaatatgctatgctcctctataatatgtgtgtgtgagtgtgtgtatatatatatatatatatatagagagagagagagagagagagagagaaagatggcatctccctctgtctaccaggctggagtgcagtggcactatctcggctcactgtaatctccacctcccaagttcaagtgattctcctaccttagcctactgagtagctgggattacaggtgcatggcaccatacccagctaatttttgtatttttagtagagatggggtttcaacatattggccaggtgtgtctggaactcctgacctcaggtgatctgcccgcctcagcctcccaaaatactgggattacaggcatgagccatcgcacccagcctcatgtattaatttcaaactccttttacttgaatctgtcagtatactgtgattgttgcctctataaagaccttctgcatttttactaggcttcttttcaggtaattcttggattttgatgctattgaaaaaggcatattgtatattaagtgttctagttactgattgctttcatctggcaaagattttgattttgctattataatctgttgtatacctcattctgaaggcccattcacttgaatcttccacatgcctactcctttgaattttcaagactgatcatgttatcactaaacattatatattttttccactattcatactccttatttatgttgatatttatagctctgactttgtgtctcaatactgatttaaaagctggagataataccttacatctaattatttttcctctctttaataataagtcctcgaacatttagcatttatgtatgtttgctgttgattttagtaaatggaaattctctttcaaaagaagttaactaaatatgtttactttgaactcatattgaatttccttcaaaagcttttcctatacccagtgatatgagcacttatctttttcttctccattttgtatgtaaggaattacaatgaaatacgtttcttttttgtaacaataaatcatattttctttccttgggcagagcctgtttgttcatttaatatgctactaacttatgtaggatatgtggtgttatgtatgagagcttccttgatgtgtttttgtccatgggtgggggtggtcctcatctggtttttgtatccaagagggcaagtctgggagaaggaattgaacgatagtctatattttgtatgccttggaagagttgaggtaagatggtagttagtttttcctgatcattttgttcaatcggcctccaagactgcctagactggaacatttgagggtggcttgagctatgaatattgtaccatttctgtttgtatagtttaagttttcttttcctttttggaccaatttggaaatgtatttattttatttctgcaaagtgttcagtttcacataggatttcactttaaacggtgtgaaatttgcgataaaaactttttcttagggagcgcctcaaaaaccttgaataatagaataacataatgaaaccagaacacctgtcactcagcatcaacaaccttcaatacatgtcatatctggttccagtttgaggctcacctacttgtatctcagctgctggaataatgtggagcaaatctaagacatcattccatttcatctctaaatacttcaatatgtttttctaaaagttaagaactttatgttaactaaaatcccaatacagttttcatttctaaaaaaattaaataaatggttatcagatgtttaactgatttacacacttatctggcagacttacactttgtaaaagtatgtttatttgaatgagagcccaaacacggtattatacagtgattttttttgtcgttataacccttaactctttcgtcatctgtaggtcccctccactggacctgtttccctgccattgttttgttgtttttggaaagaaacagatcttgcgctctctgcagttttccatagtctgggttttgctgaatgcaacactgtgatgtcctttatcatattcttcagcccttcatttctagggctacaagatgctcctggttcatcttgtttatgccctgccccagtgctaaactaagctatttctccagaggtctggttcgcttcattgggaaatggttctaggtgggaatcgacatctgggttctaggtgtgctcgttgctacagagtagtttttagtcataggcttctctgctgagaacaatgaaatatatgtttgtatataccacgtatatacacatctgttgaatttatatatgtaaacatttgcctatatattaaattaaatacaattttatactgaggtcttcaactctaatccgttaccacaaggatcattctagctttctcttcttgtttttctatagtctatcactccatccgtgagaaacctgtctcccatcatccactaaccatttagttaatagtttaataccagcatgtgcatacagcagatttggatttggtaacccataacgttgtgcctccataagaaaaacaaacaaacaaacaaacaaaccttgtatcagttacagtgcagtacttctgtgtagctcctttggcctttagtcttacagactccactaattttcaacattattaagacagtaataacgacctcataattccccccacttgcttcactgaggtaatttcatacatttataatacatctaggtttatgtgtgtgtgtgcgtgcgcacacgtgcaacattctgcattctgtcctatgatttttccaacctcttatttttaaaatttgcacactttaagcttcactttttgtgctgtaagcatctgtgggttttgaaaaatgtctgctgcccttgtcttggtccattcgggctgcccgaacaaaaataccatagactgggtggcatataaatgacagaattttatttctcatgcttctggtggctgggaagtccaagatcaggttcaacatttgctgacaaattttgtgtctggcaggaacctgcttcccagttcatagacagctctctttcccatgtcctcacatggaagacggggcaagggatctctgtgggatctgtttaataaagacactaatgctattcatgacggctctgctgtcatgatttaatcagcccccaaatgacccacctcatacctaataccatcaccttggtgttaggatttcaacatatgaattttctggaaagacaaacattgagacccagacaacgttgtatccaccattgcagtatcatgcatagtagtttcactgcactaataagtagcctgtgctcctcttatagcccccttggctcccactgataggtttatgatatctataattttgccttttccagaatgtcatataagtgaaatcttaccctatctaggcttttcagactgtattatttcatatagcaatatgagcataagactcacccatgtctttgtgtggcttgtaacatatccttttattgactaatggtagctcattttatggttgtgccatgttttgttatccattcacctaatgcaatatatcttggatgcctctatttttataaaatagtgattataaaataagttattgtatacattcatatacaagtttttatgtagaaataaattttaaaatctgctagataaaatgcctaggagtatgattgctgaatcttatggtaagactatgtttagttttttaaagaaaatgtcagattaacttccaaagtcgttttgcatttctaccagtaatgaatgaaagtttctgttgttccacgttttcactagcaattggtcttgtatttttttggtggggggagggatttcagacattctagaaggtatgtagtggtgtctcattttagcacacaattctctaatgacaaaggactttcagcaccttcaatatgtttacttgtcatctgtatatcttctttggtgaaacatctgttcagatcttttgactgttttcagttatttttctgttgttgagttttaagaatccgtgtatattatagatacatgttgtttatcagaaatgtgtactacagatgttttctcttagtctgcagcttttgttttcattctgtttacagtgtcttttgaagagcataagacttttattttaatacactccaatttggcaattttttctttcattgatcatgattttggtgttgaatttaaaaacacatcaccaaacttaagcttacgtagatattctcttatgttttcttagagaagttgtatagtttttgcatttgcattatctctatgatgtatctttggttaattttcgtgaaatacctaaggatttgtttataattataattatcattattattattacaattatgcaattattacattattattattacaattataattaacattattattgtttttgtatagatgtccaattattattgtttttgtatagatgtccaattattcaagctccatttgttagaaaaaatatacattcaccattattgcctttgttgtaaatcacctgactatatatatgtaggtctatttcctagctctattctgatctatgtgtctattctttgttaatgcttatgtcctccaccacattcatattttgaagcccgttttcaagggtgtccatatttggagatgaggcctctaaggatttaattaatgttaaaggatatcacaagggtggcaccttgatctcatagaattagtgagcttataagaagggacacaagaaagcattcttatgcctacatgagcactccccaccccctctccatgcacatgcacagaggaaaggccaatgaaggacataatgaacaaagggcatctacaagccaggaataagcccatcaccagtaaatgacaataccagtccttgacctgggatttctagcctccacaactgttaaaaaaataaatctctgttgtttcatctactgactccatggcattttgttacggcagccaaagctgactaagacatagccccagataacagaatacttcttctgttttctcctagaaataaaatgatgctgacgtttaggtctatggttcattttgagttacatttttttattgtgtatatctttttttaaattttactttaagttctgggataaatgtgttgaacttgcaggtttgttatgaagatatacatgtgccatggtgatttgctccacctatcaacctgttatctagattttaagctctgcatacattaggtatttttctgaatgttccccctcccctatccccccaccccgcaacaggctctggtgtgtgatgttcccctccctgtgtccatgtgttctccttgagttacatttttatatggtgcaagatatgtttggtggttagctttatgtgtcaacttgtctaggctatagtactcagttgtgtggtcaaacactagtctagatgtttctgtgaaggtattttgtagatatgatcaacatctgcaattggttgaatttaagtaaagcagtttaccctccataatgttggtgggcctcatccaactagttgaatgtctcaagagaaaaaaacaagtattcctggaaaaggtattctaacacaagactgtaatataaaaatgctgtgtgaatttctagcctgctggtgcactttacagatttttaatgtactagacctcataatcccgtgagataattccgtatatatctttctgttttctgtctctccctttttagctagatagataaatagatagagtatgcattgaaattcgggtttgcatatagatattgtattagtctgttctcacactgctatgaagaaatatccaagactgggtaatttaaaagaaaacaggcttaatagactcacagttccacattgctggggaggcctcaggaaacttacaatcatggcagaaggcaaaggagaagcaggcaccttcttcacagggcagcaggatggagagagtgcaagcaggggaaatgtcagatgcatataaaaccatcagatcttgtgacactcacccattatcgtgagaacaacatggagcaaactgtccctgtgatccaattacctccacctggtcctgcccttgacctgtgtggattatggggattgcaattcaagaggagatttgggtggggacacacagccaaactgtatcattctgccactgttcacttccaaatctcacgttgtcacatttcaaaacacaatcttgcctttccaacagccccacaaagtcttaactcattctcaaattaacccaaaagtccaaatccaaagtctcatctaagacaaggcaagtcccttctgcctatgagccagtaaaatcaaaagcaaattagttacttcctagatacaatgggggtaccaacattacataaatacacccatcccaaatgggagaactgggccaaaacaaaggggctacaggccccatgcaagtctgaaatccaacagggcagtcattaaaccttaaagttccaaaatgatctcctttgactccatgtctcacatccaggtcacactgatacaagaggtgggctctcatggcctcggcagctccactccttttgctttgcagggtacagtccccctcccagttgcctttatgtgctagcattgagtgtctgcagcttttccaggcacacagcaaaagctgtcggtggatcgaccattctgggatctggaggacagtggccctcttctcacagctccattgggcaatgccccagtggggactctgttttccttctgtactgccctagcagaggttctccctaagggctccacccctgcagcaaacatctgcttggacttccagacatttccatacatcctctgaaatctaggcagaagttcccaaaactcaattcttgacttctgtgcactggcaggaccagcaccacatgtaagccaccaaggcttggggcttgcaccctatgaaacaatggcctcagctgtacattggccgcttttagccatggctgggacacagggcaccaagtactgagattgcacaaagcagcaagaccctcagcctggcccaagaaaccactttttgctcctaggcctctgggcctgtgacaggaggacctgacatacccttgagacattttccccattgtcttggtgattaacatttggctcctagttacttatacaaatttcttcagccagcttgaatttcttctcagaaaacgagatttttctattctgtcacatcattgggctgcaaatttcctaaacgtttaagctccactttccttttaaacaaaagttccaatttcaaaccgtctctgtggatgcataaaactgaatgctttcgtagttatccaggcctctcgaatgctctgctgcttagaaatttcttccaccaaaaaccctaaatcatctctctcaagttcaaagttccacagatctctagggcaggggcaaaatgttgccagtctctttgctaaagcatagcaagagtcacctttatttcaattcacaacaggttcctcatttccatctgagaccacctcagcctggacttcattgtccatatcactatcaacattttggtcaaagccattcaacaatctctaagaagattcaaacttttccatattttcctgtcttcttctgagccctccaaagtgttccaatatctgcccattacccagttccaaaggcgtttccacattctcaggtatcttataacaatgccccacactacctcagtaccaatttagtgtattagtccattctcacacttgggtatgaagaaatacctaagactgggtaatttataaaggaaagaggtttaattgactgatagttcccacattactggggaggcctcaggaaacttacaatcatggaggaagtcaaaggagaagccggcagctttacagggtggcaggatggagtgagtgcaagcaagggaaatgccagatgcttataaaaccatcagatctcgtgaaactcactcactgtcatgagaacagccctggggaaactgccctcatgatccaattaccttcagcttgtcctgcccttgacacacggagattatgggaattataattccaggtgagatttgggtggggacacagagccaaaccatatgagctatccaattgttccagacccaattgttgaatacactgccatttctctcctctcaccttcatttgcatctttattaataattagttgtctatatatgcatatacatgtgtatatactattgggctttattcccttccattgatatattcttataataatgataattccgactacactgatcattgttagtttataagccttgaaatgaagtagggtaaccccaccacatttgttctattttttatttatttatttatttatttatttatttatttattattattatactttaagttttagggtacatgtgcacaatgtgcaggttagttacatatgtatacatgtgccatgctggtgcgctgcacccactaactcgtcatctagcattaggtatatctcccaatgctatccctccccccttcccccaccccacaacagtccccagagtgtgatgttccccttcctgtgtccatgatgtgttctcattgttcaattcccacctatgagtgagaatatgcggtgtttggttttttgttcttgcgatagtttactgagaatgatgatttccaatttcatccatgtccctacaaaggacatgaactcatcattttttatggctgcatagtattccatggtgtatatgtgccacattttcttaatccagtctatccactgttggacatttggtttggttccaagtctttgctattgtgaataatgccgcaataaacatacatgtgcatgtgtctttatagcagcatgatttatagtcctttgggtatatacccagtaatgggatggctgggtcaaatgatatttctagttctagatccctgaggaatagccacactgacttccacaatggttgaactagtttacagtcccaccaacagtgtaaaagtgttcctatttctccacatcctctccagcacctgttgtttcctgactttttaatgattgccattctaactggtgtgaaatggtatctcattgtggttttgatttgcatttctctgatggccagtgatggtgagcattttttcatatgttttttggctgcataaatgtcttcttttgagaagtgtctgttcatgtcctttgcccactttttgatggggttgtttgtttttttcttgtaaatttgtttgagttcattgtagattctggatattagccctttgtcagatgagtaggttgcaaaaattttctcccattttgtgggttgcttgttcactctgatggtagtttcttttgctgtgcagaagctctttagtttaattagatcccatttgtcaattttggcttttgttgccattgcttttggtgttttagacatgaagtccttgcccatgcctatgtcctgaatggtaatgcctaggttttcttctagggtttttatggttttaggtctaacgtttattttttaatgttttctttggctattctaggacctttacatttctatatcaatgttagtgctagcctcccaatttctattttaaaaaatctggaatttggattttgattgcattgaatctatcaaaaaagttgaggaaaaataaatgacatcttaatattcagtcttctgactcatgaataaagtttgtatctctatttacatatatcctcattgaatttatctttgtaatgctttatagttttcaatggacagatcttctacatcttctgtcatatttatccctttcaatttatattttctaatgttaatttaaattgtactatgtttgtctcaattgccaattgtttattgctattattaaaatacaagtataatggtcttaaatccaacaacattgctaaagttgtattcattctagaagcatttttacattgataggattgtctgcatatactcttatattatgtaaatgaggaggttttttttgtatttgttcctttccaattgtaaggtcttttgaaaaaactttgttacactggagagaacctcaggcacagtgatgaactatcctacacaatcccaccctgctccatgaactcatcagtgttaggttgtagtttcctacatgtaaacatcctgcgtgatttctggcatgagaaaatctgcctcatcctccctacactgctaaaatccaagccccggtactacacctactgagtatgggtactacacctactgagagggtcatgacctcacagttgatggaatactcatgtgatatccagtggagcaaatgtattcactgaaatttgacagcttgaaagcagtgatttcagacaggggaaaactgaaaccccaggatatcaggggaaattcagccagatgttgggcgaaattcagccagatatcgggcaaaaattttctgttttctgttttccctaagtgtcagccggtctgagaaatgaagggacagagtccaaagagagaaattttaaagttgggtgtccgggggagacatcacatgtcagcaggttccgtgatgccccacaagctgcaaaaccagcaagtttttattagtgattttcaaaaggggagggagtgtaccaatagggtgtgggtcacagagatcacgtgcttcacaaggtaatagaatatcacaaggcaaatggaggcagggtgagatcacaggaccacaggaccacaggacccgggcgaaattaaaattgctaatgaagttttgggcatgcattatggttgataacatcttatcaggagacaggatttgagagcagacaactggtctgaccaaaattgattaggcgggaatttcttcatcctaataagcctgggagcactatgggagactggggcttatttcatccctacagtttccaccataaaagatggccactccccgaagtggccatttcagaggcctaccctcagggatgcactctctttctcagggatgttccttgctgagaaaaagaattcagcgatatttctcccatttgcttttgaaagaagagaaatatggctctgttccgcccggctcaccagcggtctgagttaaaggttatctctcttgttccctgaacattgctgttatcctgttcttttctcaaggtgcccagatttcatattgttcaaacacacttgctctacaaacaatttgtgcagttaacgcaatcatcacagggtcctgaggcgacatacatcctcctcagtttaggaaggtgatgggattaagagattaaagtaaagacaggcataggaaatcacaggggtattgattggggaagtgataagtgtccatgaagtcttcacaatttatgttcagagactgcagtaaagacaggcataagaaattataaaagtattaatttggggaactaataaatgtccatgaaatcttcacaatccacgttcttctgccatggcttcaactggtccctccgttcagggtccctgacttcccgcaacaccaggagacttctgaggacactgggaacaggaagtagggtagaaaaattcctggatagtagccaactgagtgggcttcaagatgcataagagaaatttttaggggggaagtaggatgattcacacctccatataaacttaattacagccagattaccttgcagagctttctggtaaggtgtgggaaaactagataatggtgggtggtgggagaaaacagaaggaagcactgaaatagggtgactctggggaaaggcttggaggaaatacactctcttctgctatgtgacccccccaaagctgaacattggaggaaaggagcagcactaatcagtttgggaaggctctttaggcatgccaaacaaatgtcccccattcttcaaccagagcatactggcttcctcgtcagatcaccctccccactctccttctctcctcccaccatgacaatgctctgatgatggtttctgctatctaaggccctcacaccccagcagagccactattggctgggtagtggtttgctgaccaatcaaagctcagtggtgtggccccgccctgtcctggaagggtatatgtagggaagccaggaggcctggagtagaccactgagagaccccgaggtggtgaagataaccaggaaaccaagcaatcagaccagttgtagaacccccacccaccaacaccaaagagtcaaggaagacaaaggccccctcttaacccaggcccagaagccctatcaaggtgagtgacacacccaagctcctccttgtcttccccttgactcctccctcccaagactcctaccctgtccttgcctggcacaaccgcccaacccagcctgtaaccttcacatgaaacccctggtcccactcatcctctatccccttccccaaaaccagtgcctttctgtgatctctctgctgtccttctgggtcccaagacaatctgaaagggaaaaggaagacttcgagggagttccagggaaaaagcttctccagaatgatcaccacttcaagaaaagctgagcatgagagagggccaatgcaatccagacactgtgaccagctgaatgagaaactcaatcaaaatgagccacagcaacaccaaaagagccaggagacctccaccacctgaagcttctccctgggcagccgttaatttcagggcaaggccagagacctcagatctatttgagaagtctccagagatctggccccagataaatagtcaatggggtctagagtacattttagatcccacagggtatgccccatggtgatgaaaataaaatgaacttgttgtaaaatgatgtgtgggtctgctccttctcggatggtgggaagagaggaaggagggaagacgtggtgtgtgggaagggaggaaggtgggtgttgcggggttggggtcagatggacaagtcctcagttaaccagacatggaggatgaggattaggtcaggattgagcactggagacaaatttccccttaacaggatgacttggcttcttgtaaggtttccgcctttatgggatcttgatggtgcttaaatcaagtaccaagaactggattctacctacttgtgatggataatattaagtgtcaacttgattggattgaaggatgcaaagtgtggtttctagatgtgtctgcgagggtgttgctagaggagattaacatttgagccagtggactgtgagaggcagaccaacccttaatctgggtgggcaccatccccttgcctgccaacacagctagacaaaagcaggcagaagaaggtggaatgagcagacttgctgcgtcttctggccttcatctttccccatgctggatgcttcctgctctccaacattagactccaactgctttggcttttggactcttggtcttatgctagtggttttcctggggctctcgggccttccaccacagactgaaggctgcactgttggcttccctacttttgaggttttgaggttttgggacttggactgatccactactggcttccttgctcctcaacttgcagacagcttatggtgggactttatgttgtcatcctgtgagtcaattatccttaataaattccctttctcatatatatatatatatatatatatatataaataaaatatctatacattcatatatatacatatatctatgaaatctatagatatatgaaatgtatagatatatgaaatgtatacacacacacacacacacacacacacacacacacatttatcttactagttctgtccctctagagaactctaatacactacttatgtttcactgtcacaaaaccttttggttcatataaactggtggaagaatcctttgcatcatccttccttacagagtcccctccctacaatctaatataattaagaaaaaaattcaaagttgatacaaatctattcaaagtaaagccaaaactatctacttaaaaactgctttatttttgcaactgagaagactggatgtacatttcccatttccatacattagaaacacataggtcttttctactatgcatatatatgtatatatgtgtgtatatatatatgtgtgtgtgtgtgtgtgtgtgtgtgtgtgtgtgtgcctgtgtgtgttttgtgtaccatcatttgtattggaaggtaaggtgttattgttgaagcgtgcttcacaggcaaacagagaaaggaaactatcattttaagaagaataaagtacaaaattttcacaattcagtttccagttttcagtaagtattatgacagagaaattcataccttttagcttcataatgaataacattttttacctttatgtgattatggaaatgtgaatttccatacaataagggtttgtgatggaaagcactgattctataagcattttccacttgttacatagattgttattatagctttaaaggtgttaagattaatggtggctttgaagaaatgggagcatcatttgagaaactataaatgagttctgttgcatccctttcctaggtgacgtcagggctccacttcattagctaaggaaggcatttcagggctttgcatgtgtacgttgtagctgcctcctatgaaatcctgaaaaatctgggacactgtacaacagacacagggcattgtcccacatcctgaactccaacaatgtattctagtatcttctatgtcttttgtagttcttatatggatctaccatcgaagaatgagcatgctggatgtaaatcaaagcctcttgatttgcaaatgctccatcaaccctgaacaataatatttgcatttatgggtgggaagctggtcagaaggaaaacatcctgctgtctttttaggaaatcacgttggacatggttgtatagctctttccaaagagaaattcgttttttccataatagattaaaaaccgaaataaaccatgtcttgtcagtggtcactttttggatcagtgtacatcattgcactgagcaattttgcacagtgtgtttcaaaattacattcaagaactgatttgcttactggcaccttattttgatgccatgacatttccattaaaatctctatgtcaaatcagtctatgataactcttttggcattcaaaaaaattatccatggctcttaaaccatgtttctttcatcattttacggccgttggagcttcaactactatttgcttgggaacccatcttaactagctcttgcattcgggcttcctgttttattgtgatgattggcagacccatttcaggcatgttcagctttggaaaggaattacgattttgaacttatacaagcaaaaaatgtaactgagtttattttcacaaactgctttaatttgttaacaacaagtcactaaaaccaggaatcaatcgtttaaattaccttttaatttgttggagctttcgtaaatgctatgctttcatttaagtctttatttattctacatgttatatacatagttaaattagttgatcagagtttaaatattttctctccttctccaaggacccacaagctcaggcttaaaataaagagtgggatgagaaaagtaaaggcccgaaatattatacaaccaaagctgtagaggacctttataataaaataatggatgtcaaagctttctgacctttttaggcaaatcttcctgtgtccctaaagaaaaaacccccttgccaacagccaccaacaacaggtaatcatgtgactctcagctgtggtagacaattgctgaaaaaatatgaaaacaccttgggcatattaaggagctaagcatgagatgatatatacatatgtgcatgtctttctcattagacccctggaaataaaacatattgcaggaaggctcatgtccatgtctcttgaccatgtagcttcctctgctcccaactctgaagaacattctggcctttgttcattcccagcttgagtatctcatgcctaaaaatgttttagccccacatcagtgctgcatagaacagggacttgctctcaaaacaagtctgaaattgataaatgacaggagaagctcaatgtgatggctaggtaccagatagaaggcctttcactgttttgaacactgattgtaagctctagaataactgtagctgcagtctactgggcaagggcatgtgtcaggcagggtgtgaaatgctctgcatgcatgacctcatttctcccccacattacccctgtggaatagtcaggactcttaagagacaccatcaacaggatatagacaaagatacatagacagatcagaggggattgattcggggagttggagggtgaaacgtctaaggtcaggctgtctgcaagctgaagaccctgggaggccaggaatgtgactcagtccacatccaaaagcctcagtaccagagaagccaatgctataactctcaatataaggccaaaggcctgagaacctgggcaggccagggaatgggcgtgtaagtcccggagtctgaacgccaaagagccaagagttctggtgtccaatggccagataataagagtcccagcggccaggcgcagtggctcacgcctgtaatcccagcactttgggaggccaaggcaggcggatcacgaggtcaggagtttgagaccagcctggccaatatggtgaaaccccatctctactaaaaatacaaaagttagctggcttggtggcatgcgcctgtagtcccagctcttcgggaggctgagacaggagaatggcttgaacccaggaggcagagattgcagtgagccgaaatggtcccactgcactccagcctgggtgacagagcaagactccatctgaaaagaaagagaagaatctcagcttcagcagagaaagggagcaaagtgcatttcatctgccttgccttctttcttctatcaaggtcctgaacgaattggatgtggcccgcccagattgaaggtaacttcctcactctgcccaccaactcaccccaatcttatctggaatgcctacagaagctcaccctgaaatactgctttaccagttctctatgtattcctgaacgcagtcacattttggttacctaaaattaaccatcacgccctataaaatgcatagtatctcccctgtacaaatgtggcagagcgtttgggacactttcttacagtgcctgtagtttacaaggccaggatgaaaactcaagtctgcaaagatcaaattccaaaccaccgtcttaaagactgctgctcagtgctgtgagcagcactgtattagatactgtgcaagggagaaaagacactcaagaaaagtcccctgctttagggaccacatcttaccttatattagggacaggagtcatatttctgtgactctgctatagacccaatagccaagtgtgaaatgacctgctttaggtttgtatgagctcagaagaaaccctcagtgagagcaagatcgatgtagggtcaattcatacagggatatttttatggaaaatgtgagcttttagccaatgttttcctgaaagaaatagaagactactgttggcagaaaagtgttgtgctggggattaactacttgtagggctgttggagaagggtcctaggcacaggtccaggaaagtgggaaagagtacacacagtcagaatagaaacagagttgaagacccttcaggaagcgtaataacaaaaagagctcgactagtaagctgatacataattttcaatcttatctagactgagaactttgaatacaacccataattacttaagaattgttgcagtaaaaaatggagaagtgtgtgaattctgggtaaaataaaaaaattcattaaggttgaattaaattattacttcaacaaataattactggataactactatgatcccggtgaaaggccagatgctaatcaaaaaataataggccgggcgtggtggctcatgcctgtaaccccagcactttgggaggtcgaggcgggcggatcacaaggtcaggagatcaagaccatcctggctaatacgatgaaaccccatctctactaaaaatacaaaaaaattagccaggtgtggtggcacacgccagtaatcccagctactcgggaggctgaggcaggagaatggcgtgaacctgggaggcggagtttgtagtgagccgagatcgcgccactgcactccagcctgggcgacaaagcgagactgtctcaaaataataataataataataataaataataatgactgtcatgactgagcaactcacaggacgaatccatacaatggtgctggaagatagatgggcccatcttatttcatccttattttagaaaagatgacactgaggaccagcaaggttaataacctgttcgagataacccagcagttgtaccgagcttgtctgactccagagcccacacattccctcatacaccatgcggccagacaaggccagtgaagtactaacaggttttcttttctttttcctttcttttctttctttcctttattttcttactttcctttctttcgtttctttcctttctttttctttctctttctttctttcttttttctttctttctttctttcctccctccctcctttccttccttccttccttccttccttccttccttccttccttccttccttcctttcttttttctttctttcaacagagtttcactcttgttgcccaggctggagtgcaatggcaggatctcggctcaccgaaacctctgcctcctgggttcaagcggttcccctgcctcagactcccaagtagctgggattacaggcatgcgccaccaggcctggctaattttgtatttttagtagagatggggtttctccatcttggccagactggtctcgaactccccacctcaggtgatccacccgcctcagcctcccaaactgctgggattacaggtgtgagccaccacgcttggccactaacagtttttctaaggtgttgaatagatggaataagggaattagcagtattatttaaatttaaggtgttgaatagatgaaataagggaattaggagtattatttaaattgtggtaaaaacacagtgcgtgacatatatactcttaacaaatgtttaggcatataacacagtataatgaagtatatgcccattgtttgacagtggatccttagaactttctcatcttctatgactacaactctatgccgattgcaatccaattccccgttttcccctcctcctagcccctggcaatcaccatgctactttctgcttctgtgagtttcactattgtagatatctcataaaagtggaatctgaagcatttgtccttctggaaattgcttgtttaacttaagcataatgttctcaggtccgtcgatgtggctggagtagtttctgacaattctacacagtggggggatcttgaaacttgtcaaacatgcaccaaactggaaagactactatagcgatcactacgttttcatcacacagctccaatcactacaagacagctaattccgtttcgtacatctccctctccaaagctgcacaaatacagaagaaagttcccctctccttcaaaaggaaatattgatgattttgaatggcatgaagccaatttctgtaatgcagcaaaagaatacatttaactgacttattctaaccaaatttgaaacaatttcatttgttagatcaaatgtttccaaaggaagatttcaagtgttattatattttttaagtgcattaaaataacatataggcattaattgttctcatattcaaataaatatacaaatgactttgcatatactaactgaatattgcacttgaaaaaaattctgtagataatttatctctacagaaagccttgaaacatgtaaaccataaataattatgcatacttgtatatttaggaaacacttctagtcagtgctaaagacaagcatcatttaatagtggaccaaatcaattaaatgacattttgatgtgtttgtgaaaatgccatattcatgaatccatgactcacaatgtatacttacatgtcttgttcaatggtcttaatggtttttagcagtttaatttattctggggtacaaacttatgttgcttttaagttttcatatttcctctcaaattttatttcatgaaaattggtttcataatttagtaaggatacacaaaaataagttcataaaatagattttgtcttatgttttttctccttaggaataacaatgtaagcttaaatacttgtgatttctaccatttgagactgatatagatccactgaggccaaatgtaaaatcagatcatctttattgctaaaagttcattgacaatgtttgggagactaggtgaccattattagggaaaggactgaaagcccgctacatacaactttggattggctactactgctcacataactgtttaggatttacatgggttttagcagaaaagggatccaccatgaaaacaaacagtatgcaacaatttaaactaggaatttcaggccacatcggtttcatggagctaattttatggctgtatgctatcacctaggtttagctttgttctttgaagtgtcatcagaataactgtgataggagaacaccagacacctcttgcagatgctgttacatgaaaagtgatattaatcatttattgaatatttaggtaaatattagaaaaattcagcgaacaaaatattttactgcttaaatcaatcttcaattttaccaatttccttcataaattctgtttacaacactgctatttcttttttttttccattttgtttttttgagacagagtttcactcttgtcgcccaggctggagtgcaatggcgcaatctcagctcactgcaacatctgcctcccaggttcaaacaattctcctgcctcagcctccctagtagctgggattacaggtgcccgccaccacgtcccgctaattttttttgtatttttagtagagacggggtttcgccatgttggccaggctggtcttgaactcctgacctcaggtgatccgcccactgagattacaggcgtgagccaccacgcccggccccatttcttttctaagttcactttgttcaccagtaagacaaactgtatgattctcctccaggtcctccacgtgctacaacaaaaaaccaagttcagttataaccaaccactcttcatcaccttataactgtgtataactacatttcaaaagcaaaacactttaaaattccagtgatggttattatctattccagatttaaaaagcactctaagagctacccgaagaccaaaatactcacttaagaaacatagaaatgtgtgaatttagtcaattatgattacagtaggaggcacgacaatatcacaatttgctccaaacaatgggatattgaaatgttcaggtgaagatatagcaaaaagaatggaagttccatataaatccatgcgctaatttcattcataagcttcccaaacaccaggtattcgaccatttattatccctgatattgcatgtaacatggtttccatagatagagggaataaaatgctcagtagtatgatctcgagttacgaaaaatacaatttgaattttaaatctttattcttcattcaacaaacagtgaaataatgcctgctacagaaaagttaggatgtcatgtgctatggtggcattagaagatgaacacatgatcttttccatattccagtgacttcaggaaacatgtaaactgaagtcatacaaaaatgttacaatagacatggaagggcaacttgctggcactgtacagtggacaatggagatcaatgcctacttagttggcaaaagaattagatttcgataggttagccaaaggagataaaatttttatggtggaagggcttaaataaagcctggaaataatggtgaattatttcacagaaggctatcaacctggagggatgacaggaaggaaagaatgtagcaaatgaagtggttttttttttaatatactttaagtttttagggtacatgtgcacaacctgcaggtttgttacgtatgtatacatgtgccatgttggtgtgctgcacccattaactcttcatttaacattaggtatatctcctaatgctatccctcccccctccccccaccccacaacaggccccggtgtgtgatgttccccttcctgtgtccatgtgttctcattgttcaattcccacctatgagtgagaacatgcagtgtttggttttttgaagctggaaaccatcattctcagcaaactatcgcaaggacaaaagcaaatgaagttttaaaaggaggtcatgtcaaggcagaggtgtctctgaatatccatgaatttagaatggaaagctcgtgacaggttgggaagagggaagggcgatgtcttaggaagataagattgcagatctatgaaggatggaaagaggaagagagaactcagatgaaattttaatagcgtaagtgaggaaggatgaggtcctgagctaggacagcagcagtgagaatctaaacaaaaaacttaaaataacgttgaggtggtaaaaatggcagggcctagtgatagatagctggatgggaaggaaaaggaaatgcagaagactaaatcatcatgaagttcccaccataagtggtgacatttagcactaacattgagaagatcttatttcccaaacatgtgtaacaattggtacatggttctcagagaccattaaacaacacatcctctacttagaaacacttgaataacaactgagtgtacatattacatatatgtatacacacatgtagtatatgtatcatagtaaacaatgtaaagaatgactatcctgaaactcgttttcctgaaacaatcccctcagtttagaagagtgaatttttaacaagaatttgaacaagattgttttaaaaacactccaaatttataaaatgaataggaatgtacaccattccatagaaacctaaatagatatatacctgcatggttaagaggtcaatatcaccgaggacaacttgcaaaagtacaaatgtgacgggagacaattctcagtcacaaactgttaattctttcctggctttttcattctgaacgcatctgggccctgtcttgtgatagtaacttggcagagaaatcaatttgtagtcacttcgataatagtgcaagcaaatatgtcatgaaataatcaggaaataaatttgaaataaaaaatacccatttgttacaattgggtgccttctctttgagaaacactggcactagaaagactattaaaccacatctagaaatgatgtagaaacttcttgctttcatctattgctgcaccagtaaaaactgtcgagcaaaagagtcatggtgtttagtcatgtaaataaagtgtgaatagccaacacggtatgtatatttctgggtgaaattgccaagttaccgtttcctgttttggattacaccaaaaacaattaatgaattctaaaagtaaaaatacatttagttcttactttaaaacaatgacattaacatggaaaatgcttaagaattttataatcaaagtatttttaacactattttggaaaggaaaacagttttttaaattttcaatatacatgtaaagtcttacgagaatatgttgtgtaaccaaataccactgacctgtaagaattcctcacataatgcattaaatgcttttgttctctggccctcaacaatttcagattcttgaaaaagtcttttgttgctgttgagaaatatgctctacaaatatacaaagaaaactcgataacaattcgagtaaaatttaaaatttatcaaaaaaacaattctttgttaacttaaagctaataattttgaaattatcatttgaaaatattttttcttattaacaaatactatgaccaagtttatgaaatttgtgtccaacaataatatacaaaaactatataataatcctatcatgcattttttatggaaatgttcctttttaataatattctacaaatatgttttagtccttgatgctttcaaagcccacacacgtaatccttccaataaaactggtctttctgttccaccaccaatgatcttgacatttcctgcaaattaaacactcacatagccacatcctagattttgacattcctgagaatctacaatatctacataacattaataaaagcaaagttgtactataggaaccatatgtcagatcctgttctgaaccattttaaataccttattatagaaaaattcatttaacactcaaaacaactctgtgaggtaggtactcacattatgcccacaatattaatggagcaagctgggacacagaaagaatttgctcatggtttcccaggcagcaatggtcgaaccagacttagattctaaacagtgggggttgagtccgggcttttgaccactacactatgctatttccccatgtatccaacatgcaacaactaacgccctcacactgtaggtcactctaagcactacagctcaggagtctatcaggaactgaagcccattgaatagagcacctttcactgtccaacactggagtgcccaacactccctttcttcgttcccagattaagttccatggtcactcaccataactccatccttgtgtatgtgccctgccagcttctccctctgtcacagtgctcagccaaatgccaacccagaaaaatccaactctccagctgccctaacacaaccatgccaacagatctcaaagtcgtgtttatgatgacactaatctaatttgcactcccaatgctgcttgacaattatattcccctagtccactcactggcccagtctcaggaaaaaaagtatagtccttcttctctgccctcctgccccatctctacttgtcactgatgatcttttatctcactacagagacagaagcaacccacagggcacattcagcgtccgagcatcacatcttcacccacctttgtccatcagtgcttacgcactcgaccttctctcctgtttaaatgcatgaactactactccttcctgaagtcaacttgctcccctgtccactagagcccactgcttctcaagaacatcgttcagcactttcccctcctctttccaacatttccaaggtttccctctatattgttcctatcagcatacaacatgccggtccttctgtaatcactaagaaaaccacaaaaacctctagctactcctttttgcctcaggttactaccccagttctttcttcccagttgtctcttgtcttttccaatcagtcctttgcacccaccattccaccaaaccactcttactaaggatatcaaagggcctccatataccaagtccccctccttcagcctatcagcagcatgtgatgaggtggtcctctctccttctaaaaggtcttctttactgtgtttcagctggttttcttttacttatttgttcactcattcttcggcttcattactgatgccccagttctgcggtagctcaaagtattgaaggaacgcggaatcagtctttagacttcccttttttgtttacagtcattccctaggtgatctctcctagtctccttgattaaacgcaatctgtgtgatattaattcccgctctggtgtcctcagctcctaccactctcctgaacatgaggctcatatatccagggtatattgcttatccccacttgacatccgccctcaggtgcttcatatgcacctcaactttaacatttccaaaactgagctgatcaaccaacactcataatttctttatatgaacaatccctttgcttttggataagaaatgtgtgaccatggtacagtcaaggcatgggtgaaaaaagaaggctagtaaatgtaagacggaagctatcttaacatgccttagctaatataaattaaggaagatttattgtattataaattttccagaaaaaaaatgcatttttctctgcaagtgttttagtttttattttctctttttgagtagtatataagttgagatatcacaaatagacttaatttggatattacactcctttatcatctatgatttccaaacaggaatatttcattttcctcactttctgacaataagaattctgtacaaaaaaaaatatactgaacccagttcagtgaagcttacaaattatttacaatataacattaatctttgtctgtgtaattgaatacaaataactattacaagactaaatgtttaagacttttaactttaattcagcaagcacattcatggaatgaatacaaattttcatgataagcaaaatcgactgtaatttgaaagagaaaacaggtcatgtttagtgaactcgaggatacacatctcatttcattatgatgtggcatcatagcacttagattatttaaattaagtattaattaattcttaattaaggaattatttctttagagaaaaatccagctaaatatattttttcattggacttccagcacatggacgatcatagcatttttccaaagtagtttgtatccacgaatgctaagaaatgaaacaaagcatctggctccaacataaccaacaatcttaccattgttcttcccgggtatgccaagcaagttcaatttcctgctgaatgattttcgtggaagcattgatattcattttgaaatgttttatcgatgctttaggaacatttttaaagtgccctatatggaaaacactcattaaaattttgtttaaaattattttgctcccacatattcacgtccataaaggtaatgttggttcagcagtattaaaaagacacctagcatgaacaaattggcatcatttcaaaataaaagattatttgcctcattttcgtctgtgaaaacttacagtgacagatacctcaatatggaaaacattgtttcgaagatgtaataaggagttaaagagaaaagctgtctgttttctaaaacttgtaaaaagggtctcaaggagagcctataattttttatgagaaaacttttctgaaaaataattcttaataaattaataaaatgtactctaactcaaggatatgtttagaccgaccatggttagaacacattatattaaccaactacaattattccattttcaaaggaataaaaataaataaatgataaactaagaatagtatttttaaaatttagcccgggaagcttttaaatcaatttgactaagaaaaatgaccacagatagtttaaggaaattaatatttattcaagaacacttcctggatactttcatgcaggttttcatatatcatttctccccaaattgctgcagattgtaagtttgcaaaattgtaaaatttacaatctgtaacactgtacattttttaagtatttcaaacaattccttgctaaccatatgattgattctatgttatggacctaccgtcagtggttattttccagtgttcaggagggagctgtattactataaaaatattttataaatgcagtttaccgtctataacaaccaattaataagacagctcgcacatcaagcacattttcaccacaaaatacaacaaagctttcaacatgtatctgctcacatatatgatccaaatagaggagataaaacttgagaatgacacggttaagagtttgtccttttacatagttaatttaactgatagctgaggtatccatttaaaacttagatgcttgatagctgaggtatccatttaaaacttagatgtttttggttgtgatcacacgtctctcacatgccagcaaagttgtctgagttctccactacagaggttattaatgtaaacataacaataagaggctattttagaggcctcagtttgcactgcccaccccaagaaagaaatgggaaagtcttataaaataactagaataagaaaacagcaatggatatgaaaaacagatatatcacttactatctgacacaatgtggaatatatattattagtaaattattttctaatattccacagtgaataaagtaaaagcattactctgcctaaccactgtgtgtaccatccacttcactcaacagcttaaaagggtaaggaaggaaatcgatggagctgaatcacactcaatccttatgtggcatcctggataggagaacaaagcattaaataacactaatgcagccccctcattagcatttcttgctataaaagatatatggctgacaacaatgttcttgaattacaagtatctcccagacacctacaaagctttcccacatattttgaaattcattcctggaagaaattacttttttttttttcactaggtgtgaataagataccacgcttgtgttgtagggcatgcctgatgcccagtgttttaaacacaaaatgtgccacgagtcaaagttgatttttctgaacttactttactaggaggcacaattacattaaacacattaccacatgtcttcctcatctgtttctgcaaaatgactactttcgggatggctgtgcattcctgaattccgtgctgcactgaaaatttgaaaaggcaaacgtttttagaggaaggatgctattgtggacattttttcacatggaaatgtactatttgtggatttgtatggctgtttgccaattaaagctttaaagcagacctatatacatggagtcccttgagccctgaccattttacagagacatttttgcaagccctccaggactgaagtcatagataaccatgcactgcggatcagactccttggacgtcacggactgcacacatccagaagagcagctctaagggcatctgtaactctgccgtggggcaggagcttcccatgggaaacctaaagcccttgaaactgctttagaaacctagggcttcttagcatatgcaaggtgggcaccaaagtaacgagggtgccacgggctgcccatgtgctccccacgacccggtgcaaggagataagacagaccgtccccttgggcgggcacctgtttccttgacccttcattccagttttacgtccatgccccgtttcctgggctaccataaactgagtttacagcagggccttgtcagcctccctgacgcacttcccgtccatacgcaccatggctggccgtcctgggaggctagagacgactcctgaaccttgtgagtgcaaagacacactaaggaacccaggtgtgttaaatgagagccaacggggaggtccccaggttgaagaagagtggggctggcatgctccgtgtctactgctgaaggagcaaaggacaagggagaagaggccagcgtccccacctgtcccgttatgtcccatccagcccttccctggggctgcctgcagagctcacacctgctccgcacacctgaactccaggtcctctgctgaattcttgccgtgcccttgggacagagattgcccctgccccgggtccccaagtgaccccgtgttggtcgggagagctgtagggtgacacaggacctccccagccatctgcatgggaatgaacctctgtgtacccgtcctcgacagtcaggtgctggcatctgccctctcacctgcctggacgcccagcagacccccggtgaccaagggtcccatccagatgggtggccgagcaagagggacacacgcggactctcccccagcctccagcacatgcacagaacccagtgatgctcccgggcactggggaccacctggacccctcgatctcccttccctggcccatgccagcctgcccctaggggactctccctgacccaggccccaggtgacgctggggagatttcctcacaggtcagcctgagctgccccaagatccacactctcgtcctctgaggacctcggactacacggtcccagtctcccctccggccaggtcctctcctgaggtaccctcgacctctcctcctcacaggacctccaggacctggcaccttgatgctcctctgagggcctgggtccttggtcctcgcgagagcagctggcctgactgtgggtgccctttcctgattggctggctcagtgcatgtgggaggtggggctatgtggagccacgccccccccccccactgggcacgccttcccctgagggatggcccatggctgctgtggactggacttccacccctacggtcctccagctcctcatcctggggaaggacagaaggacctgggagtggagtggggagcagctactgaccctgccctgagaggtggaggccatgtggctgtggcctaggaccttgtacctggactccttccagccacccttctcctttgggagaaatggccatcaccctggaagtggggcccaggctccctcccatgccctgtgtgcttccaacacgcccagctgcatcccaggcattcctgctgtgcgtcccgtgcacccaccacatcacaagacctgcttccttatctctgtgggattctgccccttcctccttagctcaccgttgagtcacttagggtgcctatggggtggcaggtgccgtcctgccctcatctcccctgttgcatcaggtacccgtgtggggccactccaccccgcatgcgtccatttcctgtccattcacctctgggcagggctgttgtgaaagagggctgctctattgttgtggctagggctgttgtgaaagagggccgctctgactttgattaaatgttgtggttacctgtagacatgctgctttcatttcccctattccatcacctacctctgtggggctaatctacaaaaaatccgcttagttctctgtctatggacatgtcagttctttccagtgtcagtcccttctaagcaaggatgctatgaagagtgagatgtctggcatacgtgccaaaggtttacacggtatcagagagtggaattcctggatcatagactcagggaatattccccagtgctcaattgtttccaagaggcatcccccaccagaagagtgtgttcccactgttacacagactcgctggtggaataggccttttgcttaatgctgtcattctagtgggtgtgaaatggcatggatttgggatcttgcatttctccagttactaataagactgggttctttttctcggctgtttgcatatccttttacagtacaatatccatgttggtgaattaaccatttttcactttaataagatgtttttcttccagttcttatatattgtgaggctaagctttataactgtgtttacctgtgccttttgtaataaatttatcttttctctgaagtcataaaaatttcccctctattttctaataaagattgtgagatttaatttttcatgttctttttaacctttaagttcagaggtatatgtgcaggtttgttatagggtaaacttgtgtcatggggctttgttgtacagattatttcatcacccacttattaagcttagtacccattagttatttttcctgacttacctacaattgatttttgtgcctgatgtcaggtggagaaccaattcctttttttccttcccgtgcagaaattcggttttcttgtcctcattagttgaagagcatacactttccccattatcagcttatttactgcaaagtccctctttgttcctgctgatttgaaatgctacctttatcatactcccaatttgcaaatattactgggtcgtcttatcactttctagaatgttgccttggtctgtctctctattcccatgccagtgaataccacagtgttttaattatggaggctgggtgtatactgtaatgtgtttggggccagttttcccatatagctcttcctttcccgtgactttgtagctattcttgccttttgaaatgggcattatgataccatcttcttctctccaggaaaaagggaatggtgttggtatttttatggaattgtattaaacttataaactcacttagggagaaccaacatcttgatgatgccgtaatgtcctaacactgaacaaacgatttctacccacttgcccaagtctgcttttgtgtctttttaaaaggcaccgtatagtgctttcaatatgtcttaattttatgcctaaatattttcatcatttttgttgcttttgtaaatgattgttttatttgtaattgtatcccctacctggttatgttttggtgggcgtggagccttttgatctgagcagtagctctcaagagtaggctttggtttggagaaagtgcctatgaaacagtctgtgcctggtggtctcatatgggagatttccttcgtaaggctatttcctctgtacaaatgttcttttatccttttgggcgctattggggtcaattatatagtgagtgtattttcacaagaaattacatagttcatatagttttacaaggttatcggcatagagatgtgtaaagaggcccctctgatttttaaaaatttcctctttattgttatttacaggcatacctcaaagatattgtgggtttagttccagaccatcacaataaagcaagtgacatgaattttttggtgtttcttgcatgtaaaagttaagtttacagtatattatagtctattagatgtgcaatagcactatggcaaaaatatatacatgccttaacttaaaaagagtttattataacaaatgctcaatatcacctgagccgtcagtgagtcatacactcttagctggtgtgaagtgttgcctcaatgttcatggctgctgagtgatcggtggggtggttggtgaaagttggggtggctgtggcaatttcttaaaattagacatcaatgaagtttgacacatagattgactcttcttttcatgaaacctgtctccatagcatacgatgctgtttatagcattttactcacccatagttgaatatccttcaaagttgtaacgaaccctcttaaaccctgccactgctgtatcaactaagtttatgcaatactctaaatcccgtactgtcatttcaactactactacgttcacagcatcttctccaggaatggattccattccatttcaagaaatcactttctttgttcttccgtaagaagcaactccttgtcccttccagtttgatcatgagattgcagtgattcagtttcttcttcaggctccactactctttctggttctcttgctatttccatcacatctgcaggtacttcccccactgacattgtgaacccctcaaagtgatttgtgagggttggaatcaacttcatcctttaatgttgatattttgacttcctcccatgaatcacgaatgttcttagtggcatgcagaaaggggaatcatttccagaaggttttcaatttccttttttcagatccttcagaggaatcactatctatagcagctacagccttatggaatctgtttgctaaacaggaagacttgaaagttaaaatcatttcttgatccatgggctgcagagtgaatgtttcatgcatgctagcaggcataaaaataaaaaaaaaaaaacctccttgtacatcttcatgacagctcttgagtgaccagacacactgtgaatgagtggtaatatttggaagggaatctttttatttctgagcagtaggtctcaagagtgggcttaaaatcttcagtaagtcacgatgtaaacagatgtgctgtcgtccaggctttgttgtttcatttctagagcacaggcagagtagctttagcatcattcttaaaggccctaggattttcaaagcgataaattagcatcggcttcaacttacagtcaccagctgcattagccccctaacaagagagtcagcctgtcctttgaaagtttgaagccaggcattgacttctcctctctacctacaaaagtcctagatggtatcttcttccagtagaaggccgtttcatctagaaggaaaacctgtcgtgagcacagccaccttcacccatgatctcagctagatcttctggagaacttcctgcagtgcctccatcagcacttgatgatccatcttgcacttttatgtgatggagatggcctctctccttacactccatgaaccagtatctgctagcttctccttttttttgtttttgttttttgtcttgttttgttttgttttttgttttttgtcttttttctgcagcttcctcatctctctcggcctcagagaagtgaggaaagatagggctgtgctctggattaggccttggcttaagggcatctggtggctggtttgatgatatgtccactaaaactctctgcatatcagcacgaaatctgtttcgcttccttatcattcatgtgttcgccggagtggcacttttcatttctttcaccacctggctaagactttggcacaggtggtctagtttggggcctatctcagcttgcaacgtgccctcctcactgagcttaataatttctcccttttgatttaaagtgagagatctgcaattcctcctttcacttgaacctttagaggccatcgtagggttattatttggcctaatttcaattctgtcgtgtcacagggagtagagagaccagagcagagtgagagagatggggagaggccagtcagtggagcagtcaaaacacacacaacattgattgattaagcttgcttcttctagggtgcattttgtggcttcccaatgtgattacaatagcaaaatcaaagagcactgatcacggatcaccaaaacagatatagtcctactgaaaatttgagatgttgtaagaattaccaaaatgtgacacagagacacgaggtgagcacatgctgtgaaaaatggtgcccacggattattcaaatcagggtcattaggaaccttccaaaacaagctgcatctgcaaagtgcaataaagcacaatcaaacaaagtatgctggtagttgtgtgtctcctgtgcaaacatctatctatcatctatctatctatctatctaatctatctatctatctatctatctatctatctatctatctatctatctatctatctctatgcctgtctatctatctagctatctatctacctgcctacctatctacctgtctgtgtacctattatatatatacagaaacactatctctgcttctttgattcagttagctactgcttcatctgcctcattgatttaaaaagacactcttcaatatttgtgtctcctatttctgtttctccctcattaatgtctgctttatatattaacattattacttgttcgtgctttcttttaactttgttttatgtctagcccttgagctagaaatgtcactgattcatttttatactcccattgtcatggttatgagtattcaaagcggtctacttttctctgatcacctctttaaatatatgtcatagattcaaatctatagggtttattataatttatcagaaagtagataattcctcctcatatctaggccggcacccagtagttctttaacagttgatttttatgagttctggggcacgtgagcttatttacagcttttagttgtattgtactacgaccacagcagtagtttgtgatatctctatatgtggagcttactaatgttttcttcgtgacctcacatatgatcaatttctgtaaatgttctttgtaaacctgagaaggtatattttccagtatcatgttgtagtttcaatacatgtacattagttctaccttttcaaatatgtttaaagtgttacagtgggctgtgtgcagtggctcacccttgtagtcccagcactttgcggggctgagatgggaggatcacttaagcccaggagctcaagaccagacttagtaccacagagagatcctgtttctaccaaaaataagaagattagctaggcatgacggcatgtcctggtagtcccagtgactcaggaggctgagacaggaggatcatgtgagtctgggaaatcaaggcttctgtgagtcatgaacccacagtggcagtgacactgggaaatcagagccagactctgtctcaaacagaaacaaacaaatctcatgtaccccataaatatatacacctactatgtatacataaaaattttaaagctaaaattaaaaaaattttttatgttacactgttattcctttttaaccatttaactggttgtggcaaattgcattttctgaagatggtcacagtaccaccttctttcccacaagctcttctttccatgtgacctggggccctgctcctatcaaggagtgcagcctatatgtccttctcttggactcaggcagtgtatgaagctgctgagtgtgagagaggaccacacaagtgaggatttctgtctgtggagactaggacacaaaaatgccatgaaatcccaccttgctccttcaggacacttgatctgggaacccacccattatgctttgaggaagctcaagcagcccgtggagaaacccgtggagagcatcagaggctcccagcctcagctaagtttccagctaataaccagctgcagcttgccagccatgagagcaagccatctttgaacgtggatcctccagtctccacttgagcaacactaagtcgcatccttgggtcacagatgactcacctccattaagcccccaaaaaactacatgatgatttttattttcagccacagaggaaatcctcccctttaaccagagctctatttccccccaagtccccttaggagagcttcatgacagctgccagctttctcccagtatctctcttacttgctcactccccattccatctctctacatttcctccttccgttacctgactcttctgttttgggttccctatctctgtcttataggagcatcactttctctctcttctctgctctactcacccttcaggtttgctccttccactcccaactccctgtcacacgcaccatttgtctcccttgctggttttgtgacagaacaattcagacgaaatcccccaaaacttctgccatcaaacctacaagctacctgcatctgtgccctgtctctccctctgttagaggaggaaagacgtccctgcccctgtgttctaggttccatggcctcctgtcttccagaaacctcgtgttatccattagtttatccattatctttctcctccctctatcttctgcatgtctttctcttgccatccttcttattcccatttgcgcatactcgaatctccttcaacttgaaaatccctgggccttattcaccaccaatgtaattcccaccactctcttactctttgtgtcaaagtttccaaaggattatctctgcttggtgcctctattgcctcatctctcacattttctgtaatccactagaagccaacgtgggcccgcacatctcttctaaaaggattctccctcaaaagtcactggtgacctccatgtgactagatctaatgcacattctctggcactcatctcagttgattctcagctgcggtcaacactgttgagcactctcctctttttctcagtgccctccttttgtcttcctttgtcttccataacaacacattctcctgttattctcttcatcttggccacgtctcaatatcttttctagcagcaccttctccacggggccctttcaagatggaatttccagggatttgggtcttgctcaattctcttccagctgtatactctttctctatttattttcatatatggccataactaccattaccattgaaatcaaagtttctcaaagtgtgacttgtggaccagcctgtatcagggtcacagtgaaagggatttgggaaagtttggatttcatggccctcttcaggcctaccaaatgaactctctctgtgggagggaatgtgaaatctgcattggaaataagttatccaggttgttctcatacccacacactatgcgtcagggactgcctggctgacattaacaatggcagctcaacgcctccatctggtggcttttggacaccatcgtcttctttttgcaaatacagtccatggagattacgaaactattgaaaatgtgaaaaatgagaaagaagtaaaaaaacaggatatgaatggagtctctactccacaaataatcaagactgaattacatcattttatggcatgtctagcacaaagtagaacttgtctatattacagttttgagagtaaatccaatggacacatttccattttcatctaagggcaggaaaacacaggtattggatgactccccctctacagatcattacaccaagtttctaacttctaagaatgctgcatttaatgaatttgtaaagttagtcttccagaagttagctaataaagaaccctctgctttccactaataaattaatatgggttttgattcccatttctccgatgattagtgatgtgaatcacttttttcatacacctgtgggacattggtatgtcttcttttgggaaatgtcaattcagttccttggcccactttttaaggggctcctttttctcctgtcgagtcgtttgagttcctcgtatgttctggatatcagtcacctgtcgggtgattagtttgcaaatatcttctcccattcaataggttatttctttactctgctgattgtgccttttgttgtgcagaagcttttcagctgtatgcactgtatttgtctatttttggtcgtttttgctgcctgtgctttcaaagtcttaggaattctttgcctagaccggtgtcaaagagagttttcactaggttttctcctagcatttatatagcttcaggttgttttttgtgttttcttttattttactttgttttgttttgctttgctttgttttgttttgttttgtttttgagacggagtctcgctctgtctcccaggctggattgcagtggcgccatctcggctcactgcaagctccacctcctgggttcaagcgattctcctgcctcagcctcccgagtagctgggactacaggcacgtgccaccacgcccggttaattttctgtaattttagtagagacggggtttcaccgtgttagccaggatggcctcgatcgcctgacctcatgatccgcccgcctcggcctcccaaagtgctgggattacaggcgtgagccaccacacccggcctcagctcttttatgtgactccttaatctatttgcgttcatttttgtatacggtgagagacacaggcctaatttcactaaccaccacagaaatgcaaaccaaaaccgcaatgacatatcatctttcctcagtcagaatggccactatttaaaaagacacaaaataacagaggttggcaagaataagaagcaaaggcaaatcttacagcctgttggtgagagtgtaaactactacagccaccgtggaaaagagtatggcgacttctcaacaaaactgaaaacagaactaccattcgatgcagcaatcccatgactgggtatctaccaaaaggaaaagaaatcaatatattaaaaaaatacctgctcttgcatgtttactatatagcactattcacaatagcaaagacgtggaatcaacttcagtgtgcatcaacagatgaatggttttttaacaagatggtgtatatatgtatacatatatctaggtgtatttgtgtgtgtgtgtgtgtgtgtggaacacaaattattcctttaaaaagaagaatgaaatcatgttatttgcagccgcatggacggaactagaggccattatcgtcagtgaaataaagtaggcataaaaagacaaatatcacatgtcctctattatatgtgggagctaaaacatctgatcgcgtggagctagagaatggagaggtagagaatggagactgggaagagtgagtcagcaggagaaggatgcagagaagtgcgttgaagggaacaaacctacagtgagatagaagcaatcaattccgtgtttgagagcagagtagggtgacggtccttcacaaaaatgtgttgtactcaggcgacggacaccctaaatatcctgacttaatcactacacattgtatacatgtaacaaaatttcacatgtacccataaatttatatacaaaatacaaaaattaaaattaataacaaataaagaaatactataatatgaggctctctaaggtaacttaaattctactttcaagtctgtgttctagttaaaaatgtaatacatcttcactgtaaaatgttatgaaaatataatttataaaggaaatgaaatgcacacataattccaccaagcagatataatattccatttaaaatcccgggtattatttcctttcatccttttctctctctagatagatagaggcgtgggtatacataaagacatagctatggactcaaatagatacagctatagattgtctttacgtcttctaaaattatctttaactttcgtacctgtctttgtttgctaccagctctgcaagtttctttctgtttgtaatcatgcattttccttctttcatctacatttagcaaagtcttcaagactgtattcactctcatcgtgctttcccactgcctgtgcgagtaacaggttaaaggtaaggctactgtatcctattccctttgaattcacttgcttgtgaccatcagcatttcactggctcatagcaagccaccaacgtgttgggtgaggaacaatgggcaaaggctgccagagcccttgctgtactacagactctttgtgagatcatataattgaatgtggtttcctacagtaactttactgaaaattatctctcgtttcacttactcatgttaaacattgcctcagattgatctccgtcacaatggcacgttactactggaaaaggcatatagtagtctgaaaatatctggagatttcaccatgtgctccaagaggtaatacatagatgtctacgtaccatagatacatcaagatttcataactcatctcagtgctaattctaagaacagcacattgctaatactactccaccttgatcactgccaatttactccttctgattacctagactcgtgacaaaacattttctcactgttttagaagcccgtggtgtagaattttctcaaggccatttgacggcctaaatatcacgcttggttgtttcgttcatagtctcaaagaaatcaaggtgagagtctggcttttagagaagcactcagcagactaaatattgctgatcgatattgagatgtgggtaggagtttaacacatgaatgaggacggaaaagatggcccatgcaataagcaaaataggatccaggcatgtgcaagggtacagggacggagaacataggctcaacgtcattactcttagggaaatgcaaatcacaccacaatcctaccagctaaccaccccccaggttgtttactttcaagaggaagacaaaaattgctgctgttaaagatgtggagaaactgcaagccttatacactgctgacgggaatgtaaaatggtgtgtggctgctacgaaaaacagtttggtgtttcctcaagatgttaaaagtaatgaacatatgacaccatcattccactcctagatacatgcagaaaaatttaaaacagacattcaagcaaatacatgtgtatgaatgtccctaacagcaccatggacaacagccaaataggagcatcccacattaccaccaacagataaatggatgaacacaacatgatggatccacctaacgggatactccgtagctgtgagaaagaatgacgctctgatacatggtacgacgtgggatgaacttggaaaccatgttacgtgaaataggccagacacaaaaggtcacgtaccctatgattccatttctatggaatgtccagaagaagcaaatgttaaggattagcgatacttagaaatcaggttgttatcatgtcatctgattacaaaacggatgagtggatgccagggaaggagggaggcgggaatcagtagtgactgcctcatgggtacagggttttctttgggattgatgcaaatgttgtgtaaatagacagaggtgatgattttgcaatactgtgaatttactttatgccaccaaacggtatgcttaaatatctaattttatgttatctgagtttcacttcaataaatatttctttcaaaaataacaattcttagacccatgcaatatatgttcaagtgttttgaaaaaacctgagctatcaattaaatgaaaatttcaatttaaaaataatcttcagcccattcatgtttacatacaaatatggtccatgaaaaataagtccatttttgacaacaacacaagtatcgaaagaaatatgccaaagaaattatcaacagagtaacaaggtaacctgaagaatggaagaaaatatttgcaaactgtgcttgcgacaaagaactaatatgcagaatctacaaggaactctacaaaaacagcaaggagaaagagcaaataatcccattaaaacgtgggcatatgacgtggacagacatttctcaaaagaggatatacaaatggacaagacatatttgaaaaaatgttcaacattgctcatcatcaaggaaacaccaatgaacaccagggtgagatagcaccttaccccggccagaatgaccacgattaaaaactcaataaacaatagatgttggtgcaaatgtggtggaaaagaatgcttttacgctgctggtgggaatcaaaattagtccaacccctatggacaacagtatggagactccttaaagaactaatagtcgatacaccatacgatccagcaataccacgactgggtatctacccaacggaaacgaagtcattatgtgaaaaagacagctgcacatgtatgtttatcgcagcacaattcacaatcgccaacgtgtggcatcgacctaagtgcccatcgactgatgagtggaggaagaaaatgtgtatatacaccatgaaatgctagtcaggcgtaaaaaaaagaacaaaatcgtgtcttttgtggcaacttggatgcaactgcaggccattatcctaagtgagctaactcaggaacggaaaaccgaataccgcatgttctcggtgtgagctaagctataggtacacaaaagtacctgatctcgtgtgttctggcggtgggaaaggtggcccctcagggaacctggctcccacgtccctgtgcctcaagggagaacagaacctgtgacgccttcacttgcctccctccatgacccgttctgtgaaacttcccctgcccccagcgcctaggccaaggagaattcccagccctgttgcgaatcctttcttggttcccgcgtgagattgagcggggtgccactgagtgagctccagatcgacgctgagcctcgggggatgtattggcgcttcctgctctccgtagcaagtcgtcatccagcagaacctcgggacgacacttcggtttctatgacaaccaaggtaaacgtttctttcctggcggcagacacacatcgcaaggatatttacagagcggacagctggaatagctgtaggaacgtcaagactagtaggtgtctgctatcgatgtgactgtgtcgggggcgggggggaggtgagggcgtatgtgtgaggatgtgtgtctgtgtgtgtgtgtgtgacggtgtgtgcatgtgtgtgggtgtgtgtgtgtgaggatgtgtgtggacatgtgtgtatgtgtgtgcgcgcgtgtgtgtggatgtgtgtgtgtttgggggtgtgtgtgtggatgtgtgtggatgcgtgtgcatgtgtgtgcgtgtttgtatgtgaggatgtgtgtgtgaggatgtgtgtgtgtgaggatgtgtgtgtgtttgggggtgtgtgtatggatgtgtgtgtgtgaggaagtatgtgtctctgtgtgtgtgtgtgaatgtgtgtggcattgagttgactgtcctgactcactgtcctgaggtgacacctgttgagccagagcattgtcacccgagtcagtcctttaaagcagagatccacaaggatttctgaactcaaaggaatgtcgcaggtctccttcaggatggaaatttgctcgcctcctcattgtaagaacgtacgatgcatacattaggagagggaaatctgatgccggcaaatgaggagctaccatgggtaggactggaaggcctcctgtcactttgagcaggccgggactcatgctgggctcatcctgcgtagctgacccttgagacccatgttctgtaaaaggtgaatttcctggtctcactccgctaactacgatgaggtgaattgagtgaaaatcagtgagggccccttctcgatgacagaagcgaaaaacacaggctccttcaccagggcgggccattgtgttcctattgtctaccaaacggctctgctctccaggtcggagagcggtgcaattgttcactaattgcatcctctactgatgcatgcaattagtgaacagaataaggggaaaactggaccgataccaattctcacccaatggtgctacaagtgcactgcaaaccctaggaaagcgtagacctgtctctaaagttacgttgaaagtttatgtgcaattcaccagcgcaaagggaaggtgtaggaatacacaagaatgtacttcctttagagaaaccatttaatacacggtgcctttattgtactaaaggatgccgccagctcatcctttgaaggaaacacctgtttgggggaaggtctaaaatcacacacccagcagccgacgggagctccacaaagctctggtaatgctagggaggggtgctggagggaggatgcatgcctctcggtgggagggggaccacgtcaggaaacggaccccactttgagaagagctgctgaggactgtgttcttttacttgttcctaaaaagtaaatgaaccctcacttgagaaaggaattaacacagggcttccaaaataattatcccccaaatcatggctgtcgttgggagaaataaaagctcacggtcttctagttccttcatccctcaactaaagagcaaatggaatagaataaaagttatataccaaaaatagaaaatgctctactgataatgtctttagggacctaaaatggactgtgatgttatagattgtagactcactatttatcctgtcttccttttatgttcatctgcttagtctcattgtgcaggtggtgtttgatttcattttgaagtaaaatattcaacacattgtcctactcactcaatagtctgagaacttgggttcactcacaaaactgagttgggcttagtgaatgttccctttttatctcatagatcccggtatgcggaagtagatcaatatttgcacatcgtgatctagctggatctgcaatatagacaggtaaaggtaaacctagacagacatagatgtagacctgtctagctatcttgctctatctctagccactctgctgtccatccatcatctctctgtcttcatccatctctatctttatctctatccatccatctatcacctatctattcttatcattcttcatatctatcaagccgctatcttctataaaattatatttatctatctctatatccaactgtctttctctctatatatctcttcatcatctgtctccaccatctatgtctctatctctggctctctattattctgaatatctatagaccttctagctaatatatatctttatctatctctatcttttatccatctatttttatctatccctatgagtcattcaacctcatcaatctatatccatctctacctgtatgcatccatctatctatctgtctatccatctgtctatcccccatctacctgcctacctacctacctacctctctctctctctctagagggagggaaaacaattgtgtttcccttagtacaaaatatggggagaaagtcaccagcaagactatatgcaaacccttgatagaaggtatttgggcgatgggccaacgcatgtggtgagagaacatttcatattttgatttcacacacttcccttctgatgatctctcttaaggaggcatggctttggccatccgaacttagctgcaatggatattttggtggtctgtaggaggcagtcccttaaactgtttcacacctgtaaagatgttgccagatgccaatactgaagaatattcaaatggctgtgcaaactttaagcttttaaatatcttgtagaaatatacatgtataaacaggacaaaaattctggagtgtgtggactcatatacttgcaataagcatttctgggtgatgggattgctgatgcttactatatttcctatttagaaattttagacatccctttagatgtttccctgtctatgtttaaaataagaaactaaatggagaagaaaacagcatttgtactggaagcagaaacatttgcaggaatgtgtagaggcagtgagcatggattctatgcatcaatgccaggctccttgagtttccaacgtgtgtgtgtgtgtgtgtgtgtgtgtgtgtgtgtgtgtgtgtgtgtgtgtggagagagagagagagaaagagagagaggaagagaggagagactctgcatttggggatgtgggtaggcattgacttgggcttgagggtgcccagtcacacctgttttgtgacatgggctggcaggtccagttaaggggagattgaagtgccagggtcattggtgattccttctcacttttgttcggggtcctcagttgacacttgtgcttgacaacccagtactctgagttctctaaagaagagggcattaaacctgtacgttcatataccctcgtctaagaaaggttttgtacaacttttccctaaagtatgtatatctcatcatcattatacatttcatattacatctaccagtgcccgtgaacaaagacacacatacatgcatttattaagaaaataattattggcctatgaaacctgtaatttgaagtccacaatgcatgagctaaaatatgtaagtgagctatgatacccaatgttgcacagtaccaaatattgtacaatggctatagaaaacaacaacaggctagcagagtatttcgatgtggaaggtgggaagtgaaggattgacaaaagagttgcatcttcggtgcacgtttctataatatgggacatttcattaaataaagtttggaactagcagggaaacctcactgtacagacgttcacacaaatgaggtaggaacacgggcattcacaggacaatgtatccagttatgctcttaggttaggagctccagttgaagatgatatgtgcatgtgtgtgtgcacattggcgcatcggcaatgccttggaagcgggcacattatcatgtagactgagattctgtgacgtgatgtcctttcatatgtctgtctacacatctcatattctatgctaacccatttcatgttatttgagaatcagaaaaacacagtaacatgacaagactcacctgtcatgtttcctcattttatcaatctcgttgagcacatttcatttctctctctctctctctctctcacacacacacacagagagagagagagagagaggagagagagagagagagactgctaacatggaatccttctgtcttagggggatgctctcgggaaagcactagttcccaaggttctgaaatggaaaaagactagcatacgctaagtggcataacagggaaattgtttgagatgcaaaagaaggcagaaaacaaagatgacaactacgtgatgcctgagatgaagacgtcagttctgtttcaaaagggcatgcattcaagagttggggaggggaacaggataaatcacttgattggcttaatttcctatctgtgtttgtgtttccaggttgacattaggagtgcataggtcctgagcatctacacgcggtgccactgggtcgccagaagaacagcgcacttcaggggcacagagtggggttgaagggtctgcacaccagcgcttgcagtgtgagcagcaagagatccagctcacagaaccaaacctgctgcgatccatgtgacactgggtaagatttccccatttactaaacattcacttgcattcacctcacgctgacatttcacagtggaattttccttgcccatcgttgtacagacacttgttttcaggataagagtcactgatttggtgtcggcaggcaaaagtttaaaaccacggtagagaggtgcagatggcagccagtgaccgctgcctgcagcgatcctcacgaccgatggtagccagtaatcaccaggatgatcgccacgcagctctgggttctgggtgctcttgcacatgacatggtgccgacacccagcatctgcatgtgggagacctcctcgggcttcctgggaagcacaggtccatactagcaccctagaaataaaaacatgaagcatttccccaggtttccgcccaaggagcccaaaggcacagaatactcagtaagaaatgtggggtccctgctggtacacccacctccccatgcaggtgctcctcaagatggaattgttaaaattaggagaaggccttgggtttgctgtgtaataaagcttctgtggaccttctgtatgatcccaaatacttgccatctgtctatccctctgtctaagactcacttgtcacgtttccttattttatcaacctcactgagcagggtgcttcgcgtttcacgaaaggatgctttcctgatacatttccgctctccctttaccatgttgcagcatactccagaattgtccattggaaacacgagttcaagtgcctcagggagattcaggaggaggaacacagcccacccacactgcaccccctttgcagtctgaaggcaaaggatgctctgaagagtagcttggtttaggagagacctacggtagcagagggtgtggcaggcagacccctcggcctcccttagctaccttttcccagctcatcatggactcggagtacgtcctatgctcttggaaaggccgactatggccagcaaaggttttgtgcacacgtgggacttcaccaaaaacgaagcctgaaaaggcgatttctctagaagttcaaatcctcgcagtagatgaaaaaatcaaggtgaaaagcacagacgtgaagaccccaactaagtttgagatggaagacattgccgcctctgcagcagcacagacgaagctcggtgccccactcagagagaagatggggtacagaggaacccttcgggtggccctggagattctgaaagagagaacaaatctgggtggaggaaggaaaccacatgaactagagagcaccacaccctctcagctttctcaaaaggtgcccgaaaagccagccagttctgtccctcgtgaagatgactggagatgcaaaggcgacctaaggaggagtcttgggaagagggaaaacccaagctcaccgacggtcccttcagagagtaagcgtgccctgcgggatgacaggtcgcaggagcccacagccattgcccctactccaggcgccctgcccggggacaggtcaggggcgcccagggccattgcccctactccaggagccatgctcagtggcaggtcacgggcacgcagggccattgcccctacaccaagcgccctgcgaggttacaggtcttgggcgcacagggccattgcccctaccccaggctgcctgtacagtgacaggtcacgggcgcacagggccattgcccctgctcgaggcaccaagcatggtggcaggtcatgggcatgcaggtccattgcccccaaaccaggctccctgtgcggggacaggtcacaggcgagcagggccattgaccctaccttaggcgccaggcgcggtggcaggtcacgggcccacagagccattgcccctactccaggctccctgtgcggcaacaggtcacgggcttgcggagccattgcccttactccaggtgtcctgtgcggtgtcaggtcacgggtgccaaaggacattacccctactccaggcgccctgcgaggttacaagtcatgggtgtgcagggccattgcccctactccaggtgccctgcgcggagacaggtcagcagcacgcacggccattgtccgtactccaggtgcccttggcagggacaggtcacgggcacgcagcgccattgcttctactccagggaccctgcagggaaacaggtcatctgtgtccaaggccattgcccctgctccaggtgccctgcgtggagacaggtcagcagcgcgcacggcctttgtccctactccaggcgcccttcacagggacaggtcacgggcccgcagcgccattgcttctactccagggaccctgcggggaaacacgtcatctgcgtgcaaggccattgcccctactccaggtgccctgcgaggttacaagtcatgggcgcgcagggccattgcacctaacccaggtgcctggcgcggttacaggtcaacgacaggcaccgccattgcacctaatctgggcgccctgggcggcaacaggtcagcggcacgcacggacattgcccctactccaggcgccctgcgaggttacaggtcatggacgcgcagggccattgcccctactccaggcactctgagcagttacaggtcacggtcccgcaggaccattgcctctactccagccaccctgcgtggtgaaaagtcacgggcgcacaccagccttgcccccaccccaggtgctttgcgcggtgacggttcacgagcacgcagggccattgtccctactacatgcccattgtgcgagatatagtcacgggtgggcataggcattgcccctattgcagatgccctgcgccgtgacaggtcaccagtgcgcagggccattgcccctactccaggcactctgagcggttacaggtcacgggcacgcacggccattgcccctactccaggcaccctgcgaggttacaggccacggtcccgcagggccattgcctctactccagccaccctgcgtggtgaaaagtcacgggcgcacaccagccttgcccccgccccaggtgctttgcgcggtgacggttcacgagcacgcagggccattgtccctactacatgcccattgtgcgagatatggtcacgggtgggcataggcattgcccctattgcagatgccctgcgccgtgacaggccaccagtgcgcagggccattgctcctactccaggcgccctgcgctgtgacaggtcacgagagctcacagccattgatcctactccaggagctctgtgcagtgacaggtcaggggcaagcagggccattgcccccactccaggcactttgtgcagtgaaaggtcccgggtgcgcagggccattgcccctactccatgcgcactgtgcgggaaggggtcacaggtgggcatgggcgttgcccctactccaggtgcactgcgcagggacaggtcacaggcaggcagggccattgcacctactccatccgcactgttcagggttgggtcacgggtgggcacaggcattgcccttcctgcaggtgccctgcaccgtgacaggtcaccggtgcgcagggccgttgctcccactccaggcaccctgcactgtgacgggtcacgaaaatgcacggccactggttctactccaggagccctgcccggcgacaggtcaggggtgagcaaggccactgcccctgctccaggcgccttgtgcagtgaaaggtcccgcgcacgcaggagcattgcccctactccatgtttactgtgcggggacaggtcatgggtgggtatgggcattgcacctactccaggcgccctgcttggtggcaaatcaaggaaatgcagggccattgctattactcccggcgccctgcgtggtggcaggtcacagaaacgcagggtcgttgctcctactccagaggccctgcacggtgacgggtcatggacttatatggccattgctcctactccaggtgccctgcacggtgacagctcaccagcccacacgtccattattccctctccaggcgccctgcatggtgacgggccaccagcgcacatggcctttccttctactccaggcaccctgcatggtgatgcctctcacgcacacatggccattgctcctactccaggcacgatgcgcggtgacagctcaacagcgcgcacggccactgccccatctccaggggccctgcgaggtgacaggtcatggaaacgcaaggccattgcttctactccaggtgccctgcatggtaacaggtctgacaggtcacggaaatgcaaggccattgcttctactccaggcaccctgcacgttgagaggtcaccagcactcagggccattgttccaactccaggcaccctgggccgtgacagctcaccagggcgcacgtccattattccttctccaggcgccctgcatggtgacaggtcaccagcacacctggacattgcttctactccaggcgccctgcacggtgacagctctcaggcacacacggccattgctcctactccaggcaccatgcgcggtgacagctcaacagctcgcatggccattgccccatctgcaggggccctgagaggtgacaggtcatggaaacgcaaggccattgcttctactccaggtgccctgcgtggtaacaggtctgacaggtcacggaaacgcaaagccattgcttctactccaggtgccctgctcggtaacaggtctgacaggtcacggaaacgcaaggccattgctcctactccaggtgccccgcgcattgacaggtcaccagcatgcagggccattgctcctactccaggcgccctgggtgatgacagctcaacggccattgcccctactccagggaccccgcgaggtgacagttcgccagcaaacacggccattgcttctactccaggcgccctgcacggtgacacctctcagacacacaaggccattgctcctactccaggtgacctgggcggtggcagctcatcagcgcacaaggccatcgctccttctccaggtgccctgcatggtgacaggtcaccagcacacacggccattgcttctactccaggagccctgcatggtgacagctcccaggtgcacacgaccattgctccaactccaggcgccctgcgcgatgacaagtcatggaaacgcaaggccattgctcccactccaggcaccctgcactgtgacagctcacgaacgtgcaccgcctttgctcctactccaggcgccctgcatgctgacaggtcaccagcgcaccaggacattactcttacttcaggcgccctgcactgtgacagctcaagagaaagcagggccgttgctcctattctaggcgccctgcaccgtgtcggctctcaggcacacaaggctattgcttctactccaggccctctgcgcggtgacagctcaccatttcacacagccattgcacctatgccaggggccctgcatggtaccaggtcatggaaacgcgaagccatttctcagactccaggcaccctgtgtggtgacagctcaggagaacgcatggccattgctcctactccaggcgccctgcacagtgacaggtcacagacacatacggccatcgatcctactccaagtgtcctgcgcagtgacagctcaccagcgtgcatggccattgatcctactccaggtgccctgggcagggacaggtcacaggcgctcatggccattgctcctactccagttggaatgcaagcacatgtgttgcaaagcccccgagcctgccaggattccctgacgctttcgcggcatgtttgtgagaaaaaggggaagaaaagggcaaacgcctcaactcttatgtccctgcctcccacagtaacggaggagggtgcatctctgcctccaggtctcaccagccctgcaccccccgctctgaaggaagagacacaggacagccgcccgaagaaggccctggctgcatccccggaaagttctcccttctcggggaacattcaggaccccggagagggtgcctggaagccaggctgggcaggtatggctgcatcctctgggtcccgtcagcacaggctgccttcttcactccggcttgccaatagaaaaaggaagcgtccaggtccagattttcagaggagacctcaaggacctcagacgcctggtgacgctaagcttgctaatcctgtcaccaccattcaaagggctggcggtaaacaggatgggcagccccccagccttgcttttccacaggagccacatcccatcgaaaggggaacgatggtctggttcaaatttcaagatcatccgttttggccagcagtggtcaagagtgtcagcaacacagacaagaccgcgagggtgctcctgcttgaggccaacctgcaccatggaaagcggggcattcaagttcctcttcgaaggctgaagcacctggattgtaaggagaaagagaaactgctgaagagagcccagaaggcctacaagcaaagcgtcaactggtgcttctcactgatctcccactacagagaaggactggtccggggttctttccggggctctttcctggactattatgccgcagacatcagctacccaatcaggagagccatccaagagggagacctgcagattgactttccaaaggtgaattatggcgacctggaagactgggaggaggagacctccctgggcgggaagaggccttgcaagaaaatcctcccggaccggatgagggcctcttgggaccgagacaaccagaagctcgtggacttcatcgtgaggagaaagggggccgacccccaccttctggacatcttgcaaggcaggaagcagtccaggtggctgaccgcgtttctgaagccacacagggatttgcactgcattgaaacatacctggaggatgacgatcagttggaagtcgtggccaagcatttacaagaaatctacaagcaaattgacaaggccaggctgactctgataagggatgacaaagtcaattttgttctggaagttcttctgccggaagccatgatttgtaccatcgccgcacttgatgggctggattacaaggcagcagaggagaagtacctgcgaggaccacctgtgcattaccgggagaaagagctgtttgacagaaatatcttaaagaaggcaagaagagaaccagcaaccacccatacagctaattagctcccgcctgcctcccccgcacccataccttcccagggagctgcctcctttctagaattaatgaggaagcctcctcccttccccaacgcgtgtaagtatgttctggatattcgagactttgggaatgtgaggaattcatttggggcccatctctcgcatgtgctggtggcacattcatcaccaggtcttcatcgcaaactcgtgaagagctattttgttaaacgattgcaaccccttgcgattccctcaacgtctttggatgtgtagttgtcccgataggtttgaaagacaagagcattgattttcataacgtgtcttttgactggacttggtactttcacttaggacctatattcttttacacaaaaagccactggtatcagcttttaaacaacaataatttttaaagcctaatgtatatttttatggaaacgtcagtgagacttttcattcttttggcgatacgtggatagaaaccatcagattcctctttcagataattcctgccttttccctgctaggcttgtttattttttgaaaagtagccccgagagttgaatcccatgagagagtcattttctcctatgttaacacgaccttccgatactttttcaaaaagcaaactgcaggccaaacatgaagttaccgaatggcttgcacgtagtccatatgtgcttgagtgaaatctcagtgtgcagtgagcgtcttgtcagcctcatgcaagattgtcgctctgcatttccctgaaattccacaccctccttcaacggctgaactgtttcctagaacaggcttcaggctgtcttcataactgacagtgatggatcttctccctctaactgtccgtcccctgtggagggcagctagagccatctccttcttggcctggcttctctccacctgtgtggctggcccaactgcttaggagcccgtctacctgcccgtaaactggagtaaagccagctccttgttctggatccagaatcccccaagacgtggccatttgtctcaatgtcaccaagcttcatcttccaacttattcacgggccggctccaacaggtcccaacaatctagacacaggctggtaagccattcccggctgctagaggcgccagggctgggagttggaaaaatgggtcacaggggcagccttcattccgctaagtggggccggcccttggtggaataatattaaacagatgcaattcagacctaagttgtgaagcccacagattgctaggctaacttgaaacaagatggtttttgaggataagtgttatggaaaagccagtttgtttttcaaacttgatgctaaaataaacgtgaaggccttcacatgaacctgagtccttttttagttcttagaggaagtcacctgttctcatgagaccatgttatgtgttcacatggccatgtgttggggcgacattggcagaggagctgtttggagtcaccttaaaaccactgtgtctcccaccttgaacttcagctgtgtcatgcttgagattgtccaaatccataggtggaaggtctaggaaatatatagacacacttccaaagcaataatagcttggaaattctgacgaaattttagaagagagccttccaagtggtgtatacatcagacccgacggaaccctctctagactctgcctgagtgtgaccaagactcctgggcacactgcctgggcagtccatgtgacatcctcatggccccggcaattatttggaaacagatcgtctccgtgctgtgtgtggacctcacacaccgagacaacacactttagttactccacaacactgtctccccgagtctaacatatcacctgagttcagctttctcatggagccatgtttatctctagcttctaatattactttcctaccccattcattcattcctgacctcatgctagatcgggagagcaagtgaggtgtggttgaaggctctgctctgaagaccgacttcaggtgacatagaaacagacgggaatgtggtgactcaggtgacaacctaatctttaaggtaacaaggatgcactgcttccctctgtcagtgagaaattctcaccagtgtcatgggccaacggcctgtttttgagagcacagccccaggttcacccaactatgtgaggtcataggtgcctgttggcttggggtgaagggaggagacctggtctctcttggatgtcactgacacctggggcatccactgaagagaggcagacatgcctcggacatgcatctattctcctcctccttgaatcagggtcactgaaaggcatccggggcacgtgtgtgggttgagggatatatagactctgagatcctttccagcctgagcaggtgctgcggcccctccatgattgccctcagctggacctccatcacaggtgcctgtgtgtttgatgacagagcccagcctgtcacccaccctggcccgctaggttaaggtgacctcctcttctccagtcagaaggaagactgctgcccatcaggccctgatcttaactgttgcttggcagagctgcacacacagagacggctcacaccacattcgtaggtctctatatccaagtaagcaactgatggggaaagaggggaaccctcagatttgtaagagtgatgcccatgagaattttgaatacctagaatatcctgaaccctcaccctggcattagcaaccacctaacccttgctaattggggagcaatccccttattcatggaggctctgtaaagacctcgtccaagggagctgccgtaaaggaagttgccttcgagcctgtaattccagcacactgagaggccgaagcaggagcatcgcttggatctaggagttggagaccagtctgggcaacatagtaagactctgtctccacaataataaacatttaaaaactacacaggcgtggtggtatgtgcctatagtcccagctactcggaaggctgaggcgggaggattgcttgagctcaggaggttgaggctgcagagaggtatgatggcaccctcgcactccagcctgggagacagagcaagacccagtctctaagaaaaaaaattgcttgtcttacctaacatccatcccgctaactttcatcgctctgacaagcgcgaagtttgaataggaaagatcacagcacagaagagaaatacggtttctgtttgggtgggaaatacctcatattcagataagctgcagaagctggctagttcgccttggcatgacctgggacagcataggtgggaatggattttgggcatgcggaaccagcaagacagcagacagaatacagttcaatataggggagagtgtatttacgtgggagcacggagctataaggtggggttccctgtcttggggctggcctcagatcctgctgggctggcagcttcacgtttggacaacagcctacagtaaatgacatggagttatgggaactgccttggcagaatattgaccaattggtgaaagggttgagcggagagcagtattagatgtgattcattatgtgagaccagtggccctacctgtgaatgttgtccccttcgagggctgagaagacactctaaaatgaggaatttgctagtggggtggccccggcatctttgagagcctctgctttgactcctctcaaaacaatggttggaagcaagcgacgccgccatggaactggcaggcaatgagaggattctcaaatggcagggtccagacggtgacacaaaattaccagggctcaggtgggcaccactgtcgtactgggcagcacaatcagggtggggtcaggctcatttgatgaacagggacctgtggcaacgttacagattgtagtatctcagggcctgcatgtaaggacagctgactggactattacttgatttttattaaaagaataacatgagctggcaagcagaaggctgatgttagcagctgccgtggaaaactgtggtcccccaccgagggtccagatctgtcagttcataggcccagagcttattgatggaagtggaggtcagaaacactcagccacacattctcccagaaaacctgtggctatttaccaacataaataatgcagttctgtctaaagttcttctaaccggggatccgatagttctttggacccatcccaagtttgtttccctcaggacctagttgtcagtgatgtactttggatgttgcatcatcttcatgttggttcaagcaacattacatagaaaggtacatatgggagcctactaagctgctccctctttacaatacaggaacaaagaagtaataccacttctatagtgaaaacgaagagaagacccaaatttctaaatcagaaatgaaagcaaggacattgctacttaccttacagggattaaaaaaaaagactctaagagtgtatcatgagcaattttacattaagaatgaatctagaggaaacagacaaattattagaagcacacaactaacaaactggctcataaacaaagagaaattctctatagacctataacaagtgaagagattggttttgttatcaaaaatctcagaacaaataaaagcccagcaccaagtggcttcaccagtaaactctaccacacctttaaagaagaattaacataactccttctcaaactcttccaaaaaataaaagaggaggggagtcttcccaactccttctatgaggccaacattaccatgacactaaaggaagaaaaagacaccataggaaaactacaggcaatgacccttatgaaaacaaagtttaaaaatcctcaaaaaaatgctagcaaatacaggaggctgaggcagggggatatcctgagcccaggagtttaagactgcagtaagctatgatggtaccactgcagtccagcctgggtgacggagttaaatgccatctccaaagaaaaaaaaagtaatagcaaacaaaattgggcagcatagtaacagggttatgcaccacgaccaagtgagatttattgcaagtgagatcagtgtgagggtggtccaacacgaaaatcagacaacgtaatacaccacattaataaaatgaaggaaacaaaccacgtgattatctcaaatggtgtggaaaaagcatctgagaaaatcaaacactctttcatgataaggacactcagaaaaataagaagagaatttcctaaacatgaaaagggtcattcatgaaaaatccacagctaaaatcacgctcgatggtgaaaaaataaaagctttctccctaagatcatgaccaagacaagatgttcactttcaccacttctagtcaatagtttacttgaagttgtagccaaagcaattaggcaaaaaaaaaaaaaaaaagaaaagaaaagaaaaagaaacaaaagacatccaatttggaaaagaagaaatagaatgacctagacccatagatggcatgttcttatatatagaaactcccaaagaatccaccaaacaaagccatcagagctaatgacaaagtcagcaaagttataggataccagatcaatatgcaagatccatttgcatttccacacattatgaacaatttgaataggaaattaagaaaacacttctgtttacgatagccttaaagagaacaaaatactcaggaataaatttagccagggagatgtacactgaaaaccacaaaacactattgaaagaaataaaagacctaaacaaatggaaagccatactgtgtccatggactggaagatgtaatgttgctataatataaaattgttattgtttagggagatgaaaatactcccccaatttacctacttattccatgcaatccctctcaaaatcccaacagccctttgcagaaatggaaaagcagaccccaaattcctatgggattgcaagggactctgaaaccaaaacaatcttggaaacaaacaacaaagttggaggactcgcacttcccagtttcaaaacttactatgaggctatggcagtcaagacagtgtggtactgccacaaatctaggcatacaaatcaatggcatagaattgagagtgcagaaataaacacctccatgtttgatcattgattttcagtaaggctggcaaggctacccagtggggcaaagggtttaggtgtgtgatgagcaataaggtttcagagcaagccactgggcagggcaatgacattcagtggaagcctgtctacatttggtagccactgtcttgagtaggcaccctcctgaggctgcaggggaggaataggtctcctccttgaactgaagtgaagtccacgcatcctccagatgggacagcctcccagtctcattttggagaagcccaacagagctcagcatcctgttgctgagagccccgtgtcctgccacagacggccccccagccttgccgcccgccaacattcctggaaactcctttctgtacctcccttgcatgctgtcatggaaacaggacttccccacccccacccccggataccgcatcctctgagccctttccagcagggctattcttgtccaccctccttggagcacagggcctggaggtggcataggtgacctccttgcttctcacagtggcttccacatcattctccctcaatcctccctgaaaaatacccagtccctttgaagtgcatgctctcagactacactgctaggattaccagatttagcaaataaaaacactggaagcccagttaaattcaaacatcccattaaggatggctatcttgagtagaaggggtcccatgcatttccaaatttaactgggcatgaccactgcccctcctcacgcaggccaggctcctcagcccagagcatggatggctcttgcccgtctccttacggttgtactcacctagttcagcctccactttgcagatgcaatgaaacattcaggacgtgcaccagagttgaaaatgggacccactttttgtccagtcctgtgttttgagccatctatcgggatgctgtctgtgaactggagcccagtcagtataactcaaccattccttctttttcaaaccatgtaaatcatagagacctcccttctcccggcccttgaccccatcaacagcagaaagcgatacatccaactggctgtccacctcttccaggagaaggttcaggctaagatcattgtatgttagatacccaggcgtcatagaaacccaacacccccagcctgttcttcatcacccagactcttttctgcataaagcaccgcacgtgctgcccttaatctggctgagattcccactgccccttgctcatgcgtgtgctgggaaatgctagagcctgccagccacaaacgcctctatcgtcaccttccactgcgcccttcacctgcctccatgccttgactgtgtcgtccccactgcagctctcttgggcccactaatggctagagcagcctaagtggcttctgaaggggaggggaaggctggggggtggtgggggctggacggtgaagctgcagaggtcagaagggcctgggggcagagagggagagagacggcgggaaggagaagcaagtgccacactcccctgcctgcaggtgggccccatggtgacttgggcccccagcaggcctagtgacaaaaggccttccagggctcttggataaacctgctcaggggtcgggggtgcggagggtcaaggagacctcggggaggtgggggaggcctgtttctctcatttgttaccaaggaggggcccctggcttgaacgagcccttgctccaggagacacacacgtggtgagtggggctggtgggccagtgtcttcacagacatctcagggtggagtcagcccctgtgccagccaccaggcacacagagaggtaggggccaatgcccccactatccaggagcccacagtctcccagaggagacgcaagggagggctcatcatcaccctgaaggtctaaaggcgctgaaacagaccggacccaattaactctcaaatcttccctccaggacaaaggcccccacagagcagaaacttctgggaatagaagacaagtaaagcaagacaggcacaataggggcaaagaaaagagaaagtccgaatcacaatggagagggagaacaaacggagaacgtacaatggaaggtaaacagacagatggtcacagttctcacagtcaccagaagagagtgcccttcatacgcgaaatcagaaaacctagcctctcccacccttccacaagtgcagaaggactgatttcatgggaaaaccagttgacaagaggatcaaaggcaaatttcgtacaaagttactaaaagaaagaagagaataaggagcggaataacatccctccaagcccaagcctgggcctgacggaggcgtcccttagcccagcacgtcctcagccttggggatcatgaacccctttgagaaccagaagggggaagggcccttccctggaaacagacatgtatgcacaagacccctagaagggtgccttctctggccgggcagtcacaggcaccctggccccatccatggtcccagctggagcctgacttccgaaggtgagctctatgttatttccatgatgatactttgtcattgtaataggacctggggaagaatcagagcaaaacaatcaatcactttgtttagtaaaataattttattttctatttcaaagttggggagagatttggttatttttatttttattttaaaaaagcaagcaaatattatgatggctcctcacaaaatgaaacataaaattacccagcaaccccacttttaggtaataccccccaaaattgaaagcagagtcaaaggggtttttgaacatccattttgacaacattttattattattattattattatttattattatttgagacaagctctcactctgttgcccaggcccaagtgcagtggtgtggtcatggctaattgcagcctccacctcctgggctcaggtgatccccctgcctcagcctctcaagtagctgggactacaggcacgcatcaccacacctagctacccgttttattttttgcagagaggatgtctcagtatgttgcccaggctggtcttgagctcctgggctcaagggatcctcccaccccagcctcccacagtgctgggatgacaggcgtgagccaccgcacctggccgatagcagcactattcgcagtagccaaaaggtgaaagcagcccaagctcccatccatggatggatacgcaaacgtgctccacgcacatgacagaatacgattcagccttcgaaaggcaggaaattctgagccaagctacaaggtggatgacccttgaggacattatgctaagtgaagtcggccagatacaaaaagacaaatactgtaagattccacttccatgaggcccttagagtagtcaaattcagagacaggaagtagaatggtggttgccttgggctgaggggtgcggggagttggtgctgaacagggacagggcttcagtttgggaggacaaagatctccggtgacagatggtggtgatggctgcacagcaccgtgaatgtgctgaacgcctcctaactgtccatttcaaaatggttaaagtggtatattaaagtggtatgctttatgtgatgtgtattttaccacgattaaaattgtagaaaggaaaagaaaagctggccaagcatcttagtttcggcacactgacactccatgtcacagccagaacgagggacttccaccaccgggattcgagaacctgaagacgctggccaccagagagagtcaccaggcgccaatgtctgtggcccgcggcccatcccagaggcgaggctctcggtatccagggccagctcgacctgtggcccgcagccagcctcctgcaaccacagggaggaaccaagagaggcgggagggccttcggaaataggcacgtcactgacctgctagaagttacttgagcacatccattccttggcaatcacggaaaagaaagtattttcttctagggtacccagaatgctcagctgagctatctgacctgacctggcccggctcacggccccagcatgtggatttggaacctacaagcacactggctctgttggcagccccaactcgcacacccagtctcgtctccccggcggggctcaccgctgctgcgtgggcctgtggggactcctctctgctctcccactggctgcagcgttcataagtcccccttcccccaacacggtgctcggtgctgagtaaaaatatacacacgcacgtggagcccaaaaccatatttgtcctagggattggctcatgctagatgggaagaataatcggagtgtgcacaagcaggagcatttgctatttcttttccagtctacgatgaagcaggaacgtaaactgagttactctagtcggccacaacgtggagttctggtgtttatctagctgaaagcctgtgtaatgtgagcacagagacacattcattcattcaagaagcactttgggagcacccacgctacgccaataagacggctgggagccgggattacaaaacacccccggtcaaggtgtgccacaaaagatgacagccccccagaggggatcccgaaagcagcagctggaagtcagtgggatgtgtgctaagatcccaaacgggggaagccacgggactacaggaggcaacggcaagggtgcctgcccctaccgagtgggcagggaaggcgtcccgtgggaaccgtttaagcgagaaaggcactacgagtaggagttacccaggctgaggacaggggtgcgcaggcaataccaggcagggacaagcacttccagacaaaaaggagcagagtcactggaaggcgggggatggcaaacattttctgggcagggccggagggtcaatattttcagctttgccacctcaactctgcggtcgtggcacgaaagccaccccgcaggcacaacgcagagatgaaggatcatggcgacttgattcctggacagtggcatctgcatttcccatcactcttgcctgtcctgagataataccactctccctttggtcatttaactactctccccgggctggacacttggaactttcccagtcttatgctgtcactagctatgctgcactgaagaagatcttaaacatatttctttcatctatgagagggttcatctgtcggctggatattcctcccacacagtggagggatcaaaggttctgtgcatctgaatttttaatggatcttgccaaactgccctccatgggagttgtgccaatgtctactcctgccaacaaccagtgggggcatctatgtcccatcaggctcaccaacactgtgtgatctgacatttagaatttagcccattgaatcagtaaaaacaaacaaaccaacaaaccaaaagggataatctcagtgtcttttgatgtgcatgtctggggatgtgcatcttttcataggttcaagagcctcttgtatttcctttcttgttcactgtctgttcacgtcctttacccatttttcccactgggtgcttcatccttttctctgtaacagttccttgcgtattgagataggagttggagacagttttccctagtgtgtcatttgtcctttggctttgctgatcgtattagtctgttctcacattgctataaagaaatgcctgagacgactgggtaatttatagagaaaagaggtttaattggctcacggttccgcaggctgtacaggaagcatggtgttggcatctactctgcttctggggaggcctcaggaagcttgcaatcatggcagaaggcaaagggggagcaggcacgtcacctggccagagcgggagcaagagagagagtgtgaggtgccacacactttaaaacagcccgatctcacaagaactcctcactatcacgaggacagcaccagggggatggtgttaaaccattcatggaaaatccacccccaggatccaatcacctcccaccaggccccacctccaataccgcagatgataattcaataggagatttgggaggggacacagatccaaactacatcactgatgatggatcgctttgccactcacaaggtttggctcggctttgtacctttctgttacagaagagactttctaaatctcatgaaggaacaggtgtcagcggtggcagagatccgcgttaccccgagttactggtggcgaatctgtacgcgtctgcagtaactgcaattctcgcctcctcagaagaaagcattcaactgaggggtatagggcagaaagggggaccgaggtgagttccagagcaggagtgtaagtttattaaaaaaaggttttagaataggaaagaacccttggaagagatccaagtgggcacctgaaggtcaaagagaaagagaaaaaagggcctttccccttgaccctgggactttataggctcacatctttccgatgattcttcccttagggtgggctttctgcacgcaccgtgtcctccttacccttgagaactgcacctgcccagtgtgttgtgggatttgtacgcatgcccacctcaggctttttccctttttccagtggcgtgtgtccgcgagatcataaaatacttcagcatttttgtctcttaatgtgcgtgcccaggaagttgcttctcccttggggcctgcctttaatcaacactttaatgttaacaggtacggaccgtcaggaactggcctctgtctggcgccggcactacttttagagaggcgatgcgataactgctgaaccatcacccgacatttccagtgggtagggggaagagccctcacctgccccactcatggctagctacctgtataacacagggacttgatcctaaaggcagtggagggctgacacggaggtgttttcagcaaggaagtgacccggtcatgggtccatgttatttatgaagctcattctggctacagggtggtggagggactggaaagggactgaaatggccccaaagagaccagctggtggccaggaccagggtgtggaagttgcggcgggccaagaagcatttctgagtggagctatgtgatggggagagggtgccgtccaggagcaggccaggctttgggcttgtccagctgggtcactgtgtggatgtccatgatgaagccatggaatgtagaaagaagagcacggcttccttttccttccttcttttattggggtgcaggggagacaatgagttctgcatcctacagggacccttttcttaaaccccacaaggagctgagtgccacacctctgtgctccagggcaatggcctgtgcagtgcctgtttccctcaagagcctcccccaggggcagggacgatgctttagccgtaatgtggatccctagtgcctagcacagtgccaggcactgaaaaaatactaaaagaataatgcttacaccagaggaagagagctcccgagcggaagataaatctaagtcattaacaacagctcagagggcaggatccatgctctggaggtggcaccataggcccacaggcggggctgggcctggagaatgaatgaatggataagtgaatgaatgaggtgccaggcagagaggaggcctttctccaccccctgccagtgtctctcaggcttccatccttccttggccctgctcttctcaacaggccatgtcccaccctcagctccaaaggccacgtcccaccctcagctccaaaggccacttgcccgttctgtgttcaaacttgaaggtcagtggtccacggaaaggaatggtgggcggcgcatgggtggggggcaggagaagaagggccatagaacctcccttattccaacaccactttctgagtgtctagtttgtggatgtttcatgggatagtaagtaccatattacagcagtgacgtgtgtgatttagacatatctaggtgtgcacttctttggtggggaggtgtctgttgggtcctctagggatgccaaaagagccttaggagtgccagtgtctgccagcccacagcgggagatggaagcaaagacggccccttggaggggccccgtggtgagcagagataagaggtgcaggcagacaggaggagtttggctgggttggggggatgttttgtggcggcagcatcattgatataggatgagctgggcaaggaggagctgggcaaggaggagctgccaccacacagaagcagttacaaatccgtaagctctgcctcaagcagcagtagactcagcacccgtttcctgagcgagcacaatgtggccagcagagttcaagaaggagagtggcatggcccctgccccaggaggcttgcagcagggggtacccctctaaatacatctgcctctgtgtgcttccctcggctgccgtaagaaagcaccacaaaccagttgacccaatcactccacagaaactgattctgtcccagttctggaggccagaagtctaaaaccaagctgtctgcagggccgtgctccctgggaaggctccaggggatgatccttcctcgtctctcccagcttccagtggccccaggtgtcccttggcctgtggcctcctggccctaatctccacctccttcttcatgtggctttctcccctgggtctccatgtctgcgtttctcctctgtttggttcctataaggacatttgtgattggatttaaggcccactcgggtaatgtaggatcatctcctctcaaaatgctcaacttcatgatctctgcaaagaccccttttccaaataaggtcacatttgcaagatcagaaggtgaggatgaggccatgtgtgttttttttcttggggggggggaggtgcaggtggggggggcacaattcagccatgaccctggccctgtctcagcttgtgcatggccgtgcttctcaggggttgccctctgccttggagtccagcccgagaggcggcggcaggctttgccacactcgctgcatctggaggatttccctcggctagaaagaatgtgatggggatgaagagctgactgcctggaagtcttcgcatgctcagtgcccttgtgggcacctcctgggtctgaactctctgatatccctgccctgccttacagttctggaggtcagaagtccaaaacgggaagttctaagggacgaatccttttccttgccactgcagggccagtgagcacagaagtcagggagagcagagaggagagctcctggcccagattagcagagcctggcctttgcctaggggcccccccagaatcaaacagggagccataaggatgccagaagtatctcctcacctcatctgcaggacccagcccttgagcagggtgcacaagactcagctcgttactgcctgtggtggcacagtaacagcccccaaagatgttcgtggcctaacccctgggagctgcacatatgttaccttacatgacaatagcgattgggcagatgtgagatgggtggggagattatcctggattggccaggtctttacacttgaaggacaagggtccttaagtgagggagagggaggaagaagagtcagtgtcagaatgatgccgccagagaaggactcaaccggatgttgctggctttgaagacggaaggagtcaagagccaaggaattcaggcagcctcaaggtgacaggaaaggcaaggaaaagggttcttcccctagaacttcctattttagacttctgacctccagaactgtaagacgatagatctgtgttgcttgaagcagcgggtttgtgataatttgttacggcagcaacggggaacgaaaacaccacctgcctgcaggtgcacatctgcagcacactgcgggggtgggggttgctttcactgtggtgaaatagacatcacattacatttactattttaaccactctaaagtgtacagctcagtgtcattaagtacatttgcaatgttgtgcaaccaccatctctacccagttccaaaaagaatttcatcatcctcacaaagactcctcctcccattagcagtcacgccccatttactcctcctcccagcccctggaaaccacaaatgcactttctgtctctatggatttacctctctgggcgtttcatagaaatggcttcctgtcatatgtgaacctttgtgactgacttccttgtctttttttttttaattgtagtgaactacacataacacaagatttaccgttttcaccatgtctaagtgtagacttcagtggcactaagtccattcacattgttgtgccaccatcaccaccatccatcaccagagaccttcatccttccaaactgaaatgatgtccccccattaaacactagctccctttctgtccctccccggagaccctggcacccaccattctactttttgtctccatgaatttgactgctctagaccctcgtataagtggaatcatagagtatgttcccctctgtgactggcatgttttgctcagcataacgtcttcaaagttcatccatgttatagcatgtgtcataatctccttcctttccaaagctgaatactattccattgtgtggatgtaccacaattcgtttatccattcatctgtcaatgaacaacctcgtgtcgttttacagccccagtgcctgcatgtttgtaaatttaatgcaaatttatcagtaggtaaagtgctgcccattctgtatttgtacaattgtcattctagactataaatacatcactgcacttgtcccacaaagtaaatctaggtattaactgcccctctaagccttgtgacaactacagatttcatgagctcgagcagcttcatcaaacttcacgcttgaacagaagacctagatgcacaggactgctcaatgtaacggaaacttcaagctgcagtttgttacatgtggaacattttttagttattcccaggtaggaacctggctgtgactatcagagaccaaaggtgtttaatctggaattgtaaggagattttgacagttgaagacatattccaagaagaaataatcacacacacacacagagagacaaaactctagtgaatgtgttagccgtgagtgtcatttcctgcttcctcatatcttagaaggtttcatatactgctttactttaagtacctgcctgcatgtcacttacctacaaggtaagtatcattgctcctgttttacaaatcgagagagagagagagagagagacgtagaaaggttaagtggcccagggaaccagctactgagagattctaccagattgcactttgcttctcactgccccaagctttctccaaatggggtcccagttcaactctgtttctgaagagatgaaatctcggccaggcacagtggctcacgcctgtaatcccagcactttgggaggccgaggcaggcggatcacttaaggttgggggttcgagaccagcctgaccaacatggagaaaccctgtctctactaaaaatacaaaattagccagacgtggtggcacatgcctgtaatcccagctactcgggaggttgaggcaggagaatcacttgaacccaggaggcagaggttgtggtgagctgagatcgcaccattgcactccagcgtggacaacaagagcaaaactccatctaaaaaaaaaaaaaaagaaaaacagaaagaagtacatacattctgggatggggtccaggcactgatataagtttagagccccacccacatgttcctgtgcagttagggctcagaaccattcccggtgcaccaaaaacccatgtttctcctgttggtgggaatgtaaattagtgtagcctttatggaaagcagtatggggctctcttaaaaagaagaaaaaaaaaaactacaagtagaactaccatatgatccagcatagcaatcccactactgggtatatatccaaaataaggaaatcagtagatcaaagaaatatctacacttccatatttattgcagcactattcacaatagccaagatatgagatcaacctaagtgtcctactgctggtcctatgtataggactcacatgagtcctacatataggtctcagcctacccactgagacctgacaaggaaaataggcaagaaaaaatatgaaagcacaattcatagaagagtaatctaccaattaatgcttcaaacaacatccagactcaccagtcatcaaacacaaattcaaattaaaatgatatgtcacttttcacctatcaaattagtgaaggttgtacaaaggcaataaggaacgctggacaaggcacattcagaaggaactctcactcagacactgcccatcgagtgtaatttggtaaaggttttgtagaaagcaatctgaccatattgaatgagaccctcaaaatgcattaacgccttgagccagtaaaggaacatttagtatctatcctaaaacaaaccagagactgaaaataagggtttaaatgtaaaaatggtcactgcagcatcattgaaaacagtcaaaacagacgaaaagccaaaatgatgaacaaagaactgattggttatgtacgtcagagaactacactacaatgtgaagaattattatttagatatgaaaaagaatttttaaggaattttaattgtcatgaaaaaatgattcagtggaaaaaagcaaaactgaatacacagtatggtcctaagtatgtttaaagatacacgctcgcccctgcttaaaaaaaaaaaaaaaaaaatgactgaaaggaaagaatacactaatgacattagagttaggtttcaagacaataaataacatttggttttccatgataagcacaagtggcttacataaccagcaaacaataaagggggaaaactgaggcttagaggggtgaaaaaatgtacccaaagatcatatggctaggaagtaccagagatgagcctctctaccaagcctagctctgccctcagcattgtttactcactgtctctcttcctttctctctcccttctctctctctctctctctctctctcagccacaccactctaaccagatgcaaatccactcaactttggagaaaccacataaacaagaagggtaagatccagagggaacactccagcctgctgagacttccactgtcccaacaaccctaaaggttatagagacatccttgagaccatttttaaagtgtgagtcacattgcagggatagaatgctgaagccatcctactcaacaataggtgacagaagaaacaacacaaggagagaggaaatgggaaaggcggcaggccctgcttcatcccaaatcacccctatcctcacctccagggaagagaaaggggtacaagacaaaggagatgattgatggggctccctacccaagctaagctgttctcacttccacatccctgcttgtcccttcttcctaccctggccaggcatgtctatacatatctccaaaactcaagaatccactggatttctcttgcaccaggcctaacatcacttacagttggaagctgttgatcctgttcctgagaatgaagagacacactgtagttctatcttgagagagatggccctctttcgtgaatcacgacaggtacagacggcatgtggcaacatgggaaaagagaaaatagaatagccaagaaactgatactcagaagatcatggaagagggctccagttccatggttccaaagaccccctgaatagccccaggacaattcaacaccaacatgatgaaaaccaactcatccctccaccatgtggtttctcccatagtccctgtctctgttggtggcaccttccaacccaagtgccaagctagaaacagtggagtcatctgtaacattttcctttgcactgccaaccacatcctatcatcctcactgtctccagccccaggatatggctctatcccttgaggtttcccgacctccagcccacattcccctcaattacccagctcaagtgtgactcctgcttcctgcaagacctacagaaagaaaatcacagtacatccaatcttatatcctgccttttttctatttaacatattttgaacaatattccaagctaaaaaatagttttaaatgtcatgttaatggttgcatgacatttcattgaatggatagtttagccattgttggatgttggtttgcttttgatattttacagttaaaatggtactatgataaaaaaaaaaaaaaaacacagcacagaaaagttctctgggttaaagagataggaactaaagaaacacatagcataaggtaatgggcaagtcagcagtcatgggatccagtaaaaaattaaaggaaatttctgtgggcctaaatggcatctgttcacatcaggaagccaggagcacacctggagaccaatgctactagaccaccctccttggtagtgtcttatggtatgttaaggggggctggagaataaaccctttgtatgcctatttaccacaactccctcccagcacccaggaaagggacctgccattgttgcccataaaagaagccagagtctcccttctctctcctgcttcaggaggaggcactgccacatcttgaggcaagaacaatgataaaatctacaacaccctattgttcttagacagtggagcctcattccagcatcactctaataccaaaaccagataaagacacaacacaaaaggaaactgcaggccaatatctctgatgaacagaggtgcaaaaatcctccaaaaaaatgcaggcaaaccaaatccaacagcacatcaaaaagattattcaccatgatgaagtgagatttagcccagagatacaaggatgttccaacataacaaatcagtaaatgtgatacaacacatcaacagaataaaggacaaaaactaaatgatcatctcaatatacacagaaaaagcattagataaaattcaacagccctgcatgacaaaaactctcaacaaattagatatagaaggaacatacctcaatgcaataaaggccacgtataacaaaccaacccaaaacatcgtattgaatggggaaacttaaaaagcttttcctctaggaattggaacaagacaaggatgcctactctcaacactcttgttcaacatagtactgtaattactagccagaacaattaggcaagagaaataaatacacagcatccaaattggaaagaggaaagtcaaattgtccctctttgctgataacatgctcttatatacatacatgcatatatatatatataaagatttcacaaaaatactcttagagctaaaaaatgaattcagtaaaattgcgggatacaaaatcaacatacaacagttagtagcatttctatacaccaacaacaaactagctgaaaaataaatcaaaaaagcaatctcattgacaatagctacaaaaacaatcaaatgcctaggaataaacttaaccaaagaggtgaaagatttctacaagaaaaactataaaatattggtgaaagaaattgaggaggacagcaaagataaaaggcaccagtattagcccattttcacgctgctgataaagacacacctgagactgggtaatttataaagaaaaagagctttaatggactcagagttccacgtggctggggaggcctcacgatgatgatgaaaggtgaaaggcatgtcttacttggcagcaggcaagagagaatgagagaaccaagtaaaaggggtttctgcttataaaaccgtcggatctcatgagacttattcactaccaggagaacagaatgggtgaaactgcccctatgactcaattatctcccactgggtccctcccacaacacatgggaattaagggagctacaattcaagatgagatttgggtggggatacagccaaaccatatcagcatcccatgttcatggaccataagaattaatattgttaaaatgaccatactacccaaagtgatctacagattccatgtaatctctatgaaaatactaatgacattcttcacagaagcagaaaaggcaatcctaagattcgtatggatccagaaaagacccctaatagccaaagcaatcccaagaaaaaagaaaaaagctggaggcactacactaccagattacaaaatatactacatagctatatgctattgtctggatatggtttgtttacctctccaaatcacattttaaaatttaatccccagtgtggcggtgttagtaggtgggaactagtgggaggtgttttggtcataggggcagatcccttatgaatgactggctgccaccctcgtcttcacagtagtgagtgagttcatgctctattatttcccatgagaactgcttgttaaaaagagcctggcacctccttctctctgtcttgcttgcctcctctcaccatgtgatctctgtacatgccagctccccttccccttctgccatgattggaaacagctcgaggccctcacttgacgttaatgccagtgccatgcttcttatacagcccacagaaccgtaagccaaataaaccccttttctgtataagttacccaacctcaggtattccttcatagcaacacaaaggaaataaggcactgtaggaaccaaaatagcatggtactggcataaaaacagataaatagaccaatggaacagaatagaacacccagaaatagagccacatatttacagccgacagatttttttaaaagcaccaagaacattcactggggaaaggacagtctctccaataaagggtgccagaaaaactggatctccatatgcaaaagaaagaaaccagatccttatctctcaccttatacaaaaaccaattcaaaatggattaaagacttaaacctaagacccaaaactataaaacactactagaagaaaatataggggaaacactttaggacattggtctgggaaaagaatttataaataagacctcaaaagcatagaaaacaaaagcaaaagtagacaaataagattatatcaaaataaaaagcttcaacacagaaaaggaaacaatcaacagagtgaaaagacaacctacagaatggaagaaaatatgtgcattctgttcatctgacaggggactgatatccagaatatacaaggaactcaacagcaaaaatacaaataatctgatttaaaaatgagtaaaaaatcttaacagacatttctcaaaaaaaaacagaaataatcaacaaatgtataaaaaatgctcaacatcactattcatcaggggcatgcaaatcaaaaccacaatgagatatcgtctcaccccagttagaatggctatattgtcaaaaagacaaaaaataacaaatgctgataaagatgcagagaaaccagaacttttatacactattggtaggaatgcaaactagtgcagccactatggagaacagtatggaggtgtctcaaaaaaactacaaataaaactaccacatgatctgtcaatcccattactgggtatataaaaaactacaaataaaactaccacataatccagcaatcccattactgggtatataccccaaagaaaggaactcaatatatcaaagagatatctgcatctccatgtttagtgcagcactattcacaatatccaagatatggaatcaacctagatgtccaataacagataaattgataaagaaaatatgatatctatacacaatggaatattactcaaccataaaaaagaaggaattctgtcattcatggcaacatgatgagcctgggggacattacattaagtgaaataagccaggaacagaaaattaaataatgcatattctcattcatatatggaagctaaacaagttgatctcaaagaagtagagagtagaatagtggttactagaggctgggaaaggtggaggggagagagagtaggaaaggattggttaaaggataccaaatgacagctagatgggaggaatgagttctagtgttctatagcactgtagggtgactacagtcaacaataatttattatgtagaagagaggagttggaatgttcccaacacaaaaaaatgataaatgttgagatgaataatatgtgaattaccctgattagatcaccgtacattgtaagtattgaaactcactatgtgccccataaatatgtacaagtattatgtgtctatttaaaaatttttaattaaaaataaatagtggatggagactcatgaaaagtttcaaattggtggaaacacattgtccagaagtggctgaggcatgtccagcgcagacaagaaaggcaggaaggcaggtcggaggctcagactctccaggctgagtttgtgaaagagttagaataagatctatcttcatgatgcttttgaagctacttggttttaattctaggattcaatgagagatgtacgagattagatttgatgtaaggaaagacttggcatctgtcctacccttgtggttaaggagtccaagtggaaactttccatgatattccagtagatctcccagggtaggccctcccaagtggcatgaggaaatatgccctcagttttagggcaaaaattggtgattcctagctttttatgattgcagacccttctggaaatctggtgtatttttgatggctgcttttgtgccacaagggcagagttaagtagttgtgacagaaaatcgatgctatcttctctttcaggaaaaacatgctgacccctggtgtggatggctgagtttttcgtgtcttacaaggtagtgaggtgatttcaaatgttcgaaagaactgtgtgtgctgcctcattatcttaacccatccatctatccactctgaagatggctactcgctggttggcccaaggtgtgtctaacccatggagccagtgcgggaagcagggagcagggaatcttttgtggttcttttctgtattctttggagaatggtgaacaggcttttacagacctaaataagctgtagagtttttggtgttgactacaaataaaaatcagggagatgatgaaagagccagttaagatatcttgttttctaacaaaactgagaaaaggggttatttggccaccatgtgtgaccttaggtaaggaaccactctctttgggtatcggtttccttgcaagtagaatgaggggcactggggagatgcccaagattcccctccaactgaaaggcactcaaagagcctgtgattctccccagtaggtgcccagttggcaaagtaagtacaaaggagcaaagttgggattcgaatccaggttcatgtgctccaaagctctgccccacggattcacaaattgggggcaagtttaagaaccacagagccagactgaagccaagagacaagaggatcacatacatttgtgggggcttcagctggctcttgctgtagttagctcctgccccagggcctttgcatttacagtccctctgtgctagaccatgcctctctcattatctccacagctgtccacacctcctgcagctgtccgatcaaatacctcgttctcagggaccttccctgaccaccttttacaaagtaaaattgcaaccccctccccatgttccccagccccttactctgctatacaatcagttcacagcacatctctccacctgacatgtttagtgtaaatttccctgttaactcttttgttgtctgcttccctccactagaatgtcagctccaagaggcaaacctgttttgttcactaccatatccccacagcctccgccagcatcagccatggagacagagcccagtcctttttggggcacagatgtgaagcataatggggaccaggatggcccatggcactgagactgtgtgctaacccctgtgttgctactcagagtgccctgccagaaggacagtagtgatgaaaagccatgcatttttcatatgtgaacagaaggcaagaagttcccggataccagcctccatgctgcttttaaagccctctgtctccagggatgacagcctcctgccctctttggaagctgttgagttaccatccagctacctaattgtccataaagaggaagtccttcactctcctgagaaacatgcacgtgaggactggggaaccaacgcatgaatgcaggtgactgctacctcctccagagcccttctgacatggtcacccaattcaagcatgtacagaggacattcatcaattcaaatgtccactggagaaaaacctatggcctcctggccagcggctttcctcctttcctcagcccattaacccactcaaggctttctatgctttaaaaacaaatgaatgaacaaacaccatgaaatgctccttcccttcatcctgcgtccatctagcaactgccccgcctcccttccccttcagagccaaacttctaacaaaagagtctgcactggtcctggcccgtgctgtttcctcactgcccatttctgtctctctcctgggaccagcactcacccccaccacttcccggaactgcttttgcactgaggtttcaaccatcgcccatttgcccgtgattctcaaatcttccccgtagtctcaaactctctcctcacctctcatcctacatttccagctgtctagaaggcatttcctttgggttatctcctgatcactgaacatgcttaaaactgacctcattagttccccgtaagctctccagcttgcctgaattctcgacagcagggagtgataacctcgcctccaaagctcctctggctagcactgctgaaatctcactcttttgcttactctttagcctcagtttcctcatccttaaaacagggataataactcagaacctgaagggtggtttataaggggtataaataattgaggtaggtgcctggtaccccatcggtagtccacagattatagccattattacccttgactgcttcctctccctcatgtcccctacccaatcctgaacaagtcctggcaatcccacctcctaaataggactagaacacaatcatttgtctccaggcccactaccctgaaacacagacaagtcattgtagattcttgcaatcaccccaaggaactccccagaatccaccctctcctgtaccaatcctatcttccacccgaccaccacactgagctttcagaaaagcaaaccttgctgacatacaactgcttcaaagccttccaaacatctgcagtgcctacgggacacaagtccaaaatctttaacgtagtctccatagttctttgtgatttggcacagcactcctccaaagctatccccagaagcttctatgctctgtcactcctgtgaacctctgaaaatgagctacccctcatcctatccattcatttcacaaagctctactgagcacttactatgtgacaggcagtgtgccaagtgccatcctaaagagtttaccatctgctggtataggcagtgctctgcaaaggacaggatgccaggggggcacagaacaagaggtcatgggtacaccttcagcagtgagccaaaaaaagagaggatggcaggaacaagcagacgtggtcaaccgggacatccttgacatttctctcttgtcgtagccttgtgaagtcatccttgaatgtcaagttaatcatttgtttctcttggctcccacagaccaactgaacagccctctccaggttttcacatctgccttcccactagctggtgggctctttgggagaagccatcgtgtttttccagaagtggagactttaggacctgagggtgctcagtgaatggataaaaagaagttggttctagctttacatgcatgcaccatacatgtgtgtacaaaatctgcccggaggagccttccagactgcccacactaggccaggtgtgggaggtctggaaggctccccaggcagattcatgcacccccattgtctgagaagctctcgatttcacagtctcagctgtcaatcacatgccgtggttattggagtaatgtgtctcactgccattagcctgcaggctgcatgaggcaaaggactgtgtgggccatactcactgcagtgcccggcacacgggagtgctcaataagaaatccttgctggtaattgaaagtgagcaggctgcatcatctctttgttttatatctcccacagcaccaagaaccagaataagcccctcagtaaccagatactcgtggagttggacttattaaatcacatatattctcaaatgactccactgcaaatgatctcaacaagtcaggtcagcaaaggaaagtgatggtgatccaccacgtgtgaggagaaagtggatttgaattcctggccctaccagagagcagctatgtggccttggcaagtcacctagcctgtccatctctgtttcttcacctgaaaaaaaatggtcacactggattcccatgaggtgtctatgaaataaccaacacagaatgtttaatacatgcgtcatgatcactcagcatctgcttcagttattgtaattactgtgagtgtagtcatggaattcagtctcctcctggcccatgtcaccagggcccgcccttgcccccaagccaccttattgactaacttctcccctcttcccccacatagtcagtagcaatgagttcaccatccaatgaccctttcatctgagttcctcctcatccacctactcattcacagcctgggacattcagcctaggcgctaaaccccacacattcacaccaggtgtcctgagcagctagttattgagaatggcatctagttattgggccactaagcacaacacttacagatttttcactccgaaggattggaatacaatggaaaactgaaattatgctcaaagttatactcaaaaccttggagtcctggtcaattccgaagctgcctggatctttcaacagccttaatcttgcgtggtcccctgtccctgatcctggaatggcagcattgccaccccagtttcagacatgtttctcagcatcatcctggccatgtgactaaaatgcggactccaaggccccaccctaagactgattccgagaacaggaccgaagccctagcatttgcatttccctaggctccctgaggacccggatgctggggaggggctgctgcgtggaagtccaggcctgcggtgcatctgagcagagcctaggtgcctgcagggtgcagggtgcaaggtgctcactgtgcctgtggaacacctgtaactgtgctgctcagtggctccagagccccgccttctggcctttgcccatgtgaccacaggctcccgcaccctcggatccctgcctgccatgccccaaccaccctgccccctcataggagctggtgggatcccatgaagtgcagcccagccttcccgccccgaggcagggcccaggcaggcaggagccgggctgactgtagggggaggcccctccgggaaaacggcactgctgcttcccaccccacctttgcgcagcgcggagtgtggagatgcacagagtgatgctggggacacctggaagagcaatcccagcagtgatggaaaggacagacaggagtggccactgaggtgcaggagagactgtctcttgtaatctcaattgctcgctccacccagagagcacatattatgatccccattctgcagatgaggaaactgaggccgggaggtggggagggagtggtgctagatggcgatgaagggcaggctgcagaggactcccgggtctgacagtgctcatggaggcagccgcaggtgggccctgggggctatgtgggactgagtgctgcctacacactaccccattgatgttccctgcactcccagtgaatatctttattatggtcgttttacagatgatgaaactgaggttccaaaaggttaagagcattgctcagagtcacaagggtactaagtggtggaactgggcctagaattcagccaaccacacaaacctctgtggccccggtctccacctcatctcccatcattccccccagcactggcccagcagttctccaaatcctggagattctgtcctgcctgcatctttgggacaaaccctttgccctgtctggaatgtccccctccccgaactcccttgggaaattctccagatatgctcacagaacatggctttctctgtgactcgtcctcctcccactgcaacaatccaccccagcattctatttgctactccagtagcaatgatctcagtttactgtgcatactttgttttgtctttatctgtatcccatgctgggttcttacttttccagggaaagtgaccttgtcctacttatccttttatgcccagcaagcacaggcttacagaaatgcttgctaaagactgctctgtattgcctaacttgcagggccctccacagccctggcctaaccactgttccatcgttatttctgggcattctgttgactcatccatgctactcctgattgctttgcatgcagtaacagcatcacacaggacaggtgcagcaaggagcacccgcagacatgaaaggcacggttaacgctaacagcgaccagggtcagggcaagatacatgtcctaaggacccaagaagtatgggctaacactgcagttctcacatctgggtccagggaccccaaagggtccccagaccgtttcaggcagcgctttacaagatcaaatctctttttataatgacacgaagagatttttgccttggctcttttcttcttgcccaaggataccatggagttttccagaggttacctgagtgtgatgccaaggtgcgtggaagtcagaagcagatgaaagttcagctgtctaatatgttattggtgttaatgtgcaatgcttttattactgacatctttcagtaagtgaaatttttatttttattttttaattttaacacagcaaaatgtatactgtgtgtatagatagagatagagatagaatctccacataaacaaacattctttggggtcttaaataaactgtaagagtgcaaaggggtgctgagacccaaaggtttgaaagctgctcgtattaaagaactagtcagttaatcttgcttcatttgatgctccaaaatggaatgcagttaaaaaacaaacaaacaaacaaaaaaacctttcatggcatattaggttggggacagtgtggtctttatctttaaagacaactttattttgtttcttctgtgatgatggtgtaggtaccacagaatgcaaacttaggagagcaagtgtggaagatttttgtaatccatgtgaaacatcatatatctacattaacaatttttatgccctgatttttaagatctttcttctttgtttttatacaagagggtcaaatcgatgcagcacaaatagggaattgtgggttcagcttgcaaactgcctgagatcaacaactggattgtgtaagtgtgttccagctgccgtgaccaagaccccacaggctgggaggctgaacctacagaaatggatgcctcaccattccagagactgcaagtcagaaatcagaatatgggcagggccacgctccctctgaaggctctgtggaatgatctgttccaggcccctctcctagcttccaagtactgccttggtttgtggcagcagaactccaagcttcaccctggcattgtgtgtatgtatgcatgtctttccaaatgtcctcttcttagaaggacaccagtcatatcagattagggccgattctaacgccctcattttaacttaattactcctgtaaagagcctatctcaccttctgaggtgctgggagattagggcttcaacatacctttttttgcgggggagcaggaggggaaacaattcaacccataagagtggccaatgccacaaatttgagaaattataaaggaaaatggtatgggataaaattatggggctgaaatcaaggaagcaaatagcatattttggtccatggtaataaggaactagagaaggtttccagggcaaaaccttacaagaccttgttgtgttgtgttttgtcaccatacacatgagaatgttactcagggaactgggttttatgctgtgaaggtccttgctgggcctcacggaagctgggaacattgtgttgggctaagggggtgggggttattttctttaagacagccgtgctcagacagtgcaggtggggagaatgatctggacctacaagttttagaatcaattccaagactcttgcaccgaaagtccagaggaggatggaatgtacagggaaggagaaaaaagaagaaaagtggagttctccagaactttaacatcttctacaactgcagacctcaccgccatttaaagctatggcttgcagtgatgagaagtgttgctaggaatcaaatgagtttggttagtaaatttagggaatgaaatcttgtaaaaaaagacaaagtgaggaagaaaacactgccagattttgcactgttgcaaccatggtaatgacttgagccaggaacctaggtggaagttgaccaaaggaagcccagcacccaccattcctcatggccttgatgagaaaggccatggccatcaaaaagagctgcacttaaagggggagtgcaatgctatctacctaatccagcttcacataacaaattactacaaattttgaagcttaaaccaacatgcagttattattgcacaattgccctgcgtcaggggtccaggcctaacttaactgggttaagttaggctgcaattagagtgttggctagctgggtgttatctggaggctttgggggagaatctgattccaggctcactaaagttgctggcagaattcagttccttgaggtggtagggccgtggtccccattttgttgccagctgcctcctggattgttctcagctcctagaggcctctctccagtccatgcatgtgcctcccccacactctcaaaactagaaatcatgtgttgagttcttctgatgctttgaatctctctgatttccccttctgccctccgcaaggagaaagatcttcttctaaaggctcatgtgcatcctaaaccaggcatagcagagaacgcaagataatctccctattttaaggaccaccgattagtaacctaattgcatctgcaaagtcccttttgccatgtgacctcacagattcatgggtgtgacacaaggaggtcgtggtagccctgtgtctctggggaggctatctttggagactagttttcattcaccagaggattattttctggtctattctcaaaacctctcgacccttccaaattgcttttaagccacaattgacttgtcatcacagtggttcccttagcaacggcgagagctggccacctctctcccgatacagaccacacttgagtatttttccacagaatgtgcttctttccatggcatgttccaagacagctccctacctgttaggaaaaacccttcaccatgggcccccgcttgcttctccagcctcacgcctcactactgccctctcactgctgccctgttcctggcattcagtcccagcctcctccacatgcatcctgctgctggcattggcgacacctccttccccagtcctccaccctttaacagtggcttggcctttaagaccaagatcagaatgcatctcctccgaggactgccgtggagtcccccagactgagttctgtgctcccaagtggctcccagtctcattcaatgcacacgtccccaccccaaaccaaacacacgcagcccaagtaccatgtgcctgtaccagcaaaggatctccagactctgcaggtaaagccagcagcaatgcacacaaactcctaaggaggcgcctagcaagtatcaagagctcagcgagtgtcacttttgttccagctgtcactgtctatggcccaaaggactaggatagcaattgccagcccaggggacactgaagagatgccctgacaagtccctgcctgggaacagaccagagcagaagactgagcctcagctctgggagccccgccctaaggagcacaggctcctacaggtcctggggacattgcagacactgagtagaaagaagttgagtgctcacgaccatctcaggtccccaagtggatggaggcagtcgctgagaacgtgtggcccatgttattctggtctctttcttagagtctttaaaaagacattgacattggtttgggatttttgtttttctgattacagaagcaacatgtgttgaccaccaagagagcgctgatcactgctaactgcaggccctgtgtcctctggccatgttttcaagggctgtcaccattaaccacatgccacctgtcctccggctgtttccacggcacaagctgtgaggtctgtcagcctgggttagaatcccaacacatccactgatgagctgtgtcgctgtaggcaacttcctgaaacttcctgtgctcagtgtcctcatttggagaagagtggtcgtgacactgcctacctcccctcccgagggctcctctgacagcttgaggagtcaacgcaggctcaattgctcagcctggtgcctggccctaggtagttctctaagggagaggctcactattctcccaggctccaaacccttcagcacctcgtgttggatggctggtgtggggggagggccattatgaccaggtttctgctgtccctgatttggccaggtggaatcatggctgtcaaatggccatgggggactgaaagcaagatacgggggtgccacagaaggcaagaccacaggcagtgctatagaaagtgcagtgtggtgggcatgcagtgtggccacactatgcagaacccaggtgggtgtgcgctaggactcctggatctggggctcagggagacagggcttcagggcccagtctccagcagtgcgatgtgccctggaatagggtcacaggtccccagggtactcactggtgattgggctgactgtcagccttgctggagagaaatccacccacccctattcccaggataggaaactgatctgcttgggggctgcttgtctttctttgtgataggtgctgtggctcacaatgaggttctggggatagatggacctggggctttccaggaggagaatgggagccatgagtttgagcccaagcaggcacgtggagccaggagcagggcagctggaggtgctggaggccaaaacgctcaggggactgactgctgcgtgcagggactgcaggcctgggaggcaggccctgctctgggctccctgaggaaggggtaggatctggaggaagatggcagccttgagagaggctgccccacaaatgctagggtctgtgggtggggaaaagctcagacagcacagtgtaagcccaggcccagagccagccgagcctctggggcccatggctcagggaaccacagcagcaggggaccagggtctgccctgcaggcccagggaagcagccagcaggtgcctctgctttggcctttgcacaacccactgtgggtgaaggagtcagggcctgggaggtggccctgtttgcacaggcaaagagaaaggtgagacagagggaaaaggtcacattcagctctttccaaattatcttgctccaggggagaggaccaagggctgggaaaaggatggcccccaggggcctcactcttctgtgccaggccctgttcctgtgtctggcagccagagggcccattcccagagcccatctagagccagactgcccagggcgtgaccttcctcctggcaccctgccatgggagtggctgggaaagtgactgctctgtggcgtcttcatcttcagaaaaatgaagctgccacacagctcaccaagaggaggtgatcccaggccaggaacaggtggacgtcgggagtccagaaaggccacagagggtgctggatcctgtgggagaagcagcagggggtcccggccatgcccctaggttggacttgtcattcccaaccaactgcaatgggacatagacttaccttacaaggtagtgaatcgacaggttctcagatgagcctaaaattaagtacaaaatatgctggcccgccacagaccccggggtgctatccatagaaggacagggcacaggcctgaggacggcacccctgtcagtcctctctgctcaggggcagacccgaggatgggacccctgttagttcattctgctcaggtgaaaggcccgaggatggcacttctctcaatccactgtgctgaggaaacagacctgaagacaggacctaactcagtccccactgctaagggaaagagctaaggccacgactctcccagtcttctctgatcaaagccaatgagggagcaggagttttctcagtcctctctgctcaggggacagatcttaggacatgacctcactcagtactctctactcaggagcaattcataaagggacacctctccacatacatgtcactcagcaaacaggagaacaggaactctgttggtcctctcagctcaggggacaggcctgaggatgggacccctgttgggccatcttctaaggggatagataagagaacaggacctctctcagtcccatcaactcaggggacaggcctgagggtgggacccacctcggcccatcttctaagaggatagatatgaggacaggacctcgctcggtcccctcagcccaggggacaggcctgagggtgggacccctgtcggtccatcttctgatgggataaatatgaggacaggacctctctccatcccctcagctcaggggacaggcctgagggtgggactgctgtcagtccatcttctaaggggatacatgtgaggacaggacctctctcagtcctctctgctcaagggacaggactgagaatgtgacccgaatcgttttatcttctaagaggattgatgtgaggtccagacctctctcagtcctctctgctcaagggacggacctgaggatgggacccctctctgtccatcttctaagtggatacgtatgaggacaggacatctctcagtcctctctgctctagacacagacctgagtttgggacctctgtcggtccatcatctgaggggataggtgtgaggagaggaaccctctcagccccctcagctcaggggacaggcctgaagatgcgacccccgtcggtccatcttcttaggggatagatatgaggacaggacctctctcagtcctctctgctcaaaggacaggcctgaggacaggacccctctaagtcctcttttctctacgatagatatgggaatgggacctctctcagtcgactgtgctcagaagacaggccacagcacaggacctctctctgcccactaagcctcaggtacctgaagacagcatctctctcagtcttctctgcccggggacacctctcccactgctttctactcagggtcaggcctgaggacaggaccgctgtcagtcttctctgctaaggggacagaccttaggatgggatccctctctgacctcttacacagaggatgggcctgtggacagaacctctcttatgactctctgcccagggatgggtctgaggacaggactcctctcagtcttcctgctcaggggacgcctgaggatgagacctctcagttttgtttgctcaggggacagactagaagatgggacctctctcagtcctctctgatcagaaagagacctgcgggttgtactctgtcagacatttctgttgttctgcacaggggacacctgagtatgggacctctttcagtcctctttgctcatggaacaggcctgaaaatgagacctctgccatttctctatgatcagggacagagctgaggacagcacctttcccagttcccaccgctcagggtttggagagaggcctgtctgctcaagagacccaactcagtcctctctcgttaaggaacaggtcttatgatggcacccgtctcagttcattttctcagaggtatacctgtggacaggacctctctcactcctctctgctcgagggaaagacctgagaacaagacctctctcagaccactttgatcaggcacaggcctggtgacgggacctctctcagtcctccctgctgaggggacaggccttaggatgggacccctctcagtcttgtctactccgggacagtcctgaggacgggacttctctgagtcctctctgctcagcctcacccccatgattgggctctgatccagctccctcatccaccgctcaagccctctgtgagcccaggaggctgctgcttattggatgggcttggtcagcccttgggcacccaggaaggcaccttgatggacctttctgtccccaggccacacatgccgccctcctcaggggcacttgttgaggactgtgcagcaaaacacaatgcatggtaggagctctgccagctggcacgcaccaagggcctggctgggatgaaggggacaggtggccccccgggggggcccgtccttcaggcccgacaaagtctccttgctctgggctggtggggaagcaactggtttctcccggtacctccttccagactccctggctagatcccttccgggtttcacaacccaactgtccagcctgtgtgctcacatgcccactgacacagtcacacacacattcactcacacactcatgttccagacacactcacatgcgcacacacattgagtgacaaacacacattgaatgacgcattcatgcctgctcattgacacacccacatttgcagtcagcgcacgcacgcacaatgactcacaaactcacacacacactgacacacactgacacactcacagtgtcacacacattcagcgacatgcatgctcaccttcaatggcacagcctcattcccccacaccctcccactcacacacgctcagtgatgcagtcacatgctgtcacttggattcacacacattctcagaaactcatgcacatgctcacactgacacacacacgcacacgctcaaacacacccgctcactcacactcacacctgctcgggaatcacggcacacacaggtccactctgaacagggaaaaccaaggagccctgacaggccctggcaaggtcagccaagctctatgccctctcctcttgccctgtccccaaaatctggaggggcccttggaaagtgagcagttgacttggccctgctgagacacaagggacggacatgctggggttgtgcccagcctgaagaaggcagggagaacagaacacagtgggggccccaggcatgcctgcagggcaccccgatgggacacactacaagggtccctgagacaccggttaagcaccttcaggccgaggaggctgcaggcccagccccagagacctgccgccccctgcccctccccgacagccccgcaaaactacccctcccatgcctgcactggcctgtgtatgccgagtgtctcccagggcccctgccgccctgcagacctgctgactgcagctccgctcaagcagacaggtcgcctagatccaggattcctcagcccaggtgggcagccacccattcccagcattggctctgaggctgctttgggggagcctggctatcatctgagccatggggatggccggaggctctgtgctccagaacagccggaggaagtgtgtggacacagactgagtgagccccgggagaccctcgccacgtccaagtcaatgatcccgtcccctccccacacatgtgcagggaggggcctatcacttgtcccagttctgtcgcccacagactctgcgttagttaaatggctgatcgaggactaccctccatttgtagcgagctccctggcctgttgggagagagagccagtcccaggagggctcaggagggcgggttccaggatcctcaggcccccatcaagaactgcgcctctggccacagtgctcaaggaggattgctgccctggggattcaatcagccactgcccatgaaaaccaacatcctgtcgccaggctccatgcagcccaaagaaccccacaggccttcagggaccctgccctgcacacaccccagtgtcagcctggccactgtggccctcaccccacccaaccccatgcccagcaaacctcatccccagtctcccagagcagaggcgaggccggctggaacactgaatgaagtttattgaagagaaacatgtactgaaaccattgaagagaagggaatcacaacacagagagaaactgcaaattgccaccacaggacacaggtcccacacaggtcccgggccccctcctcctggggttcctggcaagacgcctcatctgctcctactcctgctgcagcccccgctgccaactccctccttcctgagggccccagggtccgcctcttgccaggatggtggactctggcagtgtccactggcttcagggagccccctcccgagcccatccgctggggcagggccctgccctatagccctcacaggacactgaaaacacagcagggaacacccccccaagtcaaggaaactgagtcacaagtaacaacaggaatagaacaccaaagcacaaagctccccggggagcctcaggcagggcagctctgctctgtcccaggtccggttcttcctcacacagtcatggtcaccatcatggtcacgggcaccatcgtggtcatgctcaccatagcagtcacaggatgagcgtccatcgtgccctggcgcctccttccaccatctcccaggactgtgctgggggcctccggggaggagctgctcagagaagaacacacacagctccacgagaacaagcagcccctggcctagatctacaccaggaaagcagaggtggtgctcacgacaagggacaggtagcagctagcagagcctgggctagcaggaagctcacagcatgtgccccaggcccagaggcagccgcaccgatgggcgcacagcatacaactttgtgtaggaacaatggctagcggtgggtgagtgggcgtctgctgttcggacgcgtgggtcactatggggcctacagaggtgagggtgggcttcccggaacggggggcagtctgccccagggatggcaagtgggggccacctcttgggacatgtaggcagctgtcacccttgagagggcctctttcccccatctctcccaacacaggacaaggggtggggggcagacatcttcaggctggccgctcagagctccctccaggccagctccccatttggtatcaaacgtggtcatctgagtcactgggaagggctggtggtggtggccaggacccattaggggaggtgggaggcacagctcccaacatggggtgagggaccggccctggcctggcctctgtctgcctccagggtgctgctgcctgagaggagaggagccctcagggccctcagagcctatttgcccgggggggacttgggcttgcccgcctccccagccccatcctcatcctcgttttctgactcctctaagatgggcttgagcccctcctggggaggctcctcagcctcctggcctccaacctggacaaggccctctggctcccagctgggacctcctggggccatgtcgactgcactgcccatcctggctgggaggcccccaggggcgtcgggggaccttccctgacctaggccttcaaggcctgcaggggcattttcatcttccccagtggcaggggcaaccctggcggcctctttggtggtggaagcagcctcatcagcatcttctgctccgggatcagcctcgctggcgtccccctgggccggggaggcctgggcagcagctgggtcttcactctccactggggccgctgcccaggccacaccctgctggctccttgctagggaggctgcccacgcctccatgtcccggatgagccgcagcagcctcaggaagtcaggtggcctcctctccagctgcatcctcctcagggtatcctggagtgcctcgctggggcgggcccgagacagcacctgccgcagtcgcaggtggttggccatggctgggtggaccgcccccttctccacggccttctgcagcaggccttccaggcgcaccacgaaggcaaacagcccctcctggggcccctgcgtgcaggtcaggaacttcatccgcgaggtcatccatgtatcccggctcctaaacacctgccccagcgccgtcaggcagtcctgcgcagagaagtctggatcttcctccaggaggccgctcacgatatccagggccaggccatccaagctgtccagcagccgcctccttctctccctttccgacgcgtggcaccacagctgcagcatatccttggcgtcctccaaccagctctcaaaggactcttccacgcagcctggctgctccctcccggaaaagggtctcagttcccggtaggccatagttttcaccagaggccgcagggtctggcgccatgactgggtccaggcctccaccacacctgcacctactgcctcacctgcagctcctgcctcatcttcacctccttcctcacctgcgcctcctgcctcacctgcacctccttcctcacctgtacctccttcctcacctgcacctcctgcctcacctgcacctcctgcctcacctgcacctcctgcctcacctgctgctcctgcctcacctgctgctcctgcctcacctgctgctcctgcctcacctacacctcctgcctcacctatacctcctgcctcatcttcacctgcagatctttcctcattcacacctcctgcctcacctacagatcctgcctcacctgcagctcctgcttcacctgcacctctggccactgcttgcccctggggctgtgcagggaaactgggtatatcctgaaactcagcatcaagggcctggggcagggagatcactttccagggtccccctttgcctgctatttggcggggaatcaagctttggtttaaaccctcagcgaattccaccaaggctgccctggccccgagctcctttctgaagaccttgatgagcactcggtacctgcccaggggcgacagggcagcccgcacggcctcctggaactcatgttcctcgcagtcgtcagggatatccaggatgagcagagagcgctctgcgttcacacccatcctcctgcaccagtcctgaagcatcgccagagctatcgcagaggacttgagggagggagcctgatcagacaggaatgtgtgctgactgttgcagtctctgacgcagcctgtgagtgcaaaggggagagagggacgacgttgctgccaatcaacccacccccactacaggcctttgccctcccctcccaagcactgcagcagccagggatccattccctcccactgctgcagcccatgcacccccaaagccctcccccagttggtgacacttaatcccttggcacacacccaccacctctattgggagatccccttttgcctgagctgatgtccccttatcacaccacaacaagtgcacctccccctcccaccatcatctgtaacattgcagccaggagtcctcccctatccaagcccctgcaacaggtagctcttcccccacccagaatccctgcggccagtagtcttcccctacacagatctttgcagcctggagttcttccttacccaaactgcagaagggaagcagagagacctcccccgtctcttttccagcgccaaaccaggagccccctccctcttttgatcttcctcttttgatcttccgtgtaacctggcaacccccctccgcgccccccacacctgcagccagaagtccccttcctcccccgaaagccagagcccccctctctcccaccgtcccctgcacctctgcaacggcagcccaccctaccccccacccccgccccaccagactcctgcagccaggagccccctcctcctctctctgcgggccctgggccggaccgggaccccctctcgcgcccactgcggaggcagcgatctggcacctgcccagggcgcccgcggtcactctggggtcccgccggagcctgctcactttctccgactctgcggacgctgcgaccacccgcggaaaaacgccgccttcaagctgtggagcccactctggaggccacctagaggccctggagcaggagggtggaagatctcgcctcagtcacgcggccgcgctgcgcagcgcaggggtctccaaagcccgctgtgctaagactacagggcttcccgcttctcccagaagccccaggtagatgaggaagaaaaatttcgtagtctctgtggaagacaagtggctagacaggaggagacatctgtgttgccctggcaacgggacctgcatggtaagggcttaatgttccaaggcttggagcctctgggagcaacaggcccaccgattggccctccaccatcaaaatgacctccatcagtaattgtggcaaattgctgggatgggatggactagaagtcacgaggaggagatcctaagaccaggtccccagggtattcacagcctgccctgctcaggcctggaatccctacaacatagattgattgctggctgtgttcctcataccagctctttaccggctggaggccggccttcaaccacctgggcagccattgcctaggaaagcgtgtgggctttcaatcagacagatgcagcctcacctaacagctaggtggcctatatctgtcagtgaacatgtatgcccatcatctggaaatgggcaataaaacacttgcctttttatatattgctggatatggatttctaataaatagttttcctatactgttcttgagggatatttttctgtaattttctggttttatatcatctttttatcaggatttaggtttgtactggccccataaactgagttaagaattgtttcctgctcctctattttctgaaactgttgtgtaaaattggcaatttttgttccttaaatatttgctggagttcacccatgaaatcatctgggcatggatttttgttttatttttagaaaagttttttgttaataaatatatttatgaagtatagggctatgtgttttttctattcaatccattggaagttttggtaaattgctttgtttccaatgcatgtgtcaattttatctaagttgtcaaaattattgtcataaagttaatattccctcactattcttttaatgcctatataacctctaatgatatccctctttcacggctgatattaatgattattttcttttttcttgattagccttcctaagggctacacatttggttgctcttttaaaatatgtgtgatttacttacttttagtttgttttctattttattgatttctgctcttgtatctctattatctccttccttctacttattcgagatttactttgctattccttttctagcttctttaggtggaatgttttgtatatttactgatttatattaaatattaaatatattttatatatttactgatttcttgtctagtggttatatcagttgctgaggcagagatgatgaaatctccaactataattgtggaaatgcctagttgttcctttatactgtcaatttttgtttcatatattttgaggctctgttattgggtgcaaacatgtttatgagttctatgtgtttctgattaattgaaccttatataattattacctttatctcaggtgatactctttggaactccactttgtcggctattaacatagactttcccactttcttatgcttgccccttgcatggtatataatttacaacctcttactatcaacccatctgagtctgtatattaaaattgcatttcttggagacagcaaaagtcttgctcttttattcattctgacaatctctgccttttaattggagtgtttagcccatttacattgaatgttatgtttgatatatttggatttaggtctatccttttactatttgctccatctgatttttgttcccatgttccccatttcctgcctggattaatcaaatattttttgtaattcacttttaatgtatccgttatcttcttagctatatctctttgcatttttgtagtgctcactctagagattacaatatatatatatatatttaacttttcactgtcgacttaaagttaatattgtgcataaatgtaagaaactctccatcatatagattcacttccattccacctcatcctttatgagttgccaaaccctagtatatactattaaactgtttactttaaagtcatattattataaagaaattaagggcaaataactattcattaatatttacccacacatgtaccatttcctgtgttcttcatttctacccaaagatcaaagatttcctctagtttaatttttcttcagattgaaagacttcctttagtatttcttttagtgcagttctgttgatgaattttcttagctttcctatatctcaaaagatatttacttcaccttcattcttgaatttgttctatttccctagatatagagttctgtattggaaggttttttttttctttcactgttttagaaatgttgctccactgtctccaggcttccattgtttctgatgagaattaagttcttaatgcactcccatatgtagagtcattttactctgactactttcaagatttttcttgcccttctttgttttcagtagcttgactacaatgtgcctagatgttgctttcctttgtaattatcctctttgtggttcaccaagtttcattaaatttgtaaataatggatttcctaagaaaaatgatactagaggaatttttcagccattatttcttcagatagctttccttccccattttctctatcccatcctggcactcaaaatacacatttgacctttatatattgtcccacagaccactgaggttccattcgtttctattattgttcctcttggtttatccgaatagatcatttctattgatctagcttcaagttcatgactcttctgtcatctgcaatctgttattaagacaatccattgaatttttcactttatgtttttcagttccggaattacagttggtttgtttctcttttttaaatttttattttaggcttaggggtacatgtgaaggtttgttgcatagataaacacatgtcatataggtttattgtacatattattacattacccaggtaatagttatcttttctcttcccctcccgtcacacaccctccatcctcaagtagaccccagcatctgttgtttcctcctttgtgttcataagttcttatcatttagctcccacttataagcgagaacatgcagtatttggttttctgttcctgtgtcagtttgctaaggatgatagcctccagcttcatccatgttactgcaaaagacatgctcttgttctttttatggctgcataatattctgtcatgtatatgtaccatatattatttatccagtctgtcattgataggcatttaggttgattctgtatctttgttattgtgaatagtgctgcagcaaacattcacgtgcatgtgtctttagggaagaatgctttatattcctctgggtatatacccagtaatgagattgctaggttgaatggtagttctgcttttacctctttgaggaatctccatactgttttccacaatggttgaactaatttacactctcaccaacagtgtataagtgttcccttttctccacaacctcgccagcatctgctattttttgactttttaataatagccattctgactgatgtgagatggcattttgttgtggttttcatttccatttctctaatgatcagtgatattgggctttttttcatgtgctttttggccacatgtatgtcttcttttgagaagtgtctgttcatgtcttttgcccactttttaatggggttatttttctcttgtaagtttatttaatttccctacagattctggatattagacctttgtcagttgcatagtttgcaaatattttcttccattctgtaggttatctgtttactctgttgatagtttcttttgctgtacagaagctcttaagtttaactagatcccacttgtcaatttttgtttttgtttagattcattttggtttctttgtcatgaaatctttgtctgtctctatgtccaggatggtaattgcctaagttgtcttccagggtttttatagtatggggttttagatttaagtctttaattcatattgagttgatttttgcacacagtgtaagcaaggggtccagcttcaatcttctgcatatggctagccagttgtcttagcaccatttactgaatagggagtcttttccccattgtttgtttttgtcagctttgtcaaagatcagatgatcgtaggtgtgcagacttatttctgggctctctattctgttccatttgtctatgtgcctgtttttgtaccagtaccatgctgttttagtcactgtagccttgtagtatagtttgaagtcaggtaatgtgatccatccagctttgttctttttgcttaggattgtcttagccattcatactctattttggttccatataaattttaaaataatttctagttctgtgacgaatgtcattgatagtttgataggaatagcattgaatctgtaaattgctttgggcagtatagccattttaatgatattgattattcctatacatgagcatggaatgtttttccatttgtttttgtcttctctaatttatttgaccagtgttttgtaattctcattgtagagctctttcaccttcctggttagctgtattcctaggtattttatatttttgtggcaactgtgaatgggattgcctttctgatttggctctcagtttggttgttgttggtgtataggaatgcttctgatttttgtgcattgattttgtatcctgcaactttgctcaatttttttatcagctgaaggagctttggggccaagaccatggggttttctagatatagaatcatgctgtccgcagatagagatagggtgactttctctcttcctatttggatgccctttatttctttctattgcctgattgctctggctaggacttccaatactatgttgaatacaagtggtgaaaaaatgtatgcttgtcttgtgctggttttcaagggaggaatgcttccagcttttgcccattcagtataatgttggctgtggttcttattattttgagttatgttccttcaatatctagtttattgagagtttttaacatgaagtgatgtcgaattttatcaaaagtcttttctgcatttattgagataaccatgtggtttttgtctttagttctgtttatgtgatgaatcacgtttattggttttcatatgttgagccaaacttgcatcctagggatgaagcctacttgatcatggtggattagatttttgatgtgctgctggatttggtttgcaagtattctgttgaggatttttgcattgatgttcatcaaggataccggcctgaagttttctttttttgttgtgtctctgccagattttggtatcaagattatgctggcctcatagaatgagttggggagaagcccctcatccttaattttttggaataatttctgtaggaatggtaacggattgtctttgtacatctggtacaatttgtctgtgaatctagcaagtcctaggccttttttggttggcaggctatttattagtgattcaatttcaaagcttgttattgatctgttcagggaatcagtttcttcctggctcagttttgggtggatgtatgggtccagaaatttatccatctcttccaggttttctaatttgtgtgcatagaggtctttggagtagtttctgatggttgttcttagttttgtggggtcagtagtaacattcccttaatcatttctaattgtgtttatttggatcttctctcttcttcttaattcatctagctggtggcctattttattaattttttcaaaaaaccaactcctggaatttcaagccagtgggttttatcttgtgaggtgctgtggaagtgggggctacaggctgttgctgctcagccccctagattcagcctctttcctaggggtatgtacaggagtctaaccttccactttgctgaagctgcaactacttttgccggaaagcccaagtatctaaggttccaggttctccacacatgcctgagcagctgctctgccaagagccatggctctgtctgtcagactgaaaactgaaaggccctggtggagtgggttcacaaggagatctgctgacccgagggttgcaaagatctgtgggagaagcgtggtttcctagagtcgctcattcactaaccactttcctgggtaggggaggatcccctggctctgtattgctcccaggtgggccattgttctattttgcttttctttgttctctgtgggtcaagttgtttccttgattaatcccaatgcaagtacctggatgtttcagttgaaggtggtgtatttactcaccccttctgttcctctctgtgagagccacccatactacctgcttctagtcagccatcttggccactcccccaattggttcttttcaatagtttctttttctctactaaaatttcctatttaaaacttcattgttattctcttgggccatgtttgtatatattttacatttttacacttttaccttttacatattacacataacatttacatttctacactacacaattggttttgtgtaaatcataataaacacatcagccaaagtgataagtaggttggtgtatataattcattcattaatttattcatagatccacccattcaacaagcatttacagtgcacctactgtgtcaggcattattctaagtcctagaaatttagagacaaattagaaatagtctctgttcttaagaagctgccagaatggtaagaagaggcaggcatgtaaacaaatttagtaatacaatttactgggggtagtgatagggtatgtacagagtacagggggataccaagtgggcaggtcatacctggaaagggtcaggaaagtcctcacagggaaggtacaccttgcattaggatagaggaggaaagatagaggtacatatcaaaaacgtagcaaacaatcatcaaatggcttgaagaacatcagggagaggtgtccagtgagcaggtggacattgagatttagaaagcagaagttggtcccagagagccaaacctgatggcatttagccttaaggtggttgtgtgaagctgggcgtattagtctgttttcatgctgctgataaagacatacccaagacgaggtaatttataaagaaaaggaggtttgatggactcacagttccacgtgaccgggaggcctcacaatcatggcagggggtgaaaggcacatcttacatggcagcaggtaagaaagaaaatgagaatcaagcaaaaggggaagtcctttataaaaacatcagatctcatgggacttattcactaccatgagaacagtatggggaaaactgcctccatgatttaattatctccctccaggtccctcctacaacacgtgagaattatggagctacaattcaagataaaatttgggtggtgacacagccaaaccatatcactgggtgaggggctgatatccccagatggcaccacaggtagcctaagaggatgtgggtgaaatagagttgttctgagccttagtcagtgaaggagaccggaaaagaatttgttggaactgagggccagaagccaagcctgagacattcagagcaagttttacctttatactttatactttaaggacggaggctgtggactcaggccagccatgtggcattgaacaaactacttaaacactgtttggctcaatttccataaccatgaaacagaagtaataataggacctgcctcaggactattgtaagaattagatgagataatatttataaaacaatgtctggcacatagcaaacaatcatcaaataatagcctttgttatcaatttattgttttaatggatatgaaaaactagagaattaattttaacccctcaatcactagattgtaacacagatgcattcatttatttgagaaatatttatgaagcatctactatgtgccaggcatgttttttggtactatcagggagaaatcaatatctatggtcttaagaccttaacctggtgttaagatctcaaaggatctacgaatcagatggggaaaaatgcatccttatttttactaaaataactaaactttagtgtttccttcaattatgaatgtaggcaacaaaccacaacagtatcggcaatacatgtgactttgtcaccaacagaaataaatattttcatatcacattacagttattgccaatagctagacacatttgctggaaataacatttcatcaatttatggcattggtaaagaacctttaagtactgctgttttacttgttaatgaagaagcacatatatcaatataaaaatcattatgagcatgctttatgttctcgactatggtcagcccagggtgagtttcccttggatgcttttttccttgagtatcaggacaattcttgtttcttgtagtaatctagcattatatcctagacactgtccataatgaattctagtagatttggcttcttggtttctgttatatttctccgaagatgagtcattgtttgttattgttgttgtggtggtggtggtggtggtggtggtggtttgttgtcttagtagacaactaaactagctaaactcacatgaagtctcctctgtattgggtaccaactgcaatctccagactccgtttctttggtattgggcatcagctgaaacctctgctcagttcttttcttggactcagccctgtgcttgcatggctccagggtcaaccagagatttgggcagagtgtacaggccaaacatggagctcctcaacacggtgcttctctactcccaggtattgcccctcctgctttccctctgccatggccaccctaaaatctgctctctgggtctctgagttttagccacccagcacagcatcctctgtggcccacactcacatgcagacaagcaagaaactcacctttgcagagaggaacaagattacaaatctcaccgcagtgctcagcagttcaggctcccctgtggctcccaccaatgactgggcagacattgcaagactcgggatgctgccaagagaaccacggctaccagtgcttctcagggaatgggtggcacgacgcctgccaccagcagcccagcctgagtgaaatctgtggggaccctgcttcttcccacctcgggcctcagactcagtggatagtaggttcatatgattggtggagcctgagttaggtgcccatgctgtagctacaagagaagctgggagagtgaatactaaccatctttgagatctagagtgggaggcaaactctacttcatgggataggcaatgccccaaacaaagaatggttaatataaaaatgattgtcattgtctactttatatggtattaaatggacagaagaaagaagagaaacacagattaagaaacaaataaaacacacagattaccaatatcaggaatcagggtggtgttatcactgcagataataatagaacattgtgtacaattttatattaataaatttggctacttacatgaaatgggcaaatttcttgaaagatacaaatagcaaagctcagtcaaaaagaaatagatacaggcatacctctgagatagtatgccttctgttccagaccagggcaataaagcatatatcacaataagccagttacccaaattttttggtttcccagtgcatacaaaagctatagcctgttaagtgtacagtagtattatgtctgaaaaaaaatgtactcatcttaattttaaaatattttattgctaaaaatgctaatgatcatctcagagtttggtgtgtggtgagggccttcttaccatgtcctcatatggtggaaggcagacgcaaaacagcaagctaaccagatgctgcatgaagcctcttttataagggccttaattccattccgagggagtagccctctggtctaatcaccttttaatagatctgggtctctccctcttcttccttctgtccatttaatactatataaagtagacaatgacaatgcctcacctcttaataatatcacattggcaacacctgaattttggaagggatacattcaaaccacaacatccagtctcaggcattttttcatggcagtgcaaatggactaagacaatttccaaataattttgttgagtgaaaggaaccaaacacaaaagaagacttattataacattttattatataaaattctagaaaataccctatagtgacagaaagcagatcattggttgcctggggacaggagaggagaagagaaagggatagtcatgggcatgaggaaactttgaaggtgatggaaatccttattgccttgattgtggtgatggtttcatacgtgtgtgtgtgtgtgtgtgtgtgtgtgtgtgtgtgtgaaagcttatcaagttgtttagctgaaacatgacaaattcacagtttattgtctgtcaaatatatctcagtgtaaacagacaacctacagaatgggagaaaatcacctgacaaaggtctaatatccagaatataaccccatcaaaaaatgggcaaaagacgtgaacagacacttctcaaaagaagacatacaagtggccaaaaaacatatgaaaaaaatgctctcatcactaatcatcagagaaatgcaaatcaaaaccacaatgggacactatctcactccagtgagaatggccattatttaaaagtcaaaaaataagagatgctggagagactgtggagaaaaggggatacttatacactgctgatgggaatgtaaattatttcagccactgtggaaagcagtttggagatttctcaaacaacttataacagagctaccatttgacccagcaatcccagtactgggtatatactcaaaggaaaataaatcattctaccaccaagacacatgcacctgtatggtcatcacagcactattcacaatagcaaagacgtggaatcaacctaggtgatcatcagtggtggattggataaagaaaatgtggtaggcattcaccacagaatgctatgcagccataaaaaaagaatgaaatcatgtcctttgcagcaacatggatgcagctagaggctgttatcctaagtgaattaatgcaggaacataaaaccaaatgccacacattctcatttataagtgggagctaaacatcgggtactcgtgcgcataaagatgggaacaacaaacaatgggaactacaagaggggtcagggaaggaggggtcaagggtttaaaaactaactattgtgtactatgttcagtacttggatgacagggtcattcgtaccccaaacctcaacatcacacactatacccaggcaacaaacctgcacatgtaccccctaaatctaaaatgaaagttgaaaacataaaatttctcaggaactacatgtgtgtgtatatatatatacatacatacacacacacatatatacacacacattgcacataatgggctagctttctcttttgtctctctctctatatatacacacacacatatatatacatatatatatactgcacataacattgggcaaactacttgaacagacactttacaaagaaagatatagaaatggccagtgagcacataaaagcatactcaacataattagtcatcagggagatgataattgaaataacaatgagatgccacttcccaccctttcaaatggctaaaaataaaggctgacaacctcaaatgttgatgaggatgggaaagaaaaggagctcgcatacatttctggtgggaatgtaaattgcacaaccactttggaatacattctggcagtttcttataaaacataaaactatcctgtgatgtggcaattcatctcttaggtatttgcccaagaaaaatgaaagcatatgtccacacaaagatgtgtacatgaatattcatagtagctttatttataatcgcccaaactggaaacagcccagatcataacctggtgaatgaacaaaccaactctgatatatccaaacaatagcatactactcagcgatagcacattcaacaacatagataaatcttgaaaacatcacgttgaatgaaagaatccagacacacaatagtacatacgatctgattccattcatacagaatactggctttccagtcttcgccctcagttcccgacccttcactccccccaccaccatcttgaagatgcccaagggggagaggtcccttccattccttcgttccttccttcgtctgctggtcgatttgttcgctcgttcattcattcattcgcacgctcattccactcctccccacctccacccaagcgtccagcccgcgcgcgccgctcccccgcaggctgatcagacttgcctgcccagtccgcccccgcccaaaccccgcccccttcccgccacgcccccttcccgggccaatcggggacgagactggggccggggcggggcctcgctccctcagaacccccggcggcgctcacggctccggaaacgcgccgcggggctgttagctcggctgggcacgggcggctccgtggcgcttcctgccacgccaggcctgcctgggccgcgccagcgccgctccaccgagggccgcgcgtcggccgccgccgggcctgggtgagtgtgcgggccgcgggaggatgtgcggggggcgctggaggggccgcagggcggaggtgatcgtgggggcggcaggaggacgtgtggacctgagtgagcgtgcagggccgcgagaggatgtgcagggggtgcaggactgtgtgcggggctggagcgagtgtgcgggccgcagaagagtgcacggtggagggagggggcgtctctgggcagttggagagctgctcggccttgggcgggccagagcagggaacgggtcccggatgacgagtacgaagaggcccgaaggccttcccgaggcgggcggggggcggcgatcccgggtgggaatcgctaaagtgtagaggcctgctctgctctttgggggacgctaggagatgggaaccgctcaggggcggagagaaaggacccctgcccctagctcctaggagcccgatctggagggggcattgtaggggtgggggttaaaggacttttccctggtctaggggagggactgagccgcagtctgggagctgggagggtgggccaggtgggaacagttcccgctggggagtccctcctttccttttgagtgggtgggagtgggggggggcggttaagcctcagcttggtggggagaatgggggccggtaggtagcctagagagagagctgtggagaggcaggggaaagggggcggtgagccgagctcaaggccctctgtctgaaccagtctttttctgtcgccctactgggggccgccatctcccacttcagtgcccccgcccccttaaactcctttgctggctcctccagtctatatttgggtgattaattatatatcttttccacacacaccccccactcgcctgccgcccaaagtccatggtccctttcaaacaaccccctgcccccattcctggcccacttcccagaggtcccaccctgccaccttgttccaactgaagccctccagccagccttgacctagctgggcatgcggccccctccagtctccttagtcaatgaaacatttcctcttcaacctcagcccgacatttttcctttacaagagaatttcagatgggattgctggaacagcacctcccctaggtactaatgctgcctcagcccctccccaccctcaccttcccccaaccctgcaacattggaccttcaagtagaagccacttgcacagtatctggcccagttcagtacatccccacaaaatgttactagggggatgtactgaactgggtcagacactgagttttatatatagaaccctattgagcagtaatttgcagccttctgtctgtgagggaccccttggaaatctaccagaacttgtgaattctcttctaaccatcagcacagactcagagatagtgggctcccatttcagcaggttcctgggcaggaatcctgtcagtaacagagattctgagagttggagaatctgggaacctccagattctagacaggcccagtgttaaggaggtgcagctctgcatcataatctcctggggtgcttgttgaaaaatgcagactccttggtctctcccaaacctgcgaaactcccacatgagttcttagtgaactccacaccaactttctcacccagtgatccagcccttacccaaacctgcctgggctccttggatggccctgggctctttgcaatttgcatagcatcccaccccacccccaatttcgacctttgtatccaggcgatgttacctaaaggaagctatacttaaaatttatttcgatttttagtaagatgccatgaatcttcttggagaaatgggaacacaaagctttcctcaattaagtacaacaaacactacaaaatccccttctggtctaccttctggctttttatagaaaggaaataagatagaaacccaaacagaaagagacaggtgcccaggcaaagtgagaggaaacagatgccttcccacccacacatacagaaaaaggcacacacagacacaaataccccaagagagacagactttcctggtgagacaccctctctttaggcccttcaggattctgctacttcgagtagcagcctgtttgctgctttgggacgggacgggatgggcccacgtggggccttcacttccgcctcctggcctgtcaggtggaaagaacatgaaggccaggctcagcgtggcccagggcttggctcaagggttgcatcctggcctggctagggtggatccagatcgtggcagtatatattcagttgaaccctgtatctggcccagttcagtacatcccccaaaatgtgggggacatgttcctgggaggtgcacacaggtctgcttctgttcacctgaattattgcaatccaacagatggggccttacctgccaggctgatcccttggagtagttctgaggcatgatgagtcatccgtgtgtgtctcttttgggtaagtctgggtgtttatgcatggtgtctgctggctttgacgctgggcatgctatcagaagaccctataggtggggttacaacatggtgaggagtatcgttttggttccggaagcacttatattttcatctgtgccactgttgctgaactgtctttgcccagagacagttctctcaatccaagcaatacaactcacaggagaaaagatattcaggaaagagaatctggagtctaatctcccttttggatgggagagggagctgaaggcatccatctgaattggatcttttgtgagtggaaacctttgaagacacccgttgctctggcctagaactgagcagaacacaagccacctgttgtcttctgggtaaactcaagctttagggcctgaggacattctgctccaggtctttatttagatgcttcagagagtccaggtgtttctggcaccccttggaagcttctggaaccttccagaggagccttatttgggtggtcttgctgcctttcccctgcccagggaaggacagcgcacctgttagagaatgttgcttggctatttgtgcgataaaatcagttgaacgctggtctttaggctcagaagctaccgttagccagtagccaaacatccagcagtgaggcagggatgttcttaatccaaaggcaaccagaaaacatctcattattactacattttgtgacgtgggttgttttttgtctctgttgagttcaactcttcatttctgttcttccacatcaaagtggaatgattattttgagactcttagtgttttctgtttccatgcagtaaatttgatttaaataagttggttaaaatttacattgtgatctaaagcacgttagcaggaagatttgttcactcacatgagctttcatgttttagaaagcataatttttcaaattatcaggcagtaggttgacattgacatcactattttccatttattctagcagatgtttgttaaacagctgcagtgtaatggtgcttgcctaggtccagtgtgcaattcacagctgaccttgacagggcctttgctttctgggagtttatagtctttagactatcttcagatcccattgaaagaaggagagtaataccacttacgttaagggttggaaatgtgtttttccacagtatttctttgagctttcatatttcccagttgtatgtaggagtgcaccctatgagattcaggacatgcttttgtgctgtgagtgaaagtgcctcacttcagggtcagcattaccctgtgtgtccattgggtgtgcattacaatgattttcatgttctgtctggaattccttcgaccttgattccccaagatccactgtcagaaggcagtggacacctgcgtttgtcacttttgtcacagcatccagcttcttttcctgattagttccaccattttaaaatagaagagttgtgcaacatggaccctaaatgatccgattgtctctaggattgatgataattttattttgaactgcagtagggattaatgtgttatctttttttaatgatcttcctttgcttctcatgcagctcttttacctgatatacttgattgattaattatgcagagtttcgtttccttttgtggaagcagggcccacttctttcctcccatttttatgagtaccttttaaatgatctccgtgtccagggctctgtcactgtgggtggtgatcacgcagccactgagagctaaagtactctcaggctaagtcccctgcatgagctgctacaggaaggggcactcctgttgctgcacaggaaaggattattaacaattcatttgggggttgtggctccaggatttcaacagttaatcatgccaattaagtaaaaacacttcagtaggatttgcccgattaagttgaacacttcaggaggattcactcaattaaatgtgggtggcttgggaggactgtgtgtgtgtgtgtgtgtgtgtgtgtgtgtgtgtgtgtgtgtgtgtgtgtgtgtgtaagagacagagagagacgaagaaagagagagaggaatggcatgtctcgttgtgcagtgagggcatgttaacaggatggtttaaaggcagcacccaaacacccatatataccattaggcctagatgacactaagcctcacccccagtctgtcttctggctgtggcgtggtgttataggttggatattatttcactcttctctggtgtggtttgaaaagtctcaaatcttgggagctagatattaagcaagtttacctcttggagccctggtttccttctctgtgaatggaggcggtaataaccgcaggatgtggtaagtgaattacaggaagggagatgcatgtctccaaacacgtgtagtgcatgctccagggatggaagtgtgctccatttaacatgcccctccccacacacattgattcagtcaccccgcaatttatcacgtacccactcagggccaggagctgctgcagacactggggactcaggagtgaccaagaatgagaaagtgcccctgcgctgttggagctccatatctcctgggcactgtcagttagaaacaagcaatttcattggatagtttttagttagcaaaagtgttccaagtagactatgacggggactagagagtgaaggcattctaaggaggtgacattagagttgaggcctgatgtgggccaggcgcagtggctcacacctgtagtctcagcattcggagattgaggtgggaagatggcttgagcccagaagttcgagacagtctaggcagcatagtgagactccatctctacaattttttttttaagttaaaatattagctgggcatggtggcacgcagctgtagtcccagctactcaggaggctgaggcgggaggttcacaagcttgggaggttgaggctgcagtgagctgtgatggcaccactacactccagcctgggtgacagagtgagaccctgtctcagaaaaataaaaatagagttggggcctgaattctcagaaggagccatccatgagaagcccatggtattctcagcagtttcagaggccttgaaggccacagtcttggcctatcgaggattgaatgaaggccagtgtgtctggatgtcactgcgatgtggcagggcaagataaggaattggggggctgggccagggcattgtcagaaggctaagttcttaggtctctggcctgaggtcagcgagaagaggtctctaacaggtcctctttctcagaaggtgtatccacaatatccccctctacattctgtttggcagccaaacgtcaatgtcaattggaagtgaatttttttaaatgaattgtgtaagtaattcatgaccagttcattttgtactggaagccaaagtcaaatcagacatcgaatgtataccagaggaatccaacggaccagcagggccctgcccgggtgacagtgggacagagagggtgtggctgctgagcacccgaggatgaacacgatctcacactggggaagcccctgtgccagacagccagttaaagatgggaatggggctgccttggactctggggctagatgaggccttctgcccgcacttcttaggtgctgatagcttgcagggaggagcccaggaagtcacaaccccaggggcctgtctctaggctttctggtcatttcccttcatggaccgcccatagattcctgccagcccttctcccctgcacttgccttgctgtgtagggatcccaggaaatgctgggttttttacccaagcagaagggctgctccccattgactccttggcctcagcccttggcttctcacatgctgagcagctttcttactcaaagtcttttaaaagcaaaatattttacaattgttatgcttttctgataccaagaaaattcagcttggttactaaaaattctcacattacagaaaaagaaagcagatctttctagaccttgactctccccaactccaaccccatgtggtcacatacacattagagatgtgcttattctagctacaagtcactctcacttttttccttttttctcctaaaatgcaaatatatacttagccatctcctcccctccccttcccttaccctctttaggttttcaagggagaagtaactatgtctgcctgtatcatctacgaaggattcacatttttgtcatctgcagcacatcatcctacgttggcacctgttggttttatattgaaaccctccagttttcttcctgctgagttctaggactctggtagtgtctccagagctcttagccacatctgtcattcattctttcccccacttttttatgacattgggattttttagactctttctgttggttctagtatcatgttttccattctccatctgtttacttttaacttatctgtgtctttatatttaaagtttcttgtagacagtatgtcttgtttttattacagcctgacaatctctgccttttgatcgaagtgtttagtccatttacacttaccttaactatccacgtggttgggtttaagtttaccatcttgctatttgtttttatttgcctcttccattcttttttcccctctttttctttacctttcttctttcagattatttttagtacatatttgatctctgctgttggcttattagcatgtatcagagtcttggaggacttgtcagaacacacaatcatatgttttacttctgatgttataaaccccacactacctttttattacttttgctttaaatgattaattgttttttaaaagatttaaaagtgaggtgggtaaaagcattgtatatttccccacatatttacattcctggtgttcttcatgcctttgtgtagatccatctttccacctactatcattttccttcaacccgaaagatttcctttagtatttcctataatagagatctgctggtgatgaattctcttagcttttgtctgaaaacaaactttattttgccttcattttggaaggaaattttccttgaatatagaattctaagttgacagttttgtttttcttttagcactttaaaaatgtcatgcactggttttctgacttgcacattctctgataagaagttagtaattactctttgctcctctccacgcagcaacatcatttctttcctctggctatttgaagactttctctttatcactggttttacagcagtctgattattatgggtcttttaaagtcttgctaggggttgattgactttcttggacgtgtgagcttacagttttcatcaaatttggaaaactgtcctgccattatttcttcaactgtatttttcatccctccccccacttttcctcaccttctcaggttccagttatgtaggtgttagaccactttctcttaccccaggtcattaagatgctgtttgtttttaaaaactctttttctctctgagcttcatttgagatcatttctattgctatgtcatcaagttctctaattttcttgtgtggtatctaatctgctgttaatcacatctagtaaaattttcactttaaatatcatagttcccacctccagaagttccatttggttctttttatatcttctatttctctcactatattcctgtttttcttttaatgcttgtacatcattaaactcgctgttatccttgtctgtgagtcatcactggtcatttctgtgtgtttttattaactgattattctccttgtcctggccacatttctgtgctttttggcgtttcagtaacttctgattggatgttgggtattataaagattatattattgagtgtctggatttggggtggtagttacttgtggatcagtatgatccctttgaggcctatttttaagctttctttgagacaggtcttttgtagctttggctctaggaatagatcagccctactactaaggcctctggattctctgctgcatgtcccaggtgatcacagaggactctctatactggttgatcagaccttgaatgtctccctacctttgtgtgtcctgagaattgttcagcttacagcttcctggtcacccttttcctgggcttttggagtttcactctatgcatgcatgggcctagtagtcaggaaagactcaaggggaggcttatacagattttttgaagctctttttactgcataactaactcctttctggaactctgctctgcaacttccagctgcctcagctgctctgaatgctggcctgtgtctcctcaacttggcgaagccactaagctctatttggttctcgcccaccccaacacacagtctcgatctggaaattgcctccaggcagagagctggggcaatgatagggctcccgtcatctgtttctcttctcttggggatcatgattctgtgcttcctgctgtccagtgtctgaaaacttgtttcacatatattttctccatttttttctacttatttatggcacgatgtgaaatctgttccttgttactccatcgcagccaaacgtggaagtttctgtccattctttttcacataacatctttaattttatataagagtctttctggagtagctggattttgtgggccttgagccagtgtaagagccttccttttcactgaattatgagttgaattgaattgaattgtcatcacaacaggaactgtgtagctgtttcttagaattcactgaagtgggaggcctgtgatgcacggatgccggtggttgaatctttcacatattttgcaatttggaagaagaagataatttgtacaaatcattcagctcttttatttaacaatttagtgtttgaagatcttttctttgaggcttatttttccagctgttttgttccacttttcatttgggttgaacacgttagagaactgctgtcatgtgtacctgtcttgctgtcaccgggctccttgtgtcagtgggctgtggcttttaagggcctcactgctggtctagaagcccccattcctgctctcttccctccagcatcttcatccggttttttgttgcctctacaaagttggaaagggtctctcatttcctggttatttcttctgatgatcttggtgtgcctccttcctgtgcagcatcagcatggacttctaggcttgccagtctccctgcccttggctttctgtctaggtctgtcttctcctagctgtgcctgggctggcatctgctggtcttgtcttggctccctctggcctgcctctgttcattctttgccaggctactttccccattgttcaagatgtgttttctcaggcatctccgtgccctggcttgtcattcagccagcatgtgagagaagactcaacaagatcagaaaccaaggaagaagaaatcaccagtctcttcccaggggatccagggacagggctgtcgtcactcatggcctttttcactttctttagttccacctactccccaaggtcttaccctccccaggatggagccccaggaaaccaggtcctggcagtccctcttgagatgccagaggcctaggtgagctgtgcttccctctgccttgcttgggattctctcaccgctccctgaatctggcctcagcctctgtctcttgccccagcatgacacacggcagagtatgaaccccagctgctgccttcctaccctccctctgcttctcttctggaggctgccaaggattggatgtccactgggcttggagttccaatcatccaggtggggaagctgagtttccatccaggaaagtgattgaatggaggtcccttggaaagacgagaggccaggtccatggcccagggatcctagtgcttgatcaggttctcttttcaggacttcttggagctgtggttaggcctccatgttagcaacagacacccactccagaccctcacctcttgaccctggcattactggcgctgcccctgcctcattctaaaatagatggaaagactgatgagccctgggaattctttcaggatttggtgacatttgatgatgtggcatggtacctcaccacaagggagtggtttaagctggaccctgaacagagggcactggaatattatgggaacgtgacctctgtgggtaaggatgtcccagcccttcctcaaattcaccaccttcttggagtggggcaggggacacatggctacccccacagaagctcaccttctccctgggttgtggggaaacacaatgggtctgccacacctgatatgtcagagtagtatgagctcccccaactcctcttggcatggaaagaacccctctcagtcttttactgggaaagaaattagaacactgccactgtaatgtagaatgcccttttcattttaatgcacaaattatgcaaattgcatggccatttggtttgagtttatttgtgagaaaggttgacgtgatcaagatcttgttcacccattaggggtctgcatgtgtgcagtggggaggaggttttaggaggagagacgttgggagtcagatttgggagctgtcgaagtccacgtgtctgggaagagcatgaagttaaatgtgtgagctctgagtgggtggacagagagaagacagggtgaagatcacctcctcagggtggccacttgatactccacagagcctccccaaggtgggcccagaggctgccttcctcaagctcctggaaggagcctgaccttgggaaacacctttgaactgaatgaatgacttgcctaaagcctggtctttgaagattgaagggggttccccttcaaaggccttgcctatgttcctccactattctcatgtcatctctggctgttgccataaccaatctcctttcccatgagcaggcgttcctgttttaaatcctgccttggtccctcacctggcacaaggacaagtgctactggtgtcagacccatcgcccaacactgatcctgctaagtactctggtgagtgaaaaagaaatgtgaggaaattgggggagacccaaccaagctgctatggggcatgggttagggttggagagcccagctgagctgttaggcttcaggttagggttgggggtcccagctgagctcttggagttgaggttagggtttgggggccctgctgagctcttgggcttgaggttagggttgagagaaacagctgatctctcaggggtttgggttagggttgggggcccagctgagctcttggggttgaggttagggttgagaggatcagctggcctcttggaggttttgagttagagttggggggttccagctgagctcttgggttcgggttagggttgagggacccagctgagctcttggggttgaggttagggttagggggtccagctgaacttctgaggttgaggttacgagtagaggggcccatttgggctcctggggttgaggttaggattgagaggatcagctgggctctctgggcattcaggttaaagttaggaccccagctgagctcttggggttgaggttaagtttgggagccctgctgagttcttggggttgaagttagggttggggggcccagctgagctcttggagttgaagttaaggttgggagggctcagctgagcttttggggttctagttagtgtttggggccccagctgagctcttgacggtgaggttagggttgagaggatcagcagggccctttggagattcgggttatgtttggagatcccagctgagctcttggagttacagttagggttgggggtcccagctgagcttttggagttctagttagggtttggggccccagctgagctcttgatggtgaggttaggttgaggatcagcagggccctttggagattcaagttatgtttggggatcccagctgagctcttggggttgaggttagggttgggggacccagctgagcctttggggacgtgtgtggctgctctctggtcacagaaggggtgacctcctcagcaccactgtggtagagagtgtccagaatgaggtccctctgcccctggcttctgcagtccttgcttctggtggcttccgggcccaggccccgtgctcagtggctgtctcagaaagaaaaagattcttgacaaaggagaggcccttccctccttcatcctctgcagactacactgccttgtgtttatcgtttcagaaagcacctccgcgacccgacaccagatgaagggggaagatgcccagccacaggagatggcgtccacaagcttcccaagggccagtggtcccagtcctgaattcagacagcacggggactctgacgggaagagagggagcccacagaatctgcccatagaacatcattttgcttgtaaagagtgtggggacacctttcggcttaaagtcctgcttgtccagcaccagagagtccacagtgaggagaagggctgggaatgtggcgactgcgggaaggtctttaggggggtggcggagtttaatgagcacaggaaaagccacgtagctgcggagccccagcccggccccagtagggccctggagaatgccgcggagaagagggagcagatggagagggaggcaaagcccttcgagtgcgaggagtgcggaaaacggtttaagaagaatgcaggcctgagtcagcatctgagggtccacagcagagagaagccctttgattgcgaggaatgcgggcggtcgttcaaagtcaacacccacctcttccgacatcagaaacttcacacttcggaaaagcctttcgcctgcaaggcgtgcagcagggatttcctggatcgccaggagcttctcaagcaccagcgcatgcacactggccacctgcccttcgactgcgacgactgcggcaagtccttccgaggggtcaacgggctggccgagcaccagcgcatccacagtggggccaagccatacgggtgtccccactgcggcaagctcttccgaaggagctcggagctcaccaagcaccggcggatccacacgggcgagaagccctacgcctgcggccagtgcggcaaggccttccgccagagctccagcctcctggagcacgcacgcatccacagtggcgagcggccctacgcatgcggcgagtgtggcaaggccttccgtgggccctctgacctcatcaagcaccggcgcatccacagcggactgaaaccctatgagtgcgacaaatgcggcaaggccttccgccggagctccggcctcagtcgccaccggcggatccacagtggggcgcggcgctgcgaatgcagccagtgtggccgcgtgttcaagaggcgctcggcactgcagaagcatcagccaacccaccacgagtagaaacgccctgtggtcccgcgggacagggacggagtccccagaggggatggcagagtcaaaggagatgaacagttttgtagcgcttatatattttgtcttccaaaaggttgagaccgatttatactgccaccagcaatttataagtgttacgttatgcccatcaagagtagcttgtaccatttaacttagtttggctagtttaactggtaggaagtaccatcaaggtatttcagtccacatgccttgaatccaagaatgagagaggacaaatctggatgtggggtagggaggggcttagaggtcatcaactccaagctccccccgccccagagaaacacacagagctgttccacgatggcgtcctcataatgtgatcccagctttcctgaagagaacgttgccctcatgatttttggcctacttgaatttataaatttttagggatgtaaatagaacactcaaatgtcttaaaatatttaatttattaatttagttatacatacatactgtaaatcacatattatataaaataatatattaatttagaaaataccccatttttgccaccctccctttcacgaaatcattttactctgactcctcaccgtcttcaccaacatgggaaccctgtttgagtcatcagacagtttcaagacacacccagtcacttccatccgagctctgcacggtcgctcagtgacgatcccttcatgaggctctcattagaaattttctcccaagccataagaccatatttgcagaacattaggacgatttctcttgtcgttttttaatctgtcctgtgactgtacaatataaccacttaaggtcatactttttcaaacaacctttaaacgtcttttcttttaaagcacccaaaatgtcattgtgaggccaaacgcctagtaacagttactgaatctgggttaaatgtcggtatctttttttcttaaaccatttcaatttggtgtcccctatacatatccaaaactagcatcgattggggttgttttgaactaatgggtcttgtcctcaagcagcactattttgttcaaaataaaatagttgagagcatgcccctaagaagagatacatctcaaggactcaagtgcagggtgacgcctccttttggaaatgagcctctcctggtatcaggcctagatggtacttctccagccttccgtttcttgttctataaaacaggggtgatcacagcacctacctccgaaggttatcacgaggactgccatcgtggctgcagagtgccaggaccaccggcctggtatggaggtacacactcagtgaaggccatctgctgtcattgtcattgtcatagttattgccgtcattctgtggcttgtcaattccagaactggggatagaccccaggcctcctgaccaccagtctcatctttctcttatgcgatgacttaaatggtgtttctgttttttgcatgcaaatggtccgttcatctcctttgactagttatcaacttaccttcggatatattaactttatgtagcagttctttctatattgatggtgatgttctcttttccaattttattgctttgctttttgtagcagttttattacgtttttgttgtgaaagcttttaatttttacatatccaagcattcattttttgtccactcagtcataactttcattgcttctgtagctagatatgatgacattttctctagaattttaattacaaacaaaaagctgcaaccccagcccatcagaaggtgagtacaccaggtgggcaggctggatggaaatgggccagagaagcaggctctttcctcatccgagatgcggactccctgtctatctgtgggcaccacttgactatccaacctgaccactgcggcacactggagatgctcccatcatagattagccagaactctgtgactgctcatcattatagaccccgccagcagcagtggggcttggcctcacctagatcaatggagtggtccaaacttggtctgggagcaagcagcccagccatcctttgagctcctgggagccttggcaatgctccgagtggattcagtgactgagcagcagattcacccaagaaacatctccttggacacaagaagacttgcctagaccacatcctcctttcagccggtgactctagaactagaaagagattggttcataggcttctgctgtgggcagctaggggaaaattcacccatgtgttctggcatcacttcctatagccacacctaagtgagggcaacagagcagaggctcggagaggaaccctgcccctccgatggcttgtgcgttatgctgatagaagctggcagcactgccctgggctatgatttgcaacagccatgcccaggaggagcactaaagcaaaggtttggagggcagtggaacccttctgaaagcctgtgtggcatagaagtagaagctggtcctcctgggtctgagctaccatttccagtgggctcccccaagaggaacagcagcaagggctagcgaggaacctgcccctccagtggcccacagaagccacagatagaagccagccccaccagggctgtgctgtgacttcccagcagctgtggctggggacagggacactaggagggcctggcaaggaagtgtgcccttctcgtgggcccaccaaggctgaggcagagcttcctagcagacacaacttggaagggcttctcaggcacccatcctgacccccaggctggagaggagccaaaagcacttgttacatagtgattccttttgccctgtgggcctcagttcttgcagtagttgtgaatctgtgtctgaaatcactactttcttctcggatcctttttctcttttcgagttgttaggatgtgttttgtacagctgtcatttgataaagaaggttgacctctaccaggggcaagtctggcacctttacctagaagtactctgccatgtcttgcccgttcatttatcgtttgttgggtttcatgagggatcccattgaagtagatcccttttatgaagggatcccattgaatgcagcattaactcagaacgtagcataaagtcgtcactgctcccagctgggacgtggtgtcttggcatcccttcctgccgtccttgactctttcccatcttcagttctataattttctcccaaacaaatgctcttttagagttaacactaaagatctggtctttgccgtcaaggttgacagaacagctgttcatggtgtttgcggtgaaacccgtgttctctttcaatgcagtctgtggctttaacgtgtgtcctgtaatttcgccaagatcatttcttgcctctggtaacttgggggtggatttccttgggctctctaggtgtactgctatgtcagatgcaaaatgtcacccagcttcctgtcacatatccttgtctgtgcattcatgcatctacctcattccggttttctttctaatctcatgtattcctgttgtgaggaaatgtgttcttttcccgatccttttgtagttcatacacatgacaattgggtttccacgcacgtgcatgagatgttcctccttcaaaccttgttactatgtcagcacattaactgcctggcatggaaaaagaaaaaaaaaaaagaaatatgttcttttcctaccatttgaaaaaaatcctccattgcttttattagagttttgaatacttgtgaaaattttcaaaagaaagtaattgattaccatttttgctgcttattacgatgagctgtgtccattagctgtgtcaccccactcttgcatttccagaatagtccctacccaattgcagcgggcatgtttttgagtggtgttgcattccatgtgcttgattttgtcctagaactggcacagcgcctgccctacctgcagccctgggttgtggccctgttgcgtaccatgtgatttgccaccccgcttctaggccatattaattcagccagaactgaacacctgacccaagggcagcaagcaatcatcagagcatagagctgacagaacatgatggaccacggacaccaccaggccttccagatctgaaatgcaaacaaggaaacagaagcttctaggcatcagaaggtgtggggagcagcacagtactcagaggagtgaggagcgtggcgcctgctgggaggaaggcctggccatggtatgttcttggatttctggcagcagccctcattggtccacgtgcgtccccactacagactccttgacttgagccagcttgagtgggtctctactcttttctattgtgttttgccacttggctgcttcctggccaagtcgcacctgactgcatgaacacctgttcaaacgtgtgttctctgttctctaagatgggtgaaagtcgatgccttctagtctcagtgaatttaacctgtgattttatgtctacgtatattgttcctttactgaacccaccacatgcgggccataaaatgagtgaaatcacagtgcaccctgttctcttatttttgaagtgtttcacgatttccagcatgtccatcagatggggggattgctaacttctctcttactcatgtacttacattctgtagttctcattgcatcactttggatgtttactttgaaaagcagaaactgtctctttaaacttggccctcaatgtcatttgcgtatctctgagaacaatagctatgtcccaccccagtttgtatttccgttggttgttggcacttttttctcattcccccatctcattaccttgtctgttttctggcactcactataatcagccttgcactagagctgtttgtggacttggcttcaccccctcctcctcagccctcccccacccattaaattgtgagctcttagaagacaggggtggcctttcatgtctgatcccctaccaaatctagcacagtgccttgcatcaagtagatttcaataaatatatgttaaatggcattggtcttccttgacgtcttttgtcaaaccttcatttaccactttccttgctcctttctccatgccatggggttctatacttgtccttgcacttggaaactgccccctcctggggtccaggtgctgttgtggcccctgctgggaatgttattccagtgcttgctgggcacttggagggaagaggaagcaccctgatggggaggctggtttgcctggaactctgagctctcccttggcagaaaggggtctttcactcagcctcccctcaccgcagctagggctccccaaatcggaattccaggtgggagcagaagacaaggccagatcctcagctcctccctcagggactgggaatgggataacatggctttgggacttgagaatcatccctaggctgcataggggtgggagcaggagttcggtcctcttggtggcctgtggctggccctctgcctggtgaccactgcctcagagaagtcaggggcaggagcaggccccagtttcctggcccttctaaatgccaacggctcagccgtggagccagcagcccaactgcagaaggacatcccatccctccggctccgggatgcacatcccgatgggagccaacaggaggagacaacatgactctctccactgccccagtctccctggcttctggcaggggcccatgctcatcacagctgtcgattctcctaccccaggtgcagctctgggtgggtggagcgataccaccccccttgacggttgcttcctacttagcaaggcagccacctcccggtgcgtccacccccagccaatgcctgccccggcctggcccagcccttgccgcttgcaagtcacttagttgctggaaaagcatcattatgtgcttgttactgagaattctacctgtttgttttttcttaaaacgtgtgcaagctgttctggcaagtctcagatgtgcatgggtccatttggacagctgacactgcacccaaggcaggaggggacagcatggggttttctctgggaatcctatgagcccctagtagaggattgagaatattctctcctgcccctctcctagttcccctgcctgcctgagcactgtagctcttccaacaccaccctctatagaacaaacgagaaggcatctgaggaaacgggatgtgccttttggctctcctccctggtggaacattaaaaaatccaagattagtggaaagatcacatgctacaccctagaagtctcttgctggcctgagattcacagtcccaaacccctaatctctgggccagtgtctgcagccctgattcctctagcccaaattccccatcacagccctccgccccagcctacctctcattacaggaaggacaggccaacaggtagaaatgggggcttctgcttccatgcccactgcattttagcttctcctccccaatactctcccagcttattttcctgaagcttccagagctgtgtctttgtccaccctcactagtctccagtagatgtgatgcaccttctcggctaaaatgcatttcattcaaaagctcactgcataataaaaacatggcctgaaatctttttcgggcaagatgtgtcagaaaaactctctgctctgtcatcccttttctgacctttattcaacaagtatttattgagcacctgctctgtgctgggccccagagatgtaaaagcaagtgacaaggtccctgccctcaaggacagagtgccagagagaaacagacatgcagccaaaatgtcaccacaagtggggcctatgtaaatgttcaccaagctgtgctcctgggtaggatttgtgcacttgagtggaggcaggttacacaacaactaccaagccaaatgcatacaacattagtggataaatccccccactccctcctcagatgctatggggttttattaatacattcctctctggcacctctccatccctgccccagccccgttccatcagcctcactggcatccctgtctctttgccttgccttgcctttctggacccaatccatgttcctctctgcacctgtcgacctctgggggaggaaggcagctccaaaggggtggtcctcacccgagcccagcaggccccaccgtgctacagagagttctttactgtaaggtcggcctgtcacctcagcactttcagaggtgggtggggccagcacctcagggtgctgtgagctggctgggctacgtcactcctgggatactgtgctgctggttctctgtccatcccagtcctctgccccatctcctccaacaagccagcttaccccacaagtttaagtctgttcatccctttcttccctatcgcaaattctgcagtcctgaggtgtttcctctgggcctctacagtccaagggcttctggcaccaccaccccttattgagctgtttgtcattggtgtctacaggtgtctcccttcccccacagaagtctccttcacctttgaacacccacctgctggatgccacaggggcccagacagagagggccctaaccacaccctgcccccaaccgggaagaggcccctccctcctccctgggctccctgtgctgccagaccctgaccccacagcctgggaggggctgcaaccccagacatggagccccctaggtaaggtggggcagatctccctggaccccaccagacactggggccctggatgaagatgtctttggaattcatgagaggaatcagctctcccacccagggccatgtccttggggatgggacaagtgggacagaatgtagcctaagcctgggcctcccctcacctcctgcacccccagatggaagtggtggagatgatggatcagatcgtccacgggtgtgggaggactcatcaggactgggccagccccagctccagggggccccagccacagagcccatggcattgtccatgatgctgctgaacctggcagagcagctcagggaggcagacaaggaactggcaggcaaatacacagagctggggaactggtgcacttggaggattctgcagctcatgcaggttggaggggcctggggacctgggcagcaaggggccctccactccccaactccccagggtgtcctcgggctttacacacctgaagagagagacatggggaggtccccacctgaggaaggtggagggctcaagggctggagggagggtgcggagccctaggcaaggcctgacagcaggagaccctccagatcaaagtccctcccaggcctctgggtggccactgcacaaaggtgctgacctcctggttggaggtagcaggtgagtggcaggtgcctggagaatggggatggatgaggcctccaccatggctcagaaggtccccaaggtcaggagctgccaaataggaggggccaaatggtggaggttgggggtgttgcccctgaacctcaagaagcctcagggcaccaagcccactttggaagggcaacaaatgccaatgaccaaggccaaagcccaaatttcaccatcggggaatgaacttccaagattcagtaataattctgaaatttatctctggtatggtttggctgtgtccccacccaaatctcgtcttgaattcccacatgttgtgggaaggacccagtgagaggttcaattcaattaccatgggggcaggtctttcccatgctgttctcaggatagtgaataagtctcacaagatccgatggtttttaaaaggggcgtttccctgcacaagctctcttctcttgtttgctgccatgtgagatgtgcctttcacattccaccacgattgtgaggcctccccagccacgtggaactgtaagtccattaaacctccttcttttgtaaattgcccggtctcgggaatgtctttattggcagcatgaaaacagactaaaactaagttggtgccagtagagtggggtactgctgaaaagatacccgaaaatgtgtgtggaggaaaagttaaatattaaatttgaactcaattgaacatggacacaaacaatggtcaccaagtcccggaacaggttgtgtgagccccttgagacattcatccactgctgtgtcagagaaatctccatttcaatctgttcctatacattgaaaaacaatagacaatcgcaaaaacaagttgacctttttgtgttccttgagcccagtcgtgaagggccctcgtgactgggcctcatgccaaacaactcgttacaaaaagagctagggtcccagactgcaccaaagcttcatgagacctctctttgtctgtgcacagatgagtggccaactctggagcccaggatgttgcttcccagtctggtggtgaatcctccacaatctggtgagtgtaaatatatatattcccttctccccttcccattgcaatttgcttattgtatcaatctgcttatgatatcatttgcttattattatatcacttgcttattatatctgcattgccatttacatgggataaaggttgtttacccgtaaaggtattgtgtgtgtatcttttcttctcccttcacgcgtttcctgcacagaacaatgtggaagtgactttggaactgggtaaaaggcagaggttggattccaaattttgaagggctcagaagaggacaggaaaatgtgggaaagtttgaaactccctagagacttgttgaattgctttgatccaaatgctggtaattattatatggacaatgaaatccagactgaggtggtctcagatggagatgaggaacttgttgggaactggagcaaaggtgactcttgttatgttttagcaaagagactggcagcattttgcccctgccctagagatttgtggaactttgaatttgagagagatgatttaaggtatctggtggaagaaatttctaaatagcaaagcattcaagatatgacttgggtgctattaaaggccttcagttttaaaagggaaacagagcataaaaattagaaaaatttgcagcctgtcaatgtgatagaaaagaaaattcccttttctgaggagaaattcaagctggctgcagaaatttgcataagtaacaagaagccaaatgttaatcaccaagacaatggggaaaatgcttccagggtgtttcagagacttttgcatcagcccttcccatcacaggcctggagggctagaaggaaaaaatggttttgtgggccaggccctgggtccctctgctatgtgcagcctagggacttagtgccctgtgccccaaccactccagctgtgactaaaaggggccaaagtacagctcaggctattgcttcagagggtggaagccccaagccttgagagcttccatgtggtgttgagcctgcgagtgcacagaagtcaagaattgaggtttggggccaggcatggtggctcacacctataatcccaacactttgggaggccaaggtgttgaggtcaggagttcgagaccagcctggccaacatggagaaaacctgtttctactaaaaatacaaaagttagctggacatggtggtgcaagcctgtaatcccagctacccgggaggctgaggttggagaatcacttgaacccagaaggtggaggttgcaatgagccaagatcatgccactgcactccaggctgggtgatagagcaagacaccatcttaaaaaaataattgaggtttgggaacctccacctagatttcagaggatgtatgaaaatgcctggatgcccaggcagaagtttgctgcaggagtggggccctcatggataactctgctagggcagtatggaagggaaatgtggggtcagagcccccacacagagtctctactggggcaccacctagtggagctatgagaagaggaccaccatcctccacaccccagaatggtagatccactgatggcttgcactgtgcacctggaaaagctgcagacactcaacaccagcctgtgaaagcagccaggagagaaactgtatcctgcaaagccacaagagtgaagctgcccaagtccgtgggagcccacctcttgcatcagcatgacctagacatgagacatggagtcaaaggagatcattttgaagttttaagatttgactgccctgctggatttcaggcttgcatggggcctgtagcccctttgttttggccaatttctttcatttggaacagctgtatttactcaatgcctgtacccccattgtatctaggaagtaactaatttgcttttgattttacaggctcataagtggaagggacttgccttgtctcagatgagactttggactgtggacttttgagttaatgctgaaatgagttaagactttgggggactgttgggaaggcatgattcattttgaaatgtgaggacatgagatttgggaggggagagggcagaatgctatggtttggctgtttccccacccaaatctcatcttgaattcccacatgttgtggcagggactcagcgagaggtaattattcaattacaataggggcaggtctttcctgtgctgttctcgtgatagtgaataagtctcacaagatctgatagtttttaaagaggtgtttccctgcacaagctctcttctcttgtctgctgccatatgagacatggctttcaccttgcaccatgattgtgaggcctccctagccacgtggaactgtaagtccattaaacctcctccttttgtacattgcccagtctttggtatgtctttatcagcagggtgaaaacagagtattacaatctccaaacctaactgttattataatgtaatgatccattttcatcctcactttcagagctggccctctggtgcccaaagcagactcctggggtccctgtattgggcacttacccacttcctgctggccgcagcatgacacctgatgctcctagagcagccaactgaattccagaagaaaggcttcagtggtgtgttttccagaaggaacctggctcctaggattaacagttgggtcaaatctcaaaaactctttgcccttaactactgaaaacttccagcatctatagcagtcatagtcacaagatttcctttaaatttttcagcaattgttttcctaaggcattctgtaaagtctggcttgaagtttgtttagttgagataaaaatgtgtttgactgcactccagcctgagagacagagtgacatactgtctcaaaaataaataaacaaataagttttttaaaacatgtttgagaaccacatttttctccaatgctttatttttttctttaaatttttatattctttatttttggggattagagacaatttatcaaagacacaattgtacacagctttggagtttttccttctggagattcttttttttcttgcaagatgagaattccccatggtgctctttctgaagacacttatgacttaaatggagtcaaacaagtaaaaactaaattccattcttaaagttccttcattcagtgctgcaaacgctggtgtgccaaatcatcgagtgagattttttatcctgttctgtgttattattaaaaatgtatgaacaggcggggcacagtggctcactcctgtaatgctaacactttgagaggctgaggtgggcagatcacttgagctcaggagtttgagaccagcctgggcaacatgacaaaaccccatctctaccaaaaatacaaaaaaaaaaaatagctgggcacgatggcatgcacccatagtcccagctactcaggaggctgaggtaggaggatcacttgagcctgagaggcagaggttgcagtgagctatgactgcaccactgcactccatcctgagtggcagaatgagactatgtctcagaaaaaaaaaagactattgtctattttatattcatttttaattacacaaacaaaacatgaatataatctcattttaaaatattaaacaaatacgaataaaataaaaaccccgtttagtcactgtctggcccctcccaatcacacccccctttctgagaacatctgtcctgacatttttctgcatatttacctgcatatatgtacacacacaatagacagtttatcatgccagctgtttatcatgcaacttactttcttcacataactaagcgtgggagaatgttgggagagtgttgttaactacaggtcagtatttcatagcatgagcatagtgaggtttatttgacccttccccttcttggtgaatattcaggtattttccagggttttgctaatagaaacaatgctgcaagagccttgctcagatctcttgtgcacaggtgtgagctgtacaacagatgctgagttaggtagagtgacactacattgcttcaacaaagagacctgcaataaagcagtagcttagagaaaattgaggatcatttctcatggaagtctgagccatgtagtcctggttgatggggcagctgtgctccacacagtcactcacagaccccagctcctcacattgcctttttcctctcttctttaggacagcacttctcaaacggtctatggtgaaaagccagtttatttcattcaattgtggagtgaaatattttttaacttgcaataaagatgccatggtgatattctgttactataaaagccttaatatctgtactaacccaatgtaaactaaaaataaaatcctaagcccccagctgactgaacggaccccctcttggccagggggacattagaaaaccttaaaaatgagttcacagccatgatgagacagcaggtcagacatgcctcccttttggagattaaacacaacaactaacctgcattggtgttaaaatagagatcataagactgacagaacacactcttgatgacaattagatgcgaaattataaacaggacctaaggccatgccacgcaaaggttaagtcccacacccctatacttacagaatgaactgtgctctcactgccacaagtttttctttttctctagcagctaaacaagcactggccttgaaataagcaagattataaacaattgcagctcagccagcttcagacatggactaactgaacccctgttccaccaggcataactacagctttgattggacaagagattgatttcagtaactttctcctgataagaccagcagccacatgcttgttcttgccagtttacagagatttcatgcttgagtgacttcatgtcctgaaaagacctttggatgtataggacctaactgtaatacatttaaatgttaagtctccaccccaaagtgaacatgggtcatatgttacatgcatgtttgttcagtacacatgtgtcaggacccccctttatgaatattcatagctcttcctgtaacctgttgaatatgtatgtttagctaacctgtccagcaccaagatcctagcccaacccctcctccttcaaagtgcctgtctcttgtcttggccagaggcacgcttcccagcctgcaggacgaccaccttgcaagctgtaacccttaaaaagaagtaaagtctcctttctcctttacaaatttatagatttgtttaaaagttaatgctggtcatggacccaccactaacaaacaatttatgggtgcacagtggttcagggaccctgctatagcagctccacttgaggaggagcttgagtggggagtgggcaccacactcaccccaagggatgctgggcaatctcgtctcactgagcagcctagcacccatgaataatagcccttgggccagagagacaatgagcagtctcacccacagatccccagaagtggcatttactgggttcaaaaggtacaggcattttaaaagtagattctggcaacgttccctccaaaaaagcctgtaccaagtggcaagagttcccatgtccccccaccctagccaaaaccaacgggcaaaaatggcaggtacttccttatcatttgcacttccctgattactagtgcagtcaggttgaacatctttttactattacagaccattcaatggcatcttctgtaaactgctctttcatactctttgctgatttccctatggacatgcagttctttttatatgcttgatagtaaccctttgttatgtacattgtagatgcttcttccacggtgtttttttgtttttgtttgtttgcttgtttgtttttgtttttgtttttgtttttttgagacggagtcttgctctgttgcccaggctggagtgcagtggcgcgatatcggctcactgcaagctccacctccagggttcatgccattctcctgcctcagcctcctgagtagctgggactacaggcacctgccaccacgcccagctaattttttgtatttttagtagagatggggtttcaccatgttagccaggatggtctcgatctcctgacctcatgatccgccagcctcggcctcccaaagtgttgggattacaagcgtgagccaccgcgcccagccccacagttatttttaacttagttaatggctcatttattgtcctgtagaagttatatttttcacagttatgtcctcaaatgtatcaggcttttcttttatggtgtgtgcattttgtgccttacttaataacatcttctttatcctctagtcttgtttttataaatttgcttgtatagttttcttttttatagttttgttttttatgtttagactttttgttaatcactcaggaatattgtcttttctatgatctatagttagaatctattattttgttttccttacatgaataaccaattgtcccaacaccatccttcccccgattatttgaaatgccaagttcatcacgtagaaagtaagctccatgcttccatgagggcagaggctttgttttcctcacccctaaaataatgtctggcacgtcatgatttgtcaactgaatggatggatgaatgaatgaatgaacgaatgaattctaaatagccaaattttcatgggcgtgtttctggaatttctgttgtcctatcaattaatatgatgattcttgcttcaatactctactgttttaactattgctttataagttttgatatctagtaggttctttcttttaagattttttgccaatcttgtacatttctcttccaaattgatttaagatttgcctcacaggttctattgaaatcctttgaggattattattggggttgcattaaagttatagattaatttcagaagagcagacgtctttcaaagttgaatctttctatccaataacatgatatatcttatcatttattcaggctacttttatgtcctgtagtgagtttttatatttttctttatatcagtcttatgcatttttatgccttttaagttcaaatgattttatagtttgcgttgttctggggattacaaggtttttaaaaatagtatattggttaattggtcattgcaggaaaggtagagcctgtgaaaacatctcatatgaacactaaagatttgtcaggtgcttcttttagattctttagaaaatgagcacaacatagctgaataattatagtcttttctagtccaacatttatactctgtatttccttcttgtctcgcattgatcaggctgagtccattactaaaagttggcaaggatgctgtaaatagatgctgaattttatcaaatgcttttcctacatcagttgagataatatattatgttttccctttaaccagtaatgaagtgaattacattaataactgtgttaatattgatctatctttgcattatttgagggaacccgtactttgacatgataaaggatccttgtaatgtcctcatggatatgaggtatctttgtgtttttgttcatgaggaagattgatctacacagtgcttttactgtgcaatctgattccaattttggtatcagggttataatagcctcataaaatgggtttggatgctttccatctttttcaatgcagagaagggtttgtacaatatgagaattacctatttcaattcagatttagcagaatttaaccatataaccacctgggtctgatgcaatattgaagcatagatctttgactatctttacatttcttctatggatattggtttattctgattttctacttcttgaccaattattataatttgtattttcctagaaaattttctattttatctatattttctaatgtattcacataaaactatatatagtattatttttttgtgtgtgagacagagtcttgctctgtcacccacgctggagtgcagtagcacagtctcggctcactgcaacctccgcctcctgggttcaagtgattctcctgtctcagccccctgagtagctgggattacaggcatgtgccaccatgcctgactaatttttgtatttttagtagagatggggtttctccatgttgcccaggctggtctctaactcctaacctcaggtgatctgcccacctcagtcttcattgcacctggcctatatatagtattctcttacaagttttagaaaaattgactctgcatctgaagtttacaccctgtcctgtttctcattatatttatttgttttttcaccttcttttctcctgaccaatatctctatgaatttgtgcatttttaaatattggtcttttcaactattctgggctttttgcaatttatttattttattaattattattttcagtattgggggctttcctttggttactaatttcttattttagtgttttggattcaataaatatgatttctgcctttgaacttgagattttctttgtgaccaaatatgtagtcagtcttggataatgtttcatatacttttgagaagaaactctgcgttatctgattgtcagatgcagttatacacactgtgcacctcttaggtcaagctcctgacttgcgttattcagatcctctatatacttatttattttgttgtttccttggtctgtcagttcctgagagaagtatagtaagtctctttcactctgactacgaacttgtcaattttttctgaacttctatcaagtttttgtttcacatgttatgaaactatattgggcaccaagcctttaagcttgtgtcttttacatataggaatagtcatatttgtccctgagaaagttttttgctttgggctccattttacatgatagtagtattgttctacctgctttctctctgttagtattttcccggcatttttaaaatccatttattttgactcttctcattatttgttttgtaaagagaccctgagtttgttgggagtagtagtgttgcaagtttcaaatctacatttcccatccttccttgcagataggggtggccagtaaaatgagagtgaaagtcactgggtggagcttctggaaggttcctgacagtgggctgaattaccaggagctgccctgtttgatccccacactttctctttctcctaacctagaacacatatttgatggctggagcttcagcagctatgttggtgcggatagagaaaaaaagccaagaaaatcgtaaagatctctcttgacatcctcaagcaactaacaaaagccagcaactgcctacttccttatgtctccatacgtggaaaaaataaactcttttgtgtttaaatccccactgctggttttctgttactccattgaacacagttcctaattaatacattgcctgtggaggcaaccagtattacccagtttttgtttattcttctagagatattctttttactgtcatcactttaagtatattttcaactttttataatgggcaatttcagacatacgcaataaatagcacatggtataatgaacctccacgtacccaccacccaacttcaacaattatccattgacattctatgcatgtacatgcacacacacacacacacacacacacacacacacacacacacattcctattttatacaaatgctagcatgctactcacactgtgctttacttttctttcttaaattaacaatgtgtgttggagatggtttatatcagcacctaatttcttcattctctttaatgtccatctagtattcttttatcttttcacaaaaatatatctgtagaatcaattcctgcatgtgcaattgctgggtcaaaaggtacacaatttgtaattttgatagatgttgccaaattacccccacagaagtcgtaccaggtccaactcccaaaagtaacataggacagtgcctatttgcccacactcttgccaacattgggtgctatcaaacttttctacttttgccagtctgataaatgaaagcaggtagttttgatttggatttctcttatttggaagtcatttgtatttctctcccgtgaaccgtattcctagtttatgcctgttttgctattgtgttgctgtcatttttcttactattttgtaggaactattaaataataggaaaactagcctccttgtctccaacaggaattgcaaataattttcccggtttaacatttgccctggactttgctggcaggaagttttgtgttgaagaaacttttcgtttttatgtactgaattaatcaagcttctctgttttggcttctgtcatactttaaaaggccttctctcttccaacatattttaaatgtcccatattttcttccaatatttttatagctttatttttttaatctttaaatctgatccatccagaatttagttggttgcacattatgatgtgggattcaacttcacatttttcccagatggccacctacttatccctacaccatttattgaataacccatctttccccaaggaactgaaataacatttctatcatattctaaatcctcgtttgtatttggatgtattttagactttctgttttttctattgttctgtcttctattcatatattagtactacacagttcttttaaattactctcaatttatgttttaatataagtattatattaaatattacatcaaacataatattatgttatagtaagtattatattaaatattacctcacacatgttataagtattgtattaaatattacatcaaacatatattatgttataagtattatattaaatattacatcaaacatgttataagtattatattaaatattacatcaaacatatattattataagtattatattaaatatcacatcaagcatatattatgttataagtattatattaaatgttatatcaaacatatattattatgttatagtattatattaaatattacctcacacgttataagtattgtattaaatattacatcaaacatatatcattataagtattatattaaatattacatcaaacatgttataataagtattatattaaatattacatcaaacatatattatgttataagtattatattaaatattacatcaaacatatatcgttataagtattatattaaatatgacatcaaaatattatgttatagtattatattaaatattacctcacacatgtaagtattgtattaaatattacatcaaacattatgttataagtattatattaaatatcacatcaaacatatattattatgttataataagcattatattggtaggactagtgcccctctcattagtcttccttttcagaatacttctggctaattttactcctttagttttctacaccaatgttagaatcatcttgacgaattccaaaatcttctgtggttgtgtgtgtgggatcatctttaatttagagattgatgtagggaaattttgcttctttatgaagttgactttttctatctgagaacattatagaccgttccattcactcaggccttttttgatggccctgaggaacattttaaaatttctttacatagatcttgcacatttcttgttaaatttatttcaaggtattttattgtttttattaaatggcatctttttttttattgtatgttctaacttattgtttgtctcaatgattttgtacccatacaacttactgaattctccttactcttcgtaacttttttttaatttgtttttgttgctgttgttgttgttgttgtttgttttgagacggagtctcgctctgtcgcccaggctggagtgtagtggtgcgatctcggctcactgcaagctccgcctcccgggttcacgccattctcctgcctcagcctcccgagtagctgggactacaggcgcccgccaccacacctggctaatttttttgtatttttagtagagacggggtttcactgtgttagccaggatggtctcgatctcctgaccttgtgatc

SEQ ID NO: 3551 - DNA, 459 bp, Homo Sapiens
tttaaactatcttgtttatatacttttattaatacaatacacacattataagtcacacacaaaaagagataaaataattagataaaataacataagaatttgaatattttcttcttttgcctaagatatattcagcttgccccatgtattttatggccctctttctgctaataacaataacacactaaaaaatacttgctctgagtcatcagatggagtcttccttcaacaaggctcttcaggtcattggtgctatgaaggagaccccatcagactaacagtggatttctcagcagaaatcataaaggccagaaaacagtggaatggcattttcaaaatgctctttccattgcttttccataccactgcttttcccaggactggagacttggtttccagctctttgcacctcctccagcaatgtcttttttgcagatgtgcttggccttaattccatca

SEQ ID NO: 3552 - DNA, 2225 bp, Homo Sapiens
ggttctttgcactgaccaatgctgagagcagaccctcggagcagccgggttggaagtgtctctccacagtcaccagacagatccaggataggatgggcagcccagtgcaccgagtgtcattgggggatacctggagcaggcaaatgcaccccgacatagagagcgagaggtatatgcagtcctttgacgtggaacggctcaccaacatccttgatggaggtgcccagaacactgcactccgcaggaaagttgagagcatcatccacagttacccggagtttagctgtaaggacaattatttcatgacccagaatgagcgttataaggctgccatgcggagggcattccacatccggttgatagctcggcgcctgggttggttagaagatggtcgtgaattaggctacgcttacagagccctttctggagacgtggccttaaatatacacagagtcttcgtgagagccctcaggagcctgggctcagaggagcagattgccaaatgggacccactctgcaaaaacatccagatcatcgcaacgtatgcacagacagagttgggacatgggacatatcttcagggcctggagactgaagccacctatgacgcagccacccaggagtttgtgatacacagccccacgctgactgccaccaaatggtggcctggagacttgggacggtcagccacccatgccctggtccaggcccagctgatctgctcaggagccaggcggggcatgcacgcttttattgtgccaatccggagtcttcaggaccacaccccactgccaggaatcatcattggggacatcggacccaagatggactttgatcaaacagacaatggcttcctgcagctgaaccatgtgcgggtccccagggagaacatgctgagtcgctttgcacaggtcttgccagatggcacctacgtcaaactcggtacagcacagagcaactaccttcccatggtggtggtgcgggtggagctgctgtcaggggagatcctccctatactgcagaaggcctgtgtcatcgccatgcgctactcggtcatccgccgccaatcccggctccggcccagtgacccagaggcaaaggtcctggactaccagacacaacagcagaaactctttcctcagctggccatcagttatgccttccatttcctggcagtcagcctcttggagttcttccagcactcctacactgccattctgaaccaagacttcagcttcctgcctgagctccacgcgctgagcacgggcatgaaggccatgatgtcagaattctgcacccagggagctgagatgtgccgcagggcctgtggcggacatggctactcaaagctgagtggcctgccatcactggtcaccaaattgtcggcctcctgcacctacgagggtgagaacacagtgctctacctgcaggtggccaggttcctggtgaagagctacctgcagactcagatgtcccctggctccacgccacagagatctctctctccatctgtcgcatatctcaccgcacctgacctggccaggtgtccagcccagagggcagccgacttcctctgcccggagctctacaccacggcctgggcacatgtggcagtaaggctcataaaggactcagtgcagcatttacagaccctgacgcaatccggagctgaccagcacgaggcttggaaccagaccactgtcatacacctccaggctgctaaggtgcactgctactatgtcactgtgaagggttttacagaagctctggagaaactagaaaatgaaccagcgattcagcaggtgctcaagcgcctctgtgacctccatgccatacatggaatcttgactaactcgggtgactttctccatgacgccttcctgtctggtgcccaagtggacatggcaagaacagcctacctggacctgctccgcctgatccggaaggatgccatcctgttaactgatgcttttgacttcaccgatcagtgtttaaattcagcccttggctgttatgatggaaacgtctacgaacgcctgttccagtgggctcagaagtcaccaaccaatactcaggagaaccctgcctatgaggaatatataagaccacttttacaaagttggagatccaagctatgaaataaccaacagtattcaagaagcaaccagcaccatcatgtgataatggtactatggcatatatgcaacattaaaattttaaattag

SEQ ID NO: 3553 - DNA, 324 bp, Homo Sapiens
gcggccgcgggcccggcggggctggggagggggccgggggctcgaggtgctctcgggactcgcaccgcgccgcgttgcgtgggcgccgccggcccgggccccggggaggaggacgctgcacgaagagggagaaaggatcgcagactgggacccctccccaaacctagcaggagtcctgcccagaatgcggctcttgtgtggccgggctgtctttatttatccgttggatgtgacatccgacttcctctttagttgcgccaggctgtgtgcgtggtgcgggatggggacccctggagaccgccctttcggatcgggccggtccct

SEQ ID NO: 3554 - DNA, 451 bp, Homo Sapiens
  misc_feature (358)..(358): n is a, c, g, or t
  misc_feature (379)..(379): n is a, c, g, or t
  misc_feature (391)..(391): n is a, c, g, or t
  misc_feature (409)..(409): n is a, c, g, or t
gcaaaggtaagagaattcactgtgaattaattattcattgaacacctattttgtgccattgactatccttattgctgggagcacagcatttaaaaaaaaaccaaaaacctttctcccactctaatagatgagtcacataatgggaaaacaaacaaatgtatcatctattaaagtgggagaacttggttttgtggttttaaaagtgttgtcgtggaaccagcgatactgcttgcatctgtgcaccatgattagagatggaagtggatggagagtatgtgtgtctgagagagagaatatttagaatgccaaaagcgggcacttcaaggaaggctttttttatttaaaaaaaattagctcnttctacatactttagaaattncctttggagttngcaaatgttaaggatatnaatactttgcacgtatattccctgttttataggttaacccta

SEQ ID NO: 3555 - DNA, 281 bp, Homo Sapiens
tagagtcatccccgcgccaaatgtgaacccgcctgtaggggccccagtgcctccaaaattaaacccgctcatggctccggactctggtggcggcagctactctgtctcccaaatgcaaatccgtcggtgtctgcagccttgggaagatttcacgcctgcgctctccgctcccaccttctttcttcagccgaggccgccgccgcctctccttgctgcagccatggagtgagtaaccgcttacctcttctccaactgcctttcccgccctttcacatttggcg

SEQ ID NO: 3556 - DNA, 408 bp, Homo Sapiens
ttttgtctttcaaacacaaatttatttaagtaatgttgcacaatgataattcagaggcagctgaccaaagcacattttcatttagaagtttattttccagtgattacgttttgaattggaagaaacgctctgaacattaaaacctaagacctaaaatcttccacacttgtgcttcctagagccagaccttcaaaatttagagatctgtttcagtgctcctgattcaaaaattagcaaggtcaattccgaaacagaaagggcaatcacagttaagtaaataatctcattcagtgaggctatttaagcctaaaaagaaatcattaggtactgtattatctaacactttaacagattctatcaaccctgaagatcaaagagccttcagataaagaatatttcttttgatcc

SEQ ID NO: 3557 - DNA, 434 bp, Homo Sapiens
gtgttatccattcaaacagcaaaagaacaagcacttgtcaccactcaacactgatttagaatttatctgcttgctttttttgttttttgagacttagtctcgaaaaaaaaaaaaaaaaatagaagtagaatttaatcttttcacttctctgtaccagtttaaaaaaatatatatcactgatggtatcaaaaggtcccacatctggattttaactcttatgtaggtataagtagtgcttactactgaaactgcatggaagatatacctgcttctactgtatatttctgattgaagagaacatgcagttcctcttagggaactgtaggtctgataaccttatatatggatagtttcaaacaattattgctgagagatcatttaaaaaaaaaatacaatttaaaatacttgattccagagtaatataaaagtaacct

SEQ ID NO: 3558 - DNA, 541 bp, Homo Sapiens
ttttttttttttttttttttttaaggaaagaaaacacggtatctttattcaggatatggacggcactaaaaaacaaagactatttgagaacttatcaagggggtaaaatgctgtcttcaggtcatttgtacataataaacaaaatacatagatgcccaactctgagaaggaacttgagttgttatttaaaacaaaaatacagatgcaacatatcctaagtcgaatctgtgataatatagccaagattaaaagactacttgttctagctttcctggatacaaatgaatgccactcttgtgtagaataggtgcaactgtaggaacaagaaggtaatccatgagagaaggagcagcagactacagaatctgcccacataaatcagtattggcaacaaaacttctgaaattgtcagggattgactgtgccctggtgaatgtcaacatttgcctactgcatttgtctcaaaaaagatgcacttatttactgtctaattgataggatctcttatacaatcttaaatcctatatgtcattaaactata

SEQ ID NO: 3559 - DNA, 334 bp, Homo Sapiens
  misc_feature (287)..(287): n is a, c, g, or t
agcggggcattgtgggaagcgcccgcgctttcggcgggttccgttaaaatggcgccctggtggccggcggcgcccgcgccttagcctgtcaggagcagggagcttgcggggcgcaggaagggcgcgggccgcggtccctgcgcgtgcggcggcagtggcggctctgcccggaccaccgtgcacggctccgggcgaggatggcgaccccggaccagaagtcgccgaacgttctgctgcagaacctgtgctgcaggatcctgggcaggagcgaagctgatgtagcccancagtttccatttgcgttgtgcggggtgatgggcagcaaccttcgccc

SEQ ID NO: 3560 - DNA, 545 bp, Homo Sapiens
gcggccgcgcgcgacccagccaggcctccagcgcgtggaacagctccagttcatcctgcagcaccaggtccgagcgttgcaggagctgccagagcagctcggggctcacggcgccccactcggtgctggccgccacggccgacaggttccaggccaggaactgcaggcagctctcgcgcagggcctcgtccccggtgcccaccgcgtagtggtaccagcccaccgccgggcccgcgcctcccgccaggtgcgcgcgcatgtagtcggccacgccgcgctgcagggaggacacgccgtacttggtggccagtctgtgcagggggatggcctgggtcagcagcacggtcagctccccgcagtacaggtacctgatgaacttgtcgaagacagcggcgcagtcctgtggctcctgcagcaccgcctcgctctggttacttagcagctccaggaacagctcactgtgcagtcccagcagcaggcggtgggcgtggaatacccggacctcatcggtgcccgcagcctgcacccgcagaaccacatcgctg

SEQ ID NO: 3561 - DNA, 818 bp, Homo Sapiens
  misc_feature (2)..(2): n is a, c, g, or t
  misc_feature (621)..(621): n is a, c, g, or t
  misc_feature (642)..(642): n is a, c, g, or t
  misc_feature (676)..(676): n is a, c, g, or t
  misc_feature (707)..(707): n is a, c, g, or t
  misc_feature (738)..(738): n is a, c, g, or t
  misc_feature (769)..(769): n is a, c, g, or t
  misc_feature (777)..(777): n is a, c, g, or t
  misc_feature (799)..(799): n is a, c, g, or t
  misc_feature (803)..(803): n is a, c, g, or t
  misc_feature (811)..(811): n is a, c, g, or t
anagcggccgccctttttttttttttttttgggttggtttttatctctgattcttcccagtaactcatccactaagaaccctgcccacaggagggtctgatccaacggggggtttgaggccactcagctcagcctggttcccagggccagtgtcccactccagaggccaagtccatgctcccctcccctcagcaggcctgttcctccagagctgtccagtctctctgccaggctccaaattctccatcttcagtgtattgaccaaacaatgagacaggaggacagctgggagagcgggagtctgaaatcactggtagagtggcccaggacacacacaggagagagctccaccgctgctgagatgaagggactctccattcttctcaaaaggcttgctgtgtttttggcattcccccacctgacttttttcaagtgagttgttccgatctgacctcagagaaggccaaactgggtgcatggtcatgtaggtggctctgatttttcacttggtctccttcctcgatcactcccggtacaattattggggagtaaatgtgttctccccttcacatctttcaaaatggcaggtttccttttatctccgggattaacctccttcgngtccttcaacaaagactgttngaatcactggaatcttaattccacaaggtcttcntcacgattaatacaagaacagggagcaacangattgtggcacaagacaattccacaatgatnaccaactggattaccaaccaagaccagaggnctcaaggntgccggggtcaacaagtgttcnaggntccttccnggctgaa

SEQ ID NO: 3562 - DNA, 462 bp, Homo Sapiens
  misc_feature (275)..(275): n is a, c, g, or t
  misc_feature (330)..(330): n is a, c, g, or t
  misc_feature (370)..(370): n is a, c, g, or t
  misc_feature (374)..(375): n is a, c, g, or t
  misc_feature (432)..(432): n is a, c, g, or t
  misc_feature (434)..(434): n is a, c, g, or t
tgggtgttagctccaaagagatgccattgctgatcacccagtcttcggagaagcctaaaatttctttgaattaaaaactgatcctttttcataaagacccagtcacttctcccagtttagtgataacaggtatgacacaagaagctgaagtcttttagattttatagagagtaattctgaaacctgccagaatgctggtagcctgtggtgtccatggcaatgggtgtccatggtaaaatatctatagcttctgctcactgggcaaatataaaagncaacatattatttaacataatatgttgtctcttatattgttattttaaatctggnttacggaatatagtacccctgagcatttcatgttaggaancccnnttaaaggcactataagggtggattaggcaccagcggttaaaagtaggttgccaggcncnttaaaataaatggtttaatttcttaggg

SEQ ID NO: 3563 - DNA, 2507 bp, Homo Sapiens
cagagtgaaacttgtgcctggtgaccaaagtccctccaaagtgctcttccttctgggttattcaagccaaatatctgggtttccccctctcctcattccctagcaaaccccaattatcttccaagataggagatatttcccatccccttcctttgtaaatatctcatctcccactggagagcccaggagcctattcctggcatggatgttctgtccacacttgaggctgggcggtgtatcagacccttcaagcagcctggctggggcccaggactgagtctggggtcagctttcacggtcgcttttcccttcctcaccacccaccacagcccaccttgcatgcatggccagcccctccactccagcctgagccatgtgtgcccctgcgggaggacccattcatgccagaaagctggtaactccctcccagcatccctgcggaaggagtcagtttctgagagtgtgacttttcaaggcgaatgatggggaagggttccccagtccccacagtggccccacctctgggccctgcaccagagcccttctgtgtcacggcgggctgtgcacccatgcacacacctacgcacacacaacactccgcactgcagtatattcttgccaaagatttcctttaaaagcaagcacttttactaattattattttgtaaatgtttatcttcttctgtcttctccctccctgaatctattttactgttgtttattgttgaatctgtgtgtcagccaggagagcgctgtctggccttgaacatgggctgggatgggaaagggtctgggagaagatgggcaacaaagagccagggagtcatggacatcgcagcgacgcagaccccagcaggttcagtcccgtgctgccaccagctgtccagctgggtgtctggagggaagagggcagaggagggtcatgtcccttcagctgggggaggggcccagtgagctccacgtggctttttcccaaagggagcaagagggaaggattgggcgagaaaacaatggagaggggacctgcgaaggaaaacagggaggaagtgagcggtttgatcagcctgctatcacggtgttctggctctcttatttagccaggcgcttaagggacagatacatcacatcctaagtttgggaaaggcctttgacccatgtcatctgagcgtctcctccagtagctctgaaagctgtggacaccaatggccaggattccttctcccctggtttttgaggatccctgggtcttctgagactggccaggagagggatggtggggccagtggttgtgtgaaagcaggaggggcagccctcctggacaagtgtgatccccctataaacggctctcaggaggttagtgagtaggagattctgccttgttctgatgagcctgtgcaggggctccaggggagcatgctgtccagggggcacagaagggtggtgagtgtgatcaaatctagtctcactcccacttttttagtctcactcctacttttgtccaccacccctgcctcctggatcttctcccactttttttttcagctttaggacctggggagatcctgtgagtcaaggcagacacccaatcctgcccccacactcggggtcctccaagaggttggggggcagagtcccagagcagccctttaccccaggtccaggccctggaatcctgagactcgcgtttccttggccagtggtaacacaggacgtgtgtgcgcatgtgcaagtgtggatgtatgtgtgtgcgtgtgttttgctcatttctttagggaacttgggagtcggggttggaggtgctgggcaatggaacttcaaattcaatgtcgcccagcagtgaggggagtcgggaggtgaggcctgtaggccaaccaattggtggagtctcagcgatagcccaggtgagaagtggttcacccagaggggcagggtgggggcctcgggcagatctgtccctcttggcccctctgtcctcaaatgtccaaaatgttggaggacctctgttcatatcccacgcctgggctcttgccagcagtggagttactgtagagggatgtcccaagcttgttttccaatcagtgttaagctgtttgaaactctcctgtgtctgtgttttgtttgtgcgtgtgtgtgagagcacatcagtgtgtgcaggctgtgtttccccatttctctcctcccttcagacccatcattgagaacaaatgtaagaaatcccttcccaccaccctccctgcctcccaggccctctgcgggggaaacaagatcacccagcatccttccccaccccagctgtgtatttatatagatggaaatatactttatattttgtatcatcgtgcctatagccgctgccaccgtgtataaatcctggtgtatgctccttatcctggacatgaatgtattgtacactgacgcgtccccactcctgtacagctgctttgtttctttgcaatgcattgtatggctttataaatgataaagttaaagaaaaaaaaaaaaaaagg

SEQ ID NO: 3564 - DNA, 320 bp, Homo Sapiens
tttttttttttttttttgaaccctagcagatttattgaacagaagtgtccacgggctcacaattctaaggacatcatcatgacagcaagtaggaaaaaaaattaaagtaattctttcaccaattaccagtttatctcttctccaattcctttggatacgcctcctgcaagaagccgatttccagctgtatgtgataatgaaagggtttttctttcttatgttaaatacaagcgaagtgattaactggaagatagcgtctgattgcgaggaaatcagtgattcagatggtgtgggaatggcacctggggatgggggaggca

SEQ ID NO: 3565 - DNA, 499 bp, Homo Sapiens
ttttttttttatggcagagtagaatttattgggaaaaaggaaagctctcagcaaagacaggggtcttgaaagcaggttgccagtaaggcgtctgtgttctgtgtcttttatgtggcagaagctgggaagtcttctgtgggttttgcccagatgagagaagtaacattttcttcttggggtactacagctgtgcatgcctaagttttgccaaagggactccatcttggttattacccatgagtgcctaagcaaaacccatgggggtgctaaaaccacaatgctaatgtcatgtttaatgacattataatgagctgggttaaattagggacatttaggctgatttattgtgcccgcaccaaagttgggatggtcacttctgagcaacatcctagcttaagggtaacttcttccgtttttcctattaactgtagaggcagtataggcactgtcttgccgttgttcttgtgaacatagttcctttctatcccttctcctgaga

SEQ ID NO: 3566 - DNA, 2240 bp, Homo Sapiens
gtccttcggtgtctgggtgtggtgagtagaggtgtgtgtcacaaagtacagaccattgtgtgtgacaaagcccatcgtgtgtctgtgtgtgtctttatccacgtggatggacgtctctttcttgctctgccccaagacacaccctagcccctccttattctcaaaagggggagctggggagcctccccctaccctggggcctcccctgcccctccccgccctgcctggccgtcaccactccccagagggcacagggctctgctgtgcctcagagcaaaagtcccagagccagcagagcaggctgacgacctgcaagccacagtggctgccctgtgcgtgctgcgaggtgggggaccctgggcaggaagctggctgagccccaagaccccgggggccatgggcggggatctggtgcttggcctgggggccttgagacgccgaaagcgcttgctggagcaggagaagtctctggccggctgggcactggtgctggcaggaactggcattggactcatggtgctgcatgcagagatgctgtggttcggggggtgctcgtgggcgctctacctgttcctggttaaatgcacgatcagcatttccaccttcttactcctctgcctcatcgtggcctttcatgccaaagaggtccagctgttcatgaccgacaacgggctgcgggactggcgcgtggcgctgaccgggcggcaggcggcgcagatcgtgctggagctggtggtgtgtgggctgcacccggcgcccgtgcggggcccgccgtgcgtgcaggatttaggggcgccgctgacctccccgcagccctggccgggattcctgggccaaggggaagcgctgctgtccctggccatgctgctgcgtctctacctggtgccccgcgccgtgctcctgcgcagcggcgtcctgctcaacgcttcctaccgcagcatcggcgctctcaatcaagtccgcttccgccactggttcgtggccaagctttacatgaacacgcaccctggccgcctgctgctcggcctcacgcttggcctctggctgaccaccgcctgggtgctgtccgtggccgagaggcaggctgttaatgccactgggcacctttcagacacactttggctgatccccatcacattcctgaccatcggctatggtgacgtggtgccgggcaccatgtggggcaagatcgtctgcctgtgcactggagtcatgggtgtctgctgcacagccctgctggtggccgtggtggcccggaagctggagtttaacaaggcagagaagcacgtgcacaacttcatgatggatatccagtataccaaagagatgaaggagtccgctgcccgagtgctacaagaagcctggatgttctacaaacatactcgcaggaaggagtctcatgctgcccgcaggcatcagcgcaagctgctggccgccatcaacgcgttccgccaggtgcggctgaaacaccggaagctccgggaacaagtgaactccatggtggacatctccaagatgcacatgatcctgtatgacctgcagcagaatctgagcagctcacaccgggccctggagaaacagattgacacgctggcggggaagctggatgccctgactgagctgcttagcactgccctggggccgaggcagcttccagaacccagccagcagtccaagtagctggacccacgaggaggaaccaggctactttccccagtactgaggtggtggacatcgtctctgccactcctgacccagccctgaacaaagcacctcaagtgcaaggaccaaagggggccctggcttggagtgggttggcttgctgatggctgctggaggggacgctggctaaagtgggtaggccttggcccacctgaggccccaggtgggaacatggtcacccccactctgcataccctcatcaaaaacactctcactatgctgctatggacgacctccagctctcagttacaagtgcaggcgactggaggcaggactcctgggtccctgggaaagagggtactaggggcccggatccaggattctgggaggcttcagttaccgctggccgagctgaagaactgggtatgaggctggggcggggctggaggtggcgccccctggtgggacaacaaagaggacaccatttttccagagctgcagagagcacctggtggggaggaagaagtgtaactcaccagcctctgctcttatctttgtaataaatgttaaagccagaa

SEQ ID NO: 3567 - DNA, 425 bp, Homo Sapiens
  misc_feature (392)..(392): n is a, c, g, or t
ttttttttttttttttcagagccacagatattgtatagctgaggtaagcattttacaacttttcagacacaagtacataaatattattttacaaccaacaatatttaatatttccacattgaagaatagatgtgataattaaatcttttataaggttttaaaaagacatgaaacataaacctaattatacataaaagaaaagaattttaaacaagagcttattgggatgacattactcataacttttacctttaaaaccttttcttgggtagctattcaaaagtaaagaccacaagttttgttgcccagatttcttatgttttgtatatttaagctctttatttattgaacagatgtgtcattaattcattgggagcattactattatcagnaaaatttgatttttttttcccctcagtcatagg

SEQ ID NO: 3568 - DNA, 569 bp, Homo Sapiens
cggcgggcgcagacagcggcgggcgcaggacgtgcactatggctcggggctcgctgcgccggttgctgcggctcctcgtgctggggctctggctggcgttgctgcgctccgtggccggggagcaatgcgccaggcaccgccccctgctcccgcggcagctcctgtgagcgcggacctggacaatgtgcatggactgctgcgtcttgcagggcgctgaccgcacagcgacttctgcctgggctgcgctgcaagcacctcctgcccccttccggctgctttggcccatccttgggggcgctctgagcctgaccttcgtgctggggctgctttctggcttttgggtctggagacgatgccgcaggagagagaagttcaccacccccatagaggagaccggcggagagggctgcccagctgtggcgctgatccagtgacaatgtgcccccttgccagccggggctcgcccactcatcattcattcatccaattctagagccagtctctgcctcccagacgcggcgggagccaagctcctccaaccacaagggtggttggggggcggtgaaata

SEQ ID NO: 3569 - DNA, 3051 bp, Homo Sapiens
aaggaagtttgcctctggtaccaccttgggactaagtgtatacccaactaagtcccttcatctccctggaccctgccttcaatcatccctcctcttgcaggtctccaacatgctaccggtgatagtgggcccattagtaatgggctcccacttgtcctccatcaccatgtggttttccttggccctcatcatcaccaccatctcccactgtggctaccaccttcccttcctgccttcgcctgaattccacgactaccaccatctcaagtaaggaccttctccccacaatgggtccctaggcaacaaccatcaccctccctccttaagcttctgatagcaggcactggtatctcagtttacatgtgagtgctagttggggaagaggtctgatggctgggaaaataaccacactgggatgaccttactcttttccttctgaaattgggtcctcctccaactgggggttttaaacctatatttggactctgggccctttgaataagctctggacattctctttagaaaagtacatatatgcataaaactcctgcaggcaatcacaagtaagtcatgtatctctgaaagccccagactttttcaagtgtagtctacaaacctcctataccagaatcacctgagatgcttgtttaaaatataggctcttgaattccactccaaatatgctgaactaaggtatctgggggagcagggcctggaaacctgcattttagttaagtgttccaggggattctgatgctggtgatctcatacctgaagaagcctagttctgctagagattctcagactgtgggcatcaatcacatagcaagcttttcaaaggaggactccagatacggcaaattgcaggtttggagtggcccccgggagatgcattggtagcaactccccagcttattctgatgcagatggtcaggatggtggtgacaggtgtggggtaggagggctgagaaatgtgtgaggctggcacaaatgaaatgggatctgcacggaagcctccagcatgggcactgcagtgccgtcctctctcttctaggttcaaccagtgctatggggtgctgggtgtgctggaccacctccatgggactgacaccatgttcaagcagaccaaggcctacgagagacatgtcctcctgctgggcttcaccccgctctctgagagcatcccagactccccaaagaggatggagtgagagacagcctaagtgtcatcctggctgtccctcagccatgggatgcagacacggcttcctgattgcacctaacaatttgcctccttcggccacacgccctaatgatggcaccaccagggtagagggaaggtcggcttcccggaaaagcagggccaaggatgaggctttcttcaaactactgcccttgatgtccctcaatgggatcaggagttagcttaagaaaaaggaaaacacagctccccagactggaggctggtcagagggaggagacccctggtcctctgctgtggaaggagaggggttcagccccagataactcctttgtggcctgggcaggatgcagagaatgacaaggctgaaaggagggggactggaggctgcctggctccagcgagagctccttctgggaccagagggtgggacggccaggtatcactttgccccttcctgccccaaaaggctttcacatacccgactcaggccagagccaagacaccctggcaaatcattataggtctcaattcatgacataccagatgccagtcgccacttcacccaacacacacacaaacatacacacaccaaacactctgagtgagtggtaaaggccccgtttttactctggcccaccgcaaacaaaaggtttccctctgtgggggagaaaaagaaatccaggagctcctccctggattaaaaccaacgaggtgcagaccaaactttaacacctttagccttatgtggaaaccaaaaaccaactgctgggaaactgtgaaaagcccttttacccacaaggggaggggtcaaagttgctgccctttggggacacccgagacccctaattagcctatctgaatgaggaccaaaggttagagccctctttctccccgaagaaagagcccggaaaaacatggcagagcaaagagcaaaatcctttctcccccgaatgctttaccagtttctcagcaacatttattcaagatgatttttaccaggaaccttatcaaaggcaaaaccacagctgcttgggttgaagtccccatcctggcctcctctcagccgccagacatggccaggaaccctgtggttcccaagaacaatttaaagatcactctttgatttgaaagaccaccattatcattttactaaattcttatatatacttgtgccttttccaactttcagttctcttaagaaaaacatccactgtagctttataaaataccttagtatcagctaggtccaagtctccaggcaggactatcaaaatggactccttcttcctatcagctctagaaccccagaggacttgcccagtaggccagctgagcacttaccaggcagcatctccctggccttccacagtctcgcctgtctgtctctggccttggtggacctggctccctccctaggaggcttttgccctcagcttgaatacagttcctggtgcatcaaagctgtaagttctcagctgctggcctgcactcatcacctcttcctacaaataaacatttggaaaaaagtccatcttcaatatgcttaaagagaagggtaggagataaggagaaagaacagatacggtttttttcccctttaaggcctttagattttgaggtactgtaaggggcctagaaggacaaaaggctttcattccctcttccttttggcaggcaggttatcagtccttggcagaagggcccagccctatccttttctgtatcaaacaaaatccttgaggttggtatacaagttaaggctgaaaaaaggccttaaattcccagtaaagaatgtgaaagcaagcatgtaaaataaactggtcttcatgaaaaaaaaaaaaaaaaaa

SEQ ID NO: 3570 - DNA, 2930 bp, Homo Sapiens
gaattccggtttcttcctaaaaaatgtctgatggccgctttctcggtcggcaccgccatgaatgccagcagttactctgcagagatgacggagcccaagtcggtgtgtgtctcggtggatgaggtggtgtccagcaacatggaggccactgagacggacctgctgaatggacatctgaaaaaagtagataataacctcacggaagcccagcgcttctcctccttgcctcggagggcagctgtgaacattgaattcagggacctttcctattcggttcctgaaggaccctggtggaggaagaaaggatacaagaccctcctgaaaggaatttccgggaagttcaatagtggtgagttggtggccattatgggtccttccggggccgggaagtccacgctgatgaacatcctggctggatacagggagacgggcatgaagggggccgtcctcatcaacggcctgccccgggacctgcgctgcttccggaaggtgtcctgctacatcatgcaggatgacatgctgctgccgcatctcactgtgcaggaggccatgatggtgtcggcacatctgaagcttcaggagaaggatgaaggcagaagggaaatggtcaaggagatactgacagcgctgggcttgctgtcttgcgccaacacgcggaccgggagcctgtcaggtggtcagcgcaagcgcctggccatcgcgctggagctggtgaacaaccctccagtcatgttcttcgatgagcccaccagcggcctggacagcgcctcctgcttccaggtggtctcgctgatgaaagggctcgctcaagggggtcgctccatcatttgcaccatccaccagcccagcgccaaactcttcgagctgttcgaccagctttacgtcctgagtcaaggacaatgtgtgtaccggggaaaagtctgcaatcttgtgccatatttgagggatttgggtctgaactgcccaacctaccacaacccagcagattttgtcatggaggttgcatccggcgagtacggtgatcagaacagtcggctggtgagagcggttcgggagggcatgtgtgactcagaccacaagagagacctcgggggtgatgccgaggtgaacccttttctttggcaccgcccctctgaagaggtaaagcagacaaaacgattaaaggggttgagaaaggactcctcgtccatggaaggctgccacagcttctctgccagctgcctcacgcagttctgcatcctcttcaagaggaccttcctcagcatcatgagggactcggtcctgacacacctgcgcatcacctcgcacattgggatcggcctcctcattggcctgctgtacttggggatcgggaacgaaaccaagaaggtcttgagcaactccggcttcctcttcttctccatgctgttcctcatgttcgcggccctcatgcctactgttctgacatttcccctggagatgggagtctttcttcgggaacacctgaactactggtacagcctgaaggcctactacctggccaagaccatggcagacgtgccctttcagatcatgttcccagtggcctactgcagcatcgtgtactggatgacgtcgcagccgtccgacgccgtgcgctttgtgctgtttgccgcgctgggcaccatgacctccctggtggcacagtccctgggcctgctgatcggagccgcctccacgtccctgcaggtggccactttcgtgggcccagtgacagccatcccggtgctcctgttctcggggttcttcgtcagcttcgacaccatccccacgtacctacagtggatgtcctacatctcctatgtcaggtatgggttcgaaggggtcatcctctccatctatggcttagaccgggaagatctgcactgtgacatcgacgagacgtgccacttccagaagtcggaggccatcctgcgggagctggacgtggaaaatgccaagctgtacctggacttcatcgtactcgggattttcttcatctccctccgcctcattgcctatttggtcctcaggtacaaaatccgggcagagaggtaaaacacctgaatgccaggaaacaggaagattagacactgtggccgagggcacgtctagaatcgaggaggcaagcctgtgcccgaccgacgacacagagactcttctgatccaacccctagaaccgcgttgggtttgtgggtgtctcgtgctcagccactctgcccagctgggttggatcttctctccattcccctttctagctttaactaggaagatgtaggcagattggtggttttttttttttttttaacatacagaattttaaataccacaactggggcagaatttaaagctgcaacacagctggtgatgagaggcttcctcagtccagtcgctccttagcaccaggcaccgtgggtcctggatggggaactgcaagcagcctctcagctgatggctgcacagtcagatgtctggtggcagagagtccgagcatggagcgattccattttatgactgttgtttttcacattttcatctttctaaggtgtgtctcttttccaatgagaagtcatttttgcaagccaaaagtcgatcaatcgcattcattttaagaaattatacctttttagtacttgctgaagaatgattcagggtaaatcacatactttgtttagagaggcgaggggtttaacccgagtcacccagctggtctcatacatagacagcacttgtgaaggattgaatgcaggttccaggtggagggaagacgtggacaccatctccactgagccatgcagacatttttaaaagctatacacaaaattgtgagaagacattggccaactctttcaaagtctttctttttccacgtgcttcttattttaagcgaaatatattgtttgtttcttcctaaaaaaaaaaaaaaaaaaaaa

SEQ ID NO: 3571 - DNA, 3024 bp, Homo Sapiens
aagccttcaccagcacaggctttgaccgtcacacttctccagtgttcagccctgccaatccagaaagctcaatggaagactgcttggcccatcttggagaaaaagtgtcccaggaactgaaagagcctctccataaagcattgcaaatgctcctgagccagccagtgacatatcaggcatttcgggaatgtacactggagaccacagttcatgccagcggctggaataagattttggtgcctctggttttgctacgacaaatgcttttggaattgacaagacttggtcaagaacctttgagcgcactgctgcagtttggcgtgacatacctggaggactattcggcagagtacatcattcagcaaggtggctggggcactgtgtttagtcttgagtcagaggaggaggaataccctggaatcactgcagaagatagcaatgacatttacatcctgcccagcgacaactctggacaagtcagtcccccagagtctccaactgtgaccacttcctggcagtctgagagcttacctgtgtcactgtcagctagccagagttggcacacagaaagcctgccagtgtcactaggccctgagtcctggcagcagattgcaatggatcctgaagaagtgaaaagcttagacagcaacggagctggagagaagagtgagaacaactcctctaattctgacattgtgcacgtggagaaagaagaggtgcccgagggcatggaagaggctgctgtggcttctgtggtcttgccagcgcgggagctgcaagaggcacttcctgaagccccagctcccttgcttccacatatcactgccacctccctgctggggacaagggaacctgacacagaagtgatcacagttgagaaatccagccctgctacatctctgtttgtagaacttgatgaagaagaggtgaaagcagcaacaactgaacctactgaagtggaggaggtggtccccgcactggaacccacagaaacgctgctgagtgagaaggagataaacgcaagggaagagagccttgtggaagagctgtcccctgccagcgagaagaagcccgtgccgccgtctgagggcaagtctagactgtcccccgccggtgagatgaagcccatgccgctgtctgagggcaagtctatactgctgtttggaggggctgctgctgttgccatcctggcagtggccatcggggtagccctggctctgagaaagaaataggaggcttttcagaagagaaagacagaaggatgtaaggttggagttgtattggctggaatttgaacctccagcagctgtctggacatttgtggaacactctgggataattggggacttctgctcaacatggcagtggcatgttaggcatgttagggcttgaggtggggcattcacattcatctgactgtaaatcccaagggcctccgctcatgctaaattgagaatcttaggggtaaagcaccccctccaggaccgggtttctcagccttggcactagtgctgttctgaccattctctgtgttggggctgtcctgtgtgtggtgggctccacccactagatgccagtggcaccccctcccagagatgacaaacgaaaatgtctctagacattgccaaatgtcccctgtgaacatcccctattgagacccactgctttagcgagagagggtttacttaggaagaattgggatagaaattcccagctgagagaacttagctgtgggctcctcagctactgacttcttagctcttaatccccttagaatttcatctttctcgatgagcaggctctgcacccactctttttttgccccccgccccatcctggagtgtgagggtgctcgcccgtactctcagctgcctctcagggactgcactgttcctcttcacccccaggttcctgctaagatcccacgggcgagggcttgctctggactcagtctgtcaagtccccgaagcttcctgcagctccaccttgtaaaaatgctgcctttgggaatcttcgaaatatgtacacagagaaaaatcacatgaaggagacctggggtccccacttgtgagtgcaactgcaagtaactctggctagagagaacatgtgtcttgtgtcaaggcaggaggataacctggatgaccttctgaggtctcttcagcccttttcgctagtggtcacccaccaccatggttacttgccagcaacatctctattgctggatggtccctgtctataaccttgggctagtatattttttccaatatgggaccttagtcttactactgatgagttctatgggtctcttgctagggggtaaggatttttattcttgggcttatagagccagttagatcataattcttatgaaatagagagtgtcctaaatatcactgaaataaaaagtaggaaaaagaagcttgaattttaagactgaggctgctctgcagattctagtttggctttcagagttcaagagtggtggcatcttcacctgaattcttcaatgccagggtaataaaccaaaatagtcctaatcagtatatgctagttgagcatcggcataattttctttcctctggctgatcccagccctaaaggaagggtagacccgtgtctttccagccctaaaggaagggtagacccgtgtctttccagccctaaaggaagggcagacccgtgtctttccatgcccgagggccacgacgtcactatgcagggcacacgtggcttggtttaaaaaggtcatcttagatttatcttagtaaatgtaataaattattttttaaatcttgaaatttataataaaaatactttacctaccctgatcaccacaaaacctgatgttttaaatgtgctttctttttgaaatttatgttttcaaataaaatctccctaaagcaatatttaaaaattggtcaaaaaaaaaaaaaaaaaaaaaaaaaaaaaaaaaaaaaaaaaaaaaaaaaaaaaaaaaaaaaaaaaaaaaaaaaaaaaaaaaaaaaaaaaaaaaaaaaaaaaaaa

SEQ ID NO: 3572 - DNA, 298 bp, Homo Sapiens
  misc_feature (265)..(265): n is a, c, g, or t
  misc_feature (295)..(295): n is a, c, g, or t
ttttttggttgagaagtgtttattgtaaaaatggagtttataatgaaaataaaaaattatttcataacattctgataccactacacctgagttcgatgccagcatggtttgaaagtgaagctgatacaagttttctaaaggatgttaaaaaactatagtatgaagaatgtaataatattttagaagacattaaaacttaaatatttaggatgctgtatatgagaaatcacaccaaggctctcttaattaggttaacattagacanctacatctcaatttccaagcttccaaaacnagg

SEQ ID NO: 3573 - DNA, 504 bp, Homo Sapiens
tttgaacttgtaacctttgtatttataacattcaaaacgcttgaaaatgagtgggtacacagtggggcaggatgggggtaagggtgatgtaaaacgcaggtagcagccatggaggggtggacagccgggatgggcctccctaaagcatgctgctgagtatttctgacatgggagaggcggtggggccctcctgactcacatcggggccagtggggctgggcagggtgatgcggcctccaaagggcgggctcaagcttgcccatggtttttcgtcctgggccaccacggccgctgcgtagggctccacgtagaggcggcggacggaaggcctcgcgtcctggagactgctgttccgctcctcaggaaggctggcagcgtgggccaaagttaggcccctgggatcatcaagggcagggccggcccgcttggcctccttgggctcctgggccagaccacaggcctgggacaggtgctgtgtataaatgccctcagagagcgatagcg

SEQ ID NO: 3574 - DNA, 609 bp, Homo Sapiens
  misc_feature (531)..(531): n is a, c, g, or t
  misc_feature (562)..(562): n is a, c, g, or t
aaaaaatggagcatcatcccaaaattgtaatttcaagaactcttgtcactgtaaacgaatgctatttgtgaattagattgcagtcagcatttaaaggcaggcccctgatgatttttcaaatcataagctttccctgcattgtttgtccaacaataattcttcaaaggttgaataatcattttggggttgacaaagatggcatggaacagcactgggtagggtggatgggtagagagataaggaggatgactgagagggagggagaactggagaaattcaggctatgagaaagacactagacaataaagaaaggcctttaactggatggctagctaatccagtctttcaatggggaatcttttaagggctctcaggggacccctggaggaatacatttgtttcagacatctagagttatttttgcgggacataaccatctaatataagtatactatctaggacacaggctaccttgtcaaggaaagtctacctatcacagaataaacatgttttagaaaaactttccctcanaccactgctaataaagactcagccacaagtnctcttttttatgtgaagacacatttaaaaaaaaaagaccctgtttaa

SEQ ID NO: 3575 - DNA, 6296 bp, Homo Sapiens
cactgggagagtttatgtggccgaggcagacaagtggaattaggccttgctgcaggggacttcatttccttctcagtactggacccatttatgaggaggtggcttatgaaagtgtgatgttcgcgtatttcttgacaggcagtggcgtgatcttggctcactgcaacctccgactccctggttcaagcgattctcctgcctcagcctcctgagtggggattacaggccacagcaaacacaggtgtgcaggaaccgtttgtcatggaagccagggagcctgggaggcccacacccacctaccatcttgtccctaacaccagccagtcccaggtggaagaagatgtcagctcgccacctcaaaggtcctccgaaactatgcagctgaagaaggagatctccctgctgaatggggtcagcctggtggtgggcaacatgatcggctcagggatctttgtctcacccaagggtgtgctggtacacactgcctcctatgggatgtcactgattgtgtgggccattggtgggctcttctctgttgtgggtgccctttgttatgcagagctggggaccaccatcaccaagtcgggagccagctacgcttatattctagaggcctttgggggcttcattgccttcatccgcctgtgggtctcactgctagttgttgagcccaccggtcaggccatcatcgccatcacctttgccaactacatcatccagccgtccttccccagctgtgatcccccatacctggcctgccgtctcctggctgctgcttgcatatgtctgctgacatttgtgaactgtgcctatgtcaagtggggcacacgtgtgcaggacacgttcacttacgccaaggtcgtagcgctcattgccatcattgtcatgggccttgttaaactgtgccagggacactctgagcactttcaggacgcctttgagggttcctcctgggacatgggaaacctctctcttgccctctactctgccctcttctcttactcaggttgggacacccttaattttgtaacagaagaaatcaaaaacccagaaagaaatttgcccttggccattgggatttctatgccaattgtgacgctcatctacatcctgaccaatgtggcctattacacagtgctgaacatttcagatgtccttagcagtgatgctgtggctgtgacatttgctgaccagacgtttggcatgttcagctggaccatccccattgctgttgccctgtcctgctttgggggcctcaatgcatccatctttgcttcatcaaggttgttcttcgtgggctcccgggagggccacctaccggaccttctgtccatgatccacattgagcgttttacacctatccctgctttactgttcaattgcaccatggcactcatctacctcatcgtggaggatgttttccagcttatcaactacttcagcttcagctactggttcttcgtgggcctgtctgttgttggacagctctacctccgctggaaggagcccaagcggccccggcctctcaagctgagcgtgtttttccccatcgtgttctgcatatgctccgtgtttctggtgatagtgcccctcttcactgacaccattaattccctcattggcatcgggattgccctttctggagtccctttctacttcatgggtgtttacctgccagagtcccggaggccattgtttattcggaatgtcctggctgctatcaccagaggcacccagcagctttgcttttgtgtcctgactgagcttgatgtagccgaagaaaaaaaggatgagaggaaaactgactagaggtcagaggtggctttctgaggcctggaaggcaggccaaccagcaaaatcctgataacaagactctgtgggcccaactctcctgaattaaaggagccttttgacccaatcatatagtggggctcagggccagtgctcactcttattggtaagctataggagactcaggatctgggccaacctcaaggtgggggcttcagagggtggggggaagattggggaacggggggaatggtcatttagttttactcctgataggtagatgcagctcttacagatatttacttggtaaagtgcagtggggaagagggaatgctaggttgatagggctggtggcttctgaatttggtatttgaactaggagtccctatagaggggctgctttatgggaagtttttctctgaccaggtacaacacctgactttaaaggcctgaaatgctaccatttcttcctctggctcaaaattcttccctggggagagagttatattcccttatttattgatatttagtccagaacaccagttctaacgaagcatgcgtgtctcttcatctacaggatgcaataggctgattgtatttaaaaatcaaagtacccaaaactgagtccctttgggctcagaaatgtctgtggtattgggtcagactctgaccacagattttatgctgtttagcacaatttctattgagtcttacctgcaacaatgaaccttaaagatttttttactcacgtacctgttacactttagcatacagatagatcatagatcacgttacaagcacttggctcaggtccagcaaggacagatgaacaaattcctgagtcagaagtctgttaatattgctgttttgaaggacaatcctttattttacttgagaccttacatctttgttctagctgacagtaaatctctgggtttctgttacgaactctaagagggctgaaacttctgatattcaggtggatcacctgaattctctcagctgtcaatggcttggagaacatctcatgggcccaagtcatcaaataacctgttcctctctgtaagggcagtgtgagggactgctgtgcagacccaagcaatcccaacctggtgctaggtcatttcacttttctgaaaacctcacatcaggctgcatcctcttctgtccctggcaccaggctttgtttacacttggagccaccttggtgtgggtcaccgggacagtgtactcctctcctgccagcctccccttccccgaggtgtggtggctgcagtctcaggaagagcttggtacttgtggggacttctgttttctccctgtggagatcagtgaagactgggaggaaagctgcttcaacctgagtccggctcttcagcaggctgcacaagtggaagcaactaattctggtgctcaggctgggctctccacccaagttaggcctgctctggcctaatggatcttactgtatgagcaggacggctgcattggattgtacaactgttttgtgatgcccccagacactgtcatcctaggccgagaagaacctgctagcttgacataccccatgggcttatccttaggttttggaattggtcaacagtgaggcagtctcccttcctgaccattcttctccacccagtcacagataagggaataaccttggccatatatttgctcaataaagattgaaggaagcatggtcatagttgccctgggttcagagcataatgcatatgtgaagcatggggtgacattcctactgtcatgggtttgggatttgtaacggcaaattcctgcccgacgacagggtgtcttatgcaaaggctgacttgcctgaacgctaagaacatgacttctgtctgagctaagctggcacccatcccagggctcctctggagctaatcctttaagcaaaatgtgcttgccttttaaagatccctgaccccagctttagctttctccaccagataaccagctaatcccaggaatttgctgccccccaccagtggcttctagggaaagcaaggacctcacatgccaggtgccctagtacttgcttagtgagccatgtcatcctcctttcatttttggatggtgacagcatttttcccctctgtgctggatacagacttctcccaggatcctctctttgggagcgaagccagaggatccctacagcactcaagcttcatggtggaattaatttctgccagctctttgttgtctgtctccttaaatccttttcctggtgtgcttattatcccttttgcagtgagtacagtttattaagttgtcagccctttaatattggggaaacttaatgagtataaatagcagggagcacattgtaacagcacagtgttttgtttttttcacccggttgctgtatgagaatggctttcaatcctttgtttctatgcctacagacagaaagcaagatgtctaatattagacatacaagttgctgcctgttataacggtgaattatacctttgtgcatgcctaggatgtttgttgttttaattagctgcaatatatacggcctgtgtacacagaatttaatcacttcggcaggttgaacaactccatgtagataagagcaagtgtaggcaaaggtttagaaaatggacataaagtcaaagaatgatggcaggtaggatgaaggagagatacttaggaaatcctaaaagaggcggcaagaaggtacctccctgtgtaactcaccttcccccatgacagtaagagacactcacaggctatgagggtacacccctagctgaatgttctgtgttgtttccttagacctgtggtgtccgctgcaacagctactagccacgtgtagctaattacattaaaatgaaataaaattaaaagctcagtttctcagttgcgctaatcacatttcaagtgctcagcagccacccgtgtctactactacacagtgcagacacagaacatatcatcactgcagatagttctactggacaatgttacgctagaataaacaccaaggcagtcagttaaggcagctatggtttggaaaggcatacggacagagtctgcttagaagagatacaagttgttaataaaattgatcctgttgatagtagtttgtttttgtggtgggtgctgtgaagagtaaacattactcagtggaaagctaagttcagaaggtactttgtttttcctcccttgccttaagtccttggtatttataatcaatgctgaaccttctatttcactaccgctccctgttttagatattcagatttaaaaggttttcaaagaattactttcttccatgttcaaagctagattttactaaacacatgtatcacattcatatatattgtttcttggccccactgccaaaggaagtcagtcagtaatttcacaaccgttatcagagtttggaagcagaaatagctgttaactaaaatctcccactgctcagactactttctgccctaatggccattactatccagtctgtattgctacaagggacccactggtaccccttttagattctatcaaaaggaacagggttttcctagaggcaggcagcctggtggtatggcacagcagaagcttactgctaatgaaatgggaacctccccctcccttgtggtttcagcacagaacctgaatgccaggaaaaattcctgggccaagaagctaaagctaaagaaaccttccttttttcaacgtttttttttctttcaaactgtagggtcacttttgattgaggcaaaggggtcctactgtaagtggaaaagactcactcccctaacataagttttcactgtggtgggatggtgccgcccgatatgcttgatatgcttttccttccacatgttaagctaggaaacctaacaggatgtcagcagggcagttaactctggactcagagccctcaagggcatgtggcagaacctcatggacatcacaagaccatcagtctgaatccaggtcgtgggggctgtcatagccgaactccttctgcacatccagagggtacttgctccacatccgctgtctgctgctgcctctttcctcctcactcaggctgttgtagtcagcagagcctagaatgacatcccgggagtggattctaaatgtgattttcctaggctactgcaggagccccttctcttctcagaaaggtctgtttttgttcccgattgtaatgcaaaatccttgctcaataaataaaaaagaatatagaattcttttttttttaaagaaggaatcactttcctatcatctaaaccaagttccttcacactggagtattttgtcacttctcccctccgtggagtattttgtcacttctcccctccgtataggattttttgttgttgtaagagttgtagtcatattgtaaatatttttgtacctttctccttttaacgtgttattgacaaacctccccaaaagaatatgcaattgtttgattcatttctctgttatcagacaccaataaattctttttgttgggc

SEQ ID NO: 3576 - DNA, 443 bp, Homo Sapiens
cggctgacgtgtctttcaggcagaggagctggtgagaagacagcgaaatggcgcctccggccccggccggcctccgcggctccggggaggtagacgagctgttcgacgtaaagaacgccttctacatcggcagctaccagcagtgcataaacgaggcgcacggggtgaagctgtcaagcccagagagagacgtggagagggacgtcttcctgtatagagcgtacctggcgcacaggaagttcggtgtggtcctggatgagatcaagcgctcctcggcgcctgagctccaggccgtgcgcatgtttgctgactatctcgcccacgagagtcggagggacagcatcgtggccgagctggaccgagagatgatcacgagcgtggacgtgaccaacaccaccttcctgctcatggccgcctgcatctatctccacgaccagaaaccc

SEQ ID NO: 3577 - DNA, 433 bp, Homo Sapiens
ttgaatttaggtgacactatagaagagctatgacgtcgcatgcacgcgtacgtaagcttggatcctctagagcggccgcctactactactaaattcgcggccgcgtcgacctcacaaaaatatgaaattatcagaaggattatagtgcaatcttatgttgaaagaatgaactacctcactagtagttcacgtgatgtctgacagatgttgagtttcattgtgtttgtgtgttcaaatttttaaatattctgagatactcttgtgaggtcactctaatgccctgggtgccttggcacagttttagaaataccagttgaaaatatttgctcaggaatatgcaactaggaaggggcagaatcagaatttaagctttcatattcttacccttcagtcttgttcttcaaccatttttagggaacttttcccataaggg

SEQ ID NO: 3578 - DNA, 535 bp, Homo Sapiens
  misc_feature (481)..(481): n is a, c, g, or t
  misc_feature (486)..(486): n is a, c, g, or t
  misc_feature (502)..(502): n is a, c, g, or t
  misc_feature (528)..(528): n is a, c, g, or t
  misc_feature (535)..(535): n is a, c, g, or t
ttgggccttctaatggtttcatgcaagttggttttttaagacctggaaactgattgggtgacatttaatcttcgagattaaaatcacttggtgaatattgtattgttccactgttctcactgtcattttggcatttggggcctcgctctgctgcttctgctggagcacttaccagctaatgaaacctagcccaggagcaagctgcctgaatctatgtcaaactgcatctggcacccatctatcttccagtcatctaaattcacctcggaaatcatacaaaagcagccacatcaacacaccagtctttgttttatcaaggctgtaaagcaattttagacttttttaaaaaaaatcctatgtatttcagagtggcagcttttgaaaggatgagggaaaagtatttctaaatcctgagaatattgagactttaaataccagtaaaaatttggaggaccatcattagcacggttttggctgaaanggtanattgaggggcttgccngtagagacccatactgccggaagatnccagaan

SEQ ID NO: 3579 - DNA, 4617 bp, Homo Sapiens
gggcattcctttagcatcattcatctttggtttcttcaagttgccactgaaaagctagacctttgcctattatctgctaatctacccagtctcacattctattgactcattgttcaaagggggggcaggaggagctaatttcctttgcacatttgtattttatttcaaaataaagtattctcttctaacaataacgtatctcaagtgtgtattcagacaaaatttataaaacatctttttattattatattttgatcctgtgaggaaagaataggtgttttcttattttctgccatgtattaagcttttagatatttgccagatatccagtatctggaaaaaactcatttatgtagtacccatgttttgagtacctaccctgtgacatggactgtaataggtgcaggcagggcaagaacccactcttgaactttttagttaggcctacccaacagaaattactctgaccttataccttttagtacttacgtaacattctcatcctttactgacagtgccctgtatgcttccgtccatcattctgagattcaccagaataattactttgaggcatctccgttaagaatttgattatttgacttacctcttatccttaaggaacacatggaaggtcgtttgctttttcttataagtttggatgaaggggaagataaacattctatatcgtgtatgtactctaataccagcaacttctgggtactagaactacaggggaaagtaagacagagtaccctcgtggagtttccattttagtgggacagacaataaacacaataattgtagcttatatattctatcaaggaaataaacatagtatagtggtaaaaaaaaaacacaaaaaataattttagggtaggggagtatatgagacagggtggtcataggctcctctgaggaggtattatttaagctgacacttgaaggatgaggggaacagcttgtgaagaactaggggtaaagcatttcagacagaataccaagtgcaaaggtcctgagacaggagaaagctcggcatgctctaggagctaaaagaaggccagtgcaggccaaaacgtagctcgcagggtgaagagtggtttgaggcaaggttgggggatggtagctatgagaccaccacgctctgtagtccatagtgaagagttggaattatatatttctgtataaaggaaaactgtggaaaggtctagcaggggagtaatatgatctgattaacactttaaagctgattttggctaccttgtggagattgaatgctggtggaaagtgaatttaagaatagaagctggaagaggcaattgtcctggaaagatgttggagatttggtctagagcagtggttctcaacctcagctgtggttgcctgaggagctttttaattgttttttcttttttcttttttttttttgtaagagactggggtctcagtatgttgccaagtttgtcttgaactctagagcttaaaagattcttctgcctcaacctctcaaatagctaggactgcaggtaccataccaccttgtctaacaaaaaatcttaatgcctaagcttcaccccaggccatttaaatcggactttcttaaggttggcccaggaataagaccttttaaagtttcataggcaattccaatgtgcggtcaagactgaagattgttggtgtagaggtatggcaggggagctgtgtggggtagattaacctgaaatatattctgcaggttcaacagacaggagttgctaatacgttgaatttcagtgggaagtggtgagaaaaaggactcagttttttggctttcataaatgaattgatcgtgtcatttaccaagacaggaaagactgaacattgagaaagaaaatcaagagttctgttttgagtatgttgagtttgagatgccaataagtcattcaagtggagaatgactccattcaagtggagaatccagctatgattgagcctggagctcagagaagagatccctgttagagatgaaaatgtgagttgatggcataaagtgggacttaaagttaagaaccgattgagttcatgttgggagagcataaataaagagaaagagcctttggctgaggcttgaggaactccaggggaggattatgataagggagaaagaacctgaaaaagagactacaaacagccagtgaggtaggatattgtggtgttcctgaagccaaaggagaggtagtgtctctagaagaaagctgcagctagctgggttgaaaatgacagctgtcaagtacagtgaggtcagagaggtattgaatttagcaagattaatgctgttgatgaccttgataatttgaagtggtggaggtagaagtcagagtggagtaagctgaggaaaaagaatgacagagaaaacatttaagaggaagagtaaatgggagatgaggaaaatatatatagccaacttttttgagatttgggggttttgtttgttgtgaatgtagcaggaaaaaaaatggagctaataggcagaagataaggtagaaccaagaatatgtgggttatttttgtgtgttttggttttgttttttaagctattgatgagaatatttcagtagagagattaggaacggtgtgaagttcttgagaaggtaaaaggggataagattcctatcacaaatggggtggctttgaagagagcaggaattcttccattttagaaacgatgtatgtaggtgcagatagatttggggagaaaatgaaaagaaggaagaaggagcctgagtcttggagtgagcaaatggacaagaatgatgtcaggataaactcagtaggccattcttttgaccatatatgattctgccctgatctggtttatatctgattttgactcattttcctctctcttccttacttgatttcagatgttctctgttttggaggggatatcctaaatatcacaggtatttttttagtttttctgaatacttaaaagactgagtgaggaggactatatttaggtggaattcagcatattggtttattcagcattgtttgattaataggtactggaccctggggatacaaagatgaggaagacatagtctgtgcctcaaaggatcccccagtctaatggaaaagctttgcccaaattaaactctcacatgctttgcatttttgtttagattgaaggacagcaaaataagtgccaataaagcgttcttgagaaaactaatgagaaatttggtcattaatagcagaagctaagcatgagatggggaggagttaagcatgtcctatctggagaactcaggatcactaacagctgtatgccccggagttggcctgtcttcttatttaaacataataaaaccagccatcaaattagatatgaacttgaacccacattttatgaatcttttgctagtatctctcctcctctgttagtatactggtggaaggaagattgctaaaaatatccttaggatcatttaaacttctacctagttacgtttttactgaatgattttgaggatctgaagcagtattttaacctagcataatgtatacagccaagaaaccttgcctgataacttacttgatatccacactgggtcaagttgatcttctgcattactgggactttgccctggaccaagtaagtctagatatttggtccccatcagcctatcctgtgtgtctgcagggaacatgctcctggcactctggagagtagaacaaaatcaactgagtgacatcattaccttggtggcaaaatgcagtctggagatacaggagaaatttgggatctatcataccagggaaggccaggacctgcagttaaagataggtagtacctcctaaaagagtgatccagttgggcaagggggaacccactataaaaacctcaaaagataaatgataaactgggaaaaaatgtttgcaattcatatagacaaagggtgaattgctctactagggaaagagcacttagaaatcaagaaaacaatagtactcttaagagaaaaattggacaaaggacatgagtaaattgtatatagacaaggaaatgcatgtcttttaacacgtaaaaagatgatcaacattcataataagaaaaatgccaattggaagtacactgactacctgtcttacctatagataggcaaaacttcagatgctgacaatgtactctttggtgagtctgaggaatgagctttttcttactgtgagtgaacaacggtataaggtgatttggcaatctttatttatttttattgtctattgtatttttttatgtcaacaaaaactaaaccatataaaaatatatattaaaaagtcttgttttcacttatataccatctatactatttactcttacaagtgcatttattccttaacctagcaatccttctggacatctataggtatacgttcacacacctgaaatgttgcatgtgcaaggttattgattgtaatatggtttgtaattttaaaacattgaaaactatttataggagactggttaagtaaataatatgtatacttaataagattacctgcaacttaaaaaaaataagatgtcttgatatggcagtatctccaagatacagttaagtgaaaaaaaaaaaaaaaagaaaa

SEQ ID NO: 3580 - DNA, 387 bp, Homo Sapiens
tgcggacggtgtccttgtctgtatatacattttatatatgtctttcatgtcattatttcatttgatcctcacaacaaccctgtgaggtaggccggggggaaaatgttagattcactttatagatgacgaagttaaggttcagagaggttaagtgactttctcagttaccatatacctagtacgaagcagacagaataagaaccactaacttttgtggttgggggcccttttctctaaaccacatagcttctgagagtataatgtaacccaaaacatttttaccgcttcatcctcatttccttattgttaattcaacttttttttttttttaaaacggagtctcgctctgtcacccaggctggagtgcagtggtgtgatcccggctca

SEQ ID NO: 3581 - DNA, 374 bp, Homo Sapiens
  misc_feature (6)..(6): n is a, c, g, or t
  misc_feature (39)..(39): n is a, c, g, or t
  misc_feature (136)..(136): n is a, c, g, or t
  misc_feature (138)..(138): n is a, c, g, or t
  misc_feature (147)..(147): n is a, c, g, or t
  misc_feature (235)..(235): n is a, c, g, or t
  misc_feature (238)..(238): n is a, c, g, or t
  misc_feature (276)..(276): n is a, c, g, or t
  misc_feature (325)..(325): n is a, c, g, or t
  misc_feature (330)..(330): n is a, c, g, or t
gaaagngacgaccaactgagaggtgggcccccaaagccnggctgcgagagtcaccagaagatttccggagagccaaggagtcgggaagagccacttactgagcgttgccgaacgtgtacggagatagccgaagagngnaaaggcggnggcacaagagcccttcctgcagggaacctcaggcttcagagagccgaaaagttgggaggcgtaaccacttacaggccggaagtgtccnggngtggacgcattcgggtagccgaagaagtcccaggattnccgaagaagtcccagggatttccgaagcgagccgaagcatcgcaaccanttttnagagacagctgatcggtttggagctctttcgcccgagcagttca

SEQ ID NO: 3582 - DNA, 526 bp, Homo Sapiens
tttttttttttttttatgttgcacatgaaaatatatacagtttttatttgtcaattaaaaatacattaattttgcaaaataaataaatgaatgaccaaataaatccagaaaccaatgcatgaaagaataaatgtagctgaataaatgtcagtgaatggcttggtcaatgtattgaagaatgagtgaatgaacagataagcaagggagtgaacaagtgaacaaatcattgcagaaaagtgtgaatgaatgaatgagttagtgagttggccagtgatttaaccaatgcatagatgaatgaataaatgcatgaggaaatgagtaaatcaatgcattgaagcatgagtatagatgaataaatcactgaatgagtgatttcatcaatgcatagaagaatgagtgaatgaacagatgaacaaagcagtgaatgaatcattgcagaaggacatgaatgaatgaaagagtgagatattccatgaactaaccaatgcatagaagaatgaatgaatgaacagatgaacaaggaagt

SEQ ID NO: 3583 - DNA, 388 bp, Homo Sapiens
cgagaagacgacagaagggagggggctgccctgtggtgcacacaggcctgccatggggcgtgggagcccatcccgctgcctgactggagctggccgctgtggtggactcaggaaccacttttaatactgcaactgctcccttttgcccagtcagggaaagctgactgtaagtcccacctcccactccgtccacccttctagtggtttctctgagaggtttctctgcttcggctgtgcttgaagtggcatgcctcctctgctgcagggctcccccacccccacacggcctctaaagatgtttattttccttatagactgattaaagtcagccattctttttccccgaaaaaaaaaaaaaaaaaaaaaaaaaaaaaagtcgtatcgatgt

SEQ ID NO: 3584 - DNA, 521 bp, Homo Sapiens
  misc_feature (406)..(406): n is a, c, g, or t
  misc_feature (430)..(430): n is a, c, g, or t
  misc_feature (448)..(448): n is a, c, g, or t
ttttttaaaacagcaaacatttattacatagttgtgtagcatcagggatccaggagggacttcgctttgtggttctgtctcagggtctctcatgaggttgacgtcaagctacagtcatctgaagggtagaactggatcttccaaactcgttcatgcagctattggcaggaggcttcagatccttgacaaacaggcttcttcatagagcagttcatgacatagcaactggcttcctccagagcaagtgatagaagaaagagagatagcaatcaaattagaagcaacagtgccttttataagcccatcttatatgtaacatgctatcacttctgctgtactcttttgggtagtgggagaccaatcctactaggtgtgggggaagggaacttacacaaatgggaaggantatcagggagggtgggagcccttnggggtgccatccgggggnggaagacttacccacaccatgtctggtcctccacttttggaaacatataatctgtttgaatttatttcccttt

SEQ ID NO: 3585 - DNA, 255 bp, Homo Sapiens
  misc_feature (36)..(36): n is a, c, g, or t
  misc_feature (80)..(80): n is a, c, g, or t
  misc_feature (181)..(181): n is a, c, g, or t
ctgacactgaacgccgcttgtcccctccggcttgcngtcctcgcagccatggcggccgccgcgctcccagcatggctgtntctgcagtcgagggcaaggactctgcgtgcattctccactgccgtctactcggccactccggtcccgacacctagcctgccggaaagaacacccggaaatnaaaggccaccaagaagaaaggcactacctcctaggacagagaaaatggctgtttgaccaggacttgcttagtgt

SEQ ID NO: 3586 - DNA, 336 bp, Homo Sapiens
tcttgcttaggccctgagcgacttgtagaattctgaacatcacaggtcacagactgactttcaaaatgggctgttttttctccctgtgcagtcactaacaaattatctgaaacttctccatatgtggtgtctagagttctgggttcctgatgctctgggctgctgtcctgactgccagggggtatgccctctgcagtctcctgcggaactgactgacttagctcatgcagagtcactctaggatcatcataaggggcctgagaaggtaaggcagccactaccttctttgatactaccctcctgacctcctccacaggtgctgaagaacgaggactg

SEQ ID NO: 3587 - DNA, 1903 bp, Homo Sapiens
aataaaattaaggaaatcaaagaaaatgattttaaaggactcacttcactttatggtctgatcctgaacaacaacaagctaacgaagattcacccaaaagcctttctaaccacaaagaagttgcgaaggctgtatctgtcccacaatcaactaagtgaaataccacttaatcttcccaaatcattagcagaactcagaattcatgaaaataaagttaagaaaatacaaaaggacacattcaaaggaatgaatgctttacacgttttggaaatgagtgcaaaccctcttgataataatgggatagagccaggggcatttgaaggggtgacggtgttccatatcagaattgcagaagcaaaactgacctcagttcctaaaggcttaccaccaactttattggagcttcacttagattataataaaatttcaacagtggaacttgaggattttaaacgatacaaagaactacaaaggctgggcctaggaaacaacaaaatcacagatatcgaaaatgggagtcttgctaacataccacgtgtgagagaaatacatttggaaaacaataaactaaaaaaaatcccttcaggattaccagagttgaaatacctccagataatcttccttcattctaattcaattgcaagagtgggagtaaatgacttctgtccaacagtgccaaagatgaagaaatctttatacagtgcaataagtttattcaacaacccggtgaaatactgggaaatgcaacctgcaacatttcgttgtgttttgagcagaatgagtgttcagcttgggaactttggaatgtaataattagtaattggtaatgtccatttaatataagattcaaaaatccctacatttggaatacttgaactctattaataatggtagtattatatatacaagcaaatatctattctcaagtggtaagtccactgacttattttatgacaagaaatttcaacggaattttgccaaactattgatacataagggttgagagaaacaagcatctattgcagtttctttttgcgtacaaatgatcttacataaatctcatgcttgaccattcctttcttcataacaaaaaagtaagatattcggtatttaacactttgttatcaagcacattttaaaaagagctgtactgtaaatggaatgcttgacttagcaaaatttgtgctctttcatttgctgttagaaaaacagaattaacaaagacagtaatgtgaagagtgcattacactattcttattctttagtagcttgggtagtactgtaatatttttaatcatcttaaagtatgatttgatataatcttattgaaattaccttatcatgtcttagagcccgtctttatgtttaaaactaatttcttaaaataaagccttcagtaaatgttcattaccaacttgataaatgctactcataagagctggtttggggctatagcatatgcttttttttttttaattattacctgatttaaaaatctctgtaaaaacgtgtagtgtttcataaaatctgtaactcgcattttaatgatccgctattataagcttttaatagcatgaaaattgttaggctatataacattgccacttcaactctaaggaatatttttgagatatccctttggaagaccttgcttggaagagcctggacactaacaattctacaccaaattgtctcttcaaatacgtatggactggataactctgagaaacacatctagtataactgaataagcagagcatcaaattaaacagacagaaaccgaaagctctatataaatgctcagagttctttatgtatttcttattggcattcaacatatgtaaaatcagaaaacagggaaattttcattaaaaatattggtttgaaaaaaaaaaaaaaaaaa

SEQ ID NO: 3588 - DNA, 395 bp, Homo Sapiens
tttttttttttctataaatacagcatttatattttctgactgaatctcaaaattagttggggcattgggaaagaatttaatttgacttttgagtgtaaaccaaggatgtatttctttgaaaagataaaacaagagggctaatcatcctaaacatgaatgtctgcacagattgaaattcccaagatgcccaggagcccagcctttgcacagcctccagcaccgacattatgtgtgttttcaaccacttcccccttatacaaagggatatgtttgcagagtttctcaatgggtgacccaagcaggaaccaatccacgtctttgatcagagactccagagggttgtacttgacccaggtgtatttgctggagaacatgttgtccagagcctgtttctc

SEQ ID NO: 3589 - DNA, 609 bp, Homo Sapiens
  misc_feature (5)..(5): n is a, c, g, or t
  misc_feature (231)..(231): n is a, c, g, or t
ataancttttcttctagtaatgcaggacaagtgagccccaaaactgttgcttagcagaagttcttggctttggctaggaaagaacttaaggttaagttagtggtgttagatagcaacatttgcttgaacggtactgctccttgcagagcaggctaactcataggctgtgcacccaaagtcagctaagtatgggctgttggcaactgtatttatactcatgtatatccactntcaattatatgcaaattaaggggcaggctgatgtgaattgacaggcaggttaattagaactttctagaaaaggggcagtaacttccaggtcattgccatggaaaggagtggtgacttcaaggttgttgccatagcacttataaactgccatggggctggtggaagtgtcttatgctaatgaacaatgagggcagccagggatcacttttgtcaccatctgctgattttggccattttttttttttttttactttattctgtctggacccggtgtatataaatggctacaaatccagcatccatctctccctgtggagaccatacctctaaagaggcattgatactaggaccatctaacatagattggtgctctaactc

SEQ ID NO: 3590 - DNA, 359 bp, Homo Sapiens
ttttttttattactagtaagacatttattaatgatattattacaattgtttctaaaatccattattatttcagcagcgaagagataaataccagagtaacctcagtcagatggtaacagttaggtctaaagaaaattatatgaaatactgactgtaatactgctatagagtatacagtatgttaaaacatgatggagaggctgcacacattggtaacgttttatgtcattaaaaaaatcactgaaaatttaaaaatgatgtttgcatttaagtgtatattagaaaagttttatttttaaagttaattctgtatcattcttctaaaaaaattatcatctgtaagatgcagatttgtattg

SEQ ID NO: 3591 - DNA, 3316 bp, Homo Sapiens
gtaggggtaggagggggccggcggagtttccctccccgcccagcggccctgggcgggcttttcggctgcttctcataagcaggtggtttcgtttctccggcacaggtaggtttctctggcaccgattcggggcctgcccggacttcgccgcacgctgcagaacctcgcccagcgcccaccatgccccggcagctcagcgcggcggccgcgctcttcgcgtccctggccgtaattttgcacgatggcagtcaaatgagagcaaaagcatttccagaaaccagagattattctcaacctactgcagcagcaacagtacaggacataaaaaaacctgtccagcaaccagctaagcaagcacctcaccaaactttagcagcaagattcatggatggtcatatcacctttcaaacagcggccacagtaaaaattccaacaactaccccagcaactacaaaaaacactgcaaccaccagcccaattacctacaccctggtcacaacccaggccacacccaacaactcacacacagctcctccagttactgaagttacagtcggccctagcttagccccttattcactgccacccaccatcaccccaccagctcatacaactggaaccagttcatcaaccgtcagccacacaactgggaacaccactcaacccagtaaccagaccacccttccagcaactttatcgatagcactgcacaaaagcacaaccggtcagaagcctgttcaacccacccatgccccaggaacaacggcagctgcccacaataccacccgcacagctgcacctgcctccacggttcctgggcccacccttgcacctcagccatcgtcagtcaagactggaatttatcaggttctaaacggaagcagactctgtataaaagcagagatggggatacagctgattgttcaagacaaggagtcggttttttcacctcggagatacttcaacatcgaccccaacgcaacgcaagcctctgggaactgtggcacccgaaaatccaaccttctgttgaattttcagggcggatttgtgaatctcacatttaccaaggatgaagaatcatattatatcagtgaagtgggagcctatttgaccgtctcagatccagagacaatttaccaaggaatcaaacatgcggtggtgatgttccagacagcagtcgggcattccttcaagtgcgtgagtgaacagagcctccagttgtcagcccacctgcaggtgaaaacaaccgatgtccaacttcaagcctttgattttgaagatgaccactttggaaatgtggatgagtgctcgtctgactacacaattgtgcttcctgtgattggggccatcgtggttggtctctgccttatgggtatgggtgtctataaaatccgcctaaggtgtcaatcatctggataccagagaatctaattgttgcccggggggaatgaaaataatggaatttagagaactctttcatcccttccaggatggatgttgggaaattccctcagagtgtgggtccttcaaacaatgtaaaccaccatcttctattcaaatgaagtgagtcatgtgtgatttaagttcaggcagcacatcaatttctaaatactttttgtttattttatgaaagatatagtgagctgtttattttctagtttcctttagaatattttagccactcaaagtcaacatttgagatatgttgaattaacataatatatgtaaagtagaataagccttcaaattataaaccaagggtcaattgtaactaatactactgtgtgtgcattgaagattttattttacccttgatcttaacaaagcctttgctttgttatcaaatggactttcagtgcttttactatctgtgttttatggtttcatgtaacatacatattcctggtgtagcacttaactccttttccactttaaatttgtttttgttttttgagacggagtttcactcttgtcacccaggctggagtacagtggcacgatctcggcttatggcaacctccgcctcccgggttcaagtgattctcctgcttcagcttcccgagtagctgggattacaggcacacactaccacgcctggctaatttttgtatttttattatagacggggtttcaccatgttggccagactggtcttgaactcttgacctcaggtgatccacccacctcagcctcccaaagtgctgggattacaggcatgagccattgcgcccggccttaaatgttttttttaatcatcaaaaagaacaacatatctcaggttgtctaagtgtttttatgtaaaaccaacaaaaagaacaaatcagcttatattttttatcttgatgactcctgctccagaatcgctagactaagaattaggtggctacagatggtagaactaaacaataagcaagagacaataataatggcccttaattattaacaaagtgccagagtctaggctaagcactttatctatatctcatttcattctcacaacttataggtgaatgagtaaactgagacttaagggaactgaatcacttaaatgtcacctggctaactgatggcagagccagagcttgaattcatgttggtctgacatcaaggtctttggtcttctccctacaccaagttacctacaagaacaatgacaccacactctgcctgaaggctcacacctcataccagcatacgctcaccttacagggaaatgggtttatccaggatcatgagacattagggtagatgaaaggagagctttgcagataacaaaatagcctatccttaataaatcctccactctctggaaggagactgaggggctttgtaaaacattagtcagttgctcatttttatgggattgcttagctgggctgtaaagatgaaggcatcaaataaactcaaagtatttttaaatttttttgataatagagaaacttcgctaaccaactgttctttcttgagtgtatagccccatcttgtggtaacttgctgcttctgcacttcatatccatatttcctattgttcactttattctgtagagcagcctgccaagaattttatttctgctgttttttttgctgctaaagaaaggaactaagtcaggatgttaacagaaaagtccacataaccctagaattcttagtcaaggaataattcaagtcagcctagagaccatgttgactttcctcatgtgtttccttatgactcagtaagttggcaaggtcctgactttagtcttaataaaacattgaattgtagtaaaggtttttgtaataaaaacttactttggaaaaaaaaaaaaaaaaaaaa

SEQ ID NO: 3592 - DNA, 654 bp, Homo Sapiens
ggacagggaaagaggagaaactcctgtaggagaagggttttctccattgcttccagttcagactatcagggaggaagaaatccaggcctggggaggaaatgccacacttagcgagacccatcaaagtggagagccctcccttgtgcagagtggccctccccggccccatctttcaaagaggaatcatcatcactcctgggaggattcgtcccaatctcccaccccaagacccaagaagtcctacagtgggcttaggtccccaacccggtgtgtctcggaaatgcttgtgattcaacacagggagaggagggagaggagccggtctcggaggaaacagcatctactgcctccctgtgtggatgagccggagctgctcttctcagaggggcccagtacttcccgctgggccgcagagctcccgttcccagcagactcctctgagcctgcctcccagctcagctactcccaggaagtgggaggaccttttaagacacccatgaaggaaacgctgccatctcctccacccgagcaaatctgtgcctccccagaaccccgtgaatcctggaggctcacgcccccagccaaagtagggggactggatttcagaccagtacaaacctcccaggtgcctctgaccccttgctgacccccctg

SEQ ID NO: 3593 - DNA, 688 bp, Homo Sapiens
actacggctaggtcgaggctgggtttagggagggagagaggcgcgcgggtgaaaggcgcattgatgcagcctgcggcggcctcggagcgcggcggagccagacgctgaccacgttcctctcctcggtctcctccgcctccagctccgcgctgcccggcagccgggagccatgcgaccccagggccccgccgcctccccgcagcggctccgcggcctcctgctgctcctgctgctgcagctgcccgcgccgtcgagcgcctctgagatccccaaggggaagcaaaaggcgcagctccggcagagggaggtggtggacctgtataatggaatgtgcttacaagggccagcaggagtgcctggtcgagacgggagccctggggccaatggcattccgggtacacctgggatcccaggtcgggatggattcaaaggagaaaagggggaatgtctgagggaaagctttgaggagtcctggacacccaactacaagcagtgttcatggagttcattgaattatggcatagatcttgggaaaattgcggagtgtacatttacaaagatgcgttcaaatagtgctctaagagtttgttcagtggctcacttcggctaaaatgcagaaatgcatgctgtcagcgttggtatttcacattcaatggagctgaatgttcaggacctcttcccattgaag

SEQ ID NO: 3594 - DNA, 697 bp, Homo Sapiens
agccggcggtccttgcgctccccaacatgcggcgccgtggggcgcggggggctgcctgtctgtggcacatgtccctggtgctcttctgtttctcagtcttcgctgcgaccctcgtctggtgccacactggggcgggctacgatgctgctcatccatgaacgttcctcagcctgtacaggctgaccagatcgacatgcacctgcaaattcgtgtgtgcagcttgttctgcctgaggatgtgtgggccagtacgtgtgacttgcccaatgggcttcgcggtgagcgagctgctgcaaggtgcgcctcgtgcctgctgcagatccagctcactaccctgggaaatcttacaccttcaaggcactgtgtatatctgctgtgatatgcaggaaatggttcagaccagccatcaagtatttatggggatattattagcgtgggcacagagattgttgcacggggcccggattcaagtgaattcctgtcattgtaacagaacaatacccgtaaaggtcttgggagcacggttcaatgacattgatttaacatggtgtaaaacgtgtgtacttccacaagatccaagtttcaattggtataaccagacgtagaagcggcataagcagagattcccggagtcaggagtgttgtatcatttggagtagaactcatgtgtgcgttcaaaaactggcctggagctagtt

SEQ ID NO: 3595 - DNA, 2955 bp, Homo Sapiens
ccctcactcctggtccccatacccagcatctaatcatccatgccccctactcctggcccctccatcctttcttctctggtccccatccctgtctctccctttcacccttgccctccagtcctctacctctggcctgcccctatttctgaaagcttcttccagtccctgatctggctcattccccaccttcaactcccaccttacatgtctcacactatcccatggttggcattacactcactcctgttcccttattcttcattcccagtaattccctaccaaatggtggggaccctgagcccagctctgaccaggtagagcctgtgcagcctgggctgctgtcattgccctccagtaagggctcagggttttgcttttagtctccccttccttctgccttgggggcggtactctgtggagctgcttaggcctggaaaggtacagtatgtagaagaggactgtgagacgtgagttagagggagaagatggagggaatctagggaacgaggcagcctattggagatgcggacaggacagacacgttgagaagctgcagggagcagggcaccaagggagtgtgcactgtgcttgctcagagaggccaaaccctgctcccaggctgaagcctggagtctgcccccacttcccttttctataatccacccttctgcaggccctgaaatctgaagggcttagttagtaccttgccactctacccccaacacgtcacccgagtagaagctgggcaaggccctaccatcctggccgtctgttcacaagcccaaggtgctagaactagcttaggagacatgcaggccacagggcttctaggcagggaaagggcacacaccctaggtcagcgtgcagagcagtgatgctggaggacacaccatggggtgaagccatcccaaggctgacagctcagtcttcaccttgcctctggccttgtatttcacaccctgctcagtatggctagccagcagtcctgagtaggagtccaggactcccactgtctcaatctgcaaattgttcctatccaggttcagggccttcagggggcctcttttcattttctcccacaggcctctctttctttctaggttgctggggagaaatgggtaccctatgatccccctccccttctcctccagtaaatacctggaagagggaacctgaatccctgggggagacagaaggggcaggggccaccagcctccccttcttgtggtgagactgaattttgggctcagacaccagcaacagcctcttgggatgccctgagttgcttcccatttcctctttctagccgtccttttctagtgtgtgctcactcttcctaggaacttttaagacttcttggtacctatgaacataggtcctcccctcaccccaactctaggtttccaggcctcacagccaagctgaagcttggagaaaactctgcattcccatgagggcaaaggcagctgccctccctgaccctatagccccaggcctcatggggggtatgtggggaagggatggggtatccccatggatgctgggatgaggacagaggaagacctgatggggtctcctattccagggaataagccaaattaacactaaaaacggatcaaagctcccacgccagtccactagggccccagtagttgacagccttgctcctctcccaagttctccttcagaacctagttgcttttattcttccagctaccacttgggcacttcacagccagcctagggtcttcggcacctccaagagctgaatctccctccaacccttcttgcctactcctcactgccagctgggacctaggctcagtcctgtgtggtgcccatgatccttctggtgggggaagagtttaagttatagggcatttggctcaaattttaaaaggccttttgtttacctatatttctggaggctcctgtattctagaacccaatctctcacctgcttggttgcaaggctcatatttttttgtacctttcctatagattctgtagcatttgagtgtggcaatattttaattgtgtatagatttctaagaaccaacactactcagtctcctgctagtctgactcctgaagcatcagcccttgtcatactgtattgactgtgtacgtgcctttcaccttgagcatgcttcaggatttttttttaaaccacagaacttgaatacatgagggaaccagagttcaaagtcctatgcaaccttaggagggggttagagagtctgttttgattgatgttttctgaggccctagaggagtttgtatcaatttgtgagtattaatgtcagtactaccagcactttgccaaaactgtcagagggacccgtttctagagtgagtcccagttacatcaaacagtgacttccagttattccccagtaagtctgagtggttccttcaagctgggtgtctttccagcctttgccagtctagccccagcagggcaccgtgtatgaatgcagtttggtgctgttttagagtatgcctgctccccagccccctgcctggaaccctctgagcaacttgctctgacctataatgtcttaggtgcaacacggaccccaccagagctcttggatacccccctagatccatgtggctttatgtgaggggactgaatgcagacacaccatagcccccttctactactttccctctcgccctgccacctagttccacatggaaccaacaagttgagtgcatccctgttgggtgttttgtgttgagactggctgaaatgaggagactttgaccatgtgacgtgtcaacagactcaaggagacaaccacctcaactgggtcatgtggcatgcctgtgtatgtgtgtaacagaattctgattgttagactgtaatgctattcctctatgggagaaaaaaattaatataaagaaaaacaaataaaaatatatttaaagcaaaaaaaaaaaaaaaaaaaa

SEQ ID NO: 3596 - DNA, 122279 bp, Homo Sapiens
gccgggcatggtggtgggcgcctgtaatcccagctactcaggaggctggggcaaagaattgcttgaacccgggaggcagtggttgcagtgagccgagatcgagccactgcattccagcatgggcgacaaagcaagacttcgtctcaagaaaaaaaaaaaaaaaaaaaaggaaaaaaaggctgacatggaagcagaggtattcccggcagaaggaaatgcttttgccaaagcacgaaggaagtgaagttccaggaagttcccagaacagataaactgagtgagggagtgttaagaggtacgaatgtggaagataagaaagaagggatttttgaagcacattgtggcaggattcaaacttttaatcccctacatagcagtcactgccaaattcagcagattcacagaactacagacatacgaaaggtcaccagaatatagttctcatcctgaatgtagccactgcttaccaacctccagagtaggtgggcctcaagataaggaagggatctcccggatacagtaaaggatagggggcagggagtcagccaggaaagttttgctagattcaagtgtctaccgctgggtggaatatggattttgccttgcccattgacagaaatactggtgtaactccttgatcactgtatgtctccaaagcattggaatttgaaagcattatggaaacagaattagagaattataacaggaaatagtaagggactcaacatttcaactcctttgagcttgttttatgtaagatctcactaggtcctcaccaacctctgggcaggcattgctattcacatttgcaagtaagttatcgtaaaggctttttgataacccctgactgaaaccctaagtaatgggatcttactctcacttcaagaaataagatcctctccctctccctctccctctccctctccctctctctccacggtctccttccacggtctccctctgatgccgagccaaagctggacggtactgctgccatctcggctcactgcaacctccctgcctgattctcctgcctcagcctgccgagtgcctgcgcacgccgccacgcctgactggttttcgttttttttttttgtggagacggggttttgctgtgttggccgggctggtctccagctcctaaccacgagtgatccgccagcctcggcctcccgaggtgccgggattgcagacggagtctcgttcactcagtgctcaatggtgcccaggctggagtgcagtggcgtgatctcggctcgctacaacctccacctcccagccgcctgccttggccccccaaagtgccgagattgcagcctctgcccagccgccaccccgtctgggaagtgaggagcgtctctgcctggccccccatcgtctgggatacgaggagcctctctgcctggctgcccagtctggaaagtgaggagcgtccctgcccggccgccatcccatctaggaagcgaggagcgcctcttccccgccgccatcccatctaggaagtgaggagcgtctctgcccggccacccatcgtctgagatgtggggagcacctctgccccgccgccctgtctgggatgtgaggagcgcctctgctgggccgcaaccctgtctgggaggtgaggagcgtctctgcccggccgccccgtctgagaagtgagaaaaccctctgcctggcaaccgccccgtctgagaagtgaggagcccctccgtccggcagccaccccgtctgggaagtgaggagcgtctccgcccggcagccaccccgtctgggagggaggtggggggggggtcagccccctgcccggccagctgccctgtccgggaggtgaggggctcctctgcccggccagccgccccgtccgggagggaggtgggggggtcagccccccgcccggccagccgccccgtccgggagggaggtgggggaatcagccccccacccggccagccgccccgtccgggagggaggtgggggggtcagcccccccacccggccagccgccctatccaggaggtgaggggcgcctctgcccggccgcccctactgggaagtgaggagcccctctgcctggccagccgccccgtccgggagggtggtgggggggtcagccccccgcccggccagccgccccatccgggaggtgaggggcgcttctgcccggccgcccctactgggaagtgaggagcccctctgcccggccaggaccccgtctgggaggtgtgcccagcggctcattggggatgggccatgatgacaatggcggttttgtggaatagaaaggcgggaagggtggggaaaaaattgagaaatcggatggttgccgggtctgtgtggatagaagtagacatgggagacttttcattttgttctgtactaagaaaaattcttctgccttggaaaaaaaaaaaaaaaaagaaataagatgctggctgggggcggtggctcatgcctgtgatccgaaaactttgtgaggccaaggcgggaggatcgcttgagcccaggggttcaatataagccttggcaacatagcaagaccccgtctctacttctcagaaagaaaacaaaagaaataagatgccatggaagggatggcaataagcgttttccataaacaacccgagagagagaaacagaaaacgctgtccaagctaagccttgcttccacactgggctttgcagattttccaatgagccaccaacgaggtggttaaaacatcagagactgcatccgattccccaagacaccaaggctctcgggatgggaacaggcaaatcgtcgtcgttctttgctgagcctgcgggctgcggtcaccagaacgaatctgggcccagcaggtgccaagggctcgacctcccgccttgcatccggcaggccgcacacacccctcggaagtcggcgagatcgctgaggcaaagcgactccagggcgcagagacccacacgcgacgctctaaaggaagtgacctttaggggctgttactctcagaccaggcccagcagcacccggcgcatttacgtcggatctgacccctgcaagcaccggcgcgaccgcgctagcggctgggaacacgcgacggtcccgcccactgcgacctgactcggccaatcccgggtggcgcatgctgcggccgccggaagtggacctacgtcatgcaggtcagtcggtaggtttccggcgcccagcgccccgtgggagttgtgtctggtggcccacgctgggggggggctcttcacactggtgggcgcagaggcgaagccgttcccagggcccctcacagaactcggtgtcagaatttccccccttgcaccagcgccgcctcaaatgtcagggctcgcccactcttctccggtctcgccgacataaccttttgggggctccagaggggaaatttgccgtttctgccggaccgctctagagcgtgcctgaacccggcctttatgggatgttgacagctacgtttattcagtgccccagaggccttctttatgcccagtaactacaatttaaattccttctctgcttcattttgtagtcgtctggtgaatttgacgtgagaaataagattaaaataggaataagaaattagttgaaatcacattgtagagttctgcaaatgtaaaatattaatttatagcaataaagcaggctgtcaaataacagaggatgaaagcaggataatacttggtcagaacctgctgtatgccaggggctgtgacagatgctggggattcagcaaccaccaagacaagaaggttcttccggcgttcacaggactaggggaagacacaataaataactaaaggcaaaatgctagaatgatgcgctctctctcaagatgaaatatagaacatgatttattttttatttttattttattttattttgagacggagtttcgctcttgttgcccaggctggagtgcaatggtgcgatctaggctcactgctacctccgcttcccgggttcaagcgattctcctgcttcagcctcccgaaagtagctgggattacaggtgcctgccactacgcccggctaatttttttgtatttttagtagagacagggtttccccatgttggccagggtggtctggaactcctaacctcaggtgatccacccgcctcggcttcccaaagtgctgggattacaggtgtgagccactgcgcccagccgagaacgatttattttagagtgtttacttaatgagatgcctaatgtaagagtgacccatggaaaaataataacttggcagcagttttttttgccgctaagatcaggacaattctgaggggagttttgttttggaacgatgaccagatggccatgggtggctattactaacactgtcaatgccatttctctgttattgccttgtgacctccacaggcagagcaatatttcatcattaaaagttgcaactgctatgagaagctacgttccttgaaaacagagtttttggccaggaatagttgcttatgcctgtagttccagctacttgggaggctgaggcaggaggatcccttaagcccaggaggtggaggccaacctgggcaacatagccaggcccggtctctaaaaatgaaataaaaccggcagtttcttccttcgtacctcccgcagtgcataaagagttgtcaaatgttgagttaaaaaggtagtggataggatggggcggttctgcctggaaattggagactgaactaggaagtgtcttcgttgtcagtactacagcagtattttttggtaaatggtttaattttttggttttatcttatgaatgtgtgatgagaaatatgcatgaactatagagtgtcttaagtgtaactgacttttaatattgacagtatatggtgggtagagtgtgaaatttagcatcagaaatctgaatttgaccaagactgcaggaccttatacagtcatttcacccttctggacctcaaccttcacatccgtggaaggaaaattgtaacacctgccaggaagtcaatatataaggtctaaagatgataaatgagaaataaaatattagcatactgtttcaaaatactgatacactaccagaagaaacagttgaaagagttgaaaatacttgcttctggggagcagggctgaggggaaggactgagttagagggctgctgctgcatggattcactactgctctgtagcaaaacctggctgctacagttcaccgttgggttgtagtaactctgtttcaggttgttagttgtgcaggttggctagggccgctctgttccacatgttcattctgaaacccaggttgagggaacagcagcaacttgcctgggggaaaagctcttcctacagcaattcaaaagtagaagagcacaacctaataatcagggcagacttttcaaggctttgttacaggtgtctgttaacattccatggaccaaaacaaggccaaacccaaaatcaagggacaggaagtagactccacccatgcaggtggaaggggagtgactatttctgaaaaataatccaatctgccgcaagtaatacttgactttttaaaactgtgcagtgtattcacttggtaagaattaatgctgactgtggtccatttcaggtcttgatggtgatgcgtatgtctcaggaatgttaactccagttcattctctctggctctcactgctgaaacatctgtcatctttaggctatcgtggctgtctcatgctgtagcagaccaggagcaggagcattggtgactccttttaggagtttaccacggggcccgggctcggtggctcacgcatgtaatcccagcactttgggaggccgaggctggtggatcacttgaggtcaggagtttgagaccagcctgaccaacatggtaaaaccctgtctctactaaaaacacagaaaatttagctgggcgtggtggtgcttgcctgtaaccccagctactcaggagtctgaggcaggggaatcacttgaaccccggaggcagaggttgcagtgagctaagatcatgcccccacactccagcctgggtgacagagagactcaaaaaaaaagtttaccacgcagactggatcaaaaaagcctgtcttcttttggttttccttccatctaactgtatccctccttggttctagaagcacacatctgaccacttgtctttcctctttctctgtcattcctgttttccacactccttcacagctgcttcctttgcaaatagccaaaagtgaagtcattccagaactcctaaaagtttcttcttaaatgtcatatgattaaagacatttcagacttttgcacaagttcagtgttcatcaattattcacattttttttttttttttttagagacacagtctcactctgtcatccagcctggagtgcagtggcatgagatcatgacccactgcagccttgacctcctgggctcaagtgattcccccgctgcgctgtcagcctctcaagtagctgggacccataggcgtgtaatttttaaaattttttgtagagacagggtcttgccatgttgtccaggctggtccccaactcctgggctcaaacaatcctcccgcctcggcctcccagagtgttgggatgagacaccccgcacagctccaatttttaaaattaaataaaataacacactcaccatcattgtaagaatcacatgaaatataccaaagtgctttgtaaactaacaaaaaatttatttcttgaaataaatgtggccaggtgcagtggctcacaactgtaatcccagcactttgggaggccgaggtgggcagatcacttgaggtcaggagtttgagaccagtttggccaacatggtgaaaccccgtctctaataaaaatacaaaaattagttgggcatgatggtgcacgcctgtagtcccagctactcgggagactgaggtacgagaattgcttgaacctgggagacagaggttgcagtgagccgagatggtgccactacacgccagcctggatgacagagcaagactctgtctcaaaacaaaaacaaaaacaaaacaaagaaaataaacgtgattttttttttttttttgagacaagagtctcgctctgtcacccaggctggagtgtagtggtgcgatctcagctcacttcagcctccgcctcccaggttcaagcaattcccctgcttcagcctcccgagtaattgggactacaggtgcaagccaccatgcccagctaatttttgtatttttagtagagaccgggtttcaccatgttggccaggatggtctcgatctcttgacctcgtgatctgcccaccttggcctcccaaagtgctgggattacaggcacgcaccaccgcgcctggccagaaacgcgattttaatatctaaattgaaaccttaaaaacactgatgtatttaggccaggtgctgtggctcacacctgtaatcccagcactgtgggaggccgaggtgggcagatcacttgaggtcaggagtttgagactagcctggccaacatggtgaaagctcatctctactaaaaatacaaaaattagccaggcatgatggcaggtgcctgcaatcccagctactctagaggctgaggtgggagaattgcttgaacctgggaggcggaggttgcaatgagctgagattgcaccattgcactccagcctgggcaacagagcgagactctgtctcaaaaaaaaaaaaaaaagaaaagaaaagaaattactagaagaaaacactgggggggggggggccaggcacggtggctcacacctgtaatcccagcactttgggaggctgaggcaagtggatcacctgaggttaggagttcgagaccagcctgggaaacatggtgaatccctgtctggactaaaatacaaaaattagacaggcatgatggagggtgcctgtaatcccagatactcgggaggctgagacagagaatcgcttgaacccaggagacagtggttgcagtgagccaagattgcgccactgcactccagcctaggcggctgagcgagactccatctcaaaaaaaaaaaaaaaagaaaagaaaagaaagaaaacactggggaaatgttccagggtattgatctgggcaaagacctcaaagcacagacaacaaaagcaaaaacagacaaatggaattacatcaaactaaaaagtatatgcacagcaaaggaaacaacaaagcaaagagacaacacacagaatgggagaaaatatttgcaaactatccatttgatgagggactaatgactagaatatattaggagctcaatagcaagaaaacaatcagatttaaaagtgggcaaaagatctgaatagacatttctgaagagatacaaatggccaagagatatgaaaaagggctcaatgtcactaatcagagaaatgcaaataaagacagtaagatatcatctcatcccagttaaaatggcctttatcaaaaagggaataacatgctgagatggatgtgaagaaggaacctcatacactgttggcgagcatctcaattagtgcagccactatggaaaacaatatggaatcctcagaagattaacttctgagaaatcataagttctggaatcataactaccatatgatccagcaatcccactaccggtatataccaaaaagaaaggaagggccaggcacggtagctcacgcctataatcccagcactttgggaggccgaggcaggcagatcacttggggtcaggagttcaagaccagcctggccaacatagtaaaaccctgtctctactaaaaatacaaaaattagccaggcatggtggcacacacctgtagtctcagctactcgaaagactgaggcacgagaattgtttcaacacagaggcagaggttgcagtgagccaagatggtgccactgcacttcaggctaggcgacagagcaagatggagtctcaaaaaaaaaaaaaaagaaagaaaatcaatatatcaaagagatatttgcactcctatgcttattgtagcactgttcacaacagtcaaaatatggaatcaaccaaaatgttcatcaatggatgactggataaataaaatgtaaatatacacaatgaatactattcagccataaaaaataataaaatcctatttgcaacaacattgatggaactggaggtcattatgttaagtgaaacaagccaggcaaagaaagacaagcatcacatgatttcactcataaatgggaagttgaaaagtggatatcatgaagataagttggtggttaccagaggccaggaagggtagccaggagaaggggatgaacagggtgattaataggtacaaaaattggtagaagtgctgggcaaggtgtcaagagccccagcatcagaaagtggtcgacttgctggttggtaagaagaatttatcgacaacaatataggtttgaaaaaggaaagttttattagaacgctgcagaagagtgcagcctcagcaagagagaactgagcatgccgcggtggatttttcatgtcccttttcgaatgtctcattttttgcaaattcaatccaagttgcgttcatttagccaggatccttctaagctcattcaagaattttgggctttaactatttcctttgatttaacctggtaccaggtgccaactttagataatagggatatctaattacttctaaattcctcagataaggggcctgcttgatggtcaccaggtgatctgtgctctccttaagagggaataagacctagcgttggcagagttctgtagggtgactatagttaacagtaatctgttgtatattttaaaatgttattattgaagagagtaactggaatgttcccagtataaagacaaatgtttaaggtgatagagatctcatttaccctgatttaatcattacacattatatgaaagtatcaaaataccacatgtacccagaaaacacatacgtctcttacatatcaataaatacaacttgagattatgatgtaaatacatctgaccaacttggtacttattagacttatgtgcgcagcactgctctagtcctgtgggtgcagcagcatcaggatcgttaaagaaaacaaacaatgctgagaaaaaaactcacacccctgagacatccgggtgtgaataaatgcggcagagtcgcccgagatcgggagaccaggcgtgggggagaggtccgggaggcctggaccagagtcctaacagaccagaggcgaaacgggaaggcgcgccagaaaaggaacaacgcaaagggagcaggcgtgcacggagcgcgaactaaggaacccctctgacaaccccagtccctcggcagttccagagaccggctcctcacggagggtggcggtagagactgttaagccccgcgggcgccggggcaggccggactgtgccattcgtggggggtaccatgtgggaccgagccgcctcacccagggctgtccagctagaaactccccggtgccacccccgcctcagtccgaggtagactcggccggacgtgacgcagcgtgaggccaaggcggcgtgagtctgcgcagtgtggggctgagggaggccggacggcgcgcgtgcgtgctggcgtgcgttcattttcagcctggtgtggggtgagtggtacccaacgggccggggcgccgcgtccgcaggaagaggcgcggggtgcaggtcagcgccagcgggggcgcggcgcatgtgtgggccgtggcgctgggcggcgtgggggtgctggacggtgtccctgtgctggacggtgtcccgctggctcagaaccggcgcggggcctgggtcggggccgccctcgcttccggcctcccagtcgggccctgtcgctggcgttggatttgactgaccgccagcgtggtggcaacgctgaagcgtccagaatcttctgcctaacctctcgccggcatggaactggctagccgttttattaaactctgttttgcgtggacggtaaaccctccagataatctgtaaataggctaaaaaaaattcggaacctcgttgagctgctgtcgttggcagtgagaactccgcgcagagagacagatgtagttgggttgacttcagtgaggggatttccatctttctcagtcattaaaaaaagtgttcagacatttaacactgttgacccccacacacaattttttagtacagttataactaagaaaacaaaaatcccctccaaaaaattacaagttaattgcgaaagaccacatttaaatttttgcccatgaaattcagtttagtcgtttctctgaaacagtgcttcaaaaaagactgtttccccgcattgtgtgaaatgcaggagacccacgtacttgtatttttaaaaaacccatttgcaacatactattaaagttggatttaagagaacatggtagaagaaaatctaagcaatactacaccttttagcaccctcattatgttttcatctcagagcaattaaaactgctatacaaatcaacgttaagataactaaactgctgcttttttcgtattcagttgtctatgaaaaccgtttccctaggaagtacttactctgcttgaaaatgctcctaaactttaaattttggggtatctcagggttgcaatgaaagttttttgaaatctttttttttttttttttttaaggcttgtaaacatataacataaaaatggcttccaaaagagctctggtcatcctggctaaaggagcagaggaaatggagacggtcatccctgtagatgtcatgaggcgagctggggtaagtcccacatcgatttttagccattcctgttttaaatgtttttggatttttaaatcattttgaataaaatattcaaagtgctctatgaaatatttcaaatatacacaaaatttcagagatgacataagaataaatacctgttgatccactgctcacatttaacgcttgttaatgtcttgccatatttccttcagacccatttctcttttgttttgagctctgtcgtccaggctggagtgcgatggcaggatcttggctcatttcggtctctgcctcctgggcccaaaccatcttcccacctcagcctcccaaatagctgagactacagatgcgtgccaccacacctggctaatttttgtatgttttgtagagacagggttttgccatgttgcccaggctgctctccaactcctgagctcaagttgtccacccgcctcaggcctcccaaagtgttaggactacaggcgtgagccactgcactgtccttagacccatttcttttttcttctttttttttttttttgagatggtgtctctctgtgtcgctcagcctggaacgcagtggtgtgatctctgctcgctgcaacctctgcctcccgggttcaagagattctcctgcctcaccctcagctgggattacaggtgtccgccaccacgcccggctaattgtatttttagtacagatggggtttcaccatgttggccaggttggtctcgaactcctggcttcaagtgacccgcccgccttagccttttacagtgctgggattacaggcaggagccaccatgcccggcccctcagactcgtttcttaaagagcagatgcttcaaagaaatacatttgaagccccctttgtaaatttctccaatcctatgccccttcttccttccttaaagataagtgctatcctcgcactcttgtgtatccatgcatgtgtgtctttttttttttttttaagacagagtcttgctctgtcacccaggctggagtgcagtggtgtgacctcagctcactgcaacttctgcctcctgggttcaagcagttctctgcctcagcctcccaagtagctgggattacaggtgcgcaccaccatgcctggctaattttttgtatttttagtagatggggtttcaccatcttggccaggctggtcttgaactcttgacctcgtgatccacccacctcggcctcccaaagtgctgtgattacagatgtgagctactgcacccgcccccacgcatgtctttaaggtagcatttgaccgtggttctcattttgcgtgtttatatattatctctctctatctaaaaatagtgaacagtgaagtgaagtagaactaactctgtgccaggcagcattctaagtgccgataaaccttacaacaatgtcgtgagttagatatcaccatcctcattttacagttgaagaaactgaggcacagagacataaataatgtacccacatcacgtagtaagtacaaaagccagaactcagacccaggcagcctggccccagagtctgttaaccctatactcctctggttctcagaaatgaagatacatgtcgattaagtttatccacttaaaattgctgcttggtgttgcactgaatgccacaatctacccattcctctaattacagcattacaattctgtaatacgtattcttgtgtaggtttctttgtgcaaatgtgaggaaatttttccaggttatatatctaaaagtagaatgactaggccgaaggatagcctgtagtcagcatgactaggttttgccaagttgctctccagtgtcccagtttgtagtcccaccagcagtgtaggaaaattcccactttcccagtgccagctcttggtattgttgactttaaaaatttttgaaagataaagcagtatttcgttgtttggacttgcatttctattttacaaaaataccatgaggtttaaatggcaacagtaaacttgcaagatgagttattaataggatgatcatataactggtcacccaaaccagaacatttgtgggagaaagggtgttccagtcccacagagtacagggcagcagctataagtagggtctgtcccgggcaaaccagggtagacctagttattaaatatatttagccagtgtattagcttaaatttggtatagttgtggtgcagtatttcctgtcatgttactttcaaacacagggcagctgtgtaaacgttactctagctgggtgtggtggctcatgtctgtaatcccagctacttgggaggctgaagcaggaggatcatttgagcccaggagctggaggctgcagtaagctatgattgtgtcactgccctctagcccaggtgacagggtgagaccccatctctcttttttctttttttttaaagacagtgttactctgaatttatgtttcagtgttcttaaatatgataacatctttctcgtagattaaggtcaccgttgcaggcctggctggaaaagacccagtacagtgtagccgtgatgtggtcatttgtcctgatgccagccttgaagatgcaaaaaaagaggtttgtaatccatacatggagttattccttcatatggcttctttgtttcttgaaatgtcttaagagtgttgttagcacagactcattttagaaaattattttgcttgaatgtcttcccctgacagattaagagggtgaggactttgtctttctattctgtatctgtagaatgtggcaattgcttgatacagaatgtgcttagtaagtgggtggctggatgggtaggtggccggttggatgtgtggccagatgggtgggttggtgcttagatggatggctgcattgttttcccatcagtatttttctggcttacacaggcatccttgcctcctattacacatttttacctgacataaatcaactgccacattttccattttttattattattatttttgtttagaggaatggtcccactctctcccctaggctggagtccagtggtgcagtcacagctcactgcagcctcaacctcccaggttcaagcaatcctcccacctcaaccccccacgtagctcggactacaggcatgtgccatgcccggccattattttttctaaagatactttcagagttccactgtagttgtgttgttttttcagtatcgttggaattatggctcttacctttaaggacgatggacacttttggaagctagcatccctttcctcagaaacatgctcccccacaggcgcttttgcacactccgtcgtgcggtcagcgtgacaggagtgtggactgtaccctctgacagcagggtcatggcaggaaaggaggcagagtcggctcacagatggctggttgcacactgctgaggaacctggagtgcggttccctgggccgagctgtcctcagatacataggaaaaagtttaatcctttctaataagtttagatttttcattactggattgtagaaaattagactgttggtatttacatgtgatttgttgaaacaaattaaaaatgacaagcagaagtaagtattccaggccaagtgcagtggctcacctgtaatcccagcacttttggaggccaaagtgggaggatcacttgggaccaggagtttgagaccagcctgggcaacatagcgagaccgtttctctttaaattaaaaatttgtaaaagccaggtgtggtggtgcatgcctgtagttctagctacttaagaggctgaggcaagaggatcacttgagcctagacggttgcttgagcccaggaatttgagacagcagtgaactgtgattgtgccattgcccttcagcctgggtgacagagcgagaccctgtctcaaaaataataataatactttttttcatctctgtttgtgtttttgtcatatgatgtctgggcattttaaaacagtggttacctttattttcaatcgacagataataagtgtacatattcatgggatttgtgatgtttccatgcataatatatagtgatcggatcagagtaattagcatatccatcatctcaaacatttctttgtgttgggaacgttcaatatcctccttgctatttgaaactatatatgattgttaactatagtcattctacgggggtatagaacaccagaacctattcctcctatctagctataattttgtatcttttaacaaatctctccctatccccactttctcctatcctccccagcctctagtatcctctgtcctacattatgcttctatgtgatcaatttttttttagctttcacatatgagtgagaacatggagtgtttaatttgctattcctggcttctttcacttaatataatgttctctagttccattcttgtagccacaaatgacaagatttcattcttttttatggctggatagtatcccattgtgtataaatgccacattttctttatgcattcatctgttgttggacctaggttgatttcgtatgttggctagtgtgactgttggtgtagtaaacaagggagtgcaggtgtctcttcagtatactgatttcctttccattggatacatgccaagtagtgggattgctggaccatatggtagttccatttactgtagttttttaaggaagtggttaccttttgtgtgtttttatttttcagtgcagattctaaaaggagtaaaataaattctatactttacacattttcttttgagttttgagctttgcttggttttgaatcaacggtaggatgtttatggtcttaaaagtgattctaagccagccatagtggttcacacctgaaatcctagcactttgtgaggctgaggcaggaggattacctgagcccaggagttttgagactagcctgggcaatgaagcgagaccctgtctctacaaaaataaaaaaaattagctggctgtggtggtgcatgcctgtagtcctagctcctgcagaggctgaagtgggagagttgcttgagcccaggagttcaaggctgtagtgagccacgattgcatcactgcactctagcctgggtgacagaggtgagggcttctctctaaaaaaattttataggttgcactaaatacataatacatttttattttgtaatttgtttaatgactagattttttttaaccactttttaaagtactaaagtattgttggccggccacagtggttcacgcctgtaatcccagcactttgggaggccgagatgggtgtatcacgaggtcaggagtttgagaccagcctggtcaagagggtgaaaccccatctttactaaaaatacacagattagccgggcacagtggtgggtacctgtaatcccagttgcttgggaggctgaggcaggagaatcgcttgaatccgggagacggaagttgcagtgagctgagatcactgcactctaacctgggtgacagagcaagactctgtctcaaaaaaaaaaaaaaaagaaaagaaaaataaataaataaataaaaagtcctaaagtattgttaaaacaatttccgttttgtaatttcaggaagtttgaaattaatttgatttctaggattttttgggggggatactaaaattctccccccgttacatttttcataaagttaagaaaaattttttgtgccttttacttaaaatttgtttctctattaattttatttgtttttttagacagagtcttgctctgttgcccaggctagagtgcggtggtgcagcctcagctcactgcagcctctgcctcctaggttcaagcgattctcctgcctcaaccccccaagtagatgggaccacaggtgtgcaccaccacacccagctaattttcatatttttagtagaaatgggggttttgccatgttggccaggctggtctcgaactcctgagctcaggtaatcttcctgccttggcctcccaaagtgctgggattacagacatgagccagtgtgcccagcctgtttttctattaattttttaagttgttcatgtacattcttgttgaacaataattcaaacaatatagacacatataaagtcaaaatgttaaatgtcctgttctcattctccctctgccccatcccacactactcccattagcaactagagtgtcttcctttgtctgtgactacctgtatacagaatatgtggggtggggtgcttgtggtgattgtacacatacacgcatacatctacacacaaatacatatatccttgtcttttacaggaaggagattatactacccctgctactctgcagcgtggacatccttgcatgtcactacatacaggttttctgcattttttgctagttaaaacaccattccgtcatgtggatacaccttaatttatttaactgttctattggcagataggctatctcctgtacttcccacatttaaaataggaaagtattattggactgtcaatttaatgcacagttgaaatgaaatgtttttgttttctttatgttttaaactgttacagggaccatatgatgtggtggttctaccaggaggtaatctgggcgcacagaatttatctgaggtaaaaaattctactcaattatacctcaataaagctggggggggggaaaaactaaagaatttcagcatctgcttatgttctgttaattttgttattattcaaatatttcgggaggaggctgtgaaaaaaaaatagaaacaactaaaattaacaaaatggtgttatagcattaactcaaacttttttttttttttgagacagagtcttgctctgtggcccaggctggagtgcagtggcacaatctcggctcactgcaatctccgcctcctgggttcaagcagttctcctgcctcagcctctgagtagctgggattgcaggcatgcacccccatgccctgctaatttttatatttttattagagacggggtttcaccatgttggccagtctggtctcaaactcctgacctcgtgatccgcccacctcggcctcccaaagtgctggaattataggcgtgagccaccactcccgacctcaagaaaacatttttaatattttctatggaggtcaggtgcagtggctcaacgtctataatcccagtggtttgggaggctgagacaggaggattgcttgaggccaggagtttgagaccagcctaagtaacacatcgagacgccatctctacaaaaaattttcttttaattagctgggcacggtggtgcacacttgtagtcccagctactcgggaggctatggtgggaggatgacttgaggccagggatttgaggctgcagtgagctgtgaatgcaccactgcattctagcctgggcaacaaagcaagaacctgtcttatcagaaaaaaaaaatgttgccatggaagtaagctgaattggtgggaccgttatgaacagatgtcgatgaatacagtccaaagtaagatgatttggtttttttccaccagcagaagaatgatcagattttgtgttttgagaagggcaaattgtctactcaaagtcttaactgggggaagctgtggggctagggctgccagcaggaatggcaaatgccatcagcagagaccattgttcctcattttaagtcgtatgtgaggagtcagaggccagggtgaggggcacacctgcaggcagagttggggctgccagaagtaagaagtgggttgtgtcagacacaagggatcttttcctgctagattctgttcctctctctgccatctgaaaacacccaaaacaccacattccctcccatttctttctccctggagtacaaaatggcaagggtcaaattgcttcttctgatctttaaatgtggaagagtgcgtttctcttatgagaaatgccttgcttgggtttaagaatataatatagacacattttgatcatttttataccaatgatttagaaatattgttggaaaataggtcagagagcttgtggtttaaactaaaattaaattcttccaaagtttcctagtgagtgattggttagtggcttaatgataactttatgtatttttggttttcttttcactagtctgctgctgtgaaggagatactgaaggagcaggaaaaccggaagggcctgatagccgccatctgtgcaggtgacgtgcaggggcagcctgtgttgcagcgtcattggtgggtggggtagcctttcattcgatggtttgattccaaatagctcttccccttcataaagcatgcagggcatctgtgttggtgtatttagtttgggtggcatgaagttggtgtcatttcagagatgaggacaattgttctgttttctgcctctccatgcctttggtctacatgctgtgaaacttagtgttttccgtgtttggttgacctcggaggaaaataaggccctctggaattcagtaaacagcttgttacagcaagtctctgtgccagaaagtctttgtgccagcacacaatcagcaaaatccatcaaacatcaacacagcagctctgtcctgtgcttgccctgcaaattcagaagcccccatggtgctttccgctggcttctcgggcgtttctgattgtctcagtaccgagtgatcttgggcaccgcattatctgccacataatttagaacaaggacatttggtgcttcgcagatgtcctcttctctttgtaccttagtaatattttattttctcataaccattttaagatccattcttgttgctttcctatcagatgatgttctgccattttggttttttcccatgctgtaatttttgccagcaccttccttgttgtataggtcttcattaaatatttgtcagggccgggcgcagtggctcacgcctgtaatcccagcactttgggaggctgaggcgggcagatcacctgaggtcaggagttcaagaccagcctggccaccatggtgaaaccccatctctactaaaaatacagaaattagccaggcgtggtggcgggcgcctgtaatcccagctactcgggaggctgaggcaggagaatcgcttgaacccgggaggcggaggttgcagtgagccgagattgtgccgttgcactccagcctgggggacacgagcgagacttcgtctcaaaaaaaaaataaaataaaataaaataaatatttgtcagaagagtgaatgaataaacgaatgaatgagtggatggtttggtaaacatcaacatcaaaacatgttgctgttgctattttgttcaatacagtaggcttttcaaaagaagttatgggccagaggtcctggggacttgatacattcgagtatcagtggttctcaatgttcttttggtgcacttgcaaggtcaaagcagatgctactgaggggccaggtgtggtggctcatgcctgtaatctcagcattttgggaggccaaggcagaaggatctcttgaaagccaggagtttgagactaaccttggcaacatagccagacccccatctcaacaaacaaacaaacaaaaaattagccaagcacagtactgcatgcatgtagtcccagctactcaggaggctgagatgggaggatcgcttgaaggcaagagttagaggctgcagtgagctatgattgcactccagcctgggcagcagagtgacaccatgtctttcaaacaaaatgttattcgccttttttcttctcagtctttcaggagtgacatcagagtaggatgataccatcatctgagaatttattattgtgttttaaaaatttcccagttttattaggttgatgtaaaagtaattgtggtttttgccattaaaagtaattggcgtggcacagtggcgcatgcctgtaatctcagcactttgggaagctgaggtgggcagatcgtttgaggtcaggagttcaaaaccagcctggcaaacgtggtgaaatcccgtttctactaaaaatacaaaagttagctgggcatggtggtgcacgcctgtaatcccagctactcgggaggctgaggtgggaggatcacttgaggtcaggagttcgaaaccagcctggctaacatggtgaaaccccgtctctactaaaaatacaaaagttagctgggcagttagctgggtatggtgatgcattcctgtaatcccagctatcaggaggctgaggcaggagaatctattgaacccgggcggcggaggttgcagtgagccgcgattacgccactgcactccagcctgggtgacacagcaagactgtctcaaaaaaaagtaataatttttaatatggcagatgttcatagatataacccacataaaagctaaagggattctaagacctaaatgtttgagaaccgtggcattaggggctgggaagaaccacagaggttgaccaccctggcaggtcttgtacgtgggcttactacaagagtcaccactagccttttgacctgccctgaggctcaggtaattatctctgccaaagggcactgcagtcactgcagcccaagcagctgctcccctctttggagagaaagtcacagatccttgagtttggttttctttggctctgctgctgtgaagcaagcctcagtcctagattctttgaccaaaggaagaaagagtttgggctgagtttgtttccttatgattctgctgaaagtaaaaaccacatgtcagtttgtcctgtgccacaaaagtagcaaaatcacttaaggtcaggagttcgaaaccagcctggccaccatggtgaaaccccatctctactaaaaatacagaaattagccaggcgtggtggcgcgtgcctgtaatcccagctgcttgggaggctgaggcaggagaatcgcttgaacctgggaagtggaggttgcagtgagccaagattgcgccattgcactccagcctgggcaacaagagtgaaactccgtctcaaaaaataaataaaataaaataataaaaataaaaataacaaaaattagcagggcatggtggcgcatgcctgtcgtcctagctacttgggaggctgaggcaggagaatcgcttgaacccgggaggcggagattgcagtgagccgagatcgtgccactgcactccagcctgagcgacagagcaagacttcgtttcaaaaaaaaaaaaaaaaaatcaaccacatttggcttactgttttgtgctgaggctagatggaatgccatgctaagaagcatgggccttatagtactttaaatcaacattaaaaaataaacaggctggctgtggtggctcatagctgtaatcctagcactttgggagactgaggtgggaggatcacttgaacccaggagttcaagaccagcctgggcaacatagtgagacccccccaccgacctctacaaaaaaatattttaaaaaatcagcctggtgtggtggtgcacacttgtagtcccagctactcaggaggctgaggtgggaggatcactttgagcccaggaatttgaggttacattgagatgtggtgatcacaccactgcacttgagcctaaaggacagagcaagacttggtctcttaaaaaaaaaaagtaaaaataggccaagggcggtggctcacacctgtaatcccagcactttgggaggccgaggcgtgcggatcacaaggtcaggagatcgagaccatcctggctaacacggtgaaaccctgtctctcctaaaaatacaaaaaattagccaggcgtggtggcgggtgcctgtagtcccagctactcgggaggctgaggcaggagaatggtgtgaacctggggggcagagcttgcagtgagccgagattgcgccactgctctccagcctgggcgacagagtgagactccatctcaaaaaaaaaaaaattatataaaaaacagtaaaaatagaaaacacactagcagtgtgtttataccattgaatatcctgcaccactgttgtgggcactacaccagaaataggaaaaaatgtgatgatgagctgagctaattgagatgagggttatgggaatggaacagaggagtgatggaagagatttggatcttttaaattggcaaacagaaaaataagattcttttttttttttttttttgttgaaatgggagctttgctcttgttgcccaagctggagtgcagtggtgcaatttcggctcactgcaacctccacctcccaggttcaagcgattctcctgcctcaggctcccgagtagctagaattacaggcacctgccaccatgcccagctaatttttgtatttttggtagagacggggtttcaccatgttagccaggctggtctcgaactcctgatctcgtgatccgcccaccttggcctcccaaagtgctaggattacaggcgtgagccaccgcacccagccaagattattctgaagtgttgcagttagggattggaaacattttgaacacaaagaatattagcctagtccttaatattgagtgaatgaggaacgcaaattggaagggagtctatgttgagaagaaaattaaatgatatttactttgagtaggggagggggaggaagtgtggagttggaggagtggacagttgtcagctgagatgcccaggtctaggaatgaggcctctggaagcaaggtcttggccacctggaggagctggggagttggcagaggtggtcattttgcatgttaccacagggtggtgctgttggctgcagaaggggacatggtcagctgcgccctctgcactgtagtgcagagtacagagcgttttcatccatcagaatcccaggtcctgggagagtgaaacgtctcttctccagtattccaaatagggttctgacgccccagaaagcagtgattatgagcttacctgataagtatgaaagacatcagtaaattcctgaatccaactgtaacataaatttattcacatcgtagcagtgattttattaccaccttgaagggagcagcctaaaaattctcgttcaccgatcactttcctcactgtgctatcatctattaaagtttactttaaaatgcaagatgatgtaggaatttcttcttaaattcttaccaaataaaaattaaaaacaatttataaatccattcaaataaaaattgataattattcaattcttacggacttctaaaatttgctaccatacatagctgtcttgtgtgtaaaaataacgtggagaagagacatttgaggcttttgatttaagagctataaatcaggacttggtctgaaactgacagctgatattaggcagaaagcttatgtaattaggtagtatttgtgtgatcttcctgtttgtaacagctacggtctgagtagcttgtgggtatattatataattccttccttggagtcttgttgaaaaatgaaaggacagtaagaccaagacctctcaggtttgctgacactaaaagtgtacaaactgtgccacaggatcttagccatccagggcaccttaagtgtttccaagatcaaggtgctgttctgaaacgtatccttctaagtgtcatgtgaggccttagaaagaatgtttatatgtgtggcttagaggaaaaaggtagaatgaatactttgtaaaaagctttaagatgaaataacaatgaaaggtatataaaatctttgtttttaatccttatttaggaccattacatacgcaatatgcttgtgaccctccctgaagttggccgttttcagtgaatacatttaaataaaaatctcaagttaggacctgccaatttggaaagacttcatcaactgacacttccatgtggttctttgcttaagtagctttcatcacgtgatgctagtgcctttatatctcacacttccaggcacttcacaggctatctccttcaaggacagtgtgctgtccattttaatcctaccacctggcatacttgggtggataggtggatgaacgagtgttaatttcccattttatttatttattttttatttattttgagacagagtctcgctctgtcgcccaggctggagtgcagtggcacgatcttggctcactgaaagctctgcctcccgggttcaccccattctcctgcctcagcctcccgagtagctgggactacaggcgcccgccaccacgcacagctaattttttgtatttttagtagagacagggttccagcgtgttagccaggatggtcttgatctcctgacctcatgatccagccgccttggcctcccaaagtgctgggaatacaggcatgagccaccgtgcccggcctaatttcccattttcaagtagaaaataagattacaaaagagcaataaaatccagaagttcagagagtaccagttgcctttagcatgtaactaaatctttccttttactaagagtgaggtaagaagttgagcccgccccagtgatcctccccctcctttggactcctggtatatgtggtccctgttctggggatggggaaggtgagagaggtgagcacattttgtttatctgtgtatgctctgctggtatcaaggtaaatcttcttgagtaaatggttattgaagtattttgagtttctgtgcttttgccagatgtgctcagcaaatcgtttgttataaacatactttatctctcatactaggaagtgtttcatttcagaatcgtagctgtatgtttggtaagagcctcttgattttgaagaatactttgctgttgcagtttttgttgttgttagagaaggggtctgtgttgcccaggctgatgttgaattcctgggctcaagcaatttttctacctaggcctccccaattgctgggattacaggcatgagccactgtgccaggcactattgcgattttttaaacatgggcttttctatatctgcacttagatctttttatttttattcttaggtcctactgctctgttggctcatgaaataggttttggaagtaaagttacaacacaccctcttgctaaagacaaaatgatgaatggaggtaagtatatgcttgtttttgtttgtttgtttgttttttgagatggagtctcgctccatcgcccaggctggagtgcagtggcgtgatcttggcttactgcaatccctgcctcccgggttcaagcgattcttctctctcagcctcctgagtagctgggattacaggcgcatgccatcacacccagctaatttttgtatttttagtagagatggagtttcaccatgttggtcaggctggtctcaaactctttttttttttttttttttttttttttttgagacagagtctcgctctgttgcccaggctggagtgccatggtgcgttctctgctcactgcaacttccgcctcccgggttcaagtgattcttctgcctcagcctcctgagtagctgggatcacaggtgtgctccaccacgcctggctaatttttgtattttttagtagagatggggtttctccatgttggtcatgctggtcttgaacttctgaccttgtgatccacccgcctcagcctctgaaagtgctgggattacaggcatgagccaccgcgcccagtctcgaactcttgaccttgtgatctgcctgcctcagcctcccagagtgctgggattacaggtgttagccaccgcgcctggcccatatgcctgtgtgtggttttttttttttttttgagatggagtctctcgctctgttgcccaggctggaatgcagtggtgtgatctcagctcactgcaacctccgcctcccgggttcaagggactctcctgtctcagcctcccgagtagctgggattacaggcatgtgccaccacaagtttcttgtagactgggcacagtggcttccgcctgtaatcccagtactttgggaggctgaggcgggtggatcgcttgagccccgagttcgagaccagcctgggcaacatggttaaactccatctctactaaaaatacaaaaaacattagccaggcatggtgatgcacactggtagttgcagctgctcaggaggctgaggtgggatgatcgctttaagcctgggaggtcaaagctatggtgagctgtgatctcgccactgaactccagcctggaggacaaagcaagaccctatcaaaaaaaaaaaaaaaaaaaagtttcttgtgtacctgtagaattttatctatcacatactcattatcctttttattttaactaaaatgagatctactaaatgtattgttctgcagcttgctttttttaacttaatgttaatatcttatgttatcttttaacagcacatgtagatttagatttgcttcatccttgttaagtacagctgctagtccagtgttggaatgtgccatgctgtatgtaaccttctcctgggggtgggcatgaaggtggttttctgcttttgcccttgtaaaccatgccataatgatcatccttgaatgccgctgtgagcatatctgagctccactttaaaagtgatgcacttttcattatactgcatgttttttaattactaaactttagttttttagagcagttttaggttcacagccaaattcccgtctaccttgacccactcgccactccccaggcccccgcccctggccatgcatagcctcccctactatcaacatcctgcaccagaatctgtacccacattgacacatcatcatccagagtccacagtttacatgagggttctctcttgctgttgtacattctacatacagttacatttgatccagagcagtgttttcctgaaaatccatggtttgtttatttatttaatgtatttgagacagaggcttgctctgtcacccaggcaggagtgcagtggtgtgatctcagttcattgtaacctccacctcttgggatcaggcaatcctctcacctcagcctcccgagtagctggaactatgggtatgagccaccacacttggctaatttttaaatttttttgtagagacagggtctaaccatattgcacagtctggtcttgaactcctggcctcaagcgatccttctggcttggcctcccaaagtactaggattacagatgtgagccactgtgccccgctcatggttttattttagttgctagaaagatactatgttatcattaaaacgatctgtttgaaaattggtactttttgctggatgcagtgactcacgcctgtaatcccagcacttggggaggccggtgggggaggtagatcacgaggtcaggagatcgagaccatcctggctaacacggtgaaaccccgtctctactaaatgtactaaaaaaattagctgggcgtggtggcgggcacctgtagtcccagctactcaggaggctgaggcaggagagtggcgtgaacccaagaggtggagcttgcagtgagctgagatcgtgccactgcactccagcctgggcaacagagtgagactccatctcaaaaaaaaaaaaaaaaattggtactttttaataaaagtctctggtttctgggcattttaaatgtaggaatttaatttactttaagctcatggagggattttagagcgttgaaagaaatggaaagaacagaactgggctccctttgtgatgtcttcagagggaagacaagcggagcgcgctcctgcactacctgaaggtgtgcctgttgcatctgttttcctttagtgcctcaaaaacattgaggttggtcaggcatagaaaaagatcagattgttgatgctcacacttggagtttacaaagcacgttcccgtacgttatcttggtggagcttcctggtccccagtgcccagcaaggcaggtggcatcatcctggcttcacaaacaaggagagactgaggccagagctcaagcccagccctctgccttgcatccagttttggcttcctgcccctcccctgctctgtggtagcaaaaggctcccacacatttaagttaccaggtgttggatttagtcagtaacctctattataagaaatggatacttgaaatgtctactccttcaggacacttcgagaggtagggctgcagtcatcacctgggggtctgctctgggtgaggcccttgtcctcactgtgaacttgaaagatcagtgtgacagtttcttctcagataagcaatcccatctgaagaccatagtcttttttctttttttcttatcttttttttgatagattcagggtctcactatgttgcccaagcagtacttaaactcctgggctcaaatgaccctcccaccttggtctcccaaagtgctggaattacaggtgtgtgctaccagctccagtccccataatcttttaattcctccgattttagaataagtcagttataactgtaatgtgtgattccgtttctcatttgtccactgtttgatggcatccgcatgcctggtcccatacccgagcactgaagagcagggtctctggagcctggcatcgtggggtggccctcagcttccccactcactgtgggaagtttccttagtgtctctgagcctgtttcctcatccgttgcctgaggataaacctgcttcaggattgttggtgaaaagacttccctcacctagcttctgtaacgccactgcatgccaccactgctgagtactgtttgtttgctaggttggtgtcattctcattttaccagaaagtgaagctctgagaggtcagacagccactaaatggcagacctgggatttgaacccagaactctgctcaggggtcaactgactgctccccaaaggccaggtggtaaatattgcaggctttctgggacttcagatctctggcagctactcaactgttgcacctccacaatagctacagacagtactaaacacgcagggtggctttgtgccagtgaagctgcatttgcaaaaacaggcagcaacctggcctcggccctcaggcttgtcgttgctgacctgtgtcctgtgtcttttgttttttttttttttttgagacagagtctctctctgtcatccaggctggagtacagtggcacgatctgtgctcacggcaagctccgcctcccaggttcacgccattctcctgcctcagcctcccaagtagctgggactacaggtgcccgccaccacgcctggcttattttttgtatttttagtagagacggggtttcatcgtgttagccaggatggtctcgatctcctgaccttgtgatctgccctcctcggcttccccatgtgctgggattacaggcgtgagccactatgcccagcccccccgccttttttttttttttttttttttttttttgagacggagtcttgctctctcacccaggctgaagtgcagtgacgcatctcggctcactgcaacctccgcctcccgggttcaagtgattctcctgtctcagcctcctgaatagctgggattacaggtactggccgccaggcccagctaatttttgtatttttttttttttttttagtagaggcggggtttcaccatgttggtcaggctggtcttgaaatcctgacctcaggtgatccacctgccttggcgtcccagagtgttggaattaccggcatgagccactgcatccggcttcccattgctttttctctgaagagactttaagacttggagtctggtttaaaaaaaataaagaaataaaaatcaatgccttctgctggttgaacgggaagtgtaaaatctgaattcgctatagggtcacaatcccagcctccagttcgcacagtgccttcctggtgctgatggggtgcatgttctgtcttcgccactaggtggaggcagttggtaaccttaaaccttttgcttctcgtggttaaaagtctgacaagaaccgtagaacctttaagcatatttaaccagtttaagccctgtttgcgatgttttagccacaaagatactgttcagtgaaccatttacagttgtgcctcgcgttgtcccactctcagctgtgcatctcactgtcgctctggaagacctagcccagccagtttctaggttagcatttgaaatggtcttggcctggtttaaccatcagtaaatgaggccagattatgataaaccttttcccctcaaactagggatcctctttttctctacaatagttaaattggaaattgtttatgtactctattcatttattttggtgggtgacctgattttttaaattttttagattagtcaagcacagtagtgagaagaggagaaagagtagaacaaggtgtaactgcctgtgaacgatcaattgagataactcactgccttcgaccagcagtggcttggtttctaatgacagtaagacaagttcctatagccattgttaatctccttggaaaagaaatgaacactgtgtggtttcagaagctcattaatatagcagaagcactctgcttctgtttgaagggaggttttcagatgaatttttctgcgtgttcattgaacagacgtttcctaagctcctccttagtgcctggcactgggaacagaagaaggaagaagagaaagctgtgccctcagggtgttctcaggtccgcactgagcggtggtgaccagagccacccgcctgcctgcgtggccggtgcatcaggatagagcaggagttcacagaggagctttgtcacttccccctccgctaaatctgttctgtggccccacatcactgagtggtgtcaccatcatccagtcacctgggacaggcagctgggagtcatccttgaagcctcctcacctaggccttcattgcaaacctccatttcctctggatcactgtcaccagcctagtgcaggcaccaccagcttctacccagagagcaggttcctttccatctccttctggtcccagcccagtctctgtgcgaaggccagaccgcagagggctccaggccccgtgacatggagttcagcgtgaccttcaggtgctggagagagttggcaagggctttccatggggaactggctatgccctgctttgcactctggacagttagcttttgggtgctgggcatggatcgaaggggcgcacagccggaagggagagctgtaatcatgcagagatccttcccctttaaagcaggggacaggcgagaaaggagatcgagtcaagaatggtgtttggtgcctttgacctcacacttcaggggtgcctcctgtgtgccatggatatcattggccagacagggactgatgaagacccagcctttttaaagagtaaacaataaacaaggaaatgaaatgttcatagattgtgatagattgtatcaatgctgcgagggcagtaaatagaatgcggtgatagagtcaatagaggtacctaatttggggaggtgggggtggtcacagataccctctctgaggggtttttgttgatgctgaaactgaaggagcaaggaactggaaagagctggtctctgggtggagggagcagcccttgagctcttcctggagcaggagagaacgtgttgtatacagtaagggaagctccaggtgggagagtgatagggatgggtgtggggagggaggttaggctctgtgtgcagtggagaggctggtgactacctgctgtggaggggcagagctcagggcatccatgcttaagagtcccagttttggtattatatttgccaagaaatagccaaccggcgggcctggaggtgcggggatgcggaaggaaagtagtccttgagagggaatgtggtttctacctgcacacgcacactcacatgcatacccgcctccattacgttgtgctgtggttgtttttgaggcatcagagggtgtgcgtgccgccacatgttgattggggtggcttctgcgttcagcgctgccgcatcccttcacccttccccggcacttcagaattgacacttgagctttgttgtaaatagtgatgtgagtaactgtcattcaccgacatctcccccaacacttaaagtcttagcagctgcatttaactcacgcatatttgtttcattctaacagtggtttctgtcaccctttgctctgcacagttttaaaaatacctttgtagggggcttctaagagcttggagtgcctagtaaatgtttttgaatggttagctacagtgttgggtttatatgctgtaatagtgaatttaattggtaagtaatcgtctttctcgtcacatagcccattaggatgtcaccttttctgtttctactttgcaggtcattacacctactctgagaatcgtgtggaaaaagacggcctgattcttacaagccgggggcctgggaccagcttcgagtttgcgcttgcaattgttgaagccctgaatggcaaggaggtggcggctcaagtgaaggctccacttgttcttaaagactagagcagcgaactgcgacgatcacttagagaaacaggccgttaggaatccattctcactgtgttcgctctaaacaaaacagtggtaggttaatgtgttcagaagtcgctgtccttactacttttgcggaagtatggaagtcacaactacacagagatttctcagcctacaaattgtgtctatacatttctaagccttgtttgcagaataaacagggcatttagcaaactactgattgtttcttgttttgtctctcatttcttttgtgaaattaaattccgtatcaccttcatttgcagctcttaactgtccatatggcactgaaataaaagaacagtgaccacattttacacagcaaggaggaaaggcatacaaacagaatttaagaggcttgtgattttctctgcttattagctgtgtgtttttaatgtgctattaaaaaataccaatgagggctgggtgtggtggctcatgcctgtaatcccagcactttaggaaaccgagccaggaggattgcttgaggccaggagttcaagaccagcctgggcaacatagcaagtctccatctctacaaaaaaatacaaaaactagccaggcatggtggcatgcacctgtagtcccagctacttaggagcctgaggtgagaggatcacttgagccccagggggtcaaggctacaatgagctgtgatcacaccaccgcaccccagcctgggtgtcacagcgagaccctgtctccaaaaaaaaaaaaaagaaaaaaagttggctgtactggtgaatttttatacaccagttcctttttccattatggaaagagtacttggataaaaacttttcaaggttggcccaacatctcttttcccttccccaggtaatagcacccagcattccttgtgaaccacccagttcctcctgggcgggcacatgatccagacccagccaatccgagccctgtttaccactggccgtgtgacccaggtgagctcagtcagtccacgagactccatccgagggtctcatagctgctggagtggccaagaggatatgctggcaacccagagcactggcagccgtctcgtcactgccagcgaaagacctgcttgggacggctctcacgctgtgggtggctgaccctagtccagaaggctgggcagatgttaacttttacaatgcaaacacatgtgtaattgtctattttagtaagtgctttaacagatgataatgctaagggagagacgatttccatggtggggagtggggagggaggcttctgaggaagtgacatttcaggtgtgaagtaggagcagtgcttaggctttcattccttccccagctgtgtgctcagtcagtacctactgtgtgccaagtgctgttcctgctgctgggaatacgccagggagaaacacagcctttgtccttggggagcttatgttgtgggtgccggggagagatgaaagcaaatacgaaaatacccacattctatgaagaaaattaaggagggtaaggaggcagtgacaggggaattgcatgatgggaagtgaaggcctctccgaaaagagatcttagtgggaatctgaggacttttgggtgtgaaagagacaagtaggtgtctgttcagagcataccaggcagcaggagcagggagtgtagaggccctgccgcaggagcattgagaggcgggttagagaaacatggtaggaggtgaagttggagaggtagccagggccatggtgaggtgtcaagacagagacagaaccaccagagagagacctgacccacctcgttcaaagactggccctgcagagaagagacccttctggagcaggcacgcaggcaggcgggatgctggggccagtcaggtggcagcattgggcacccactcagggtgtgagaggaagggcgtccgggacaacccccacttttttttttttttttttttttttgagacagagtcttgctctgttacccaggctggagtgcagtggtacgatgatcccggctcacagcaacctccacctcccaagttcaagcgattctcctgcctcagcctcccgagtagctgggattacagatgtgtgccaccatgcccagctaattttttatttttggtagagacggggttttgccatgttggccaggctggtctcgaactcctggcctcaagtgatccacctgcctcggcctcccaaagtgctgggatttcatgtgtgagccactgcgcccggccacaacccccacatttctgacttgaacacagatcatgtggagattcaatgtcttgagtttgtgaaggagtccttgggggaggggctgggatgaatttagagttcagattggtgaatttgaggtaaaatacacttttgttgtttttttctttagagacaggatctcactctagtctgctggagtgcagtatctcgatctcggctcactgcaacttctgcctcctgggttcaagcaattctcctgcctcagcctcctgagtagctgggactacatgcacgcaccactgtgcccagctaatttttggtattttttgtagagatgaggtttcactgtgttacccaggctggtctcaaactcatagcctcaagtgatccgcctgcctcggcctcccacagtcctgggattacaggcatgagccaccacgcctggccttgttttgtttttgagacagggtctcgctctgttgcccaggctggattgtggtggcgcaactatggctcactgcagcctggtcctccccagctcaagcgatcctcatgccttagccacccaagtagctgagactacaggcacacaccaccatgtccagctagttattttttgtagagatagggtttcagtatgttgcccaggctggtctcaaactcctgggctcaagtgatcctcttacctcaacctcccaagtgctaggattgcagcgtgagccacagtgcccagcccacttttaataaggaaagaaaactggacacctgctgtttgtttactggatacctgctatttgttttgtttgtttgagacggagtctctctgtctcccaggctgaagtccaatgaatggccctatctcagctcaccacgacctccacctttcaggttcaagcaattctgcctcagcctcccaagtagctgggattacaattgcctgccgccatgcccagctaatttttgcatatttagtagagacagggtttcaccacattggccaggctggtcttgaactcctgacctcaggtgatctgtctgccttagccttccaaagtgctgggattacaggcatgagccaccgtgcccggcggatacctgctatttgaaagtcacaggctgggtgcggtggctaatgcctgtaatcccaacactttgggaggccaaggtgggtggatcacgagttcaggagttcaagaccagcctgattaagatggtgaaaccctgtctctactaaaaactacaaaaattagctgggcgtgatggcggacgcctgtaatcccagctacttgggaggctgaggcaggagaatcgcttgaacccgggcagcagagtttgcagtgagccaagatcacagcactgcactccagcctgggcaacagagtgagattctgtctcaaaaaaaaagaacaaaaagtgaaactgctgatctgaaaaccacttattactaatagtgaacaactgtaaactctctcaagtttgctaggtgttttgccagcatcccttacctctgaataagctccttggaattttagagatatctacaggaagggagatagtgaaagaaattggctctttgagtttttgtgccctcagggcagcaggaaaaggtgtttctagatgagcatttctaaaagagcatctctaaggtaaatcagtattatcagagcccaggcattgtagtgaagattcatttccctttctctgacagtgtttgggatgggggctccaggaaccagctttatctaaaccttgggctttttctggtccttcttgaatgactagcttttggcatgttgataacatttttaaaacctccactctctcttatctgtccacttctttcccaggctgaacaaacttgcttcctaaacttctggtcggggaggggacaaacaaaaattgggaacttaagtgggaggggtgctatctacagttgaaaagtgacctggagtcagaattcagatgtgtgattaagatgtgtggcaggtggcttgactgtgctcctcctgatttgggggtgagggtgtgacaggcgtgagccactgtgcccagccgattttctttcactctttatacaaaaggatcaacttctatccagaatcccaagaggggttgcattcttctgcccctgctttttcacttgtcatatcttcgagaacttctaccagtttgtggacatttatgtgctgcatctccaactctgtctgaccagtaaccctagaaaaagtggtcattggtatcatccattgcagagaagaaagtctttctagaggtcaagagcctactgggcctatgccataggattcatttctgtaactgcaacatcaaatgtaaaatatgattttactttagtagccaactgtatcatctgagtctggttacttactctatattctagggtgttggtttcctaaggaatgaggaggacatcatgttctcctgcagtcagttctcctgtagaattagcttgttttttttagaaaacaccctccctttttagagggaagcagcagcagggacctgggcattcaaggagtgctgggggggatctgggctgctctcagactcttccctgtttattagctacagcatcttccccatgcacacaaggagtctgtcagcacagtgcagaggaaggggctgttccttttcacatctgggctggacacattcttcacggttccagcatgaggcctttccagagctggcccttttcccagaccctagcttgagtcccaaggcatccaggctggggccaagggctcttatgggactgagcactaaggaaggtctttagcactgggaagaatgtgaatgctggattcaccaccatcaccatcaccaccaccacaatcactatcaccatctccatcatcatcaacatccccactgttgtcaccaccaccaccatcactatcaccatcattaccatcaccatcaccatcatcaccatcactaccaccgtcatcaccatcaccctcaccaccctcaccatcaccctcaccactatcaccacactcaccaccaccaccatcaccaccatcattaccaccagcatcaccctcaccaccatcaccatcaccaccaccatcaccttcaccaccaccaccaccatcaccaccagcatcaccctcaccatcaccctcaccaccaccatcaccacactcaccaccaccatcaccatcaccaccagcatcaccctcaccaccaccatcaccatcaccaccaccatcaccttcaccaccaccaccatcaccaccagcatcaccttcaccatcaccctcaccaccaccatcaccactaccaacaccatcaccctcaccactaccatcatcaccatcaccaccaccatcaccatcaccctcaccaccaccatcaccatcagcatcaccaccaccaccaccaccgtcaccatcattatcaccaccatcatcatctttttcacttcttgcagcttgcaggttcccaaacaagtcccggaccagctgatcagatgggatctccccacagggctgcatacctgctgggcctcagacattcagctacttcacagagctgctttattttgctttgctgtttcaattctgcatgtgatcacattctcagggtttcttttctttttttttttttttttttttttgagatagagtcttgctcttgtcgcccaagctggagtgcagtggcacaatctcggctcactacaacctccacctccctggttcaagcgattctcctccctcagcctcctgagtagctgggattacaggcatgcaccaccacgtccggataatttttatatttttcctggagatggggtttcaccacgttggccaggctggtctcaaattcctgatctcgtgatccacccacctcagcctcccaaagttccgggattacaggcgtgagctaccgcgcccggcaagtattttgtttttaaattcagcctgctcctggaggtttttacttggcttaaaaataacatgagacttgaaagttcattgtcttaaaaaataaagaagaaaagacaaaattgtggctaatggaggtgcaacctccagacacaaaacttggattgatgatggtaaaatctgagagcctgtgttggaagacagcagccaggagcgagatgttgccctctttagatttcacatctttgcttcagtggttttctttaaaggcaagcaaaggtaagtaagccataacaagtgtgcttggttcagatttcttctttccagaagagaataagatttcacaaagtatactgaagagaaagttatgtttcctttttttctttgagatagagtttcactcttgtcgcccaggctggagtgcaatggtgcggtctccgctcactgcaacctccgcctctcgggttcaaaggattctcctgcctcagcctctcaagtagctgggattacaggcgcccaccaccacacccggctaatttttatatttttagtagagatgggatttcactatgttggccaggctggtcttgaactcctgacctcaggtgatccacccacctcggcctcccaaagtgctgggattacaggagtgagccgctgctccaggctgtttccttgttttttagacctagatggaatgtggcctggcgacagtcccgtattcacctggtcctgaaaattcctccctccagccctccgtatctgttgtgcggcggtcttaggccctgcctgcctggcgcctggggccctactgtgctatgtggtcagtcttacaaaatgcagaattctctctatttgcattgctgagtgactagctgaggcaggtagggtgactgggaggaagctttgttacagataacttgacagccgggggcaagttaaaggatgatggtaataaaaggatggtcaggcctcaaatttgggcttcagcagtaaatcagtgcaagaataaaacttacaaaggtcacaggcaagagtgagatcatcctcttttctaatacttgcttatgcttctacatcccttattgaggaatgccagccactcagcacacttatgaaagagtaaattatctccggatggtggataataccatgtcattagtccatgaggcatctagctcagcgccacctgggtcttaaagcacttaaaaatgtaattatacaacaaatacaccaatacctgttcattgggaaagactcaaatgatacatgaatacataaagcaagacttgaaagttctctgtcccgccctccctcccctacctcctcttcctttccccaaagtcccactttgaggtctcgcttacagtctgttttctaggaatttacaaatatgtaactctacacacacatccacacacattatgttttatacatacacagagattgtacattattgtgtcaattttttaaaaataaagtaaggccgagcacagtggctcatgcctgtaatcccagcaccttgggaagccgaggtgggtggatcacctgaggtcaggagttcgagaccagcctggccaacatggtgaaaccgcatctctactaaaaaaaaaaaaatacaaaaattagctgggcctggcgtccggcgcctataagcccagctactcaggaggctaagacaggagaatcgcttgaacccgggaggcggaggttgcagtgagccgagatcacgcaattgcactccagcctgggcaacaagagcaaaactccatctcaaaataaataaataaataaaaacaaaataaaatacataggatcctattgagtatattgttttgcaaattgaattttttgaaacagtatgtcttagaaatctgctcatgttcaagtccactttgtttatgtaatggttgaacagaatgttatagtataaccacactgtaatttaacctttttttttttttttttgagactgagtcttgttctgtcacctaggctggagaataatggtgcgattaagactcactgcagcctccacctcctgggctcaagccattctttcacctcagctgcccgccccttcacccccagtagctggaactacaggtacctggcactgcaggcacatgccaccacacccagctaatttttttgtatttttttgtagagatggggtctcactatgttgtccaggctggtctcaaactcctgggcattcctctattaatggatttcccccattaaatttttttattgcagtaaaatacatacaacatgaaatgtaccatcctaaccattttaagtatacggttcggtggtattagatacattcatcccgttgtgcaagcatcagcaccatccatctcccgaactctttttcatcttgtaaaactgagactctgtatccagtaaacactaactttccttccccctacccctagcccctggcaaccaccattccaccttctctctctgtgaatgagagtaccctcagtacctcctctccgtggaatcacatagtatttgtctttctgtgactggcttattttacttagcaaatcatcctcaacgtccatgttgtggcatgtgttagaatttccttccttttttttttgagaccgagtctcgctctgttgcccaggctagagtgcggtggtgtgatcttggctcaccgcaacctccgcctcccaggttcaagcgattctcctgcctcagctcccaagtagctgggatcacaggcgcgcgcaaccacaccaggctgatttttgtattttttgtacagacggggtttcgctgtgttcttcaggctggcctcaaactcctgacatcaaatgatccgcccgccttggcctctgaaagtgctgggattacaggcgtgagccactgcccctagcccataatttccttcctttttaaggctgaataaaatttaagtgtatgtatgttccacattttgcttatcctttcatccctttatagattcttgggttacttccacctcttagctattgtgaataatgctgctgttaacatggtgtccacagctcttccggaccctgctttcgattctttggggtatacacgcagaagtggaattgctgaatcatatggtcattctcattgtggttttggtttgcattttcctaatgactaatgatgtggagcatcttttcatctgcttattggccatttgtacatcttagatatgtctattcaagtgctttgcccattaaatttttttttccaggggccatgctaataatctgtgttgttccatttttagtatatgtgctactgaagtgtgcactttgcccagttttgaatcgggtttttgttgttgctgctgatatgatttgtttttttttttttttgaaacagagtctcactctgtctcccagactggagtgcaatggcgcgatctcagctcactgtaacctccacctcccgagttcaagcgattatcccacctcagcctcccatgtaactgggattacaggcatgtgccaccatgcctggctaattcttttgtatttttaatagagatggggtttcatcatgttgaccaggctggtcttgaattcctggcctcaagtgatccacttgcctcagccacccaaagtgctgggattacaggcgtgagccactatggttgacccacgcataagccaactttaatgtttttcaataaagttttgtaatttccccattaagcgtttacacatcttttggatttattgttggtattattaggtctgtctttttttctttcttctttctctcttctctttctttctcttttctttctttttctttctttctctctccctttctttctttttctctctttccttttctttctctctctccctttcctttccttttctttttctctttttttccttttccttctttctctttctttctttctctttctctctctctctttctttctctttctctctctctctttcttcctttctctttctctctctctccttccttccctccctccctccctccttccttctttccttctttctcctttttctttctttcctccctccctccctcccttccctccttccttcctttctttttcattgttaattccttttttaaattgttttctgattgttgctggtatatagaaatacagatacttttatttacttatttacttttttaagagacagggtcttcctctgtcacgcaggctggagtacactggtgtgatcaaatttatgacctgcttttaggcaaaaagggggagggcagagaactctttctggatctgttgattctcaattgccttcagctcaaaataatctttatgtcaaagtcgcatattctgtggtggcctgtccggatccccttcaagtctctctgacctttcttctgccctccagcctgggtgacagagctagagtctgtctcaaataataataataatacaataaataaataaataaataaataaataaataaagtacgctttccattcttggtttgctaagagtttttgtcatgagtagatgttgaaatttattgaatggttttccatcatcagtgacatcttctggcttttctcctttaatctattaccatggtgaattatatcagtagattttctttttctttttttttgagacagaatctcgctctgtcgcccaggctggagtgcagtggcgcgatctcagctcactgcaagctctgcctcccgggttcatgccattctcctgcctcagcctccccagcagctgggactacaggtgcacgccaccacgcctggctaatttttttgtatttttagtagagacggggtttcaccgtgttagccaggatggtctccatctcctgaccttgtgatctgcccgcctcggcctcccaaagtgctgggattacaggtgtgagccaccgcgcccagccttatgtcagtagattttctaatgaactagtcttgcatgcctgaagtaaacccaatgtggtcattatgtttttatacattaccaggttctatttgataagtatgtaatttaagggtttttacatctcatgggtaaagttgaactgaaactttcctttcttgtactgtctttgtacagttttggaatcacagttacgctgaagtcctatctttttttttttttttcagatggagtctcactctgttccccaggcttgagtgcagtggtgcaatctcggctcactgcaagctccgcctcccaggttcgtgccattctcctgcctcagcctaccggagtagctgggactacaggtgcccgccaccacgcccggctaattttctgtatttttagtagagacagtgtttcactgtgtttgccaggatggtctcaatctcctgaccttgtgatccgcctgccttggcctcccaaagtgctgggattacaggcatgagccaccgtccctggcctaaagtcgtgtcttgagttggggagcatgttaggccattcttgcattgctataaagaaatacctgagattgggtaatttataaagaaagaggttgatttggcttacggttctgcaggctgtactggaagcatggccctggcatgtgctcggcttctggggaggcctcagggagcttttgctcatggtggaagatgaagtgataacaggagtctcacatggtgggagcaggagcaagagatgggggtcggggagtagatgccacacacacttgacaacaaccacatctcgggagaactcactaccaagaaaactgcaccaagccatggaggatccgtccccatgacccaaacgtctcccaccaggccccacctccaacactggggataattcaatatgagacttgggtggggacaaatatcctaactatatcgggagtatccctcttctgcttttctatataaatatttctgaagggtaagaaatacctattctttgaatgtttcatggaaatttcccctaaatccacctgggtgtcaagtttttaaaaacggagctgaaattcatctaacagaatgaaccatgttgaagcagactgttcaggggcacttagtacattcataatgtgcagtcctcactgctgtccagctccgtaatactttcatccctcagagtagatccggtgctcattagaagtcatcctcactccccagtcctctctcccacagcctctgacaaaccctatttgaccttctacctctatggatttacctataatggatgtttcatgtaaatggaatcatataacataatggagtaatattgtatggatgtaccacattttgtttatccatttatccactgatagacatttggctttgtcttctggctattgtgaataccactgctatgagcattcatgtacaaccatttatttcactacctgttcgcaattcttttttctttttttttctttctttttttttttttttttttttgagatggagtcttgctttgtttcccaggctggagtgcagtgacacaatctcagctcactgcaacctctgcctcctggattcaagtgattctcctgcctcagcctccctagtagctgggattacaggtgcacgccaccatgcccagctaatttttgtatttttagtagagacagggtttcaccatgttggccaggctggtctcaaacttctgatgtcaggtgatccacctgcctcggcctcctaaagtgctgggattacaggcatgagccaccacacccagccaagagctgattattaaaaagagtttcgcacctcctccattccctcttgctccctcccttgccatgtgacaaggccagctgcccctccttctgccatgagtggaagcagcttgaggcctcaccagaagcagatgctggcaccatgcttcttgtacagtctacagaactgtgagccaaataaacctcttttctttataagttacccagcctcaggtattctcaggtatcttttatagcaacactaaatgaactaagacactttcatatctcttaacctctttttcatattttcagtttctttacttttttgtactgtattctgtataatattgttttctgtgtaatattttcagatccactgtctagttcataattcttttttttttttttaatttttttgggatagggtctcactctgtcacccagactggagtgcagtggtatgatctcggctcaccacaacctccgcctcccaggttcaagagattctcctgcttcagtcccccaagtagctgggattacaggtgtgcaccactactgcctagctaatttttgtatttttagtagagacaggttttccccatgttggccaggctggtctcaaacttccgacctcaaattatccacctgccttgacctcccaaaatgctgggattacgggcgtgagccactgtgcccagctctcacaatttttttacctgtgttcattctggtggctaatgcatccattggtataataattttaattattatatgtaaattttatttttagatgttttatttctttttttttttgtcttagttcatttttgctgctataacagaatacctgaaactgggtaatttataaagaacagaaatttattgtctcaccattctggaggctgggaagtcaaatagcaaggtgccagcatctggtgagggccttcttgctatgtcatcatatggcagaagacatcacgtggtggaaaagcaaagaaaaagtagaagaggccaggtgagggagctcacacctgtaatcccagctctttgggaggctgaggtgggtggatctcctgagatcaggagttcgagaccaacctggccaacatggcgaaaccttgtctctactaaaaatacaaaaattagcgaggcgtggtggcaggtgcctgtaatcccagctactcgggaggctgaggcaggagaattgcttgaacctgggaggtggaggttgcaatgagtcaggattgcaccactgcactccagcctggatgacagagtgagactctgtctgaaaagaaaagaaaagaaaagtaggagagagagcaagaggggttgaagccactcctgtgataatgagaacccattcctgcagtctgacaatagtccactcacaagggtggcaccctcatgatctaaacacctcttaaaggtcacatctcttagtactgttacagtggcaactaagtttctttctttctatttttttttttttttttttttgagacagcatctggctctgttgcccaggctggagtgcggtagtgtgatcttggctcactgcaacttcaaccttccaggctcaagcgatcctcccacttcggcctcccaagtagctggaactacaggcatgagccaccatgtccagctaatttttgtatttttttttttagagacaaggtcttactacgttgctcaggctggtctcaaactcctgggctcaagccatcctccttgccttgaccttgggatataggcgcaactcaccacacccagcccctaaatttttcaatgaccagaattaatcaattctatcctttcctccaaaaagataaaaaccttagtctgttctcacttcagtcctcattcttcttctccttgaattaagcatccttgaacttctccttgcaatcccagatcttagttctctattattattaattttttagttatacataaaaattacttaaacttctctgactcaaaaaaaaaaccttctccgtgatgtgattattatgcactgcatgcctatatcaaaatatttcatgtatcccataaatatatacacctactatgtacccgcaaaaattaaaaattaaaaaaaattttaaaattacttaaacttaactataagttataatggctgctttgcttataattgcccactggataccacattttcctattttttggatttgtttttttgagacacagtcttactctgtcgcccaggcatgagtgcagtggcgtgatctcagctcactacaatctccgcctccccggttcaagtgattctccttcctcagccttccaagtagctgggattacaggtatgtgccaccacgcctggctaatttttttatttttagtacagacgaggtttcctcatgttgaccgggctggtcttgaacacctgacctcaggtgatccacctgccttggcctcccaaagtgctgggattataggtgtgagtttctgtgtgcgacctaacttttttcttagaactttgattacagccgtgagccactgcacccagcgcctggattctcttagtcttattaggttgcaatctttgagcaattctttcagagagcaaatctgaatgtgacaaacttcctgaggttttgtatacccccaggtattttattttgacctttcatttgaatagtaatttggctgagtagagagtacaggacttgggttcaaaataacgtgtttttgtttgtttgttttttgttttgttttttgagatggagtttcgctcttgttgcccaggctggagtccaatggcgcgatctcggctcactgcaacctccgcctaccgggttcaagcaattcgactgcctcagcctcccaaatagctgggattgcaggtgtgtaccaccacgcccagctaatttttgtgtgtgttattagtagagacggggtttcaccatgttggccaggctggtcttgaactcctgacctcaggtgatccacccaccttggcctcccaaagtgctgggattataggtgtgagtttctgcgtgcgacctaacttttttcttagaactttgatgatattaatattattgcattttcttttagcattctgtgttgctggggcttgtataattcttactcctctgtaggtgactttttgctttttgtttttctctttggaagctttattcttcttatccttggtgttccgaaattttgggaaacgtgtctaggcgtagtcttattttcaagcaaatcatttggcgttcagagggccctttccacatgaagacttgtatttttcttcagatcggagaaattttcatgttatattttaattatttaatctatgccaccactctgtactcttctcagattccaaatgtctcttaacctttcttcacactttctatcccttggcatttttactaaacagcctgttcttggccgggtttggtgattcacgcctgtaatcccagcactttgggaggccgaggtgggcggatcacaaggtcaggagattgagaccatcctggctaacacggtgaaaccccgtctctactaaaaatacacaaaattgccaggcttggtggcacgcacctgggaggctgaggcaggaggagaatcgcttgaacccaggaggcagaggttgcagtgagctgagatcccgccgctgcactccagcctgggcgacagagcgagactcccgtctcaaaacaaacaaaccaaaacaaaacaaaacaaaatctgttctttttttttttccgagatggagtcttgctctgtcaccaagctggagtgcagtgacaccatcttggcttactgcaacctctgcctcctgggttcaagcgattctcctcctgcctcagcctcccgagtagctggaactacaggcgcccgccaccatgcccactaattttttttgtatttttagtagagacggagtttcactatgttggccaggatggtcttcatctcttgacctcataatctgcccggctcgggctcccaaagtgctcggattacaggcatgagctactgcagtgggccctgttcttattttttatttatttttagatggagtctctgttgcctgggctggagtacagtggcgcaatctcggctcaccacaacctccaccctccgggttcaagcgattctcctgcctcagcctcctgagtagctgggactacaggtgcacgccaccatgcctggctaatttttgtatttttagtagagacggggtttcactatgttggccaggctggtctcgaactcctgcccttgtgatctgcccgccttggcttcccaaaatgcagggattacaggtaggggccaccgtgcccagcctaacagcctgttcttatttcacgaatataatgttctgtctaatctccaaggattgttttaacatgtttgctttgtgaaatgtttgcatggggagttgcatgtttattgagttttgtacttttcttgatattaattttcctcaaatgcttcgcaatttaaattttgggctcatatttcaaaattcctattctcctgtctgttgaaccaggttctgatgacatgagtttgcctctgataaccacagcagaggaaacacagggcagtgtgaggaaggctgagtcctctcagtcaggagggcctttctagcccacctagaaatagtgcagatttcttgctacccagggtcttgctgtgcctcttgtcaccagtgctctggcctgtgtgcacatactcactgtgacacagtttagcatgagagaggtggggaagggggcgaaggcagctggctgatcctccaaaagcccccagataatcaccctgactcctgccccagggctccttcctgttccctatttccataaagggcagagctttctcagaactcacagccaccttcacagaagtcatctcctatagatttttttgtttgtttgttttttgagacggagtctcactctgtcccccaggctggagtgcagtggcaagatttcggctcactgaaacctccgcctcctgggttcagcaattttcctgcctcagcctcccgagtagctggaactacaggtgtgagccaccatgtctggctaatttttgtatttttaatagagatggggtttcaccatgttggctaggctggtctcaaactcctggcctcaagtgatccactcgcctcggccttcaaagtgctgggattacaggcgtgagccactgcacccggcccctcctgtagatcttttagcctttggtcttttctttggtcttatttctccatcacacaagacccatctgttttctatctttcatgaattcctgaaacagtctggtatgccaataaacacttttgtttttcagtaatgggtttattctgaatttcaggagattttcagatgtgtagcaggagggctatgggactctttgtggccctccatatccatgttacattacactcctggctatgacctgtcacatagttgttctgtgccactttgattaacagcacagtgtaccttgtcttggttggtcttcatgcttacaggaaaaagacctgccaacatcaggatttgtaaccagaaaaggcattgaaaacatatcctcaaaatcaggctatcaaattttagaaggaaacctttcagacctagaatcagttatggagaagtgagatgataaacagttccagaaactgtaaatggactgcttctaagccacaacttgtcttcgtacacactgatgtatacataatatggcaaagttttatgtgcaactgagggtgtggcatttatgattcagaaagaatgagttcgtgtagatggaaatgggcatttgggtggggattaggcaaggacagaattataatgcacgccgggtggatggtaacacctctttttgtctataccaaaactgttcagagaaaactgtatccataaaactgactttttgcgattactaaatacatagaatcatttaagtatccaatttgagaaaaaaaattacatgagtagaagtcatccacagatgagtagtccaggttttagaggaaaaaaactttaagtgaacatttcagttgggtaaattcagtttctcactgagaatcttctcaatctcatcttgccagatgacaaatgactgtctattattgttaaggtttgtggactcttacaaaaggaacagtcgaattgattcagcatcagctaagcatggaagaaaaaaaaatatgtaactgtgaaaacaaaaacaaaacagatttctggctgctgtcctcagaagcctcccgcacagacgatgttcctgacaggatcaacaaacgtcgcatttcactgtcccacagtgcagcttcgtccatcagccactgactggcatgggccaggagcagtgttggtctcggtgacagtgacttccttgccctgctctgaatgagtgtcctttctgtgaaagtaggtctcatggttctagggctgatcccagcgccatcccacaacatttcagtgtgcccgacagcgtgcctggcaagcagcgagctcctgacaattggaagctgctaatgctgttacagacatctgcaagcaagtcagatcagccagcttccatcacgtgagacaccttggaggacaaagccacattgtgtggaggaaaacacaccaccattcaggcccatcgtcatcctgctttctcctatactcagtctcccacagtgccaggtagttttctgcctgtactaagaagggtgaatggaaaggtgagatgtaaaaacaaacaaacaaacaagggctcgaaatgtctatgggaagataaaattgtagcagtgctttagaaaacaagaagcgcatgattaaatggactgttgttttctttagaatgcgggtattatcattggtattgaggtgacgcattaggactttgaggtgcctcccccaccctggcctctgcgctggcagtgagaacccagcccgtgctatcttcacagttctcagcccatggaagcacaggccacctgggctcctgcaaacaccagacgtgtaattagaggctcctgggctgggatgatgtggtgtgcagacaagtcttatcacgcgtctgagccgctgtgggtgcctggagttgcctctgcagcccggagcggatgagcggaggctcccgtgactcacccaactgcaggaactgtcaactggcttctgcccagccaagaacttttatcaatcactaagtagagacactgtgtacaaggacaccggttcatccaagaacatcaggacagccaggaattcaaaacacaaaacacagcttcctgcatgttgcaccccaggcggctctgaggctcagcccaaggaaggtttggggctcgggccagaaagacacgattcactctgacttacacaagaggggagtgtacaaaagtcatgcagtctcaggggaaggcactgggctaaaccctcatgactgtaaaatgaagaaataggcatgaagcatgactagggtgtttatttgacgaggacccagagttatgtccaaggaatgaaggcgttgcctttctacaacagagcaaaatgtcaagttaactgataacatgtacattcctcaggactggtccctcagtgagacagcgtttttagcggggaaaaaaagaacaaatataagtgttttcctggatgctgttttagggagcttgctacaggtttacttgcttgcggttcctggtaggtttcaggattcccagggtgagaggtgatgggccaaagagaggcacgctaaactgatagcctgagatcacagcttccttccttcctttccttcctcccttccttccttttctttttttttttttgagatggagtcttgttctgtggcccaggctagagtgcagtggcgcgatcttggttcactgcgaactccgcctcacgagttcaactgcctcagcctccgagtaggtgggattacaggcgcccaccactgcgcccggctgatttttgtatttttagtagagacggggtttcaccatcttggccaggctggtctcaagatccacccgcctcagcctcccaaagtgctgggattacaggcgtaagccaccgtgcctggccttctttttctttttcttttttttttgagacggagtcttgctctgctgcccaggctagaatgcagtagtgcgatctccgctcactgcaaacttcgcctcccaggttcaagccattctcctgcctcagcctcctgagtagctgggattacaggcatgcactaccatgctcggctaatttttgtatttttagtagacgggatttcaccatgttggtcaggctggtctcgaactcctaacctcaagtaatctgcccaccttggcttcccaaagtgcagggattacaggcatgagccaccatgcccagcccccacagctctctctctaagacaagtgcaaactagtacctggaaaggagtcctttctttccattcccgagccccctccccacaccaaaaccccacctgctgccatgtggcggggacgctgaggaacactgactatcacagagctgccttaatgtaaatgatttcctcaggtgcagaaaaacatacacaccaagtatggtttgccactctgaattctggacagataacatgacggcagaagtaagcttgtttaaacacgctctagtaatagcttcttagtggctgaggttaaagcatagtgaaatttgatacattcaggtgaaaagcaaacatgaaaatttgcatcctcccagcaatcaaattacattagacatggctaaatcatgatttcatgtagttaacaagcagtgaagggtgaggccaaccaagttcagacaaattgaaccttctacccaattctactctcctctcctcctttctccgaataaaacccaatactcctctttaacaagttgtatgattcacatgccgagaggaaaagggccaggttgtttgtcaattgatctagtctaaagaaaacaagtccttgactgtattttagtttgaacaaaacttattttcctaaggataagaatacctcgaaactctagtactaagttagaaattcacactatgcctcctggcttgtcacgcacttccaatttgaaaatatggaacctcaaggctgtagatatttgaggcccttaagagaaaaacaattcatgtttttttgtgtgtgtgttttttttttttttttgagacagagtctggctctgtcgcccaggctgtagtgcagtggtgtgatctcggctcagtgcaacctccacctcctgggttcaagcagttctccctcctcagcctcccgagtagctgggactacaggcacacgccaccatgcctggctaatttttgtatttttagtagagatgggggtttcactatgctggccaggctggtctcgaactcctgacctcgtgatctgcccgcctcagcctcccaaagtgctgggattacagacgtgagccaccgtgcccggccatgaattcttaaaagtgtaaaggactgtttttattagagcaaatgcaaattaaccttgcaggaaaccatggcagatcaaagttaacatgccttaattttatcttttcaatgacaatggccataatgcattatttacatgactctctctctctctctctctctctctctctctctctctctatatatatatatatatttttttttatttttttattttttgagacagagttttgctcttgttgcccaggctggagtgcaatggtgcgatctcagctcaccgcaacctccgcctcccaggctaagtgattctcctgcctcagcctcccaagtagctgggattaataggctcgtgccaccacacccagctaattttgtatttttagtagagatggggtttctccacattggccaggctggtctcaagctcccaacctcaggtgatccgcccgcctcggcctcccaaagtgctgggattacaggcgtgagccaccatgcccagcctgacaacatatttttagagttttattagctttttacaaaatgccagaaggccaaaattaatttctaaattaatttgaaaaagtagcacctaagttcattttgatagtaactacttccagataaaatcctacatgagtattgtgccaatgtcagtttcctgattttgataaattctatgtcatcactgggggaatctgggtaatgggcataggggatctattttgcaacttcttttgagtgtataattacatcaagatgaaaagttaaaaaaaaactatataagaaatacaaaactgtgctaggagctttacttatttttaagagaaaagctccagtatatcctaaaactattaattatgtgatgaaattaagaaccaaaatagagactagcttaaaatacatgttgattcttgaaccagtagatatatgaatatggcttttctctagtcaactgtgaattgctctggaagatgaaactctatggccttttattttattttttagggtccctaatagtgaagaagcatcctctttttttttgagacggagtttcactgttgttgtccaggctggagtgcagtggcttaatctcagctcactgcaaatctccgcctcccgggttttagtgattctcctgcctcagcctcccaagtggctgggattacaggcatgagccaccacgcccagctaatttttttgtatttagtagagatggggtttcaccatgttggtcaggctggtcttgaactcctgaccttaggtgatccacccgccctggcctaccaaagtgctgggattacaggcgtgagccaccgcacccagccaagaaacatcctcttaaagagagttcttacttttcacagcatagttaagacatctcttgagacctagagatggataagcaacaaacagtattaaacttccattagtgtgtttttggaatttattaaaaacaagaggatacacatcacatacttgactgttgcagcataagaactgacaaaattggctgggcgcagtggcccacgcctataatcccagcactctgggaggctgaggtgggtggatcacctaaggttaggagttcgagaccagcctggccaacatggtgaaaccccgtctgtactaaaaatacaaaaattagccgggcgtggtggcaggtgcctgtaatcccagttgatcggaaggctgaggcaggagaatcgctagaaccctggaggcagaggttgcagtgagcccagatggtgccactgcactccagcctgggtgacgaagactttgcctcaaaacaaaaaaacaaaaaactgacatttactattaacccaaattttgaattcacttgtaagagagcccccttatcctcggcttctgtttgctgccacgaaatggtatctactaaccagtcccttaggtgtgcatagcactacagtgcgctctggcatggcctcacatatactgacaaggaacttaaagctcagggaagtgaagtgaatccttcctatagaaagtgggaggtcagccaggcgtggtggctcacacctgtaatcccagcaccttgggaggccgaggcaggcggatcacctgagattgggagttcaagaccagcctgaccaacatggagaaaccctatctctactaaaaaaatgcaaaattagccaggcgtggtggcgcctgcctataatcccagctacttgagaggctgaggcagggagaatcgcttgaacccgggagacggaggttgcggtgagccaagattggtgctactgcactctagcctggagcctggggtgacaagagcaagaagactctgtgtctaaaaaaaaaaagggagaagtcaagacaggaacctgggttttaggccagtactttgttgtgtgacataaccatctttgagaactcaacagtgcataaagtggcagctaacacgcagctgatttcctattggcatcttacttagcaacagagaagagtgtcagaagtcccgggcttgacctatgccacgagaactctttagaattaacttgctttgtgtgctggttgaggaataagttgacaggcagaaggtgctaggggatgtgttccggtggtagtgtggcattggcatggcggctaggcacatttgcttagccaggaaaaatcagggaaaaggtatatgcttgcaaacacaagtaaaaatacaaaggtaagatggaaagcaaacagaactaatgaaacatattcttgaccatatgaccaagaaaaggtagtggaggggaggggagaggcaaaaagtctcagaagcagacaaagttctgcaagtgctgcattcagacatccagtcagcagggacttactgcacccctgggtcaggcagtgcgtcatgacagtgcacaggaagctgagtccctgcgcttggggagctgtccctctttggccagggtgccgcgcacacgggcctgcgtgatctggaacttaactgtttctactactcccaggtatcttttactgtttttctccatctccactggccaaggcagtcttgtctcagttcaggactacagtagcctctgtccattaagtcttcccgtttccttttgcttctctccgatctgtcctccacacaacagccactgtcctcttaaatcacatcaccttcctctcctgcttaggatctttcagtggcacccactacacttttccaggcccctcctcctcctgacagccactttctggaagctgctcagctgtttcctacttcagggtctcacacattgtctgcttcctccactggtaacatgcctacctgttcactcccctccctcagcttccattctaacccttcagagcttaacacctcacaggtcccattatcagtcctcattgctcccattgttcattacctttttatttagcacttaatataagatgtaatcataattaacattatctgctttaaattccataagggaaggggatgtgttttcgcaggatccagcatggggctgggatttaacaaatgtctgttgactgaacgtcccaagcctgcatcttcatctgtaaaatgccataaatgacacccagcctttagatgacaaaaacagttctcatgtatggggccctcactatgtaccagataatatagtttatatgcagttgtcacaaaataattcccacctctctgcccattttaccaatgagaaaactgagctacagggatttaaaataatctgcctcacacagaattagaaagggatgaagttgcaacttcaacccagataatttgagccctcactcttcactctggagagtggcaagacagtgcaggtgcccgatgaaggtcgtggagggctcccaccctctcccaggggacaaaggagcctgcagaggacagtgaagagaaccaggcacagggctaggtgacatgggactaagccccctcacaaagagcactccagcccctgcctccatccaaaggctgccaggagcccatttgtccactgtggacttgccatctccatgacaggccaaggcaggtgcagattccttgggtggccttaagcaagaagcaaagcctgccaaagggcccagagtaaccgggacctcgtcctaaaaatcagaatgagtcaaaccaagtctacacatcagaactggtttcttctgtcacgttctccttgatgtggactcccacccccaacgttgtttctgatagtaaccccagaatccagttctctttcagttgttaaaggtaaaaacaaacagctcatttccactgtatactttcataatatgtgaaaaagattgcacaaattatgtttcattctaaagaataagagtttcaagaatacattaaacttcaaagaatcttcgcttgtgcttaaaaataatgctgtcaaattgcttcatacactttataagactttaggcaagaaacattactaatggtatcataaataagtattataactttattaaaatgaaaagacaatattcaaaataatgcaacaaaatgaataaaatcctttgtccaatactgtacacataatgcagaaatcagtgcatttttcttaagcatgttttaaccttcatttagttcatactaaaatataataagctttaaatagctcaaataatattcagcagtttaaactgtaaacagcttgtttaactgttaagagaacattgcagtaatgtacctctgttagtgagcaccttctcttctgtgcttatctcttcaagataaatacatggaaggatgtgaaaatcggaacaccaactatgtgtctcactgcatctaagtgaagcagccacagctgtgagagttttcaaagcagaaagatgctgatgtgacctctggaattcagacatactgagctatgggtcagaagtgttttacttaaaaagcaaacaatccccaggaaatactgaataggaaccagcaacacaaggccagcttgtgttgtatgtttattaatacagtctaaaaaaaaaaagcaaaaccacaacacacatccccaaacaataactctcaatcacatagctaattgcttcattattttgtaaaactgacatcctaacactggcacctagaatacttttccatctgagtctaacgtaccccactgcctctaatacggcccgcactacgatgagctacttcagtgggtgggaccaagcaggaactgtaagggaaaattagtcactagttctattatcgttttatttttcaagatgtgtgacaggtacaggtgacaatatggttgccaagtaacctgctctccctccctcaacaagacgcaacatgaaacctggaagtatgaggccttggtatgatttttaacctaagcaggtacacccatggtaaagaatggataccctgccctccatggaaaagattgcctgcaaaaataaatggaacaaaatagaaaaggcctaaaagccagaaatcttcaaacttactaaacaaaaatattttttaatgattctgatctaaacaatactgtatcttcttccatttgctcaattttcagtctatcaggactcatttctccagcttgagtttattattctgaatatatattactctacgatagtaactaattggttaacctgcagctatggtctatggttataccacaagtttatatataggtatgtaatgtatgcatatataaaaagcttccccatcctcccctccccaccatcacatctttaaattatagacttgtaagacttttttccaacactaacaaagtcagggtttctcagcataacagcatctcacaactgctctaaaccttccacatgaagacagagagttcaactattttattttgcaatctaagggatttttctctgcacttcaatcaaactggaaaattgagaaccatttgctcctatgtaacctctgctgaaccatgaccccaaggtctaaggagaaaccacataggataaatgtttacgcttcacgtggccacccagatccatttttgtttttgagtctggcttttctgtggctgaagatataccgcagtcagcaggtaatggctggatttgggcgcctccatttgtttcttctgcttccctaaaaaatttttcatatttgtccaggtatggtggtcgttcaggtagtaggtaataatgtgttgaactaaccttcttcccattttcaataatgggcagaatgcaaggaaccttactggcagatccttcgctgttctgtctttgcagtgctttgctgctgacatacttgggatcaggggcaaagctctgtgtcgggggcatgaccccattgaggtaagacggaaggcttttgggactcggtgtgcgcgagttactcggtgacaaaggttctcttggcggtactttgggaggcctgtcttcatcactataggtgctcgaagtaacttctgctgaccatcttctataatctggctttactggtctaggaggtatgggaactctggggggaacctcaggtttgtcttcatcggagttaggagaagctctgtgtatacaacagttggatatccttatggctggcttgttaaaggagccagctggtcccgaatgagaccttcttaatcttcggtgggtctgaggtggaggaggatttggatctgggacacctccattttggtcagacacatagctgagatctgctgcagaaacagctggggtatcaaaatatgcatagttgatttgtccacacccacggaagcttcgcctgccaggaacatcatatttgaaatcagaaagtgtagagtcttctaaaaggaagtctgtatctgagctagttaggaattccacctcacagtctgtgtcatccagagagagggcttcagagattggcaacggtggaagaggcctagaaccccgttcacaaagaggggcacaggggaaaagggaaggggagttttttatgggtgtcagtggaggggtggaagcacaaaccccattcactgtgagtttcttaaaaccacatacaacttgatcctcttcatgtggtcccaagttttcacttgggggaataagaagagggggcaagctggacttttgagatggaccattttctgcaaagcagtggccattcatcggagcagatttggaagcatgccctggaatgaacgagagatattaataaaagatcaacaatcctctctccacctgtgtgagggagagagcaccccagctacctatgcttccacagctttcttcctgagtgaaacacttgactgctgtcaccccgagaacacccatgcaaccaccacaggtgtaattagagagcagaagattcttaacgcacatggtgtggttcaaagaacaaactatctcctctatctcccttggacatgtgcacagcgcacacccacacatcacaggcaagttttgtgacgtgtgtaaaattcgcggaagatgaatagcatataatttacatgaataccatactgtaccagccttgccatttaagacatgcgaccatactaggcacgtagggtaccaatgagataagacaaagtccttattgctggcacatcataatattgtgagtgaatggacttgcctgcaatgtgttcagttcacacacagctcttgacaaagatccaaggaacagaatattcacattaaaaatactattttttaagttttgaggaacatttatactattttcatctattactgtcaaacatgcattcgatactagtaagaaaggtgggaaatctcgcctaaggtttcatgaagtaaagtatgcatcagagctggaatgagaactaattcttgattttagaagatcccacgtccatgaacagtcctacttagcaatcagtgactcagaatgaaggcagtcgagtacaatagcttgagaaaaacacagttatcttctgaatctgttgccactaggggtcaggctgttgttggaaatagttcaggtttcctcatttaaaaaataatgctggaggacaagctaacccgaatccagactgttcttctcaaatgcttactgtgatcagattttcagaatacataccaagtggtattaggcgctcctgagcagaagagttcagactgtaggccatggttatcgggtcaatatttaaaaagttgctgaaaggagaggaagctactttggtcataagcgaagagcaatcacagcctctcccattttagtgtcacatatttatccagattacagcagcattacatcctctacttactttttaaactcactgcgactgctccagtaggtcttcctcatattccccatggctcggccattatgtagaaatccagtttttaatgggactctgatctcctgagcagcaactcctgctattgacattgtgccttattctgggacatctccaaacctgtgaggcccaggcactttaaaatcaaccagtagctttcattccctgggaggtagaagagatgagagaataaagaaaacaattcagaaatacctccattaggacagtctaaattacagcaaagctaacagaggatttgggggatgctgaatagaaaaaattagttgtagactttcacttaattctcacagctcgtgagggtacttatatgtaaacactaaaaatgattttttgtgtaaatgctaatccaaaagacatgaaatgttttagtgaaatgagaaataatctattgccagcaaaagcagacctcctactgcacagcctgagagttgcacaacaaatcacactcacttggcaatgcacacagaccctcccctgacttattaaaccagccttctaagttacggctgcactgggcatgaagcaccagtggatcctgcttatttttcccaagctaaaaaagtaatttcagaagccactgtattttatgctgtagaactaatactcactaaaacacaatgctgaaactaagcaagagtttctacagtattggcacctgactaccccagggtctagcatttatctggattttgtatttcagggttggccatggggagacaaattctccagttactacttgttcaaggaacaaacagtaatatatgaagatactaatttccattatcctgtaaaaatcaagttctgcaagattactggcttcagtaaaagcctgggacagcttcctccctcccttttaaagacaagttaaaggtacattctttacatcctcctttgtgaaacacccagtaactcatatcttgcttagctgcaaggcatggataacaaaataagtacatttttcttaaattagtagttcctcaacttcaggaccgccaatcccctttgtcagatgttacaggtctggagtccctatagcccccttttcactttccttttttattattcgttatgtgttagtcagcatcaatctctgctgtcttcagatagccaagtttatttataagtttaggtttttttccttaggcaccaggatattatttgtcaactattgtgtaacactgaccccttttgggggcacgtacatatacactctttaacacgatctcattctctcactaaatattagtaagggatcagtgcaaataatatctgcacagctgagtgctgggcactgtgcaaaggctgggcactgtgcaaatgtgacacatttgctgtgggggagaggtacacaggtttttttttttgtttttttttttgctcagcaacttcaaatctattatttacaaatctgtcacctcctactagactaagctcaggacagaggctgtgtctcaatcaccttttaacaatcagtacctggaacattagtaggtgctcagtaagtgaatgtttgctgaatgaatgattgtataataccatctaattatcataatcagtatcaactcaatatacacattgtgtaaggcacagggtttttttttttaaagctaaaaacttttaaaaaatactctgcaagtgtttattattattttcccattagaaaggaacacagtgataagtaatgttctacaggttcaagatttcagtaacaaagtagagaagggagatccaatgactggttctctgcattttacccttccacagtcagctgttctaccaggcagagattttatgatagggttaaaatattatttcagatagtcaagcattatttttctttaaatcaatctctcaaatatatgataaagaaaacattgtcatttaagaattctaattgagaggtcttttgaggattggtttttcagattacttcaatgaagcaaatgtgttatctaccatcaagctataaaaaatttagaaaccaatttaaaaatactgctagcctctccctctgtgtacttagcccagtggtttatcaagctttttctaagcattctacaagcactggcaagactatgaggaaagtatctgtggtaatataaaaatgaaaggcaagataggaagaatatggtatttaagtagtttgaaagcacacgtttgaagatcgctcatccagattacaggaaaatgctgcaggggattctgcaggcccaacccccacctgtctgcaagccaacaagtactactagtaattactgtgtgtcagcctcctaatgccatctaaatcttagctttcaacagaatgattgtgtaactatcgcctctgcagaaattgccttggaattctaaacttacatttcaatggtcacttaaaattatttatatgttctagaaaaagttattttttattcattgtttccatcacctacttgttagctttcttaagaaaaaaatttttttagtataaaaagaattgtgttcactaagccagctcacttctgaccacaatagtgtctttgtgtattcatagaaggtgacctgcctctaaatttcaatggggaattgtgaatgggccatgttatgaaactgtccgaacttcctacttgctagcatgggagacgaggggggcaatataactgccatgttctcttcttttggaaaataacttcaaactgtagactcaaaaagggcaatgtgctataggtttggaaggaagcttttaaaaaaaatgtttctcagattgtaaactgagggtatgaaaccacctgaaactttctctctctctaaaaaccttctagtattcagcacaaatggaagcggggggcggggggggggggggcgcggagtaaataaatccattttaccaacctcaagctaaaaagaaacaaactcttcccaagtgatgtttaatgccaatttttcacattttatctgtcttacaactcattagaggaaaacaattgcaaaaatgtacctatgtggggaaatcagtatctaaaaagtacaagatgggattatgttatggaatccaagaataggaaagcgaatgtgaatccagacagcatggtttagacggggacccaaataaccttcagcataacttctccaaacttcatcaactatttttagcttttttagtgggtctaaaatgcagttaaataccaaatttcagatgtgaaccaccttttcctgttaacttgattcttttctaaattcaacgaaaaaagaagccctaaaatcatttgcttcttgaggttatccttttattaatccacttgtatagcttcaactcatagacagctcctgaatcaatgactccagcctggctcaagcttcaactttgcatttcctattgtctggtgattatctttccacttggatggccctctggcatctcaaactctacaaaccaaactcctcctttcacttcatactccattccccactccccaaaccagttcagggtctaagaggatcacacttctcaaggcaccatttttaacctgaggccatgtacattcaattgccaagttccacagactacttttacatggtttctcaaatcttacccttccattgacaggcatcattcttcctggggtctggcaatatgcaacctattctacaacactagtaccaagtcaatattccttaacaacagctcaagctaagatttgctgctgctcaaaaaaccttcaaaggctcctaaataaaacctcctcagcctggcaatttagggcctccacaatataaacctaatctatattttcaagcgcgcttctattttccccaaatctctgttacaattcgattcatcctttaaggtcagctctaccctgccttctccatgaagccgctccctttcatgaaacactggagcagcggtgctctgttcttgtgttattttgtgctgggccccaattccccttccactcttcaaatcatctaggacagaactgatgtctgatttatgctttccccctgtagatcttggcatcattcatgtctattatttattaaatggatactgagaaaatatccatctcatttttaaaaagtaatgacatgaaagattcacatacactgtgagtcagtgaagagctcaggggagaagcagatttataaaggataaagttaatgcgtgctggagtgaggcgactgcccaataataatgtaacaaccttaggatatgtaacaggaaggaatttttatgaaattcatttccagaattcaaagaagacagtttgtagactgagtaaaaattataagcttcagtggttaacagtgtagctttctaaactggtttctgttacagtatatttacttgaagcaattgggggggtactttcttaaaacagtgttttgccttctcttaaaacactattccttctagactgtgtttttgctgctgaatttaaggtgactttcatttttctaaaaaagttacaccaaaagcacactgcaccttcttcattaaggtgaaatcatatgcctttagcttgaggacagtctctttgaaactgcttaaaaaaaaaaaaaaaagaaaaatgcaggctaccttaaggcagtaacctagatatgcttacctggccaccagatctcattaataaatctcagaagccatccatgggaggaggaggggcacatttttgtcatacaactcatccagttctgcccagtgcttccttatttaagagtgtgatgtaatttcctcctttcaatctggttctagaacctgatttctgtttattcagggtgataaatggtcttttcagttccatttaagaatcacctacattaagtacttccataaccaaggaagataataaggtaactacatttaaaggcaaaatttataaaaggaaactgatttaggaatatgacaaactccatgattttagatcctccccaaatataccaatctctgcatgtttattttttaaaatgtctaaaataatcacctgtgaggaaattaaaacaaacaaacaaacaaaaaaacaccaattttttttttttttttttgagacggagtcttactcttgtcacccaggctggagtgcaatggtgcacagcacaatctccacctcccaggttcaagcgattgtcctgcctcagcctcccgagtagctgggattacaggcatgcaccaactcgccaggctaatttttgtatttttagtagagatggggtttctccacattggtcaggctggtctcaaactcctgacctcaggtgatcctcctgcctcggcctcccaaagtgctgagattacaggcgtgagataccacgcccggcccagatttcattttaatagcctatgatttaggtaggggtaggaaaagaaagagggaggcaagttaagaaaacttccttagttgtactctctaccatggtaagcataagtagcctttaaattaaaaacatagattacttttaaaataatgccatgttttaatgtaattaaaatactcctgcatgaattcaagaaaagcttgatggcttcagtaaacattaaaatatagttcagtgtggcaaagatgaacatttgtgtctgtgtttgcagctccattcctcagaggctcttaaacatgtccagaacataatggaccatttgtaggtggtgaaatagaggcaacagagaaaataatttatcttcaaactgtcaaataaaaaataaatgacgtaatttattcaataattcagaatgctttctagctaagtattttaaaaaatggtaaactaacaaaaaacccattccctcaactaccataatccagtctttcaactcacttaagcctcccacacaattttagtgtgacagcagaaaagtaggatagcaggaatacattcttttgtcctttgtatttctcctacagagtagcacaatcagtaactatatatacacacagaggggagaaaaatattatttctttttgacatataacaatagattatttcttactataaaagtgaattctaatctaaagacaacgagcacaatggtctaatgatgggacgcaagtctttaaaacttcaaatttatttaacaagcatttaagttacccgatgggtaactctagattgttacaattaatataaaaccattaatgataactaacattcactggacatacaactgccaggcaagcatggttctaagtgctttatgtgtatgaactcatttaatcctctctacaatgccataaggtgggctactattattactctcacttacttgaggcacagagttaaagaacttgctcaaggtcaaaactggtgagcaatggggccaggacttcaactagacagcccggcctcagtgtccaggcccttcaccaacacaccacactgcctcttcctgtccctacggctttttaaactggcgaagtaggatccgactgactatactgctcaacttgtaagggtagcacagatccttttttatggatttactggtaatagtttttcttgggtaacctgtagcctatgaaagttcctgtttcacttcaactccctcaaattctcctattaaaagttattaattgtagatctggcctatgtatcctctaaaatgggtgggttaaggcatcaatttgacattctattaccacttcaaacaactattttgaagccctcagtctttaacgatccacggatgccccaccacaacagaactctttacaacatggttatttcatataacacaagtctgtttttactcgtaataagcggttactacatatacccaacgggcctccttttaacatgctttcacagcatggatcccaatgatggcattataatcacactgtattgtaaaatccggaatttaacaatagcataccttatatttgtaaagcactcaacaagttacaaagcaccttcttacacattatctcacttgatccccacaacatccctgtaagaagaggcagggattagaatctccattttgcagatgaggaaacaaagtgaggttaaatatcttgctataagcaaaagggcgatcatggctcttctgtactataatccagcattttccccacactttcactacctctccactctatagtatcttcattttaggcaacaacctcatttctccttgtaacattcttgtttataaatggagaaactgaagcaaaaggctgttaagttaaatgctcaagacctaagtgctagtcaatagcagaggcaggaacagaaactcaactcatagtgctcattcagctcaaaaattcttagagggcaaggattaattcttttcacaaatatttatcaagtgcttattctggattagacaccatgtgaggtgaaaaatagagatggctgctgcctgaagaagccttccatctaatgagggaggaagagaatagccaagcaagcaaacaattttagatggcgataccttccaaggaaacaagcagggtacagcagcaataggataaggaggcagaggagcatatatttacacaggtggtttgggaaggcctctctgagtaggtgacttttaaatggaaatctaaaggctgaaaaagaggcagccctgataagagtcagaagacaattctactgagcgaatagttgtttaaaaaacaatctgtaactagtccagtttcacatctggggtattgaataagagcttttggataatgtcttccaatccttaccttcctattgtttccaagttgaaaagggctccatttctgtagccaaagccccacatttttttgtttgtttattttttaaagacagagtctcactctgtcaccaggctgtagtgcagtcgtgtgatcttggcttactgcaacctctgcctcccaggctcaagcaatcctcccacctcagcctcctgagtagctgggactacagacgtgtgccaccatacccagctaatttttgtgtttttttgtagtgacagggtttcaccatgttgcccaggttggtctcatactcttgggctcaagccatctgcccgccttggcctcccaaagtgctgagattacaggcctgagccactgagcccggccaaaagccccacattttaaagacacattcattgagacctggaagagtggtcttttcgtaatattgcccaattttatggtgtgaggaattggactacagtatcaacaaagacttgaaatctgagaatcctccccaccaccttctgaaatctgaacccccctcagtaacttttccctatcttaaaactaattgttaaggtagtaacttacatttaggaccctcaaactcattcgcctcatctacctttacaaagcacgtgtttatgctgtgtgaacaatgccagaataccacaactggactgcgtttatgtagcgagttctttattagcttttgtatagccagacacccgcaaaggatgctaaatgtatccaaatggatccagatgatgaggtaccaattcaaatttatttagatcaagagcagagttgtttctctggcagagggagcctatgccattccaattcctggagttacccctgacacctcctttccttcctctgctcctttctaaagcaatctgatggtatgcagacaatcaggtcagtttcaagcatgttagattgtgcctgtaatttacgcaaattgctttgaaaagccaccattagtttcagcagaaaggaagtattatctagctcaacttttgagaagcagcagtcaagaggtattttcacacaaaaactcaagcataattaaatcttataaagagtgaccagtatatattgtgaactgcaagtaggaaaaccgatgattgaaacaacagttttacccgtcaaaaatatcaataattcaggcatttcataacagccataaaaaaattaaacagatttgctttccaacccttatcaatgactgctccaatcctgctgagccttaaaaggtaaaacatgctttcatgcaattatttatcaacatcaactatgtgcaaggctgcataagatagaagctatacaaggcagagtgcctacccttaaggagtttacaatctaatatatctgtcaggttataaatcgttagtctaagacctctatcacttattatcgagtgtcccctggaacacacaggtgaaaataaacttctgcttgaagcaaagggaatgacaaatagtttctgaagtccatgctaaatcctttgttatttttcttcaaacttgctaatatctggaaaagaacttgcttgataacatattggtaaccaattatagccagcatgttagcaagaaaccagcttcttttattttggtctttgcaaaatttgatcatttgctgatacctagcctgtctttggtctctgttcaaataaaatttcacttaaaactgtatattgtaattacagaaatataagaaaagaaatgcagttaaaaaaataggtacggtgaacttgggatgttcagtctcaacaaatgtgtgtacccactgcattcttacacatttataaaaggttgaacatttgttctggaagggaaaaaaagggcattttaacctcacctttcttcacccctgacagttgcctagaaaccagtcttgccctacctgtgttgcaggtgtacctcaagtcaccgacacatctcttttaaagctacagtctccattctgacttaagtttatgactaaccatctattcatatttttatcaggtaagagactggtttctttcaagcaatgatgaaatcctaataaagacttagcaagcactaatacagcaccattcacggttaaagagtcatctaatttgtacagggctatgatatacatataaatacacacacaaaattcccaataagcattcacgtcttgaacacataattttgcagtccgattccattcaaagccgtacttaagacactcagagcaaagaatcacgtttctaggagagaaggaagagttcagaacagcttagacgaatttttaaatactgatttcggcattaccatcgtcgctgtgagattaggcagagggagcggggctgaccgccagagaaccggtaccaaccaccgcaagcaatcgccgagcctcccaccccagctttcaagacaggatttacgggtacacggtgtgaacaagacaacgcaaccccctttttacaaataaaaaaaaaatcaaacaagcccccaggcccgaagacgctcatccccgccgggcaaccccgcgagcgcaggctgcgggacgaggaccttcatgctcgccgctcccgaacccccgtccgctcctgcggtcccggtgctgcggggacgtatcccgggcgctcgggtgcatggccccggccagccgaggggccgcgcgacgaccacagccggcgtggagaaggcggcgggcgccggcacttcgcggcgtccccaggcccgggctgcgccgccggggagggtcccgctctccacacctcaatggggagaagcccgcgagcgaccggccggcctctccctccatcccagagactccgcgtcgcggcgaccctccccgcgccctccacgcccccgccctcgcgtcggggagccgcctggatcccggcgcccggcgcggggccccctgagggaacggagcgctgcgtggccctccccaccccctcagcgcgccaggccccttaccccggaggagcggcggctgccccgcggcgccctcccgcgcatgtccgtcccggctggctcagcgccgcgggctcaggggcccggacatcgcgcaggcgcctcttgctggctcgcgctcccgctagcactctgcctcgcaccggaccgccgtcgccgcggctgccgccgccgcctctatatatagcataggccgccgggccgtgaggtcgccgcgtcccgccccgcctcctcccgcagccaatcagggcgcgcgccgcttaaaggggcgatgccgtggccgaggcgttgcgccgggcccaccgtggcgtatcgcggcgctgcagggagccggctttgtctcccggagaggcgtctccgggctgaccgcggccgcagctccgctcctctgcctgagccgtgcggcagccctgggagcctctcaacgccgagctttcctcagaagcccgcggcgacccgggcctcggccgctgttcctgcccgaactgagggcacatcgcgcttcgcgcgggatttcccataaattcaggctccgggcaagattgtgtgttttttcctctccgcgggccgccgctggccgtgtgggccgaagaagccctggagggggagaggggagccgctctcgactgggcttgcggcgtgggagggacagtgagggacacttagggactgtgtggggcagtgaaggatagtgtgggatgatgagggaccgtgtggaccggtgagcgactgtgtgggacagtgcgggacgatgagagacggtgtgggacggtgagggacagtgcgggacgatgagggacagtgagggactgtgtaggacagtgagggacagtgtgggacggtgagggactgtgggacagtgagggactttgggactgtgagggactcggacagtgaaggatggcaagggacagtgtgggacagtatgggacagtggacagtgaggcactgtgaggggcggtgagggacaatgaaggatgtcaagggacagtgtgggacagtggacggtgaggtactgtgaggggcggtgagggacagtgtgggactgtgagggatggcgagggacagagtaggacagcaagggaggatgaggggacagagtgggccggcgtggggcggtgaggctacgcggggggaacccagggctcctctgactgcgttggaatatggaggaaaggtcctgctcgaggttgagcccttcagggtcgctgtgggtttccaggaggagctccctcactactgacttagggggccctcggcttcccaggtttgtgtttactcaggcgacctgagctggccccgacgtcttttggctttggagaggccacggatgcccaaggacaaagccccagcgggcctgtgggaggaggtttctcggggcgccagtgatgcaacttaggcttatagtttaaccgtaaaataaataatacaaatgataacaaaccaagagtgactaaagtcagaaaaaaagcaaacagacggaaaccctctagttttaactagaacaaattccctggctggtcctctgttgggagagcccagagacctgtcgctgacctctagcctcctggagcccctgcttgcacttcagcaataatgcctgatagttagacactgatcactagctaattggggtagtttaacatatggaatgagattctggccttattatcaggttaactattaactctacaccccatgaaatgatttgcctttcccccactattatttacttacattctttttaatttaattcaaaggcctaattttgaattcaaggccttaagcacgaaaaggaaaaaaaaaagaaaaagaatctgaagtatctttgccctctctcacttgcaaaacaaacgaacgttttgcagagagaaatctggcttcctttctgatggctcttctggcttacaaggggctgttgggtcattttcatgcctatgccatttgtcaacaattcagttaacctatcttcttacagccattcatttagtattattttaggatgatggaaatgagtcacaactaattgcagagttccttaccaactaactaggttttttgatccaaagaaaatctgtcccgattttcctcccattttggcgtcatttatgtttgtggcttacccatatgctgttatcagtgtaaaaaaaagatgagtgtgagaacttgccagggtacatcttttcaaacctcacgggacaggatttactgaatgggcacctaaaggagctcaagtttcatctgaaaggagccctggctatactatttcaagtcactacaatacagttgtaatttgtgcttcggccttattggcgtgcttttacattcccctattcataaaacagtgataatcaccagagcaaccatcaaacacaccccttctttagagaaagaagatcaacaggatactcactctacagttgtgagctgtatgatgtgctaatgttttggtaaattatcaaaaatcataaaatcccatgagtaatatgtgattaatctgatttttctattttaaacaacttgcaaaataaacttgatttattcattttttggggaaaacctgtttagccactagtttgctgtgtttagcttgcagttatataatatggctttctcagctgtggaagaattacatgagaagacttacaccccacaaattttttatctaatagtctgttaatgatgtgttataataacattgatatgtcaataatattgtaggacatcttgggaagagtttaaaagcaaaacgctaagcatcttgaagtaatactagcatgttgtgtttattaagtgattattcattgacctttaatagattagaacactacaccagagattcggggaaatagtctctttttcctgaacccaatttgttttaaattatctccagaaaagcatgacatttaaagtaagacagtgttttttatatctctcacagtctgcttaattttgaggccattttccaaggaatttatattagttgatttttttaatagaactcaacatctaaaacgttagacttgcatcacattgacccaaattgtcacttttcacttgcccttctttcagtgtaagaagaagctgtctttggagtgagaacaagggtgaggttctggctcagaaaccttagaatcacagacactgttttcctgaaaacattgcttctttctctcatctcaaagaaatgccacaagtcgtgtgtaagtataacatgctggacaggtccttattaaatttatatttgtattttgatattattttaatcctgtagaagaacatatacattttggtgtttattcttcttgattatagaagtttttgtgtttctactttgtttataataaatattttaaagttaaacacattttgtatgtccctcttggtcctagagcctttgtttctgtctatacataatataaatgtatattatgcacttaaactattttatagataagtgtgcaataaaaaaatacaaccaagagaggaattacatttcctagagggtgtttgcttagtgtgctacattgcattttgggaacattcatatttctgttcatggatgtttccaaaacgcatgcatgtacacacacacacacacacacacacactcaacatataaaataaactctaggtgattcttttcatttttttgagacggagtctcactctgtccccaggttggagtgcagtggcgccatctcagctcactgcaacctccgcctcccgggttcaagcgattgtcctgcctcagcctccctagtagctgggactacaggtgggtgccaccacgcccggctaatttttgtatttttagtagagacggggtttcaccatgttggccaggatggtcttgatctcttgacctcatgatccgcccgcctcggcctcccaaagtgctgggattacaggcttgagccaccgcgcctggtgaactctggatgattctaaaacacacatgctgataagagcctagattcacccatgaggagtaccacaaccccaaagagatttccatggacttttcacttttcaaccttagtggccatttgaaaagtagcacagaaaatatatttcttggcaacatttcatttttcctttttctgtttttttgtcttttttgttttgttttgttttttatttgttttttgagacagagttttgctcttgttgcccaggctggagtgcaatggcgtgatttgggctcaccgcaacctccgcctcctagattcaagcgattctcctgcctcagcctcccgagtagctgggattataggcatgcaccaccacgtcggctaattttgtgcttttagtagagacggggtttctctgtgttggtcagactggtcttgaactcccggcctcaagtgatctccctgtcttggcttcccaaagtactgaaattataggcgtgagccaccatgcccagcccatttttccattagttaattaggggtactgctctcccttcctagtttttccccaaaaaggatacttcgcctgtggaagtctgagcaggttggttttaatttcccagtctattattttaagtgttagggccagggcttcactgctttttcttagtatgagttttagacaggctgttcgcgtagttgtttatttttaactgagctacctttcatttaccaaatgctctcttaacattaaatgctattggtggttattatgtttctaattctatcccatctttaaaatgtgtaactgttgtaaattttttagtcttgtggatacattaattaattaatttttatttatttgtttattttgagatggagtttcgctcttgttgcccaggctggagtgcaatggcgcaatctcagctcactgcaacctccacctcccaggttcaagcgattcacctgcctaagcatcccaagtagctgggattacaggcatccaccaccatgcccagctaatttttagtattttcagtagagacggggtttcaccatgttggccaggttggttttgaactcctgacctcaggtgatgcacctgcctcgccctcccaaagtactgggattacaggtgtgagccaccgcgcctggccaagtcttatggatacattaatttagatacataatctagatgtttacaagacaatttttcaaatttcttttagacgctagcctgactttattttcaaattatttaaacatttaagcattttctcctaagtaaatgctgtatttcctattagctggccagtagggtgtgctctagtcccttgccaaattaattaattaattaatttaaaatgttaatataaactcttcattgagagatttcagaaatatatttcacttcttattgacactggtcacatatgagatatgtttatatagatgcaggtatatgcagatgcagggtataaggaaagtaacactgctatattaaaaaaagaaaactttgagatgcttactccttggcttagttctaaaataatttggtattattttaccaagttgatgctttggagcaggtattttcttttattctcgataaagaagaacaagaaaagtggtgtaggaatgaaaggcatacgctctggactcagggtttcggtttgaacaccggctgttccacttcgggcaaatcacttaacctcttgaggccttgtaatatggggataagagtggttcctattggacagataattgagatagtacatgtaaaagagcttataatattgtctagcacaatcagggttcaataaatgttagattttttattattattatttgagaccaaggcttgctgtgttaccccagctggagtgcaatggcgtgatcttggctcactgcagcctccgcatcctgggttcaagtgattcttgtgcctcagcctcctgagtagctgggactacaggcgtgtgctaccatgcctggctaatttttgtatttttagtagagacaggttttcgccatgttggccaggctggtcttgaactcctggcctcaagtgatctgcccgccttggcctcctaaagtgttgggatgacaggcgtgagcaaccgcgcctggcctgtttttattattgttattctcgttgttgtggtcacatattctttgggagatttttgaacatctgtgattgcaagattgaaaaattcttgattgcttgatagtatacatgatttaattagtccagaaggctgtttccttaaatcccagggggcataaatgacttataagataaaatgtcttaattgactctgcagtattctacttaagagactataaaaccttaagacaaagaaagggctgtgtattagttgatagcaccagcaatccataggggagatatgctaagggcacagagaatcttcttagcattcctgaaggcaagctcacaagtaaccgtaagtctgtgagcagttacttctaagcccatagtcataaacatccatagacatgtttcctttaaaaaacacatttagcctatacataaatctatttaacataaagtccttgcagaaccttttgataggaacagctttacaattttctctggaatgtataaggacaacagatatactcaatgacttgatgcagtaatgttgtaaaagctgaatgaatgccaacacttcttgggatttctaactgctcattcatacatgtattcatttatccatcaataaatgtctattgaggctgggcagggtggctcacgcctgtaatcccaggactttgggaggccgaggcaggtggatcacctgaggtaaggagttcaagaccagcctgaccaacatggcgaaaccccatctctgctaaaaatacaaagttagctgggaatggtggtgggcgcctgtaatcccagctactcgggagactgaggcaggagaatcacttgaacccgggaggcggaggttgcagtgagctgagatcgcgccactgcactctaacctgggcaacaagagcaaaactccatctaaaaaaaaattacatatatatatatggctcctcctatgtgacagtcctatgctagtatccagcagcatgcaggagtttccatcactgtctttagtgagcttgcagtgcagtgggagctataggtaagaacacaggaagctgtgatgtcatgctgtgataggagcctgtggggtgctatgggggtacgtaggatagacaccaaccgcgagaattgaaaggtgattcagagtggacagggggacaacaaaggaagaaggatgttcttaggagggtaaagagcaaatgttcagaatgtgacatgtccgaggaagccaaattcactgtaaatgaaggtaaggaatgaggctggagaggttaactagaggccagattttacttgactgcggaagtgttaagaagtttggacttcctgctaaaagtagagtagtcattaacaaggttccggtggacagcgaaagttgacatttgcattttggagagattcttttgttgccagaggcattgtatgaccagaaagtttagaacttgggtctggggagtgctgggccatcttcttagttctgagttatcatttccggctagggcatcaattctcctaactcggggacacagacatttgcaccagtctttggcagtaattatgtttattttactttattttaaaaatttatttatttatttattgtagatggagtcttcctctgttgcccaggttggagtgcagtaggaccatcttggctcactgcaacctccatctcctgggttcaagcaattcttctgccttagcttcctgagtagctggaattacaggcacccgcgaccgtgcccaaccaatttttgtatttttagtaaagatggggtttcaccatgttggccggagtggtcttgaactcctgacctcaagtgatctgcccacctcggtctcccaaagtactgggattacaggtgtgaaccaccacacctggccccctggcaggaattatgaaacagacaggataaaaggaaggggatgtagagagaaatatgcacagatttttggagaggcattgcctttcagagaatgttaggtacaaaaagctgctttttaattttaaaacaagcttttacataattgaagttagaaagaacaaaacaacacagttaaactatcgaacaatttaaggagagtaaaacatttgtgtaccaaggtatgcaaatttgggtataatcattaaagaaacaaatttaccaggccagtagaggaacacaaactgggtaaaattattaaagtatcagtgtcaaggccgggcgctgtggctcaagcctgtaatcccaacattgtgggaggccagggcaggagggttgtttgagcccaggagttcaagaccagcctgggcaacatgttgaaaccctctgtctacaaagaatacaaaaatgagctgggcatggtggtgcgtgcctgtagtcccagctgctcaggaggctgaggtgggaggattgcttgagcccaggaggttgaggatgcaatgagctgagatcgctccattacattccagcctgggtgacagaataagactctgtctcaaaaaataaaataaaaaataaagtatcagtgttagttgagttttactgaactattcatatttgcattttgcttttttaaaaaaattattgagtaggaaaatgatttttagccatgtcacagaaccataaagctgtgaattaggtttaatttttattatttttattttttgagccagagtctcactctgtgcccaggctggagtgcagcagtgcaaacactccctgcagccttgatcctgggctctagcgatcctcccgcctcagcctccagagtagttggggccacaggtgtggcctacgtggtgtgccaccatgtcccactactgtttaaaaaaacttttttttttttttttttttgtagagatggcatcttgccatgtctcccaggctggtctcgaattcttgggctcaagggatacttccgccttgacctcccaaagtgctgggattacaggtgtgagccaccatgctcggctgaattaggttgtaaaattaatgtatgtagttcattttctgtacttctgttaattctccattcctacgactgtcacactaaactgttttctttaagaagctagtgggtcctcttctgctgtgttgattttagtgaggtcctggagcgagtttgccttccagcatctgaaagggagaaggcaccgcttcagctggagagaccactggggaagctgggtccccatagaacaaagtatgagtcaggagcaagcaggtgggggaagcgttcagtgaagaggtggtgaatgtaggaatttgttgcattcatggcacatggtaagtcctgtgtgcccagtagaaaaacttgtcttacctaagacaaaagtctttcgtaagaggaatctcaaagcactcactcatttattcaaccagtactgacaaactgcacctgcatgccaggcactgtcctaccactcactgagtgtgcattggtgaacaaaatgggtctaacccttgcctctgtgaaacttacagtctaatggggaagaaatatgatacataattagcagatatgtaagtgtgatggttaatagcatcaacttgattggattgaaggatacagagtatggatcctgggtgtgtctgtgagggtgttgccaaaggagattcacatttgagtcagtgggctgggaaaggcagacccaccgttaatctgggtgagcacaatcaaatcagctgccagcaaggcaagaatataaacaggcagaaacatgtgaaaagagagactggcctagcctcccagccttagtctttctcccgtgctggatgcttcctgccctcgaacatcggactccaagttcttcagttttggaacttggactggctctgcttgctcctcagcctgcagatggcctgttgtgggaccttgtgatgatgtgagttaatacttaataaactcccatatatatatatatatatgtatatatatatgtatatatatattccatgagttctgtccctctagagtaccgtaactaatacagtaagtcattctaaaagtagtgtgctctcagaaagtcctgaaacagagggcaatggggtggtggcgggagatgagtttttagactgagtggacagggaaggcaaccttgggggagatgacatgtcgagacctgaagtgtgagaaggagctgtccaggtgaaagcctggggaaagtacactttgggtacagaaacagcaggaataaaggccagaaaataggagagaacttggtgtgttggagaaacttggaggaggtcagtctgaaatcacgtaggaagctattgcctgtgtctaagtgagaactgatggcttgagggagagttgtggtacttggaatggagcagagcaaaaaggttccacgaacactgatcctaggtttacattttggatttaggccgggcgcagtggctcacgcctgtaattccagcactttcagaggctgaggcaggaggatcacttgaggtcaggagttcaagatcagcctggccaacatggtgaaaccccgtctctactaaaaatacaaaaattagctgggcgtggtggcgcccgcctgtagtcccagctcccagctacttgggaggctgaggtgggaagatcacttgagcctagaaggtcgaggctgcagtgagtggagatcatgccactacacttcaacctaggtggtggagtgagaacctgtctcaaaaaattaaaataaaataaataaattttggatctagaatggacaggacttaatggtaacttgcacatgagaaatgaaggaaaaataaaataaatgatgattccagctttctggcttaaataactgggtgaacgatggtgcagtagtttactgagtaggagatggagggagctgggcattggagtatgggagatggtaccccctgataaacaggggggcttataacttagctgaagacctaatggcaagagagatatgaagcacagtaagttttccaaaatgcttcatttcagcagtcctgtggaaaatgtgggtagagatgggcaacctggtttcatactactcaagaaagcttgtgcagagatccctgtggttagtaacctggattctagggatgaagggcagctcactcagaggctcagctctttggtcttcagccactgaggttaacagaaacagtggctggctggcagtcttattttgggaaatacaggttcctatccatgatctgtctcttggagtcaacaacattgcaaaagcaacagatatctaatggagacaccactagaactcaggactttgggtttaatactccttttataagaaaggatataaatttcaaatcatttatgaaggtcagatgaatattgattgatccttgaattaaatttgccaatgcatctggaaccataatttcttttgagttgtttctgacctcttcctcagtccatctaagactgtgggattaaagtaatcttctttccaaattatacttttaaaaataatgactgtaaatgcctgatatcttaaaggtgtcagatttttttttttttttttttttttttttttttttttttttttttttttttttgagatagagccttgctctgtcgcccaggctggagtgcagcggcaatttcagctgactgcaacctctgctgcctgggttcaagtgattctcatgcctcagcctcccgagtagctgggactacaagcgcccgctgccacaattggctaatgtttgtattttcagtagagacagggtttcaccatgttggccaggctggtctccaattcctgacttcaagtgatccacctgcttcagcctcccaaagtgctgggattacaggcttgagccaccgcgcccagccagattttttttttttcctagaacaggcgtgtgtgtgtaattaagacacatgaccattcctgtgttgttttctcttgtaaaataagtgtaattaagtcattaaccttagggagctgtgattcataaaaactgggaaaaaaatgtaacaaaatcttagttttcactgacttagaaatataataaaatcgacttcctattagtgcacaccatcctgaggcatcagaaggtaccccaggacatccatggtaaccattacattcattcaacaaacatttactgagtatcttactacatatatttctaatggtttctactttttcaaagtaaaatccagaaaaatttctagtcatttgaactttgcttctatttgaagttttctttaattctttatatgcatttgtcctgtctcattagagtatatgatcctagtgaagattatgatttcttttgtatctcttatagcacacagcaccactgttgactgtcttggccataagcttaaactataggatggaaaattcaggtggatacaaacagcctaattgatataaaaatggaaaagaagcctcatcagaccaaggctgtagattctacctccttaaaatttttcgagaatcaaataaactctttgaaccagtatttttaccagcactctaaggaaataggccaggcacagtggctcacgcctgtaatcccagcactttgggaggctgaggcaggtgaatcacttgaggtcaggagttcaaaaccaacctggccaacatggtgaaaccccatatctactaaaaatacaaaaattagctggacatgatggcttgtgcctgtaatccctactcaggaggccgaggcacaagaatcgcttgaacctgggaggtgtaggttgcagtgagcagagatcccgctgctgcactcagcctgggcgacagagtgagactccatctcaaaaacagcaaaaaactgaggaagtaatcacaatacagaaagctttatacccaaagaggttcaatatggtgttattcataagagtgaaaaactggcctggtagtaggacaactggccaagtaaaatacagactattcatatgctaatgagaattttataattaggagtaatatgattatgaacattttgtaattgagaataatgcctaataatagctaacacttttgtggcatttactaagaactagatactgttctaaggcttgacatatattaacttaactttcacaacaaccctacgaggtacatcctatcgttgtacccagtttacaaggtgaggttaggtcatgtgctcaaagtcacacagctaggaactagattccaacctaggcagttagtttccttttaaccaccacaaattctttcatgatcatgttcagtgaaaaaagtcaaacacagtacctggctgacaaaacaatctgtacaacaaatttctgtgacataagtttacctataacacaaacctgcacatgtaccccgaacctaaaataaaagtttttttaaaaagtagaatacaaaattgagtatggaatatctatcctcatgttatcagttaggacttttttttagtgacaggaaacccaactcaaattggataaataaaaaaaggaattcagtggatcagtactggagaagactaggatgtcgctgcacacattgctttgttcacatgttcagatgacatcatgcagggcaagactttctctaacttttggctttatccatgtttgtgttgacttcattttgaggttccttggtggcatgatggctgccagcaaaccctgggatcatctaattaaaaattttaaaaacaacttatttaatagtttgaacaaaaaccctgggcctgattctcacaaatcgaaactgaaggccaggggagtgcaatgttccaattggccaagcctgaatgtgggacctcatttggaaccatggggggagaatcaaatccatctgaggctcaagtgcagaggaggaccaagagtagaggaggactaagagtagaggaggtgatagcttcccagagtaagactgaagaatggactaggaaaaaaaggaaatggatattgtcagcatacatcaagtgtccacaacagccattttcttatgtacagcatttgactctgttcacttacaaatttcttaaagttttctgttctttgacctcggtaacactacacgtcacaccttttgatacctctcctcagtcctgctcggtcatttattcttctcttccttgtatgcttagatgttggcgtcttcgaggctttctttacttattccttagtttagtcatctcattctattcctgagcttttattatgatgtctatgtaaattacaccaaaatctaattgtagtcccattttctctcctggcctgtagtcccttttttttttttctcctggcctttaatcccatatttttaatttcttaccagtgcatctctcctggatatttgttgcagactggcttcttggcaagcagtctttgagatggagatgaacatggaggacatttattagagtgttgaaggaagggtgaggaaaaagaattgggcagagggagaagttaagttgtgatccatgtacgacataggccttagctaactacatgcaaagctctggaacaggattgaccctttggagttgtcctaacttgggcaagagagctggaccttttttcctctaactcttattggtcagtcattgatatggcttgcctttggaaggaagagtaagcttggaaaaggcagttttcttcagctgagtcactctccaaacagggttgacagctaagggccatgttctggcagcattcccaggagcttgaggaataaggcttttcataactcattggggatctgggtagctcatcatggaaacttccttttgttctctctgttgttagtttatccttcctcactccattttcctagtagttttgttgatgtttctactttgatattttgaggctatattattcagagcatacatgtttagaattgttaaatctgtctgataaatccaacattttgttaatttgtagtaagcctctatctctagtaataatttttgcattaaagtctattttgtttgatacttcttttctttactttctttctttctttttttgttttgtcttgttttgttttgggacaaagtctcactctgtggcttaggctggactgcagtggcatgatcttagctcactgtaacctatacctcctgggtttaagcgattcttgtgtctcagccatctgagtatctgggattacaggtgtgtgccaccatgcccagctaattttttgtatttttagtagagacagagttttgccatgttggccaggctggtctcaaactcctggtcttgagtgatctgcttgcctcagcctcccaaagtgatgggattataggcgtgagagaccacgcctggcctgtttgatatttctggagtcacaatggctttcttttggttagtactttggtgtatttttttctaaaattttctttttactctttgggtgtccttaagtttttggtctgttttataaacagcgcagagctggattaaaaaaatctttgtcttccattggtgagtgtagttcacttataattattatgattactgatatattttactgataatttcaatcatttataccatgctattttgaactgtctatttgtcttgattttaagggtttttctttctcatttcttgcatcttttctttactcgttgcatttttttctcatctcatgctcccaatttggaagttataccctctatttctcttttttggtggttacctagaaattgtgaaatgcttaacatagcaaagtctaaagctagtatctttactctcctgaaaaatacaagaaacacttaagaacatgttaattcacatcactgcctcctaattttcatgttcttccacctcccaattttcatgtttttgtccagaatttaaacttctgttttttttttttgtttgttttgtttttttttgagatggagtcttgctctgtcaccaggctggagtgcagtggcgagatcttggctcactgcaacctctgcctcctgggttcaagtgattctcctgcctcagcctccctagaagctgggactacaagtgtgcaccaccaccacgcccagctaatttttatatttttagtagagacggagtttcgttgtttctttccctttcttttttctcctgctataactttgattagataagtattagatctttttactctgtccttggtgtcttttaactcttttgtattttctatttctttctctttttgtgctacattttgtatagtttcttcaaatctattttccagtttgctattgctctcttcagctatatctgctacttaacatcaattggctttataatgtgagttattatatttgtcatttttagatgtatttttttcaaatgcacctaaaaataatcacatatcaaaaataatcaaatacatcttgattatttttgataattttttccttctctgatactttatttctttaattactgtaaacaaaattttttatttttatagattaaggggtacaagagcagctttcttacatggatatattgtgtaacagtgatgtctgggcttttagtgtacccatcacctgaagagtaaaatattgtaccaataggtaaatagtgaaaattatcattaggtaattttttatccctcacccacccctctcgtcttcttatctttggagtctccagtgtctattattcccctctgtatgtccatgtgtagcctttatagtaaaccttatattttatatttgttatctaataattccaacatctgaggtctttgtgggtttacttaggcagtttgtttattctgcttagttttactttcagtaaacgtcattctcagcagtgtttcctcatgcgttttgtgctttttgattcaaagcttatattctttgggactttatttgtgagaagtcaaggattggagttggtttatgctagacacctagagccacttttagccagatcacttcaataaactaaatttttggctagaagtgttttttgggccagcacacaggtatctctctctctctctctctctctctctctctctctctctctctctgttttttgagttcgagttttgctgttgttgcccaggcttgagtgcagtggcgtgatcttggctcactgcaacctccgcctcctgggttcaagcgattttcctgcctcagcctcctgagtagctggaattacaggtgctcaccaccatgcctgggcaattttttgtacttttaatagagacggggtttcaccgtgttggccaggctggtctcaaactcctgaccttaggtgatccacctgccttggcctcccaaagtgctggaattataggtgtgaaccactgcgcctggcccagatatctcattactgtgtaaggatgaacttttggtgaagaattctcagggaaacttttttctttctatcacagccaagacatgagtaagcaagtattccctctatccccttcttcagggcaaacattttctagggtcccaactttatgcagcctttcttttggcatcccactcgattaggtcccaggctttgtctcccaaatcccacaaactcaacctactaaaactcaaggctaagcatcagcaaactttttctgtcaggggccagatgtaaacgttgtaggctttgtgggccatatggtttctctcacaactactcatctctgtggttgtaatatgaaagcagccatagacaatacataaattaataggagtggttgtgttccaataaaactttatttacaacaatgtgtgacaagctggatgtggcccacagtttgctgactcctgctctaggccatcgggaattggcagatgccctcagggaagatgccaacttcatcattttcttgcccagttggtgtcatgctttctctctctgtcatgcctctgaggatttcacttactattttgtcagttcagtcatacctttataaagatttaaaaaatattttgcttgcagtgttgaagtattccataccaggagggtttctatggatatcaccaggcaggagtgcagtggcaggatcttggcttactgcaaactccgcctcctgggttcaagcgattctcctgcctcagcctcctgagtagctgggattacaggtgtgtgccaccatgcccagctaatttttgtatttttagtagagacagggtttcaccatgttgaccaggatggtctcgatcacttgacctcgtgatccacccacctcggcctcccaaagtgctgggattacaggcatgagccactatgcccggccggagttaccagtttttgagaggaagaccacaaaggtaaaattccattttcatgacatcgtatcatggataaatgcagtaacatgatttatcaccattgatgttgaccttgatcaccttgctgagaaatacgtagccttctaaggcctacataaacataatcagtgatgttcaggtcaactattctgaacaaaatttgaagggttgagtcattgaatcaccatgaaatctacaacagaaaactgtcatattcattgcaattcatgaacccaaatacatatattgatgggacttctttaagcataagtttaatttggtatagtgtgagagccggacgtggtggtgtacacctgtagtcccagctacttgtgaggttgatgtgggaagattgcttgagctcgggaatccaaggctgtagcacaccatgatggaggctgtgaatagccactgcactcctgccagggcaacataatgagacacccatctctaaaaaacgatacaagtatgcagtgtgtttttggtgatgctgtgaactagaaattaatgttagaacagagtcttttccttttttatctttctgttgcccaagctggagtgcaatggcgcgatctcagctcactgcaacctctgcctcccaggtacaagcgattctcctgtctcagccgtccaagtagctcagatcgcaggcatgcgccaccacacctggctattttttttttgtatttagtagaggcagggtttcaccatattagtcaggctggtcgtaaactcctgacctcaggtgatccacctgcctcagcctcccaaagtgctgggattacaggcgtgagccactgcacccagcctagaacagagtcttaagatctgttctttaatgcaggctgaggcaggcggatcatgaggtcaggagatcaagaccatcctggctaacactatgaaaccccgtctctactaaaaatacaaaaaattagccaggtgtggtggcgggcgcctgtagtcccagctactcgggaggctgaggcaggagaatggcgtgaatccgggaggcggagcttgcagtgagctgagatcgcgccactgtactccagcctgggcgacagagcgggactccatctcaggaaaaaaaaaaaaatctgttctttaaaagttttggcatattattctgactgcaaaaatttttgcatgtatgcatgcggaggtgagaacatctatatgtatccatatgtcagatatagtccttgattttctagaattgttttgcaaaggaacacatcttctctagaaatgatttagctgtccgatgacactgattcttgtttccattcactgaataagccttttgaatgtttgaacggttaaattttccgcaacctatttaatcttttccagcagccaataaaaaagtttagtaaaatgaggccaggcgcagtggctcacgcctgtaatctcagcactttgggaggccgaggcaggcggatcacctgaggtcgggagttcaagaccagcctgaccaagatggagaaactccgtctctactaaaaacagaaaattagctgggagtagtggcacatgcctataatcccagctacttgggaggctgaggcaggagaatcgctagaacccgggaggcggaggttgcggtgagctgagatcgcgccattgcactccagcctgggcaataagagcgaaactctgtctcaaaaaaaaaaaaaaaaagaaagtttagtaaagtgaatctgaatgatttatttgtacagaaagaatgaatttcctcttagtcatacatccgacacccacacgataccttgtcattttcagaagaaatctgatgcccaattagtgtgttttaatttagccagtgattttccatctggctctaatgtgtattctggagggtggactaatatggagttcaatggtttgttaggttttgagatggagttattggctacaaagaacatttcacagaagcaggacttcatagattctgagtttttccccttgttttggttagttgcaggatgaatggggacagaagaagcagatgctacttattttgcgattacatgccttaatataaatagtttaaaatgaggaaaaacctttacaaaaatagatgacagagcaaactgttttcttgtctagcgaaatttctggcaaataggtaaatgctttgttattctaggatataagtcacagattttagataagcatattttgcacaaataacaagttctctttttaaaagttttaggccgggcgtggtggcgcatgcctgtaatgccagcactttgggcggccgaggtgggcggatcacttgaggccaggagttgagactatcctggccaacatggtgaaaccccgtttctactaaaaatacaaaaattagcagtatggtggcgcactcacgtagtcccagctactcgggaggctgagcaaaagaattgcttgaacccaggagatgaaggttgcagtgagccgagatcgcgccattgcactgcagcctgggtgacacagagactgtctcaaacaagaaacaaaaaacaaaaaacaaacaaaaaaaagttttgtcatttttgcagatacatacacagagagagagagaaagagatcgatcttgtcaacttttaagacttccctgtgttgagtacattcatatactaatattgaaattaatgattaaattcaacccacagaaaaatctaagactaaataagcctattataaaattgaagttttcagtaagggtgttgattcctattataaaaatagaggagattccagaagtaagggctcctggacaaaatattctgttttccattttgtggaatggattgtttcagtccatttccaacaggttcgcattctgttttcatgttaggttttctgaccttcagtggttttgttttcatgtacttgagcatatggtcccagacagctgacattgttcatgtcctttacttccctaagaattacacaaccttcccaggctttctcatctccagcagttttgtcacattgctgagtaacgtccacccttggtaatctcttaacattatttccattctgtatgtagacaacaaattagcatttatgacctaggttttctgtttttcatgaaggtatcagacaatctcaaatgtctgtggaatgttacgcttgactaggaaggtgtaaattgtttcttttgatagttcttaatttcaaatgattatgaattcattatttttaatgagagaaaggtgattgtatacctgcaaaacttttaaacatcgacctttggtaaaacacaattccaattgtgtttaatcatgactacttagatacaactgaacaagccccaggcacagaagttacgactaaaacattcagcccttccaggaacagaaccagaaatttctccatatgtctgtagacgctgaacttcaggatgtctgtgaatattttctgtgttccactgtcccctcaagtttgtttcccagccatggaaaatgcccatgagaaagagttgtgcaattgctaactgttagtcactttatatttcctgtatcccctatttaatttccctggtagctggcaataacatctaggatttaagttgctgaagggtatttgggaaaacccacataaatgtctaagatgaggtttggcaagcaatgaatcttggtgacataacaatattataactagagatttcatcagacagaggagacaggaaatccctgacactgccaaacacccacttaaactcatttgagtccgaggaccatcgtttgttaaaaatggattttacacagtttttaatttgatgaggctgctgaaataaaaatttggacctgaattttagatgcaatgagatttctcaaagggactttgggaaaaaagaaaagaaagaaaagaaaaaaagaacttatgtaaagttcccgtaaggagagcaacagctgctatggaatagccaagccctgctccaccaggaaggggcctgagctttggcaaggatacacttagcctgaccaatccagagactcagcctccactaccagtgggatgacggatttcccagtcgtacttttctcacacccaagaacctaatggacataattttaagtttaaggcagcattatctatgggcacaaaaataattagaaaggataaataagatctagtacttgatagcacaacagggtgactacagtcaataataatttaattctacagtttaaaataactaaagaccccctcccatgccattaccttcagacttctcaacccctccctgcaaaaaagaaaaaataataactaaaagagtataattggattgtttgtaacacaaaggataaacgcttgaggtgatgaatacctcatttaccctgatgtgattattacacactgtaggcctgtaccaaaatttttcatgtaccccataaatatatatacctactatgtacccacaaaaattaaaaattaaaaaaatacagcagtatctaaatggaggtattatagttatcttttccactgtgaattcactggtctgaattttatcccagcctagatattgtttaatagtttgtaagttttaactgcttcaaggtaatttttgttcatgttttgttttcactgtagtcttgctcaacacatatgatcagattctgttctagaatttgttaactttttattagaggggcatgtacacttgaaatctattgtcctattctttacttttctcaagctatgcctgccaattcttttttgtttgtttgattttttttgtttgtttgtttttattatactttaagttctagggtacatgtgcacaatgtgcaggtttgttacctatgtatacgtgtgccatgttggtgtgctgcacccattaactcgtcatttacattaggtatatctcctaatgctatccctccccccttcccccaccccatgacaggccccggtgtgtgatgttccccaccctgtgtccaagtgttctcattgttcagttcccacctatgagtgggaacatgcggcgtttggttttctgtccttgtgatagtttgctcagaatgatgttttccagcttcatccatgtccctacaaaggacatgaactcatccttttttatggctgcatagtattccatggtgtatatgtgccacattttcttaattgagtctatcattgatggacatttgggttggttccaagtctttgctattgtgaatagtgccacaataaacatacgtgtgcatgtatctttatagcagcatgatttataatcctttgagtatatacccagtaatgggatggctgggtcaaatggtatttccagttctagatccttgaggtatcgccacactgtcttccacagtggttgaactagtttacagtcccaccaacagtgtaaaagtgttcctatttctccacatcctctccggcacctagtttcctgactttttaatgatcgccattctaactggtgtgagatggtatctcattgtggttttgatttgcatttctctgatgtatgcctgccaattctgttgtacttattgtatcatcctggctagctactttctttgtcaaattctttgatatttaattctatcactttgataagtattgaggtcatccattaccatgatatatgtctatttattccatttccactatttcagagatttttattatatgaattggatcatgaattgagtgttacatttgtatgatttaatattttaccattatttggcaattttatctgctgatgctccttgctatgggctttgatttaatctcataccacagcgatcagttctgctcctcctcagtttgcacgataccttagcctgaagaccatcatcttacttcaaaggttggcatctgtttgtgttttcataactcctgtagacagcagatgactgggttttgctgtatagtgaggtctagtgtatttgttcatagtgttatatgtaacttatctccacatttacatctttagccccactccctggactccaggtcttggatgtctaataggtatctgtattagagatttctctttttttttttctttttttttgagatggaatcttgctcagtcagccaagctggagtgcagtggcacgatttcgactcactgcaacctctgcctcctgggttcaagcgattctactgcctcagcctcccaggcagctgggattacaggcatgcccccaccatgcacagctaatttttgtatttttagtagagatggggtttcgccatgttggctgggcgggtcttgaactcctgacctcaggtggtcctcccacctcggcctcccaaattgctggggttataggcgtgagccaccttgccctgcctagacatttcttgtattgatttcttagggctgctttaagaatgtaccacaggccaggcgtggtggctcacatgtgtaatcctagcactttgggaggccgaggtgggcggatcacaaagtcaggagttcgagactggcctgggcaatatggtgaaaccccgtctccattaaaaatacaaaaattagcgggcgtggtggcacgtgcttgtagttccagctactcaggaggctgaggcagaggaattgcttgaacctgggaggcagaggttgcagtgagtcaagactgcgccactgcactccagcctggacaacagagtgagactccattgcaaacaaacaaacaaacaaacaaacaaaccataaaaagaatgtaccacaaattgggtggctttaaacaacagaaatttattctttcacagctttggaggcccgaagtccaagatcaaggtgtcaccagggccatgctgcactctgggtggaatccttcctggcctcttctggcttctggctgtggctggcaatcttggcattccttcacttgcagctgcacgcctcccccgctgtgcctccatcttcccatggtgccagtcatagtggatgaagggcccatcctactccagaatgagttcatctttaaaaaattgcatctgtaagaccctatttccaaataaggttacgttgcgcaggcctgagggttagggcttcagtatattgttttgagggacgcaattcaacctctaacagcatctgaaacttcgcatgtcaaaagagaattttcaatttctaccctgtacacctgcttctccttcagtgtttcccatttcagtaaatggcagcaccatccacatgatttctcaggccagatgccatccaggagtcaactttgacttctctttttgtgctcacacccgaaatccaatccatcagggagtcccatcagcccaccttcaaaatgtctttccagcctcactgcttttcactactccatggcactgaccaaagccactgtccccacttgcttggaatacttagtaacctcctgtatagtttccttgcttccacactggccaagaatttgctctcggttgtccacagagcagccagagagaatctttcaagaacatgccattcccctgctaaaaccctcccgtagcttcccagaaccatcagaacacaaactacactgccagtcttgggctcagggtgctgcattgtttcaccctcacctcactgcactttcccctcattttgctgttgtgttcctgactttctgtgtgtgggggatttcaaaaaatttattttaatttaactttttttgagacggagtctcactctgtcgcccagtctggagtgcggtggtgctatcttggcttactgcaacctccacctcccaagttcaagcaattctcctgcctcagcctcctgagtagctgggattacaggcacccgccaccacgccaccatgcccagctaatttttgtatttttagtaaagacaggttttcaccatgttgcccaggctggtctcgaactcctgacctcaggtgatccacctgccttggcctcccaaagtgccgggattacaggcatgagccaccgcgccggcctttatttcattttattattttttttttgacacagggtcttgctctgtcgcccaagctggagtgcagccgtacgatcacggctcgctgcagcctcaacctcccaggctcaatcaattcttcagcctcagtctctgaagtagctgggaccataggcgcatgccaccacgcttggctaatttttgaatttttttttttttttgagatggagtctcgctctgtcgcccaggctggagtgcagtggcacgatcttggctcattgcaacctctgccttccaggttcaagcaattctcctgtctcagcctctggtgtagctgggactacaggcactggccaccaggcccggctaatttttgtatttttaatagagatgtggtttcaccatattggtcaggctggtctcaaactcctgacctcaggtgatccacccacctcagcctcccaaagtgctgggatttcaggcgtgagccaccgcacccggccaattttttatttttttgtacagacgaggtctcactatgttgcccaggctgatcttgaactcctgagctcaagcaatcctcctgcctcagcctcccaaagtgctgggattacaggcatgagccacggcacccagcccaaaaaagtgctttaagtagtttcatggaggcataatttacataccataagatccacttgttttaaatccacaattcaaagatttttaaataaacttgtaaagttgtgcaaatatcatcacaatccagttggagaacatatcaccccaaaagatcccccatatctgcatacataatgaatttttttaagtttcattgaggtatcttcttgtggtttttataaaagatattttctggctgggcactgtaattctagcactttgggaggccgagatgggtagatcacctgaggtcaggagttcgagaccagcctggccaacatggtgaaatcccgtctctaccaaaaccacaaaaaattagccaggcgtggtgtcatgcacctgtagtcccagctactcgggaggctgaggcaggagaattgcttgaacccagaaggcagaggttgcagcgagctgagattgcaccactgcactccagcctgggtaacagaacagagtgggactccgtctcaaaaaaaaaaaaaaaaaaaaaaaaaaggtattttctgccttgggaccttatttgctggtctctttgcctccagcttctcatggcttactttggcccttcagtaatctgctcaaaacttccttcttcaaagaagcctcttctgaccaccctgtctaaaatggaaactctcatctgcttacacttcatcctgatcttatgtctgtttgtgtggtgttgctttccccagaaaggaccatgagagcaggaactttgtcttgcatctgatcattacatccccagggcctagaacggtgcctggggtacagaggtgcccaataaatatgtgtttagtcaatgcaagaatgaagataattggagcatcgtcaatttccttatcactttattgccagtctttgcttcttttaattcacaatgtttctttgagtgaatgtcttagggctgctttaagaatgtaaattgggtggttattttgacttttatgtctgcttttcaatatttctacttttaatttatttcacttacctaaacctcgatcttccttccaggaaagataaatttggttcattctaatcctctttctcctccaaattgtggtttagtagtctaaccttctttttgaaattctacacgttttatagtttttacactctgtttactgattgataacttgctattactggttttgctttttattgagttaatctacttatctgtctgctttcacatactttaagctgcctattttattctgattgtgatcaaagctgtcactagtgtttattgatttttttctgttctttctctctatttttacatttctacaacatgaaatttgtactcactagtctttcttttttttttttcttggcagagtctcactctgttgctcaggctggagtgcagtgacgtgatctcagcttcttgtgctcaagtgatcctcccaccttagcctccaaagtagctgtgaccactggcgtgccaccatacccacctaatttttgtatttttggtagagatgacattttgcattttgccatgttgcccaggctggtctcaaactcctgagctctagcaattcacctgcctcagcctcccaaaatgctggaactacaggtgtgagccatcgtgcctggcttgtagtcactaatctttacggattatttcacctttctagttctgaaaatcgtctccattcacctttcagaaatgtgagcttggtacactgtacctgtgggactagtaacctttctcttagctctgaggtcaaatcacttttatttggatatgttttctgggttttctttctaagtttttgtttgaaaacttaagaaatggatgtatgaatgtttagagccttggtttctgttgttttcttttgttcttgtttttaagagtgttcctgagaaaattcctatgcagcctaataatgatactaggatttcattgagaaaattttaattttaattttagaaaagttactttttccggtcggatgcagtggcttatgcctgtaatcccagcactttgggaggccgaggccggtggatcacttgagatcaggaattccagaccagcctggccaacatggcgaaatcccttctctactaaaaatacaaaaatcagctgggtgtagtggtgggtgcctgtagtcccagctactcaggaggctgaggcaggagaatcgcttgaacccaggaggtggaggttgcaatcagccaagatcaccccattgcattccagcctagtttccacattgctgatctttcctgattaccctggtacctttgtttagcacaaatgggtttcttggattcattctctaagtcttgaatatctcttgccttgttataatctatttgtttaatttacaggagagggatttgctgtatgataagcacagttaatcctttgctcttggcatctattttgccattttcagcttttgttggggtacaattaaaaattatttacaggtttagcagagtgttttttcttttcttttttcttttcttttctttttttttttttttttttgagatggagtctcgctctgttgcccaggctggagtgcagtggcatgatcttggctcactgcaacctgtgcctcccagactgaagagattctcatgcttcaccctccggagtagctgggactataggctcccgctaccacacctggctaatttttatatttttagtagagatggggtttcaccatgttgccaggctggtctcgaactccggacctcaagtgatcctgcctcggcctcccaaagtgctgggattacaggtgtgagccaccgtgcccgacctctttttcttttcttcctgttttttttttttttttttttttgagacagggtctccctgtcacccaggctggagtgcagtggtgtcatcatgggtcactgcagccttgacctcctgagctcaggcaatcctcccacctcagcctccctagtagctgggactacaggcatgcaccaccatgcccagctaattaaaaaaaaatttttttagagacaaggtctcactgtgttttccaggctggtctcgaactcctgggctcaagtgatctacccccctcaacctcccaaagtgctgggattataggcgtgcaccaccacacctggcctggtgtttttttttctatattgaaaggcattgcttttgaagttatctattttctttcatatcctcaagtaatctgacataacccatttgtgatgactcatgaacccagagaagatgtggcaattttactgttctatgtatcttctgttctttctggcttgctcttacacttgtaatgcatttatgcattccacaaatacgtattaaaagcctattccattccaggtgcttttctgggtactcagctccatcaatgagcaaatgaagttcctgctcttagggcacttacattctagagacggataatgtatctgtttatatacaagacagtaagtagacaaatgattaagggaaaaaggtgcagtaaagttagaagacagagtggggctaaatggcctattttattttatttttttgagatggagtctcactctctcacccagactggagtgcagtggcacgatctcggctcactgcagcatttgcatcccgggttccagttattctcctgcctcagcctcccaggtagctgggattacaggcacgcaccaccatgcctggctaatttttgtatttttagtagagatggagtttcaccatgttggctaggctggtcttgaactcctggacctcaggtgatccttctgccttggcctcccaacagtgctgggattacaggcatgaggcgctgtgcctggcctgtaaaggggctattttagagggatggtcactgatatggggctattgagcagagatctgaatgagggtgaacaatgagaagacacaggggaagagtgtttgaggccatgcaaagggcctgaggcaagagagtgcttcacttgttcaagtggagcaaggctggccttagagtgagggccagtgctaggagatgcattcagaaaggtggaccctgtcgagccactgtccccttgattgtgatttgccagccacctggccttgtcacattcctggaacacacctgtccttgctgtcttgtgccttttctctttctgttctctagagtgccagtgttctttccgtggctgttctcatgggtgccttctcattgtgctttttacagcagtatatttgtttacatctttttttttttggaaggaaaatctgtattattttaattatttttatatactgaaaactcaacagtgtacatttaatccagcttggtggcaagttctttagcctttgcctttttgagattggtaatgcgggccatagacttggaagccaggacattgcctccccagtgacagcagatctcgtcgtgtctgtctttgtaattggtcctgatagcttccaccagcttagccaaagctcctttgtcttccgagttaacccatgcgaaggcaacagtggtgcaggtcttcctgtagactagacgtcccagtcttgccttccccttgatagtgcagtaagggacccccattttacgacacagggcaggcaggaagacaacagctcgatgggatccatgtcgtgtgcagtgatcaccagctgagactttttgttctccaccaaggtggtgacgttgttaactcctgcttgaaggacattgaaggactggtggtctcttagtggggacatcccctttgctggcagctgtcttctcagcccagagccaacagcctctgcttcttctcttgctttgtctctggtctgtacttgtgggccagcttaagcagctgagtagctgtatggcggtccagggcttgggtgaacaggttcatcacaggaggcactttcagcctcttatagaggatggctctctgccactgcagcctgatacagtggggccatttcacaaagccggtgaggtcccttttgggctggatgtcctgtcccatgccaaaattcttaggctgtttcttttctttctctttccttccttccttccttccttccttccttccttccttccttccttccttccttccttctttctctttctttctctctttctctttctctctttctttctttctttttttgagacagatttttgctcttgttgcccaggctggagtgcaatggcgcaatctcggttcacggcaacctccgcctcccgggttcaagtgattctcctgcctcagcctcccaagtagctgggattatgggcacgtgccaccacgcccagctaattttgtatttttagtagagatggggggtttctccatgttggtcagattggtctcgaactcccgacctcagctaatccgcccacctcagtctcctaaagtgctgggattacaggcgtgagctaccgtgcctggcctggccttttcttaaacaggggattcaccactttcttggctttctgcttcttcttgacagcaggggcgggagccgccttcttccccttgggcttctttctttttggcatcttgggcagtgggaggagagattgtttacttctttattgacttgccctagcaccccaactggcatatcagtgccacgtggatcgagaccaagtttgtttgattaccatgtactcccaggacctactacagcacctaggactcagcaggctccaacaagtgtttgttaagtaagtgaacaaagataaacatcttggccgggcttggtagctcatgcctgtaatcccagcactttgggaggccgaggtgggtggatcacctgaggtcaggagttccagaccagcctggccaacatagtgaaaccccatctctactaaaaatataaaaattagccgggtgtggtgataggctcctgtaatcccagctactggggaggctgaggcaggagaatcgcttgaacccaggaggtggaaggtgcagtgagccgagactgtgccattgcgctccagcctgcaaaacaagagagaaactcagtctaaaaaattaaaaaaaaaaaaaaagcttgtattggtcagtgagtttccttgagtagtttaattcactttatataaacatgtccctcttttactgggaagagagaaccaggagaagaaaagaaaaagacaaacacaaccaaataaatgtgtccccacctctcatctcattatctccatctcccatgtttattaccaaataacacagttcatattcctgggattcccctatttgacatttttctgttctcatgatcttgaagtcgatcccatatgaatactaaggttctggcatttctgtcaccacatgtatcaagctcttacccaacatattttcccattgcttcttggttttcttttgacatattcttcataacattaaccttataaggcatgtaaatatttctttctttcttttttgttttttttttttctttttttgagacagggtcttgttctgtcgcccaggctggagtgctgtggtgcaatcacagctcactgcagccttaacttcccagggtcatgcaatccttccacctcagccttctgagtagctgggaccacaggaatgtgccaccacgcccggctaatttttaaatttctttttgtaaagatagggtctcactgtattgctcgggttggtcttgaactcctgggctcaagtgatcctcccacctcggcctgccaaagtactaagaggcgtgagccaccgtgcccggcccagacctggtctttctgtcctgacttcttgttaagtgatgacaatgtgctcctttttcattctgccacagtaggtgggtttcttttattattattattattttctttgtagagacaggggtcttgctttgttgctcaggctggtctcaaactcctggcttcagacaatcctacctcaacctcccagagtgttgggattacaagtgtgagaccctgcctctggtcgaggagatgggtttctattccgtgcagttatacacaatttctaattaatacagcttaattgagaaggtgagatttgatcagggctttgaaggatgtgagtagcaactaactgcgagaagggggccaatgaaacagtaattcctagaggctctgttcagacttagggcttttgaatatcaggggttcatcatctgagctgctgaattagactaggacttcttaaatacttctaaaattggtcttgggaatgaacctgcaagaagaaaaaagcctaataaaaatagtaatagtagcagtagtagcagtactagtaatagctggctgggcgtagtggcttacacctggaatcccaacactttgggaggtcgaggctggaggatcacttgagcccaggaattcaaggtcaacctggggccaggtgcagtggctcatgcctgtaatcccagcactttgggaggccgaggcgagtggatcaccttaggtcaggagtttgagaccagcttggccaacatgatgaaatcctgtctctactaaaagtacaaaaagttagccaggcttggtggtgggcacctgtaatcccagctgcttgggaggctgaggcagaagaattgcttgaacccggaaggcggaggttgcagtgagctgaaatggcgccattgcactccagcctgagcaactcaaaagagtgagactctgtctcaaaaaaaataaaaaataaaaaataaacctgggcaacataacaagaccctgtctctacaaaaaataaaaataaaaaaattagccgggcatggtggtgtgtgcctgtggttccagctactcaggaggctgagctgggaggatcacttgagcctgggaagcctaggctgcagtaagccacgatcgcaccactgcactgcagcctgggtaacagagcaagaccctgtctccgaataataataataatggcagggcgtggtggctcacacctgtaatcccagcattttgggaggccaaggtgggcggatcacctgaggtcaggagttccagaccagcctggacaacatggtgaaaccttgtctctactaaaaatacagaaattagcctggtgttgtggtgctcacctgtaatcccagctgcatgggaggctgaggcaggagaatcgcttgaacccaggaggcggatgctgcagtgagcctagattgtaccactgcactccagcctaggcaacagagcgaggctctgtctcaataataataataataataataataataataataataacacttccaatgtaataggctttgttctaaaggacttacatgcgttgcctccttcagtcctcacagctactctttgatgaagggtagttcccaccttatggctgaggaaatagaagcaaagagaggtcaagcaacttgccccaggctacacagctaggaaatggatgagccaggatctgaacccaggcagtatggcctgagcctgagctcattagttcatgccaggcagggtttgaccaaaaccttggactcactcctgtctgctttccttcagtgactaagaggattcctgagatggatgtgcaaacatgaagtgtttactttcctccatgggaatgtacttctggcttccactcctcagctgctgctgctaagccagtgagatagatggtggtttggaaacaccctcatgtgtgtttcttctttttgttgtttttgggatccttactgaaataattttcccctcattttatgaaatatagaggttcttgctgtatcttataccccaccccaaattctactgatttgtactgagctgtgataaaaataatgataccaagtacatgcagggtttcttccagcctctaggacctggctttgtcttccactgctccttctgggatgctcctctgagaaccaaaatccgaccctttacatccagatcaggacaaactcacagagtagtttgcgaactactagtttagaactagttcggaatctgcttgttacggtttgtgacaagaggaacgcagaaatcgaaagtaaataagggtaagagactttttagcaattgagcatttgtccccaacacccaagcatatgatcagggaattagtcttgacggggcatggacccctttggatgctgttgaacttgtgatgagttgcatgctgcgtgagctgtgttaaagtcatgggcaataggactgatttttggttcctgaaggggtggaaattaaaacaaaacaaaataaaaccaaaccaaacaaagtaaaacgaaagaagtgaccctttatcacagaaagtttgtgagtcactgctctaacccatatcacattttgccacttgtgaatcaccatagtatttcagtctacatcacataatctaggactggactatacaggtttattattgtttttttgagacggagtctcactctgtggcccaggctgaagtacagtggcgccatcttggctcactgcaatctctgcctcccacctcctgggttcaagtgattctcctgcctcagcctcttgagtagttgggattacaggcacgcgcctggctaatttttttgtatttttagtagagacagggtttcaccatgttggccacgctggtctcaaactactggcctcaagtgaaccacccgcctcggccacccaaagtgcactgggattacaggtgtgagccactgtacccagcctggaccatacagtttttatttatgatttatttatttttatttcatagagatggggtcttgctatgttgctcaggctggtctcaaactcctgtcctcaagtgaccctctctcctgagccgcccagagtgctgggacctcaggcgtgtgccaccatgcctatctatttttttaagtttttttttttttttttttttttttgtagagacagggtctcactctgttgcccaggctggtctccaactcgtgggctcaagtgatcctcgtgtctcagcctcccaaagtgctgggattataggcatgagccactgtgcctggctcagagatacgtttttaaaacctcgttctagttgcttcatttatggaagtctcaccttcttgtttgtattcaggacccatgagttggcactcaaggatttttgcttctatttttgttatgattcaaatcaagagatgagataggagccaaggcaaatatctctacaaaaaaatacaaaaattggcggggcatggtggctgacgcctgtgatcccagctacttgggaggcagaggtgggaggattgcttgagcccaggaagtcaaggctgcagggagccatgagggcaccactgcattccagcctgtctcaaaaaaaaaaaaaaaaaaaaagtagggttggacagaaagcagagtcagctttgcctcacttggtggtaaaaagaaaaaagaaagtctcgaaacatttatttatttattagaaatgcaaagccaacgaagaatcttcaggcaaacgattgtagtgactgtttattggaggttattgtgtgccaggcattgtgcatttacatatattatttcatttaacctttataccataatcttttaaaagtaggtataattatcaccattttgcagatgaagaaaatgaggtgtcagagaggttaggtaactggcccaaggtcacacagctactaaatggtggcagtctgtctgacttggaagcctgtgtgcttttgcttattcccattattgcttgatgacaccaattgctgctaaaagggaatgttactggatttaaaggatatgtgtactctgtcatttttctaaaacagccttctttggcattgtttcagggtcttatatttccattaaagccttccctttagatacttagcttttacttcagaggatggtgcgggagttacagcttgggctaggctatcctgcaaattgcaattccagcttttcctttccatctcttgggagaagacagagacaaagccttcttctttggctttaattaggctgtaattcagcctcatcaccggggaggtcgggacctgcagctttaggagagatctgcgtcctgtctttgaggacagcagatttgcttcgggactctggagtgctgtcagcactgtgaccaggatggggttttcagaggctgctttctggttctttaaggctaatttttaaatttcattattattgtttttttagtgctttagtagttttcaaaggcttttattgtttaattgaaaaatatgtttattagttcatattttttattttttagacagagtcttgctctgtcacccaggctggagtgcagtggtgcaatctcggctcactgcaatctccgccgcgggggttcaagttattcgttgcctcagcctcccgagtagctgggactaccggtgcccgccaccacacccagctaaattttgtatttttagtagagacagggttttgctgtgttggccaggctggtctcgaactcctgacctcaagtgatccacctgcctctgcctcccaaagtgctgggattacaggcgtgagccactgtacccggccaattagttcataatttaatcagctttgaacattattcaaacaatttgcgatcccgaattagaattcaattgcagtttatataagatgaaggtacatttaataaaggaacatttatctactaatatacttaacttggttgttgaattatcctcagaacataaatttataatagtattcctttaaatgtaccgtattttttaaaaccgaattgactactttaaggatgcaggtatagctaaaaagtcatttagaactttttaaacagtactttgagttgccgttttataattttttttatacataaaacataactgaatttatggctggtatttgcatttctaaatcagaatatcagatctatacttgaaaaaccttttttaaaaaactgttttaaaaaacaagattccaggccgggcacagtggctcacgccttgtaatcccagcagtttgggaggccaaggtgggtggatcacttgaggtctggagttccagaccagcctggccaacaaggtgaaaccctatctctactgaaaatacaaaacttacctggttgtggtggtgggcgcctgtaattccagcttcccgggaagctgaggcaggggaattgcttgagcccaagaggcagaagttgcagtgagctgagatcacaccactgcactccagcctgggtgacagagtgatactccatctcaaaaaacaaaacaaaacaaacaaaaaacaagattcaagaattgcctacattcaatatgagttcttcgacatgattcaatttcaatgattatgcaaaggcataattctggagaagcaaattctctgcttttcatgttttgcttcctttgaggtgacctagtaattaatagagaaatcagaataattgtgattcaggatgttattataaggaaaggtaatgtcaggagggaaaaaaatagactcccctcttaggaacctaagtggtcttacgaaaagtagtttacttaccatgtgtattagtccattttcacactgctgataaagacatacctgagacctgataatttacaaaagagagaggtttaactggacttacagttccacacagctggggaagccccacaatcatggtgaaagccaaggaggagcaagtcacgtcttacatggatgtcggcaggcaaagagagagagcttgtgcaggggaactcctcttttgaaaaccatcagatctcgtgagacttattcactactaccagaacagcatgggaaagacttgccccatgattcagttacctcccactgagtccttcccacaacacgtgggaattcaagatgagatttgggtggggacacagccaaaccatatcaccatgatacctctaaaatatatgtgtatgtgtgtaactagtttctagtttttctttagtcaattatctctgtcacactgttactgttctttttttttttttttttttttgagatggagtttcactcttgttgcccaggctggaggctggagtacaatggtgcgatctcagctcacagcaatcttcgcctcccgggttcaagcgattctcctgcctgagcctcccaagtagctgtgattacaggcatgcaccaccacgcccggctaattttgtatttttagtagaaatagggtttctccgtgttggtcaggctggtctcgaactcctgacctcaggtgatctgcctgcttcgacctcccaaagtgctgggattacaggcatgagccaccccgccaggcctgttactgttcttttaatccctcagatctaactggggatcaaagccttgagttccggctgctaaatgacacttcatccatcccttccctgcagtccagctgcctgcagctgctatatctcttgccttttaactggtcttcttgattccaagatcttccattctgcaatccatctttcacactgccacctgggtgatggctgttttgaaaacaatacctgatcatgtcacgctgccacttaaaatcctcccatcttcatttctcacagaataaaacaaaagacaacataagactcaggcacaaaataaaggcaaggtcagacacagagcccttgcctcttaatcgttgcccactgttccttctgcattcgcaggtgttctagcctcagggacaaaccatggtccgtcctttcagctaaactttactcttggcctagaatgttcttcaccagcctgcccccaccggacctgggacctctgtggatgccttggcatcaccacctccaggataagccttccttgatcatctctttcctcccttttctcctcctcctcctcctcctccccctcctccttctttcttcttcttcttcttctttttttgagatggagtctcgctctgctgcccaggttggagtgcagtggtgcaatctcagctcactgcaacctctgcctcccaggttcaagagattctcctgcctcagcctcccaagtagctgagattacaggcatgcaccaccacgcccagctaattttttttttttttttttttttttgagacagagtctcactctgttgcctaggctggagtgcaatggctggatctcggctcactgcaacctccacctcccaggctcaagtgattctcatgcctcagcctcctgagtagctgggattacagatgtgcaccactgtgcccacataatttttgtatttttagtagagacggtgttttactctgttggccaggctggtttcaaactcatggcctcaagtgatccacccgcctcggcctcccaaagtgctgggattacaggcgtgagccagcactcatggcccctctcttgcttctagtgaaccaaaatcccaatgcattttaaatattaatctcggttacatgagttttaattacgatatttgtatctaattattgcattttaaaaacagggttgcacagcggttgaggcctctggctctgaatgctgactgcctggattctggttctgcctctggcatttcctatctgggttatatggggaaattacttaagctgcctgtacttcagcgtgccgtctgtcaaatggggataataatagggcccacttcatagggctgaagatttagtgaatcaatatatgtaaagctctcggctgtgacagtaaataatatttactgagccctttattcatcccatgaggaagccattatgtaaattgcatagattttatttgagaaaatactttttaaactattttatttattgctatattcatctgtgaaataaataattgcataatgtaaaatcagttgtaagaaattgctagttatccatagtgtttttcctcaggaaaatgaaaaacttcaaacaaaggaattttatattctttttcttttttgagttggagtctcgttctgttgtccaggctggggtgcagtggtgcaatctcgactcaatgcaacctcctcctcctgggttcaagcgattctcctgcctcagactccccatgcatctaggattacacacgtgcgccaccacacccggctaattttttgtatttttagtagagacggggtttcaccatgttggccaggctggtcacgaactcttgaactcaagtgatccgcttgcctcgacctcccaaagtgttgggattacaggcgtgagccaccgcgccaggctggaattttatattcttgggcagaaaagtttaatgtacttcttaggtttagtaattttagtcagagcctttactgactggtagattacctacagtttattgaactaatatattctgtttctgaagaatgcagcgcctagattgcctgcctcatattaacgtgcttagcagaactagaagtaacaattaaacatttctggtcgggtgtggtggctcaagcctgtaatcccagcactttcggaggccgaggcggcggatcacctgaggttagagtagaagaccagcctgaccaacatggcgaaaccccgtctctactaaaaatacaaaaattagcagggcgtggtggcgtgtgtctgtaatcccagctactcgggaggctgaggcagaagaatcgcttgaacccaggaggcggaggttgcagtgagccaggatcgggccaccgcattccagactgggcgacaagagcgagactccgtcacacacacaaacacacacacacacacacacacacacacacacacacacacacacacaaagtctgacacttggttccatgaccataccaatcagggaattgcaatttattttctcagttctcccgtgcatgggtgattctaattttgatcattataaatgatgctgaaatgaacaacttttcaccccaaacttattgtacatctttaattttttccttagaaaaaattgatcaaggcagaatgatcagatcaaaggaaatgattgaatctttggataccaattgctagcttacctttcaaataagttaaactaatttacactctgaccaacagtgtttcagtgttcatttcgtctatattttgctatcaatgagtgttaatcttttttttaatctttcctaactttataggccaagaaaaatgaaggtgtatcatcccgttacttgcacttatttagtttattagtttttaataaaagatttatgcttcagattccacgatttttctgattacaagattggtttctttcttttttttttttgtttttttttttttgagacagagtttcactcttgttgcccaggctggggtgcaatggcatgatctcggttcactgcaacttccacctcccaggttcaagtgattctcctgcctcagcctcccaagtagcagggactacaggcatgtgccaccacgcccggctaattttgtattcttagtaaagacggggtttcaccatgttggccaggctggtctcaaactcctgacctcaggtgatccgcctgcctccacctcccaaagtgctaggattacaggcatgagccactgcgtctggcctgattacaagatttttaatagccaaaactttttatatctaataagttttaattgcatgtatcaagtatgattaagaagaatcacaagaccttaaactccagacagtgaagacattattattattattattattatttaacttttattttaggttcaagggatacatggtcaggtttgttacctgggtaaattgtgtgttgctgaggcttggtgtacgaatgatcccatcacccaggtagtgtgcatagtactgaaggggtagatttttaccccttgctcctctcccctcctccaccctctagcagtcccgtgtctattgttcccatttttatgtccatgtgtactcaatacttagctcccacctagaagtgagaacatgcagtctttgatgttccattcctgcattgatttgcttaggaaatggcctcccgctgcagccatgttgcttcaaaggacatgatttcattcttttttatggctgcatagtattccatggtgtatatgtaccatattttctttatccagtccactgttgatgggcatctaggttgattctggatctttgctattgtgaatagtgctgcaatgaacatacgagtgcatgtgtcttttttgtagaatgacttattttcctttgggtatatacgcagtagcaggattgctgaatcaaatgttagttctgttttacgttctttgagaaatctccaaactgctttccgcggtggctgaactaatttacattcacaccaacagcatacaagcattcccttatctctgcaacctcgccaacagctgttagtttttgtctttttatgtataatttttttttttttgagacagagtctttctctgtcactcaggctggagtgcagtggtgcaatcatggctcactgcagcctcaaactcctgggctcaagctatgtattgtttatatatacatacaggtgaaaaaatgtgtgtgtgtgtgtacacacacatagattatttgaatttaaaatatatggataaacacatatatacatgttttaaattcagaaaaccttgatggtgtttgaaggtagactcctgaggacttgagggaaggaaggggttaaacaaggcactgggcaagcgtggggcagacttctcgtcaggaaatctggtatttcaggttggactggactttggagatggctgctcctttgttcaagtgaaaaaatgctttagatctggctgcgctctcagatgtgacttgtacaaaatgaattctagacttttctcgcatcaagaaagtgaagtggggccttccggtaacttgaacagactttaccccgggaatcccagacagcagcatctccgattccctaaagtgtgcacaattacagctgtggcaaccgaccctaggaaggctcagcaccacagcgaacccgagaatattgggaataaacttggaaatgtggagataggttcaacaaacctttgggtgttcagctgtttttttacacaaagccgtttatttagtattagattactgtgagatttcacattttctgtgagaggaattcttaagtaacagtgatagtgaagttgccaggtttacctccacatgattttgttttcttagtctctatattttgggattcatttatttatatttctccaatgaccagcacctatcctgtagattacttcttgcagaaactttttttttttagttgcttcatttaacctgtgactaattggttaaataaaaacaacatgtactcctcgtatttacaagtacatttcgttctgggccagataaaaaggagtaaattacactgttcattcctgtcgttttttatccctccctttccttcaaaattataaacaaaatttacattagaaagttcttaattgcttaaatagtgttcctagtgtttatttaggtttattttactcaatttattttttgagatggagccccgctctgtcacccaggctggagtgcagtggcgtgatcttggctcactgcaacctccatccccccgggctcgagcaattcttctgcctcagcctcctgagtagttgggattacaggcgtgagccaccatgccgagctaattttttttttttttttttttttgtatttttagcagagacaaggttgtgtcacattggccaggctggtcttgaactcctgacctcagctgatccaccagcctcggcctcccaaagtgctgggattacaggcgtgagccaccgcatcctgcctacttaggtttattttgaattacattgattggttcctttaggaatttacctactaagcacaaactcacctttcattcatgtgtgtattattctgtaactattttcaaattccatatttgcatgtgttctcactggccaggttatgacttctcaagtccttcggtttattcacaacttagaaaagggagaaagtaggagaaggaactgattaggaaggagatcagttccaatgagattggtaaacctgggatgtaaatgaaacagcaaagttgtgatttaatggaaagagcggtagaccagaagtccaaacacctgggttccaggctgggcactctccttatttgttgtgcgaaatcgcacaatttcagtttacctctctgagtccttgttttcttcacttgtgaaatgagcattatcaaacttgtctggccatttccataggattgctgtgagaatccaatgagatgctatatacaaaatcactttgtgaactccaaagctcttataaaggtagtcccgagtagctgggactacagacacatgccaccacgcccagctaatttttgtagttttagtagagacggggtttctccatgctgtccaggctggtctcaaactcctgacctcaagtgatccacccgcctcggcctcctgaagtgctgggattacaggcatgagccactgtgccaggcctcttgctgtattttaatatctcctctaaaccagactataagctccgcgaaggcagggacacacctcacctgtctaccttgacactcctggaacctgccaagctcagtgtgcctcacgtcggagaggcctgctatgtgttggtctaggagaggtcttgccacctagccaatattactccattcattcagctattgatcctcttctctgtgcaaggcactgctctgggtgctgggacacagcagcgtatacacagccacaacttcttggccttgtggagtttacattataaattaaggaaaatgtgtagtgtgagatgtgagagggaattttcttcaacttatataggtagtaaagaaatcgcacctatcaccccaagggaatggaaattaaattgccctttcatatagaattctacattggccacttcctgctgccacacagcagaattccatttaattccatttctcctgcagcagacaacaactcaggttccactttagaaccaattaagttttccctgtctgatgcttgcttcattatacaggaaactttttgtttttttttttttgagacagagtctcactgtattgcccaggctggaatacagtcacatgatcttggctcactgcaacttccgcttcctgggctcaagtgattctcctgcctcagccttccaagtagctgggactacaggtgcgcaccaccacgcctggctaatttttgtattttttgtactttcaccatgttggtcaggctggtcttgaactcctggcctcaagtgatctgcccacctcagcttcccaaagtgctgggattacaggtgcaagccactgtacctggccaggaaacttacttttatagtgagctttttggaaaaaaagtaaaatgtttactctacatctattatacctaactaaaattatattcagtacaatctatctgtttattgaggtcttggctcctcatttagaacagtagttgctgtccatcattcaccagtgaatgcatattgagggcctactgtgtgctagtagcttttctagactgttacagccataggtgtgaaattgggatttcacaattgggatttcgcattgagattttcacaggtttgggagtattagaccttttgactctgcaccagcttgctctgcatgaataagct

SEQ ID NO: 3597 - DNA, 436 bp, Homo Sapiens
  misc_feature (322)..(322): n is a, c, g, or t
aaagagggaaaaaaaatgttccttttatttgagatgctttttcaatgtctttaggcctgaatatggtaggaaatcatgaagcacccaaagactcaggatctcacttcgtatttggagtgggccattctcctatgcacacacacccttgttttgttgccctctccaaaatcaagtcttcaccccttcagttcatatcgccttcgttccactcttcaccatgggaaactcccacagtgtttccactgtttacagattcctttctctcacgtcagcgcaggcaccctttcacttactctgtaaccatcaggacttccattacatntctgtgactttgcacatcttcatcccagtttttaacagggatatatatacgaccatcatataaaccttgtgcggcaatcctgccggcccaccagaactttctcacattctttaa

SEQ ID NO: 3598 - DNA, 306 bp, Homo Sapiens
  misc_feature (106)..(106): n is a, c, g, or t
aaagagaaagctgctgggctctgtgtgactggaaaccagggaaggagacctggctgaggcaggaactgggtttgccagcagtgcggaggggcagcgggtggctcanaagtgggagcaggtacacagaaggagctcagggcatgcctggggcatctccaaagctctgctgagagtgaaggccaggagcctgttttccttccccagaagtgtgctcatgggaaatggggcagggggcaggctggcttggggatggaaagtaagcttacactttgatattaaactcattctttgacttgctgtcaggca

SEQ ID NO: 3599 - DNA, 509 bp, Homo Sapiens
agctcgcgcagtcgttcgggtgagcgaagatggcggccgagagggaacctcctccgctgggggacgggaagcccaccgactttgaggatctggaggacggagaggacctgttcaccagcactgtctccaccctagagtcaagtccatcatctccagaaccagctagtcttcctgcagaagatattagtgcaaactccaatggcccaaaacccacagaagttgtattagatgatgacagagaagatctttttgcagaagccacagaagaagtttctttggacagccctgaaagggaacctatcctatcctcggaaccttctcctgcagtcacacctgtcactcctactacactcattgctcctagaattgaatcaaagagtatgtctgctcccgtgatctttgatagatccagggaagagattgaagaagaagcaaatggagacatttttgacatagaaattggtgtatcagatccagaaaaagttggtgatggcatgaatgcctatatg

SEQ ID NO: 3600 - DNA, 360 bp, Homo Sapiens
  misc_feature (332)..(332): n is a, c, g, or t
  misc_feature (341)..(341): n is a, c, g, or t
acttgatcattatcagcttgataagagactttttgactctatatccttgcagttaagaagaaagcacttttttgtaatgtttgttttaatggttcaaaaaaaatctttcttataaagagcataggtagaattagtgaactctttggatcctttgtacagataaaggttatagatttcttgtgttgaatattaaaaaagcaaggatgtctaaccattaaggattatccactgtgcctggccccaagttttgcatcttttaatgccctctggaacaaatacataggggaaaactctcaggaacaattaaaacctggcggggcaacagtgttccntccctgtcntaggggttccaggtttggc

SEQ ID NO: 3601 - DNA, 2354 bp, Homo Sapiens
cgcggccgcgtcggacctgtggtcccgggtttctgcagagtctacttcagaagcggaggcactgggagtccggtttgggattgccaggctgtggttgtgagtctgagcttgtgagcggctgtggcgccccaactcttcgccagcatatcatcccggcaggcgataaactacattcagttgagtctgcaagactgggaggaactggggtgataagaaatctattcactgtcaaggtttattgaagtcaaaatgtccaaaaaaatcagtggcggttctgtggtagagatgcaaggagatgaaatgacacgaatcatttgggaattgattaaagagaaactcatttttccctacgtggaattggatctacatagctatgatttaggcatagagaatcgtgatgccaccaacgaccaagtcaccaaggatgctgcagaagctataaagaagcataatgttggcgtcaaatgtgccactatcactcctgatgagaagagggttgaggagttcaagttgaaacaaatgtggaaatcaccaaatggcaccatacgaaatattctgggtggcacggtcttcagagaagccattatctgcaaaaatatcccccggcttgtgagtggatgggtaaaacctatcatcataggtcgtcatgcttatggggatcaatacagagcaactgattttgttgttcctgggcctggaaaagtagagataacctacacaccaagtgacggaacccaaaaggtgacatacctggtacataactttgaagaaggtggtggtgttgccatggggatgtataatcaagataagtcaattgaagattttgcacacagttccttccagatggctctgtctaagggttggcctttgtatctgagcaccaaaaacactattctgaagatatatgatgggcgttttaaagacatctttcaggagatatatgacaagcagtacaagtcccagtttgaagctcaaaagatctggtatgagcataggctcatcgacgacatggtggcccaagctatgaaatcagagggaggcttcatctgggcctgtaaaaactatgatggtgacgtgcagtcggactctgtggcccaagggtatggctctctcggcatgatgaccagcgtgctggtttgtccagatggcaagacagtagaagcagaggctgcccacgggactgtaacccgtcactaccgcatgtaccagaaaggacaggagacgtccaccaacctcattgcttccatttttgcctggaccagagggttagcccacagagcaaagcttgataacaataaagagcttgccttctttgcaaatgctttggaagaagtctctattgagacaattgaggctggcttcatgaccaaggacttggctgcttgcattagaggtttacccaatgtgcaacgttctgactacttgaatacatttgagttcatggataaacttggagaaaacttgaagatcaaactagctcaggccaaactttaagttcatacctgagctaagaaggataattgtcttttggtaactaggtctacaggtttacatttttctgtgttacactcaaggataaaggcaaaatcaattttgtaatttgtttagaagccagagtttatcttttctataagtttacagcctttttcttatatatacagttattgccacctttgtgaacatggcaagggacttttttacaatttttattttattttctagtaccagcctaggaattcggttagtactcatttgtattcactgtcactttttctcatgttctaattataaatgaccaaaatcaagattgctcaaaagggtaaatgatagccacagtattgctccctaaaatatgcataaagtagaaattcactgccttcccctcctgtccatgaccttgggcacagggaagttctggtgtcatagatatcccgttttgtgaggtagagctgtgcattaaacttgcacatgactggaacgaagtatgagtgcaactcaaatgtgttgaagatactgcagtcatttttgtaaagaccttgctgaatgtttccaatagactaaatactgtttaggccgcaggagagtttggaatccggaataaatactacctggagtcttgtcctctccatttttctctttctcctcctggcctggcctgaatattatactactctaaatagcatatttcatccaagtgcaataatgtaagctgaatcttttttggacttctgctggcctgttttatttcttttatataaatgtgatttctcagaaattgatattaaacactatcttatcttctcctgaactgttgattttaattaaaattaagtgctaattaccaaaaaaaaaaa

SEQ ID NO: 3602 - DNA, 656 bp, Homo Sapiens
  misc_feature (9)..(9): n is a, c, g, or t
  misc_feature (67)..(67): n is a, c, g, or t
  misc_feature (354)..(354): n is a, c, g, or t
  misc_feature (414)..(414): n is a, c, g, or t
  misc_feature (443)..(443): n is a, c, g, or t
  misc_feature (526)..(526): n is a, c, g, or t
  misc_feature (656)..(656): n is a, c, g, or t
atcccccgngctgcaggaattcggcacgagctgaaaggaggtgtggtctatcaaaattaggaaacanattaagaaagatgatacaggaaagaagaaatctattctgtgacagcatgtggttcatttttctgtaatgtagattgcttttttcctggaggattcaggcaacagaatcccatgaaatactgggcttttgttatagtacatagaccaggatccaagggggtattggagggaaggtacaggatgacagctgtacatcaggcctagacaggcaaccatccagattggcaggaggacaggggacttaaggagggaggtctctaagaaaaaaaaaaaaaaaaaactcgaggnggggcccggtacccaattcgccctatagtgagtcgtattacaattcactggccgtcgttntacaacgtcgtgactgggtggcgtatacnaagaggcccgaccgatcgccttccaacagtgcgcagctgatggcaatggaaatgtagcgtatatttgtaaatcgcgtaatctngtaatcagtattttaccaatagcgaatcgcaaatcctataataaagatgaccaataggtgatgtgtcagttgacagatcacttaagacggctcacgtaagcgaaacgcttaggcatgccatctgacatcn

SEQ ID NO: 3603 - DNA, 428 bp, Homo Sapiens
ttttttttttttttttaaaataaaataagcaaataaatattacatcgtgccggcgatggtgtttcccgagcactcgaagcgccaagttttccctggcctttgaacgctagactgcagaaagcggcaggacagcggttctcaaagtcaggttctggaccagctgcgccaacgtctcctgggaactagatacacatattcgggcccacccgagacctacagaacccctttgggcaggcagcccggcaagctgaattttcgaaggaccccccaggcacctgcgatacgggaccagttggagaaacggtccggcatcacagtttgagaccccagatgtggggtctgatggtctctaggacccctagggtcacagttgtcagccccggctgcccattgctgggaatcacctgggaagctttagggactgttgc

SEQ ID NO: 3604 - DNA, 645 bp, Homo Sapiens
tggcgaattcggcacgagggcggcccaaggtggaaggaggggccgtgaggtgagagagtcctgtagcccgaccttgagatggcctgatatgaaggagtcacgcctcccgcctcccggagctgcccagtggctgccttgtccttcaagtgcaggagctggttcaaatgtcaggaatggaagccactgtgaccatcccaatctggcaaaacaagccacatggggctgctcgaagtgtagtaagaagaattgggaccaacctacccttgaagccgtgtgcccgggcgtcctttgagaccctgcccaacatctctgacctgtgtttgagagatgtgcccccagtccctaccctggctgacatcgcctggattgctgcggatgaagaggagacatatgcccgggtcaggagtgatacgcgccccctgaggcacacctggaaacccagccctctgattgtcatgcagcgcaatgcctctgttcccaacctgcgtgggtccgaggagaggcttctggccctgaagaagccagctctgccagccctaagccgcactactgagctgcaggacgagctgagccacttgcgcagccagattgcaaagatagtggcagctgatgcagcttcggcttcattaacgccagatttcttat

SEQ ID NO: 3605 - DNA, 861 bp, Homo Sapiens
aaaaggccggcggaacagccagaggagcagagaggcaaagaaacattgtgaaatctccaactcttaaccttcaacatgaaagtctctgcagtgcttctgtgcctgctgctcatgacagcagctttcaacccccagggacttgctcagccagatgcactcaacgtcccatctacttgctgcttcacatttagcagtaagaagatctccttgcagaggctgaagagctatgtgatcaccaccagcaggtgtccccagaaggctgtcatcttcagaaccaaactgggcaaggagatctgtgctgacccaaaggagaagtgggtccagaattatatgaaacacctgggccggaaagctcacaccctgaagacttgaactctgctacccctactgaaatcaagctggagtacgtgaaatgacttttccattctcctctggcctcctcttctatgctttggaatacttctaccataattttcaaataggatgcattcggttttgtgattcaaaatgtactatgtgttaagtaatattggctattatttgacttgttgctggtttggagtttatttgagtattgctgatcttttctaaagcaaggccttgagcaagtaggttgctgtctctaagcccccttcccttccactatgagctgctggcagtgggtttgtattcggttcccaggggttgagagcatgcctgtgggagtcatggacatgaagggatgctgcaatgtaggaaggagagctctttgtgaatgtgaggtgttgctaaatatgttattgtggaaagatgaatgcaatagtaggactgctgacattttgcagaaaatacattttatttaaaatctcctaaaaaaaaaaa

SEQ ID NO: 3606 - DNA, 2128 bp, Homo Sapiens
caagacttctctgcattttctgccaaaatctgtgtcagatttaagacacatgcttctgcaagcttccatgaaggttgtgcaaaaaagtttcaatccagagttgggttccagctttctgtagctgtaagcattggtggccacaccacctccttacaaagcaactagaacctgcggcatacattggagagatttttttaattttctggacatgaagtaaatttagagtgctttctaatttcaggtagaagacatgtccaccttctgattatttttggagaacattttgatttttttcatctctctctccccacccctaagattgtgcaaaaaaagcgtaccttgcctaattgaaataatttcattggattttgatcagaactgattatttggttttctgtgtgaagttttgaggtttcaaactttccttctggagaatgccttttgaaacaattttctctagctgcctgatgtcaactgcttagtaatcagtggatattgaaatattcaaaatgtacagagagtgggtagtggtgaatgttttcatgatgttgtacgtccagctggtgcagggctccagtaatgaacatggaccagtgaagcgatcatctcagtccacattggaacgatctgaacagcagatcagggctgcttctagtttggaggaactacttcgaattactcactctgaggactggaagctgtggagatgcaggctgaggctcaaaagttttaccagtatggactctcgctcagcatcccatcggtccactaggtttgcggcaactttctatgacattgaaacactaaaagttatagatgaagaatggcaaagaactcagtgcagccctagagaaacgtgcgtggaggtggccagtgagctggggaagagtaccaacacattcttcaagcccccttgtgtgaacgtgttccgatgtggtggctgttgcaatgaagagagccttatctgtatgaacaccagcacctcgtacatttccaaacagctctttgagatatcagtgcctttgacatcagtacctgaattagtgcctgttaaagttgccaatcatacaggttgtaagtgcttgccaacagccccccgccatccatactcaattatcagaagatccatccagatccctgaagaagatcgctgttcccattccaagaaactctgtcctattgacatgctatgggatagcaacaaatgtaaatgtgttttgcaggaggaaaatccacttgctggaacagaagaccactctcatctccaggaaccagctctctgtgggccacacatgatgtttgacgaagatcgttgcgagtgtgtctgtaaaacaccatgtcccaaagatctaatccagcaccccaaaaactgcagttgctttgagtgcaaagaaagtctggagacctgctgccagaagcacaagctatttcacccagacacctgcagctgtgaggacagatgcccctttcataccagaccatgtgcaagtggcaaaacagcatgtgcaaagcattgccgctttccaaaggagaaaagggctgcccaggggccccacagccgaaagaatccttgattcagcgttccaagttccccatccctgtcatttttaacagcatgctgctttgccaagttgctgtcactgtttttttcccaggtgttaaaaaaaaaatccattttacacagcaccacagtgaatccagaccaaccttccattcacaccagctaaggagtccctggttcattgatggatgtcttctagctgcagatgcctctgcgcaccaaggaatggagaggaggggacccatgtaatccttttgtttagttttgtttttgttttttggtgaatgagaaaggtgtgctggtcatggaatggcaggtgtcatatgactgattactcagagcagatgaggaaaactgtagtctctgagtcctttgctaatcgcaactcttgtgaattattctgattcttttttatgcagaatttgattcgtatgatcagtactgactttctgattactgtccagcttatagtcttccagtttaatgaactaccatctgatgtttcatatttaagtgtatttaaagaaaataaacaccattattcaagccaaaaaaaaaaaaaaaaaa

SEQ ID NO: 3607 - DNA, 579 bp, Homo Sapiens
  misc_feature (415)..(415): n is a, c, g, or t
aaggagaaaagatccggaagaaatatccggacagggtccccgtgattgtagagaaggctccaaaagccagggtgcctgatctggacaagaggaagtacctagtgccctctgaccttactgttggccagttctacttcttaatccggaagagaatccacctgagacctgaggacgccttattcttctttgtcaacaacaccatccctcccaccagtgctaccatgggccaactgtatgaggacaatcatgaggaagactattttctgtatgtggcctacagtgatgagagtgtctatgggaaatgagtggttggaagcccagcagatgggagcacctgggacttgggggtagggggaggggttgtgtgtgcgcgacatggggaaagagggtggctcccaccgcaaggagacagaanggtgaagacatctagaaacattacaccacacacaccgtcatcacattttcacatgctcaattgatattttttgctgcttcctcggcccagggagaaagcatgtcaggacagagctgttggattggctttatagaggaatgggggatgatgtaagtttacagtag

SEQ ID NO: 3608 - DNA, 244 bp, Homo Sapiens
  misc_feature (128)..(128): n is a, c, g, or t
  misc_feature (206)..(206): n is a, c, g, or t
  misc_feature (239)..(239): n is a, c, g, or t
acaacctgcaagccaagaagtacgagaagggccaggcgcggtggctcacgcctgtaatcccagcactttgggaggccgagacgggtggatcacctgaggccgagacgcatccagagctttcgtgaccngggactgttctgaagcaggcctcgtggatgacgtatccgacctgtcagccgctgagatgctgacacttcacaattggntttcattctatgagaagaattatgtgtgtgttnggagg

SEQ ID NO: 3609 - DNA, 609 bp, Homo Sapiens
  misc_feature (466)..(466): n is a, c, g, or t
agtgctgggattacagatgtgagccaccaggcccggcctcttaattactaatcatgagccgacacccgcactgccaggatccaagatgcagggctggtgttggcagacacgctccggaaattcttattcgatctggatgttgatgatggcctagcagctgttggttactccaaagctgatatccccgcactagtgaaaggaacgctgccccaggaaagggtcaccaagcttgcaccctgtccccagtcagaagaggatctggctgctctgtttgaagcttcaatgaaactgtattaattgtcattttaactgaaagaattaccgctggccattgtagtgctgagagcaagagctgatctagctagggctttgtcttttcatctttgcgcataacttacctgttaccagtataggtgggatatacatttatcttgcaggaaattccccaaagctcagagtccagttncttccataaaacaggctggacaaatgaccactatgttagacccccaggctcgacttcaggggtcagtgtttctgtcccaaaccccacacagaatactctgcctctgtttcatgtagcaaatgagcaaaaactcagtatctatc

SEQ ID NO: 3610 - DNA, 342 bp, Homo Sapiens
  misc_feature (21)..(21): n is a, c, g, or t
  misc_feature (23)..(23): n is a, c, g, or t
  misc_feature (25)..(25): n is a, c, g, or t
  misc_feature (90)..(90): n is a, c, g, or t
  misc_feature (134)..(134): n is a, c, g, or t
  misc_feature (139)..(139): n is a, c, g, or t
  misc_feature (270)..(271): n is a, c, g, or t
  misc_feature (310)..(310): n is a, c, g, or t
  misc_feature (328)..(328): n is a, c, g, or t
  misc_feature (335)..(335): n is a, c, g, or t
ccacacggcccccgcagcatnantncttacgcagcccttgcgttgcactgattccccggccgcgcccactgcatagtggctctcctcgtngtccgcatcctccccagaagagtctctgcaggaggcggcgtccnagttntccacctcccagcagtggcggtccggccccgaagccctgcgcacccagcacagctggagtctgatcgaagcgcttggggccgtcagggtgcgcgggcgtccctgggtggggccagttgtacgctgcggcgnncggcggagatgagcaggcggcggtgtgcggtcccagggnccaggggtcaggtcggcngtcaggnctatgaa

SEQ ID NO: 3611 - DNA, 348 bp, Homo Sapiens
cattagcgcggtggggaccggatttttccaaatcaatggtcttggctggcagagtgctgagtggggcctgagtgaatgaggctaaaacgcttggccgaagcgtccatccccaatcctgagaacagagttgtctgtttctctttcgggggtcaggtcagcccaagtaagaggccaacaacctacctgggccgatacaaggcgacacaaggcccacccgtggctgacgcgccctccaccctcactccatcccggggcacagctccttccgctggtgcttaggaaaaggcgaggcttctggtaatttctcatctttgtagttctgctttgaaaagaaaagggggccgggca

SEQ ID NO: 3612 - DNA, 365 bp, Homo Sapiens
ctgggatctagactgaactcttggaacttttgaagatgatttcctttattttattttcaatggaggaaagttgcccactctttcatctcagtgagaagtcccattttaatttgccatcactattggatggagccgctaattgctgggagggagaaagctatagtttagcaacatgttttcctcctgctcgttctaggaaaactattatgaatctttaaaatagtgattatcctaaactgttttttccaatcactttaattttttttattaatttaaagcaagccctgctgaaagcccaagtatatatgacttagagtcttactaaatgaatacaggtgtgcctcagtttgtccattggagggttt

SEQ ID NO: 3613 - DNA, 413 bp, Homo Sapiens
  misc_feature (38)..(38): n is a, c, g, or t
  misc_feature (168)..(168): n is a, c, g, or t
  misc_feature (300)..(300): n is a, c, g, or t
  misc_feature (310)..(310): n is a, c, g, or t
  misc_feature (326)..(326): n is a, c, g, or t
  misc_feature (373)..(373): n is a, c, g, or t
  misc_feature (389)..(389): n is a, c, g, or t
  misc_feature (400)..(400): n is a, c, g, or t
ttttttttttttttttgctcaaaatgctccgtttattnctctattcaatgaccacgagcgaattataaaaagacaccaaatgtctctgtctgccgtgggataaatatttaaagtcagcaataaaaacacgtggctccaagcacacgcagagcaacacgcagtgagganttctgggaaggctttcccacagtgacacagaaaaatgtctcacgtagatctgggctgagtccccacccaaaccttgagctcccctcccctccccaacagggcctagatcctctgggttctccatgccccatntgccccctancttgccagtgcctcanaggctgggggaaccttcctgagggcattttgacaaccagagggccancttgggttttgattgnccatttccaanttaggagaatttt

SEQ ID NO: 3614 - DNA, 350 bp, Homo Sapiens
  misc_feature (251)..(251): n is a, c, g, or t
  misc_feature (321)..(321): n is a, c, g, or t
gggctctcctcccagcgccgagcactgggccctggcagacgccccaagattgttgtgaggagtctagccagttggtgagcgctgtaatctgaaccagctgtgtccagactgaggccccatttgcattgtttaacatacttagaaaatgaagtgttcatttttaacattcctcctccaattggtttaatgctgaattactgaagagggctaagcaaaaccaggtgcttgcgctgagggctctgcagtggctnggaggaccccggcgctctccccgtgtcctttccacgactcgctcggcccctcttggaataaaacacccgngagccctggagggcccagaggaggtcgaa

SEQ ID NO: 3615 - DNA, 410 bp, Homo Sapiens
tttttttttttttttctagcaataagcatgtgctacctttattaaactctggagcagcgaggtccaggatggccatgggggcccccagctcggcccccacacatgaagggctcccagaccccccttccctgcccccctgcagtgggagcagtgagatgcatatgaagccagggtaccgcctcagccattaggctgagaccagtgccagcccttaagaggctcctgctctcgagggacgtggagttccggctcggccctcccagctcggccatgctcgccaggcttttcgggctttttactgctgaaaagcaggggtgcaggccatgatccccttcactgtgtcttgtgagcccacagaatgggctctgccttcagaacaacgggtggatgccccaggccagagagagcag

SEQ ID NO: 3616 - DNA, 270 bp, Homo Sapiens
cggccgccgcgcttccgactctcccaggccgcaccgcgcgccgcgacggctacagcccagccatgtgcgtgcgacggggaggccgcaccaaggccgcgggggcggggggcgcacccacgccctgggggcctcacgaacgacccttgagaggactcgcatccacaagaccgcgcccgaaaatcatcaaactgatatatttgtgacaagaaagtgcttaattccattcagcaagattgtttctgtgcatcagtaaactcatgcctcgtgccg

SEQ ID NO: 3617 - DNA, 495 bp, Homo Sapiens
ttttagctcatcagctatggttggtattaagtctattttatgtgtagccctcgacaattctcctaatgtggcccagggctgccaaaagattggaccccctgcgctagaaagtacttaatataaaccagtggctctcaaaatgtggtctacggattcactggggattccagagtcctttttgggagggggttgtgtaaggcccccttttttcatctatttgtgactttggattgtcttcatatacctccaccaaaatgatccgccacagcaatcaaatgtgtttaagtaaaattgccttaagacacatgttgaatatctgtaaaaatgtaaaatgctactcttctcagcttttttagaaaagtcattttagaaatttgttttaatttctactgttagtattgataattataacccatataaacaaaagctctctgggatcctcaataatttttttagagtataaagaggccctgagaccaaaaaaagtttgagaac

SEQ ID NO: 3618 - DNA, 412 bp, Homo Sapiens
  misc_feature (375)..(375): n is a, c, g, or t
ttgatgtacttacatttgtgcatcacaatcaagaggttcccagcttggtggaactttcaaagatgaggcagaaaactaaacaggcaattacaatcttacttttcacgctgacaagtggtacggtggctagcccaaactcccctccctgtcccagctacctcccttatagaccattcacgatcacttaggccaggctgccatgtgacctaagagaagacagggagaacacagcatttcttactcctactaacttgcaacatcattctctcaagttgctctcattgggagggctcccaactgcttcaagctggcccagtggatatttgtatttctaaagtgggggcagggcatgggccatttcccaaaaaaaggganacacatttcaggactttgtggcctttttgtttacccc

SEQ ID NO: 3619 - DNA, 447 bp, Homo Sapiens
  misc_feature (165)..(165): n is a, c, g, or t
  misc_feature (209)..(209): n is a, c, g, or t
  misc_feature (234)..(234): n is a, c, g, or t
  misc_feature (252)..(252): n is a, c, g, or t
  misc_feature (314)..(314): n is a, c, g, or t
  misc_feature (368)..(368): n is a, c, g, or t
  misc_feature (391)..(391): n is a, c, g, or t
  misc_feature (434)..(434): n is a, c, g, or t
  misc_feature (442)..(442): n is a, c, g, or t
ttttttttttttttttttttttttttttttttttatatttaaggcagaaacaagagtttattgaagcaaaaaaaagtacacttggatggaacgaagggggacgtcaaaagattgagtacccagcttgacctttgtcttagggctcttagagatttattatttccnatttttttccccatctcttccctccctgtatgtgcagtggtttnccagtatctggaagggccttttggngattgaagttatgcacangctctcttagggcaattttcccttactgggctagcactcccggccaagccccatgggaaggncatatatttgtcaaactctgtcattttgccccttactgcgcatgtctggggcangcccccagaggaaggccaaactntgccatcttaaattcttattgggggagtttgtggggggttgtncccgcccngttca

SEQ ID NO: 3620 - DNA, 2343 bp, Homo Sapiens
atacgactacacctgctccggagcccgcggcggtacctgcagcggaggagctctgtcttccccttcatctcacgcgagcccggcgtcccgccgcgtgcgccccggcgcagcccgccagtccgcccggagcccgcccagtcgccgcgctgcacgcccggggtgaaccctctgccctcgctgggacagagggccccgcagccgtcatgctttccgccatctacacagtcctggcgggactgctgttcctgccgctcctggtgaacctctgctgcccatacttcttccaggacataggctacttcttgaaggtggccgccgtgggccggagggtgcgcagctacgggcagcggcggccggcgcgcaccatcctgcgggcgttcctggagaaagcgcgccagacgccacacaagccttttctgctcttccgcgacgagactctcacctacgcgcaggtggaccggcgcagcaatcaagtggcccgggcgctgcacgaccacctcggcctgcgccagggagactgcgtggcgctccttatgggtaacgagccggcctacgtgtggctgtggctggggctggtgaagctgggctgtgccatggcgtgcctcaattacaacatccgcgcgaagtccctgctgcactgcttccagtgctgcggggcgaaggtgctgctggtgtcgccagaactacaagcagctgtcgaagagatactgccaagccttaaaaaagatgatgtgtccatctattatgtgagcagaacttctaacacagatgggattgactctttcctggacaaagtggatgaagtatcaactgaacctatcccagagtcatggaggtctgaagtcactttttccactcctgccttatacatttatacttctggaaccacaggtcttccaaaagcagccatgatcactcatcagcgcatatggtatggaactggcctcacttttgtaagcggattgaaggcagatgatgtcatctatatcactctgcccttttaccacagtgctgcactactgattggcattcacggatgtattgtggctggtgctactcttgccttgcggactaaattttcagccagccagttttgggatgactgcagaaaatacaacgtcactgtcattcagtatatcggtgaactgcttcggtatttatgcaactcaccacagaaaccaaatgaccgtgatcataaagtgagactggcactgggaaatggcttacgaggagatgtgtggagacaatttgtcaagagatttggggacatatgcatctatgagttctatgctgccactgaaggcaatattggatttatgaattatgcgagaaaagttggtgctgttggaagagtaaactacctacagaaaaaaatcataacttatgacctgattaaatatgatgtggagaaagatgaacctgtccgtgatgaaaatggatattgcgtcagagttcccaaaggtgaagttggacttctggtttgcaaaatcacacaacttacaccatttaatggctatgctggagcaaaggctcagacagagaagaaaaaactgagagatgtctttaagaaaggagacctctatttcaacagtggagatctcttaatggttgaccatgaaaatttcatctatttccacgacagagttggagatacattccggtggaaaggggaaaatgtggccaccactgaagttgctgatacagttggactggttgattttgtccaagaagtaaatgtttatggagtgcatgtgccagatcatgagggtcgcattggcatggcctccatcaaaatgaaagaaaaccatgaatttgatggaaagaaactctttcagcacattgctgattacctacctagttatgcaaggccccggtttctaagaatacaggacaccattgagatcactggaacttttaaacaccgcaaaatgaccctggtggaggagggctttaaccctgctgtcatcaaagatgccttgtatttcttggatgacacagcaaaaatgtatgtgcctatgactgaggacatctataatgccataagtgctaaaaccctgaaactctgaatattcccaggaggataactcaacatttccagaaagaaactgaatggacagccacttgatataatccaactttaatttgattgaagattgtgaggaaattttgtaggaaatttgcatacccgtaaagggagacttttttaaataacagttgagtctttgcaagtaaaaagatttagagattattatttttcagtgtgcacctactgtttgtatttgcaaactgagcttgttggagggaaggcattattttttaaaatacttagtaaattaaatgaac

SEQ ID NO: 3621 - DNA, 2429 bp, Homo Sapiens
ttatgcacgatgctgtttttgggcagcctgggggcctggggaacaacatctatcagcacaggttcaattttttccctgaaaaccctgcgttctcagcatgggggacaagtgggtctcaaggtcagcagacccagagctccgcgtatgggagcagctacacctaccccccgagctccctgggtggcacggtggttgatgggcagccaggctttcacagcgacaccctcagcaaggccccctccacccataaagcataacatggacattggcacctgggataacaaggggcctgtgccgaaggccccagtcccccagcaggcaccctctccacaggctgccccacagccccagcaggtggctcagcctctcccagcacagcccccagctttggctcaaccgcagtatcagagccctcagcagccaccccagacccgctgggttgccccacgcaacagaaacgcggcgtttgggcagagcggaggggctggcagcgatagcaactctcctggaaacgtccagcctaattctgcccccagcgtcgaatcccaccccgtccttgaaaaactgaaggctgctcacagctacaacccgaaagagttttgagtggaatctgaaaagcgggcgtgtgttcatcatcaagagctactctgaggacgacatccaccgctccattaagtactccatctggtgtagcacagagcacggcaacaagcgcctggacagcgccttccgctgcatgagcagcaaggggcccgtctacctgctcttcagcgtcaatgggagtgggcatttttgtggggtggccgagatgaagtcccccgtggactacggcaccagtgccggggtctggtctcaggacaagtggaaggggaagtttgatgtccagtggatttttgttaaggatgtacccaataaccagctccggcacatcaggctggagaataacgacaacaaaccggtcacaaactcccgggacacccaggaggtgcccttagaaaaagccaagcaagtgctgaaaattatcagttcctacaagcacacaacctccatcttcgacgactttgctcactacgagaagcgccaggaggaggaggaggtggtgcgcaaggaacggcagagtcgaaacaaacaatgagggcgaaccagtttcttacatgttctaacgtttgactttgaaaacagtttaaaacacgtgtgcttggtcagctccagtgtgtcgtcccgtgcgggggttgagtgttgcatctttgcctttcttgtcgttgatttttgcccagatggatctgcatttatttgtactttttctatgtattataatcctgtagaagtcactaataaaggagtattttttttgtcagcttatcaatcagactgatctaatgtgaaatgtaagtatccttaaaaacaaagcatctattttggcagaaattgtgttcttaaattcagtcatttgatattctgtgagacttcatatttctcatccctttattgctttttagcaaacataagaaaccatgagtcattttgtcatttagagtattctgataaaatctcttgaaaatactgaaatcaaaaggttaatgattttttgttcattctgatttgtcattttattatctgttatcggtctaaagtgctaatttacccatttgatttttctgctagacagataacttttaatttttcaaatttggcagacactttttttttttttttgaaaatctttccttccagatctgttgcccactgaacagccactcgtccctcactgtcctggtgtccgattgggctggatggtgttggggcatgatgtgtggaggaactggaaggtgctttaggtctggttcagggtcgggcattctttgttgtttgcacatctttttaaattttacaccttttcttaagaattctaatgccgtcttaagtttttataccaataatgctgagctttaagtgtaggatctggtagtacagacagtgtgatggatgatgctgctggttgtaaatttcatcgtgtgtgtctaattttttttcctgttgaatgggtaaaaacaaaacaaaactttttttagaagatgaatttgctgtcatgttttgtggaatgagggaccgttgagctcactaccacctggagtttgagttgaagcatgaaaatggtgcccatgcctgacgctccagcgcctggatctgcacgtgcccttgtagaggatccttaccgtcctagagagcagacgctttctgaaaactacttgctccaaaagaccctctgagttaacgtttcagctgtatcattagacttgtatttagagcgtgtcacttcctctgaactgttactgcctgaatggagtcctggacgacattgggtttttcctctaggagaatacaagccttaataaacaatactatttagcaaaaaaaaaaaaaaaaaa

SEQ ID NO: 3622 - DNA, 2597 bp, Homo Sapiens
gagcagcgcgcgcaagcaggccaggggaaggtgggcgcaggtgaggggccgaggtgtgcgcaggactttagccggttgagaaggatcaagcaggcatttggagcacaggtgtctagaaacttttaaggggccggttcaagaaggaaaagttcccttctgctgtgaaactatttggcaagaggctggagggcccaatggctgcaaaattgcaacccaacattcccaaagccaagagtctagatggcgtcaccaatgacagaaccgcatctcaagggcagtggggccgtgcctgggaggtggactggttttcactggcgagcgtcatcttcctactgctgttcgcccccttcatcgtctactacttcatcatggcttgtgaccagtacagctgcgccctgaccggccctgtggtggacatcgtcaccggacatgctcggctctcggacatctgggccaagactccacctataacgaggaaagccgcccagctctataccttgtgggtcaccttccaggtgcttctgtacacgtctctccctgacttctgccataagtttctacccggctacgtaggaggcatccaggagggggccgtgactcctgcaggggttgtgaacaagtatcagatcaacggcctgcaagcctggctcctcacgcacctgctctggtttgcaaacgctcatctcctgtcctggttctcgcccaccatcatcttcgacaactggatcccactgctgtggtgcgccaacatccttggctatgccgtctccaccttcgccatggtcaagggctacttcttccccaccagcgccagagactgcaaattcacaggcaatttcttttacaactacatgatgggcatcgagtttaaccctcggatcgggaagtggtttgacttcaagctgttcttcaatgggcgccccgggatcgtcgcctggaccctcatcaacctgtccttcgcagcgaagcagcgggagctccacagccatgtgaccaatgccatggtcctggtcaacgtcctgcaggccatctacgtgattgacttcttctggaacgaaacctggtacctgaagaccattgacatctgccatgaccacttcgggtggtacctgggctggggcgactgtgtctggctgccttatctttacacgctgcagggtctgtacttggtgtaccaccccgtgcagctgtccaccccgcacgccgtgggcgtcctgctgctgggcctggtgggctactacatcttccgggtggccaaccaccagaaggacctgttccgccgcacggatgggcgctgcctcatctggggcaggaagcccaaggtcatcgagtgctcctacacatccgccgacgggcagaggcaccacagcaagctgctggtgtcgggcttctggggcgtggcccgccacttcaactacgtcggcgacctgatgggcagcctggcctactgcctggcctgtggcggtggccacctgctgccctacttctacatcatctacatggccatcctgctgacccaccgctgcctccgggacgagcaccgctgcgccagcaagtacggccgggactgggagcgctacaccgccgcagtgccttaccgcctgctgcctggaatcttctaagggcacgccctagggagaagccctgtggggctgtcaagagcgtgttctgccaggtccatgggggctggcatcccagctccaactcgaggagcctcagtttcctcatctgtaaactggagagagcccagcacttggcaggtgtccagtacctaatcacgctctgttccttgcttttgccttcaagggaattccgagtgtccagcactgccgtattgccagcacagacggattttctctaatcagtgtccctgggcaggaggatgacccagtcacctttactagtcctttggagacaatttacctgtattaggagcccaggccacgctacactctgcccacactggtgagcaggaggtcttcccacgccctgtcattaggctgcatttactcttgctaaataaaagtgggagtggggcgtgcgcgttatccatgtattgcctttcagctctagatccccctcccctgcctgctctgcagtcgtgggtggggcccgtgcgccgtttctccttggtagcgtgcacggtgttgaactgggacactggggagaaaggggctttcatgtcgtttccttcctgctcctgctgcacagctgccaggagtgctctgcctggagtctgcagacctcagagaggtcccagcactggctgtggctttcaggtgtaggcaggtgggctctgcttcccgattccctgtgagcgcccaccctctcgaaagaattttctgtcttgccctgtgactgtgcagactctggctcgagcaacccggggaacttcaccctcaggggcctctccacaccttctccagcgaggaggtctcagtcccagcctcgggagggcacctccttttctgtgctttcttccctgaggcattcttcctcatccctagggtgttgtgtagaactctttttaaactctatgctccgagtagagttcatctttatattaaacttcccctgttcaaaaaaaaaaaaaaaaa

SEQ ID NO: 3623 - DNA, 461 bp, Homo Sapiens
  misc_feature (76)..(76): n is a, c, g, or t
  misc_feature (79)..(79): n is a, c, g, or t
  misc_feature (125)..(125): n is a, c, g, or t
tccttcttttgtgccttcttggaatggatctttaaaaagcttttgacagaaacagatgtctggttttctaaacagnagnaaagattttgaaggtatttggcctttcttttgaaactgaacaaggnaaaaccatttgtgtcagtattcagacatttaaggttacaatatattatcagtgatctggcttctgcaagaattattgaacaagatgctgtagtaccttcagaatggctctcttctgtgtataaacagcagtggtttgctatgctgcgggcagaacaggacagtgaggtggggcctcaagaaatcaataaagaagaactagagggaaacagcatgaggtgtggtagaaagcttgccaaagatggtgaatactgctggcgttggacaagttttaacttcggcttcgacctacttgtaacttacaccaatcgatacatcattttcaaacgcaatacact

SEQ ID NO: 3624 - DNA, 202 bp, Homo Sapiens
  misc_feature (28)..(28): n is a, c, g, or t
  misc_feature (53)..(53): n is a, c, g, or t
  misc_feature (58)..(58): n is a, c, g, or t
cggccgcccatccttttagcaccgcgangaggcgccggtgtttcgagccgtgnaccgnatcggctgacactgctgcctccagctagttatttcgtcctcttccgttcttcacccctacaccttggaggtgaacttctcacctgagggctgtaaagactcgtttgaaaatggagagccaagaaccaacggaatcttctcagaa

SEQ ID NO: 3625 - DNA, 537 bp, Homo Sapiens
  misc_feature (314)..(314): n is a, c, g, or t
cgctccgcgactgcgttaactggagccaggctgagcgtcggcgccggggttcggtggcctctagtgagatctggaggatccaaggattctgtagctacaatgttgtcaagacttttttcgaatgcatggcctctttgtggcctcccatccctgggaagtcatactggggacagtgacactgaccatctgcatgatgtccatgaacatgtttactggtaacaataagatctgtggttggaattatgaatgtccaaagtttgaagaggatgttttgagcagtgacattataattctgacaataacacgatgcatanccatcctgtatatttacttccagttccagaatttacgtcaacttggatcaaaatatattttgggtattgctggccttttcacaattttctcaagttttgtattcagtacagttgtcattcacttcttagacaaagaattgacaggcttgaatgaagctttgccctttttcctacttttgattgacctttccaagagcaagcacattagcaaagtttgccctca

SEQ ID NO: 3626 - DNA, 364 bp, Homo Sapiens
tttttcgaagacaactactgtcaaggtcattgatttataagtgaagtcctttcctctggtctcaatctggttttctgccatggtagatataatatttttacattatgcctttcaagctacttgacatcctctgggacacttagtctcttttgtgattgcttaactgagatttactctacaaatcccactggaaatgaatcacctttgggaactgtaatggcagtctggtagtacacctgatgaagtcttatctgaaggccctgagagggagtgacttcttttctgcggacatttcctctagaataagatatactgtgtttactcatatttggaatcgacagaaagcaaataagaaagatgtctg

SEQ ID NO: 3627 - DNA, 570 bp, Homo Sapiens
ttatctataggatcccgttggagtgctgtgacagaagaaaagctcccccttctggacatttgaatactaccaaacattctttgatgtggacacctaccaggtctttgactagaattaaaggatctcttttgccaatacccgggaaaaactttgtgaggttatatatccgcagcaatccggatctctatggccccttttggatatgtgccacgttggtctttgccatagcaattactgggaatctttccaacttcttgatccatctgggagagaagacgtaccattatgtgcccgaattccgaaaagtgtccatagctgctaccatcatctatgcctatgcctggctggttcctcttgcactctggggtttcctcatgtggagaaacagcaaagttatgaacatcgtctcctattcatttctggagattgtgtgtgtctatggatattccctcttcatttatatccccaccgcaatactgtggattatcccccagaaagctgttcgttggattctagtcatgattgccctgggcatctcaggatctctcttggcaatgacattttggccag

SEQ ID NO: 3628 - DNA, 2586 bp, Homo Sapiens
gtaagtccagagagtttagtgtccacacctagactggaattgaaagacaccagcagaagtgatgaaagtccaaaaccaggaaaattccaaagaactcgtgtccctcgagctgaatctggtgatagccttggttctgaagatcgtgatcttctttacagcattgatgcatatagatctcaaagattcaaagaaacagaacgtccatcaataaagcaggtgattgttcggaaggaagatgttacttcaaaactggatgaaaaaaataatgcctttccttgtcaagttaatatcaaacagaaaatgcaggaactcaataacgaaataaatatgcaacagacagtgatctatcaagctagccaggctcttaactgctgtgttgatgaagaacatggaaaagggtccctagaagaagctgaagcagaaagacttcttctaattgcaactgggaagagaacacttttgattgatgaattgaataaattgaagaacgaaggacctcagaggaagaataaggctagtccccaaagtgaatttatgccatccaaaggatcagttactttgtcagaaatccgcttgcctctaaaagcagattttgtctgcagtacggttcagaaaccagatgcagcaaattactattacttaattatactaaaagcaggagctgaaaatatggtagccacaccattagcaagtacttcaaactctcttaacggtgatgctctgacattcactactacatttactctgcaagatgtatccaatgactttgaaataaatattgaagtttacagcttggtgcaaaagaaagatccctcaggccttgataagaagaaaaaaacatccaagtccaaggctattactccaaagcgactcctcacatctataaccacaaaaagcaacattcattcttcagtcatggccagtccaggaggtcttagtgctgtgcgaaccagcaacttcgcccttgttggatcttacacattatcattgtcttcagtaggaaatactaagtttgttctggacaaggtcccctttttatcttctttggaaggtcatatttatttaaaaataaaatgtcaagtgaattccagtgttgaagaaagaggttttctaaccatatttgaagatgttagtggttttggtgcctggcatcgaagatggtgtgttctttctggaaactgtatatcttattggacttatccagatgatgagaaacgcaagaatcccataggaaggataaatctggctaattgtaccagtcgtcagatagaaccagccaacagagaattttgtgcaagacgcaacacttttgaattaattactgtccgaccacaaagagaagatgaccgagagactcttgtcagccaatgcagggacacactctgtgttaccaagaactggctgtctgcagatactaaagaagagcgggatctctggatgcaaaaactcaatcaagttcttgttgatattcgcctctggcaacctgatgcttgctacaaacctattggaaagccttaaaccgggaaatttccatgctatctagaggtttttgatgtcatcttaagaaacacacttaagagcatcagatttactgattgcattttatgctttaagtacgaaagggtttgtgccaatattcactacgtattatgcagtatttatatcttttgtatgtaaaactttaactgatttctgtcattcgtcaatgagtagaagtaaatacattatagttgattttgctaaatcttaatttaaaagcctcattttcctagaaatctaattattcagttattcatgacaatatttttttaaaagtaagaaattctgagttgtcttcttggagctgtaggtcttgaagcagcaacgtctttcaggggttggagacagaaacccattctccaatctcagtagttttttcgaaaggctgtgatcatttattgatcgtgatatgacttgttactagggtactgaaaaaaatgtctaaggcctttacagaaacatttttagtaatgaggatgagaactttttcaaatagcaaatatatattggcttaaagcatgaggctgtcttcagaaaagtgatgtggacataggaggcaatgtgtgagacttgggggttcaatattttatatagaagagttaataagcacatggtttacatttactcagctactatatatgcagtgtggtgcacattttcacagaattctggcttcattaagatcattatttttgctgcgtagcttacagacttagcatattagttttttctactcctacaagtgtaaattgaaaaatctttatattaaaaaagtaaactgttatgaagctgctatgtactaataatactttgcttgccaaagtgtttgggttttgttgttgtttgtttgtttgtttgtttttggttcatgaacaacagtgtctagaaacccattttgaaagtggaaaattattaagtcacctatcacctttaaacgcctttttttaaaattataaaatattgtaaagcagggtctcaacttttaaatacactttgaacttcttctctgaattattaaagttctttatgacctcatttataagcact

SEQ ID NO: 3629 - DNA, 3493 bp, Homo Sapiens
agcggccggggccacgatggagcgcgacggctgcgcggggggcgggagccgcggcggcgagggcgggcgcgctccccgggagggcccggcggggaacggccgcgatcggggccgcagccacgctgccgaggcgcccggggacccgcaggcggccgcgtccttgctggcccctatggacgtgggggaggagccgctggagaaggcggcgcgcgcccgcactgccaaggaccccaacacctataaagtactctcgctggtattgtcagtatgtgtgttaacaacaatacttggttgtatatttgggttgaaaccaagctgtgccaaagaagttaaaagttgcaaaggtcgctgtttcgagagaacatttgggaactgtcgctgtgatgctgcctgtgttgagcttggaaactgctgtttagattaccaggagacgtgcatagaaccagaacatatatggacttgcaacaaattcaggtgtggtgagaaaaggttgaccagaagcctctgtgcctgttcagatgactgcaaggacaagggcgactgctgcatcaactacagttctgtgtgtcaaggtgagaaaagttgggtagaagaaccatgtgagagcattaatgagccacagtgcccagcagggtttgaaacgcctcctaccctcttattttctttggatggattcagggcagaatatttacacacttggggtggacttcttcctgttattagcaaactaaaaaaatgtggaacatatactaaaaacatgagaccggtatatccaacaaaaactttccccaatcactacagcattgtcaccggattgtatccagaatctcatggcataatcgacaataaaatgtatgatcccaaaatgaatgcttccttttcacttaaaagtaaagagaaatttaatcctgagtggtacaaaggagaaccaatttgggtcacagctaagtatcaaggcctcaagtctggcacatttttctggccaggatcagatgtggaaattaacggaattttcccagacatctataaaatgtataatggttcagtaccatttgaagaaaggattttagctgttcttcagtggctacagcttcctaaagatgaaagaccacacttttacactctgtatttagaagaaccagattcttcaggtcattcatatggaccagtcagcagtgaagtcatcaaagccttgcagagggttgatggtatggttggtatgctgatggatggtctgaaagagctgaacttgcacagatgcctgaacctcatccttatttcagatcatggcatggaacaaggcagttgtaagaaatacatatatctgaataaatatttgggggatgttaaaaatattaaagttatctatggacctgcagctcgattgagaccctctgatgtcccagataaatactattcatttaactatgaaggcattgcccgaaatctttcttgccgggaaccaaaccagcacttcaaaccttacctgaaacatttcttacctaagcgtttgcactttgctaagagtgatagaattgagcccttgacattctatttggaccctcagtggcaacttgcattgaatccctcagaaaggaaatattgtggaagtggatttcatggctctgacaatgtattttcaaatatgcaagccctctttgttggctatggacctggattcaagcatggcattgaggctgacacctttgaaaacattgaagtctataacttaatgtgtgatttactgaatttgacaccggctcctaataacggaactcatggaagtcttaaccaccttctaaagaatcctgtttatacgccaaagcatcccaaagaagtgcaccccctggtacagtgccccttcacaagaaaccccagagataaccttggctgctcatgtaacccttcgattttgccgattgaggattttcaaacacagttcaatctgactgtggcagaagagaagattattaagcatgaaactttaccctatggaagacctagagttctccagaaggaaaacaccatctgtcttctttcccagcaccagtttatgagtggatacagccaagacatcttaatgcccctttggacatcctataccgtggacagaaatgacagtttctctacggaagacttctccaactgtctgtaccaggactttagaattcctcttagtcctgtccataaatgttcattttataaaaataacaccaaagtgagttacgggttcctctccccaccacaactaaataaaaattcaagtggaatatattctgaagctttgcttactacaaatatagtgccaatgtaccagagttttcaagttatatggcgctactttcatgacaccctactgcgaaagtatgctgaagaaagaaatggtgtcaatgtcgtcagtggtcctgtgtttgactttgattatgatggacgttgtgattccttagagaatctgaggcaaaaaagaagagtcatccgtaaccaagaaattttgattccaactcacttctttattgtgctaacaagctgtaaagatacatctcagacgcctttgcactgtgaaaacctagacaccttagctttcattttgcctcacaggactgataacagcgagagctgtgtgcatgggaagcatgactcctcatgggttgaagaattgttaatgttacacagagcacggatcacagatgttgagcacatcactggactcagcttctatcaacaaagaaaagagccagtttcagacattttaaagttgaaaacacatttgccaacctttagccaagaagactgatatgttttttatccccaaacaccatgaatctttttgagagaaccttatattttatatagtcctctagctacactattgcattgttcagaaactgtcgaccagagttagaacggagccctcggtgatgcggacatctcagggaaacttgcgtactcagcacagcagtggagagtgttcctgttgaatcttgcacatatttgaatgtgtaagcattgtatacattgatcaagttcgggggaataaagacagaccacacctaaaactgcctttctgcttctcttaaaggagaagtagctgtgaacattgtctggataccagatatttgaatctttcttactattggtaataaaccttgatggcattgggcaaacagtagacttatagtagggttggggtagcccatgttatgtgactatctttatgagaattttaaagtggttctggatatcttttaacttggagtttcatttcttttcattgtaatcaaaaaaaaaattaacagaagccaaaatacttctgagaccttgtttcaatctttgctgtatatcccctcaaaatccaagttattaatcttatgtgttttctttttaattttttgattggatttctttagatttaatggttcaaatgagttcaactttgagggacgatctttgaatatacttacctattataaaatcttactttgtatttgtattt

SEQ ID NO: 3630 - DNA, 403 bp, Homo Sapiens
gggggcggggtaggcggggaggccgcggcggggtcaggggggccagcgcccaccgggtacgagcgcgctggtgaggcaggcccggccgcgcccgcgcccccggcgcacggtcctcccgggagccggtttcggggacggcggcggggagtgggcgctggccagggacgagggttgaggaggtcgcggctctcatgctgggtgggagtcgggccttctgcctgggggttgcgtcagtgtccgaccccgcgatgagtggtcgggacaatttgcaactagagggtggtcctcatgggtaccctgtggggtgtcgcgcgaggtgaagggccaggccatttccgtcgggtcagcgatttccgccttcgccccgctctcgcctggcctggtcagggcctgttttggtact

SEQ ID NO: 3631 - DNA, 178 bp, Homo Sapiens
acacggagataatatgatgagggtgcgataccactggttgaccctgatatacaggatgatggtgagcaggtactggggcaggaggtgggggttctctagcacctgaatttgagtcatcctgaatagggacggttattaaattgctgtgttttcttgcttgaacatacgaaaggtttcc

SEQ ID NO: 3632 - DNA, 402 bp, Homo Sapiens
tttttttttttttttttttttacaaaagagaaaagttttattcgcaaggctgccaagtgaggaggggggagaacaactctcatgtccacctctccaaatataagtcttacagatatttatgggttagggaagtggagtggtctaaggtatggggaaaggtgactggcagtgaggaacagtgaaataacaggtcccttctgtgcaggcacaatcagggttcatggcattccataaaatacatgtacagaaaatggcagcattagcatgatctgagggtggagtttttggctctctgatgtcaaaagcccccttcttgggcacttgttcaggcccatttgaagagttagtggtctcaacaggtttgaaccggacaggagttgggtccagttcctgaaaaactac

SEQ ID NO: 3633 - DNA, 294 bp, Homo Sapiens
ttttttcctttatccagcaaatatattctttaggaaagaaaatgaaataaagacattttcttttttttctttacttttttttttttttatgagatggagtctcactctgttgcccaggctggaatggagtggcgcgatctcagctcactgcactccagcctgggggaacagagtgagacttcattgttgaaattcgtgctccactccagcaactgctttcaatcggagttccatcctccgccgcagtatgccctaacgcagcgttatcttcagagctaccaccagcttccgaaa

SEQ ID NO: 3634 - DNA, 253 bp, Homo Sapiens
tttttttttttttgtagtttgtttctttatttggagcagagacatgatcaattcacaaattcactgtgctcctttgctctttcctgcctaatgcttctgcagctacccgctcctgtccatcggggcatccacacttctacggtctgatcttcgaatggcagtttgggactctggcctgggtaacctaggaagatcacacagaccctgttcagaacccatgaagtgggtttggcttggtgagtttccatctcct

SEQ ID NO: 3635 - DNA, 595 bp, Homo Sapiens
cggggaagcgtgtggtgcggggaggtcgcccccgggcggcgaagcggccattatgcaggccttgcattgaaaggctctagttacagtggacttcttgaacgacatcatattcacaccaaaaatgtagaacatattatagatagtttacggaatgagggaattgaggttcgtctagtaaagaggagagaatatgatgaagagactgttcgatgggcagatgctgtcatagctgcaggaggtgatggcacaatgctgctggcagcgagtaaagtcttggacagacttaaaccagttataggggtaaacactgatccagaacggtctgagggtcatttatgcctgcccgttcgatatacacattcctttccagaagccttacagaagttctatcgtggtgagttcaggtggttgtggaggcagagaatcaggttataccttgaagggactggcataaaccctgtacctgtggaccttcacgagcagcagctaagcttgaatcagcacagtagagcccttaacattgaaagagctcatgatgaaaggtctgaagcttcaggaccccaacttctgccagtgagagcattaaatgaagtta

SEQ ID NO: 3636 - DNA, 462 bp, Homo Sapiens
tttttttttttttttttgaacttgaaattgcacttttattttaaaacagggaagtgtggctattacatatttcacttttacaatcaatacattgatggtttttacaagtattaaattgatgattttattatatataaatacacaaatggtccaaaacaatatctaaaatgttgcaatatttataaaatccataaaaatatttaattttcagtatgaaaatggcatactaatttgagtttgaggtaaatgaagagacagatttaggccatctaagaaggaagataaaggagaatgtcatatctatattttgggaaaagtcaaagaatgctaaagagcttgacctgttactgcattaatgacttcagacattatgcagatacatatactatatagtaataaataatacacaatgtagacagaacagaaagcagagggactggaccaatctgctcaaggaaaagg

SEQ ID NO: 3637 - DNA, 149 bp, Homo Sapiens
ggcacgaggccctgccgaggtgaggggagcgactacaactcccagagggtatggcggccgcagcagtgggcagttgagtttccggggcgacccaggtcctccggcggaagcgggagcctctgtcggccgcggaagcctggagtgggcgg

SEQ ID NO: 3638 - DNA, 387 bp, Homo Sapiens
tttccggtgagatattcctttatagcaacacaaaatggactaacacacaggactaactggaatagttacatgtggtgacgtgaagtaaggttgaagtacaaaggttcctgtagttgcagaaggaagggaggatttggaggcaaaagaacgcagtagggtggagtggtgggtataacaacccaggcgagcaatgaggctctgagctgacctaagcgcctaagtgccaagataaagatgaaccatggactttctgttgagggggaggcaggcacacagagcaaagggagggcatcgggtgagggcatagggaaagcacagtgtccatggactttctgttgatggggaggcaggcacacagagcaaagggaggcattgggtgagggcata

SEQ ID NO: 3639 - DNA, 4179 bp, Homo Sapiens
ccggacctgccagtgtctcttaggagtgaggtacctggagttcggggaccccaacctgtgacaatgacagcagacaaattggttttctttgtgaatggcagaaaggtggtggagaaaaatgcagatccagagacaacccttttggcctacctgagaagaaagttggggctgagtggaaccaagctcggctgtggagaagggggctgcggggcttgcacagtgatgctctccaagtatgatcgtctgcagaacaagatcgtccacttttctgccaatgcctgcctggcccccatctgctccttgcatcatgttgctgtgacaactgtggaaggaataggaagcaccaagacgaggctgcatcctgtgcaggagagaattgccaaaagccacggctcccagtgcgggttctgcacccctggcatcgtcatgagtatgtacacactgctccggaatcagcccgagcccaccatggaggagattgagaatgccttccaaggaaatctgtgccgctgcacaggctacagacccatcctccagggcttccggacctttgccagggatggtggatgctgtggaagagatgggaataatccaaattgctgcatgaaccagaagaaagaccactcagtcagcctctcgccatctttattcaaaccagaggagttcacgcccctggatccaacgcaggaacccatttttcccccagagttgctgaggctgaaagacactcctcggaagcagctgcgatttgaaggggagcgtgtgacgtggatacaggcctcaaccctcaaggagctgctggacctcaaggctcagcaccctgacgccaagctggtcgaggggaacacggagattggcattgagatgaagttcaagaatatgctgtttcctatgattgtttgcccagcctggatccctgagctgaattcggtagaacatggacccgacggtatctcctttggagctgcttgccccctgagcattgtggaaaaaaccctggtggatgctgttgctaagcttcctgcccaaaagacagaggtgttcagaggggtcctggagcacgtgcgctggtttgctgggaagcaagtcaagtctgtggcgtccgttggagggaacatcatcactgccagccccatctccgacctcaaccccgtgttcatggccagtggggccaagctgacacttgtgtccagaggcaccaggagaactgtccagatggaccacaccttcttccctggctacagaaagaccctgctgagcccggaggagatactgctctccatagagatcccctacagcagggagggggagtatttctcagcattcaagcaggcctcccggagagaagatgacattgccaaggtaaccagtggcatgagagttttattcaagccaggaaccacagaggtacaggagctggccctttgctatggtggaatggccaacagaaccatctcagccctcaagaccactcagaggcagctttccaagctctggaaggaggagctgctgcaggacgtgtgtgcaggactggcagaggagctgcagctgcctcccgatgcccctggtggcatggtggacttccggtgcaccctcaccctcagcttgttgttgaagttctacctgacagtccttcagaagctgggccaagagaacctggaagacaagtgtggtaaactggaccccactttcgccagtgcaactttactgtttcagaaagaccccccagccgatgtccagctcttccaagaggtgcccaagggtcagtctgaggaggacatggtgggccggcccctgccccacctggcagcggacatgcaggcctctggtgaggccgtgtactgtgacgacattcctcgctacgagaatgagctgtctctccggctggtcaccagcacccgggcccacgccaagatcaagtccatagatacatcagaagctaagaaggttccagggtttgtttgtttcatttccgctgatgatgttcctgggagtaacataactggaatttgtaatgatgagacagtctttgcgaaggataaggttacttgtgttgggcatatcattggtgctgtggttgctgacaccccggaacacacacagagagctgcccaaggggtgaaaatcacctatgaagaactaccagccattatcacaattgaggatgctataaagaacaactccttttatggacctgagctgaagatcgagaaaggggacctaaagaaggggttttccgaagcagataatgttgtgtcaggggagatatacatcggtggccaagagcacttctacctggagactcactgcaccattgctgttccaaaaggcgaggcaggggagatggagctctttgtgtctacacagaacaccatgaagacccagagctttgttgcaaaaatgttgggggttccagcaaaccggattgtggttcgagtgaagagaatgggaggaggctttggaggcaaggagacccggagcactgtggtgtccacggcagtggccctggctgcatataagaccggccgccctgtgcgatgcatgctggaccgtgatgaggacatgctgataactggtggcagacatcccttcctggccagatacaaggttggcttcatgaagactgggacagttgtggctcttgaggtggaccacttcagcaatgtggggaacacccaggatctctctcagagtattatggaacgagctttattccacatggacaactgctataaaatccccaacatccggggcactgggcggctgtgcaaaaccaaccttccctccaacacggccttccggggctttggggggccccaggggatgctcattgccgagtgctggatgagtgaagttgcagtgacctgtgggatgcctgcagaggaggtgcggagaaaaaacctgtacaaagaaggggacctgacacacttcaaccagaagcttgagggtttcaccttgcccagatgctgggaagaatgcctagcaagctctcagtatcatgctcggaagagtgaggttgacaagttcaacaaggagaattgttggaaaaagagaggattgtgcataattcccaccaagtttggaataagcttcacagttccttttctgaatcaggcaggagccctacttcatgtgtacacagatggctctgtgctgctgacccacggggggactgagatgggccaaggccttcataccaaaatggtccaggtggccagtagagctctgaaaatccccacctctaagatttatatcagcgagacaagcactaacactgtgcccaacacctctcccacggctgcctctgtcagcgctgacctcaatggacaggccgtctatgcggcttgtcagaccatcttgaaaaggctggaaccctacaagaagaagaatcccagtggctcctgggaagactgggtcacagctgcctacatggacacagtgagcttgtctgccactgggttttatagaacacccaatctgggctacagctttgagactaactcagggaaccccttccactacttcagctatggggtggcttgctctgaagtagaaatcgactgcctaacaggagatcataagaacctccgcacagatattgtcatggatgttggctccagtctaaaccctgccattgatattggacaggtggaaggggcatttgtccagggccttggcctcttcaccctagaggagctacactattcccccgaggggagcctgcacacccgtggccctagcacctacaagatcccggcatttggcagcatccccattgagttcagggtgtccctgctccgcgactgccccaacaagaaggccatctatgcatcgaaggctgttggagagccgcccctcttcctggctgcttctatcttctttgccatcaaagatgccatccgtgcagctcgagctcagcacacaggtaataacgtgaaggaactcttccgcctagacagccctgccaccccggagaagatccgcaatgcctgcgtggacaagttcaccaccctgtgtgtcactggtgtcccagaaaactgcaaaccctggtctgtgagggtctaaagagagagtcctcagcagagtcttcttgtgctgcctttgggcttccatggagcaggaggaacataccacagaacatggatctattaaagtcacagaatgacagacctgtgattt

SEQ ID NO: 3640 - DNA, 435 bp, Homo Sapiens
tttttttttttttttttccaaggaaaccagacttattttgtaactgagaatcaagagagaagcaacggtacagagaaatgatgctcccgtggaaaactacggcgcacgcttgcgggttctcagttcctctcctttcctccaatatctggctacgacgctccaagctaacatttccagttttctcctaccccctgagttggcatgacaaagaactaaaacctgccatttccccaaagccccaaaagctgacgctggaagacttgatataaacttcagagaaatcacagcagatgatgtacggatagtccttgtgcctcctactcagtctgctcagaaagttcaccggaacacccagtgccatcaccaaagacatctaaattgcaaactatggaattcactggccagctgctgccactctctctctaccatgaaagg

SEQ ID NO: 3641 - DNA, 1760 bp, Homo Sapiens
gaattccgagctttttattcctaagaggagaaaatcagtaacgggagaagcaggaggatgtccagaagaaatttcatcccttgctctcgcccctactctttctggtgttagatcgagctaccctctaaaagcagtttagagtggtaaaaaaaaaaaaaacacaccaaacgctcgcagccacaaaagggatgaaatttcttctggacatcctcctgcttctcccgttactgatcgtctgctccctagagtccttcgtgaagctttttattcctaagaggagaaaatcagtcaccggcgaaatcgtgctgattacaggagctgggcatggaattgggagactgactgcctatgaatttgctaaacttaaaagcaagctggttctctgggatataaataagcatggactggaggaaacagctgccaaatgcaagggactgggtgccaaggttcatacctttgtggtagactgcagcaaccgagaagatatttacagctctgcaaagaaggtgaaggcagaaattggagatgttagtattttagtaaataatgctggtgtagtctatacatcagatttgtttgctacacaagatcctcagattgaaaagacttttgaagttaatgtacttgcacatttctggactacaaaggcatttcttcctgcaatgacgaagaataaccatggccatattgtcactgtggcttcggcagctggacatgtctcggtccccttcttactggcttactgttcaagcaagtttgctgctgttggatttcataaaactttgacagatgaactggctgccttacaaataactggagtcaaaacaacatgtctgtgtcctaatttcgtaaacactggcttcatcaaaaatccaagtacaagtttgggacccactctggaacccgaggaagtggtaaacaggctgatgcatgggattctgactgagcagaagatgatttttattccatcttctatagcttttttaacaacattggaaaggatccttcctgagcgtttcctggcagttttaaaacgaaaaatcagtgttaagtttgatgcagttattggatataaaatgaaagcgcaataagcacctagttttctgaaaactgatttaccaggtttaggttgatgtcatctaatagtgccagaattttaatgtttgaacttctgttttttctaattatccccatttcttcaatatcatttttgaggctttggcagtcttcatttactaccacttgttctttagccaaaagctgattacatatgatataaacagagaaatacctttagaggtgactttaaggaaaatgaagaaaaagaaccaaaatgactttattaaaataatttccaagattatttgtggctcacctgaaggctttgcaaaatttgtaccataaccgtttatttaacatatatttttatttttgattgcacttaaattttgtataatttgtgtttctttttctgttctacataaaatcagaaacttcaagctctctaaataaaatgaaggactatatctagtggtatttcacaatgaatatcatgaactctcaatgggtaggtttcatcctacccattgccactctgtttcctgagagatacctcacattccaatgccaaacatttctgcacagggaagctagaggtggatacacgtgttgcaagtataaaagcatcactgggggatttaaggagaattgagagaatgtacccacaaatggcagcaataataaatggatcacacttaacg

SEQ ID NO: 3642 - DNA, 314 bp, Homo Sapiens
tttttttttttttttttgggactgagcactgcattttcattgtatttcatttcaattaacatacatttaagttgaagtagccaaatgtggtcagcagtattgtattcagagtagcactgagctgaagacccaggcaggaggtcgaaggcagggacaggaaggtcagggtttaaggtctgtgcagctatggcagagaagcgactttggcaaagcgcagagtgaggccccaggaagggaggaggtgggacactcggtctcggaatctggctccactggaagagaggtatacccagttcccagggtcaaagtgtttg

SEQ ID NO: 3643 - DNA, 490 bp, Homo Sapiens
  misc_feature (126)..(126): n is a, c, g, or t
cttgaaccggggaggtggaggttgcagtgagctgagatcacgccattgtactccagcctgggcgacagagcaagactccatttcaaaaaaaaaaaaaaaaaaaaaaatccactcatataaaaggtnagctcagctcactgggttccatttctcagtggcttctccatcctcatttgcaaacctcagagggataaggcagttgaacctgatgagcaagaattataacagcaaggaaacattaatgcttagaattctgagatccagcacaactcagtctgtgggagctcagctcgctgcccagggataggtatgacctatgtctgccttaggctgctgggagatgccattctccagtttcagaagcaggcagggcaaaggtcaagactgtggtattggggtcttttggctctgaaggatcctgggaaccacttgattttgggtttattccctccagggttttaaagaggaacaagaggtgctagctcttacc

SEQ ID NO: 3644 - DNA, 333 bp, Homo Sapiens
tttttttttttttttttttttttttatgagtaatattggtttataacatgcagctgccttttcgtccacacctacaggctaggggtttcaaagttggagtgttcatcccttgaagaacctgagttacgtcactatacccactctcaaagttgcagctctgcaggggactcccatggtgctgtacaggtgctgcaggctggcttgtgcgattgagtgtgctgaggccaggggctccaagcatgcaaagttcaatggagtagacaaactgggggcatgttttccaagtttgatccaattgttcttccacctgaagctttactcccagaaagttag

SEQ ID NO: 3645 - DNA, 635 bp, Homo Sapiens
acacggacccaggtcttttcccctcaaaaactggctgggcgcgatggctcatgcctgtaatcccagtactttgggaggccgagatgggtggatctcctgacatcagtagtttgagacaagcctggccaacatgatgaaaccctgtctctactaaaaatacaaaaattagccaggcctagtggttgtgtgcctgtaatgtcagctactcgggtggctgaggcaggagaatcacttgaacctggggggcaaaggttgcaataagctgagatcacaccacttcactccagcccgggtgacagagtgagactctgtctcctaaataaataaataaataaatagcaaatgttccaaagtaaaccagttgactgaaaggtataaattcatcttccatttgttggatgccctttaaattatgtgggaaatggaacacatgaaattttttttgagctttgtctttctattaatttccaaaagtgaaaagttcaagtttagagaaacatttatcttaccatagtacctaccttgaactttgctgcatagtatatactgtttttatttctgatcgaagcatttgcatttaattacttaaagcatttaaaaagttcaatatttctaatttgaggggcaaagacctg

SEQ ID NO: 3646 - DNA, 1802 bp, Homo Sapiens
atttttgctccctcccttggctgggcctgaggatttctccgaggaagagatgcaacgtgagtggctagtgtggagcctcagagttggccggaagaggagggaggccagtggagggagagagaggtgtccaggccacaggctcctgaaactttgcagcagtgagttgctgagcacaggtgggacttacacaggcagagcctggctcagctgcccagcccagggacacagtggctcccacacactcacccctagggctgcctgtcgacttgcagtacctgccaccagacaagcagcgagaacctgatgcagacatccgcaagatgcttgttgaagccatcatgctggtgacagccacagcaccaggtcggcagcaggtgcgggaccagggagcctacctgatccttcgagagctgcacagctgggagccggagcccgacgtgcggacggcttgtgagaagctcatccaggtgcttattggggacgagcctgaacgtggcatggaaaacctgctggaggtgcaggtgcctgaggatgtggagcagcagctgcagcagctggattgcagggagcaggagcagttggagcgggagctggccccagagccatgggtggagagggccacacccacctgaggcccctgcagccggacaccagctccagggtcccctttgccaggctttctcagaccaggccttcctgcagctgtctgcaggccccctgggtccccttgttcagagactgtgctcttctgagaagcagagctacgcttaggctccagtaaggattggaggcactttccagccctgtgcagtgttgctaccagcaagaatgaaggttgtgcagagcagtactgtgaggtaggcaccgtgactcggctgcctgtgcagaaggtggaggtggcaggcgatggccagggagccatgagaagactcttctgggcacggcgtggggactggacagaaaaccactgcaagccccaaggagccagctgaagcctcccaatccccagggcactgcagagtctgggcagaggtgggcgcataggtacaagtgctgctttgtcagcctacttccctgcagctctcagctccctgttccctgagacctggccttaaagggctgacccagccatacgtagatcctggggtctttctaggactgtgcctccctgcttgacctatgctccaggaccctgccctcaacccttgtcagctccctaagtcttcctgtttcccagtctcagattgagtgggtgctctcattggcctctctagctaggccgtctccctggtcagcttccttgagcctgggccactcctccctggccttcttacctctgccaagagcctcagatgtgcctgcagctagtccctgcccaagcttctcccccagccaccctctgcccctgtggtagagcccactataggcccaggcgccttacgtgcttctcccctggacctatgtgcatccctcacctgccagttatgtggctgccaagccctacaggctgtcatggtggctcttgccacacttcccttcctgagctgacctgacctcactgccacctcttgcattgggatcctgagggctggcccctgctcactgatgggccctcccaggcccgtcaagccctggtgaaggagcttaagcttggcttcttggcaattcacaatgcctcactccacaccctaaaactggaagcgtcccctatgggtcttcctgcttgtggcttgggtgccggcgttccggcttcaggatctctcttaactggccccaattaaagcttctgccataaaaaaaaa

SEQ ID NO: 3647 - DNA, 696 bp, Homo Sapiens
cacacacacatgctatgatgcggaaatccccttatgacttgctactttttgattttgtgatattttgtactttttagttgttcagcaactgtcttatttaatggggagattttaagtaacataactagtggctctcagttaaaatgtgaggaagaactacagctcttaaatgtagcaatggcactgttgcaaactcagtgcaaacgcctagattgctttcttcttaacctatttatttctttggtaaatttttctgatatggtcctttatagagtgtctcaaggtgcagaggtcagactaagaaatattccaaatgtcttttataagatagatgcacttatgcactaaattatcttgggatagttcccaaaagattgctgaaaaagtagattgagtattaaaacttgaaaatatatgatggctcgtgggatgtcctactatcactgaacaaactaaaggtgcactgctttgggatttaatttccacggttgcttgatcattatatcattggaacaactgatacttcactactttaataaagaattaacagagattgaactctcagaggtgggtaatttggttaaaaatacatgttcatgggtttaccactaactcctgagaaatgttaaaggttcacacgggtgtccttttctcaaagtttgtaaaaatgctcataagcaatacccgccattcata

SEQ ID NO: 3648 - DNA, 2241 bp, Homo Sapiens
atctttgctgcaaaggctgggtatcggctgtgctcagcaaagcgtcaactcgtgcaagaacttagcaggaatagttctggctaaggttaggaggctgccaccaaagtctcttttttgttcctctgcttctcccgtttgcctccttatcatgagatctttttgctaagctggcagaaagattgcatagtcagtgcttccagctctgctcccacctgatcctgcactgtcctctggtccctgaatgaatgaactctgatacccaatcttgtctcgagccttctctatgccactcatggctcctcttctgctctttccatctttttgctgagagttctgagctctgtacttcctcttggcccatctcacttcctgaaacacccctgaagagggttgcttatcttgatggaactcaaaaagccaaaaagctgcaggcagaggcgttgaggacatctgtttggggaactaagagcagcagcactttcagattcagtccatatagagctgtcctacagcattctggaaacttgaggatgtgcggtgcataaaggggctggaagtgacccacctgtgatgagccctttctaaggagaagggtttccaagagatcaccccaccagaaaagggtaggaatgagcaagttgggaattttagactgtcactgcacatggacctctgggaagacgtctggcgagagctaggcccactggccctacagacggatcttgctggctcacctgtccctgtggaggttcccctgggaaggcaagatgcccaacaacagcactgctctgtcattggccaatgttacctacatcaccatggaaattttcattggactctgcgccatagtgggcaacgtgctggtcatctgcgtggtcaagctgaaccccagcctgcagaccaccaccttctatttcattgtctctctagccctggctgacattgctgttggggtgctggtcatgcctttggccattgttgtcagcctgggcatcacaatccacttctacagctgcctttttatgacttgcctactgcttatctttacccacgcctccatcatgtccttgctggccatcgctgtggaccgatacttgcgggtcaagcttaccgtcagatacaagagggtcaccactcacagaagaatatggctggccctgggcctttgctggctggtgtcattcctggtgggattgacccccatgtttggctggaacatgaaactgacctcagagtaccacagaaatgtcaccttcctttcatgccaatttgtttccgtcatgagaatggactacatggtatacttcagcttcctcacctggattttcatccccctggttgtcatgtgcgccatctatcttgacatcttttacatcattcggaacaaactcagtctgaacttatctaactccaaagagacaggtgcattttatggacgggagttcaagacggctaagtccttgtttctggttcttttcttgtttgctctgtcatggctgcctttatctatcatcaactgcatcatctactttaatggtgaggtaccacagcttgtgctgtacatgggcatcctgctgtcccatgccaactccatgatgaaccctatcgtctatgcctataaaataaagaagttcaaggaaacctaccttttgatcctcaaagcctgtgtggtctgccatccctctgattctttggacacaagcattgagaagaattctgagtagttatccatcagagatgactctgtctcattgaccttcagattccccatcaacaaacacttgagggcctgtatgcctgggccaagggatttttacatccttgattacttccactgaggtgggagcatctccagtgctccccaattatatctcccccactccactactctcttcctccacttcatttttcctttgtcctttctctctaattcagtgttttggaggcctgacttggggacaacgtattattgatattattgtctgttttccttcttcccaatagaagaataagtcatggagcctgaagggtgcctagttgacttactgacaaaaggctctagttgggctgaacatgtgtgtggtggtgactcatttccatgccattgtggaattgagcagagaacctgctctcggaggatgcctagaagatgttgggaacagaagaaataaactgagtttaagggggacttaaactgctgaattcacctgtggatgtttttgagtaaataaaagctaatag

SEQ ID NO: 3649 - DNA, 517 bp, Homo Sapiens
taacttggaaagacttcaacggattgcactgccggggaccaaaaataagattttaattgaaatacagataagataggagcctttaatttaccttctccctaagcaacaggacttttctggctgcatctgatagatggcttttcccccttctttctttttcagcctaagctagagcaaaattatcttaccttcagatgaaatattttagggatttggggattttgtgtgcctcaggacaaaggacagtgtttgtgaaaagatcactgtcctcttttggaggcaaatttcatccttattgaaattctgatgttagaaaaagtctgccatctcattaccatcctgcataccacacattttatgtgctcttatagatgggcgcaagaatattaggggcaagggagagaaagaacacaaggagagttcccctgcaatcatgtcagatgagacgtttttcttcaccaacaaaatagtttgtataaaatgtgatgctataaaagtgaattatgttattcttact

SEQ ID NO: 3650 - DNA, 409 bp, Homo Sapiens
caagtccaaaaatatttattgagctagatgccacgagaagctacaagaaaaatctaagctgttgctcccctcaggttttcaatatcaacgtcattgagaaggtcagatgtttcacacaacacagagcaactatgagacattctgagtttgggccaaaatgagtatttctagaggcagtactttgtgaacgaaatggcctttgtgtatgtctgcttcacatttccttttgctgccaatcataatgattaaaaaaagagcaatgaagccttgaagttcatggaatctaccagccacatgtcctataaaatactaattctcttgtcttggggtgagctgtgggttgcttccaagcaaacactcagctatcttctttctggctctctgcatgaagttcacctctcccctctcc

SEQ ID NO: 3651 - DNA, 2448 bp, Homo Sapiens
acccaagatggcgaccgagttggagtacgagtctgtgctgtgtgtgaagccagacgtcagcgtctaccggattccgccccgggcctccaaccgcggttacagggcctctgactggaaattagaccagcctgattggactggtcgcctccgaatcacttcaaaagggaagactgcctatatcaaactcgaggataaagtttcaggggagctctttgctcaggcaccagtagaacaatttcctggtattgctgtggagacggtgacagattctagccgctactttgtaatccggatccaggatggtactggtgggtaaagcaggaatctgagatttccaaggaatctcaagaaatggatgctcgtcctaagttggatctgggcttcaaggaaggacaaaccatcaagttgtgtatcgggaacattacaaacaagaaaggaggtgcttctaagcccaggactgcaaggggtgggggtctgagcttactcccacccccgccaggaggcaaagtcactattcccccaccatcctcagttgccatcagcaatcatgtcaccccaccacccattccgaaatctaaccatggaggcagtgatgcagatatccttttagatttggattctcctgctcctgtcacgacaccagcaccaactccagtttctgtaagcaatgacttgtggggagacttcagcactgcctccagctctgttccaaaccaggcaccacagccatccaactgggtccagttctgaatggcattggcaggacattaaggacagacttgaggaataaaaatgaccttgagggcaccaatctgtgagggaagttaggaacccatttcctccccagaaccagaatgactggacaatctttttcatagcttctccatcacattcaagctggtttatgtcactcccctgtgttgttacttgtacagccaagaaagtatctgttatctcctgcgtggtaccaaggtaggggactagtggatcttatcatagttttggctgactatgcagggcttaaaaggccagcgtctgtttgagggggaatgacctctaacatctgtaaaatttgtctcatcttttaatttctttaacttatttcaaaatcatctcatgacccttgtgtgcctctttgtgaagccctatttagcaatttcaggggagtcaaaaaccttgcaacttccttctccactaacccaggactaaaaatggacaggctgacctcagtgtttacaaattcagaattttgataggggtagatatggagaaagacctatttcctgggtctctgctgtgtagtctccttcaggcttattgtgctcagtgaacatccagtgctgggtgcagctccatcaccctcttgtgtgtttacatgtctctttctatgataagagggttgtgttggtggcacctccactactcttttctgtttgttgagtttgaattgtgtaacatctttgatcagtgggtgtatctgtaatgaaggaggttcaagaggctgtgctttccaagtgatagtctataggagtgtttaatttcttgcagctccatctggttgctgcatttgaagcatggcattaatttgtatttgccctgttctttgacctaaagttgaagggtttagagtttttaacctgatctgtagagcagagaggttgaaagcacttaactcttgtttagtatcctcattgccttgctgcctgggtatctggcccctttccataaacatttcttttcagttcatgtagttctttaatagaaagctgctattatgtatattgtcatttgtgaaggaagttggagagtcacagctttactgtgacaggttttgcccaaggctttgatacctgtcacccagggtatcttaaaagcaagttgttctcccactactttcctttccctctgccctgccattcctattacaatgctgtgaaaaaagttctgcttcttaggtgaatgggtactttctattttgtttctaaacgagcaattttgaggatgaaatgggaagatatcattgcttcctttttgcacctattgggtatgtacactctggccgaagggagtccttatgtttagtttcaaaatatattactttcctggattctcttcttcactttttctgactttgggtccattttcttttcattgcctccttttccaggcagctctattcttgcagagccatagcaggacatgttaaaattccaatagaaaacactaaagggaaagtctgtggaatcactagtgactaaatactgggaacctattttctcaatcttcctccatgttgtgttctttgtattcttgagatgataatatattatgtatttgaattcctgaaaaatggaaaatgtttaagatatatgtatataaagtgtatgctgtattggtgcaataatggtaattaaaaatatgaaaaaagaaaaaaaaaaaaaaaaaaaa

SEQ ID NO: 3652 - DNA, 502 bp, Homo Sapiens
  misc_feature (41)..(41): n is a, c, g, or t
  misc_feature (76)..(76): n is a, c, g, or t
  misc_feature (431)..(431): n is a, c, g, or t
  misc_feature (440)..(440): n is a, c, g, or t
  misc_feature (449)..(449): n is a, c, g, or t
  misc_feature (466)..(466): n is a, c, g, or t
taactttttccataagctgattttggttcattttatcaacngtaagcacacccttgttcatagggaaaataaaccnttgggttataagcattagcctgaggacaatgaagccacttaacctaatttatgctttcgactgttctgtttccagagaggaaagcctttacaaattactctcagttctttaggggcagaaggcttgtttcaagaggtttgacagaagaaaggaatatatgaacttaatgagatgtcgacttggttcaggtctaaaaatgagggcaaaacactaaggctctagcagtgacttgttcactaaaaaagagagagtcctgtccccagacggttagtacaaagccttggatacagtttgcttgtaatatttttaataaatgtggagggagtacagtgttttctaatttcatttcaagtantatatgganttaaaaccngggggctactgacacanacacagtaggccattagtttagactcttccttagtg

SEQ ID NO: 3653 - DNA, 354 bp, Homo Sapiens
ttttaggatggaatatgcagctgatgaacattttatttataaaaaggtctgtaaaacacagagaagtgctggaataaagtgatggaacgataaggtggaaaaggcaggatacaaagttgtatatacaagataattgctctgtaaaaagaacaccggcaaattatgtgaagaagaaaagagtggaaggaagtacaacaaaacgaaataatgatagtctctggtgagactatgggtgacatttttttcttccttttctttttctcctccatctttccaagttttgcatactgaacaactcttaatttcactttttaaaggaaatagggccagacacagtggctcatgcctgtaatc

SEQ ID NO: 3654 - DNA, 415 bp, Homo Sapiens
tttttttcacctgcttattaaatgtatcccaattggttttaattgtattaagctgtaactgtaaggctgccttctcagacccttgtgtttttaataacagattttcaccttctgcaatggttttttcatacatatgagactgagcggtcaaagttttactaaagtctttatgatctttaattaatgactccaagacatcgagtttggcagatattggatgagatttgttttgctcttctttctttgtatccagccaagcctgaaaatctctagacatttgctgaaattgatgagagcttgcacaggccgactgaaggtgctggacatgattctctgctttctgttcaacatccttaaatgattttaagatgccttctagttgcctactaagttctgctttggggggggggggatt

SEQ ID NO: 3655 - DNA, 296 bp, Homo Sapiens
  misc_feature (286)..(286): n is a, c, g, or t
tttttttttaagcatttttttggttcttaaagaataatttctatttggtgtgtaatataaacagacaatacagacacagcccggttaatgctttgtgacatagccccaatttcaactgagattcagagccctaagaaggcagggcattcacatataaacagaccgttccacggcaggaggacttacctgaggaccccagaaggatggggtaacagtagcccaaaagaagaccccatttgtcacctgaaaacattcaaccagcaagttttgtcctccagagcatgcnaacaacttta

SEQ ID NO: 3656 - DNA, 5145 bp, Homo Sapiens
ggcggcgggagagctgctggctcgcccggatcccgggagctgcctggaggcgggcccggcccggggaaggtgagcggctgcgggacccagcccctcgccgggagcgggcaccatggtgctgtcggtgcctgtgatcgcgctgggcgccacgctgggcacagccaccagcatcctcgcgttgtgcggggtcacctgcctgtgtcggcacatgcaccccaagaaggggctgctgccgcgggaccaggaccccgacctggagaaggcgaagcccagcttgctcgggtctgcacaacagttcaatgttaaaaagtccacggaacctgttcagccccgtgccctcctcaagttcccagacatctatggacccaggccagctgtgacggctccagaggtcatcaactatgcagactattcactgaggtctacggaggagcccactgcacctgccagcccccaacccccgaatgacagtcgcctcaagaggcaggtcacagaggagctgttcatcctccctcagaatggtgtggtggaggatgtctgtgtcatggagacctggaacccagagaaggctgccagttggaaccaggcccccaaactccactactgcctggactatgactgtcagaaggcagaattgtttgtgactcgcctggaagctgtgaccagcaaccacgacggaggctgtgactgctacgtccaagggagtgtggccaataggaccggctctgtggaggctcagacagccctaaagaagcggcagctgcacaccacctgggaggagggcctggtgctccccctggcggaggaggagctccccacagccaccctgacgctgaccttgaggacctgcgaccgcttctcccgtcacagcgtggccggggagctccgcctgggcctggacgggacatctgtgcctctaggggctgcccagtggggcgagctgaagacttcagcgaaggagccatctgcaggagctggagaggtcctactatccatcagctacctcccggctgccaaccgcctcctggtggtgctgattaaagccaagaacctccactctaaccagtccaaggagctcctggggaaggatgtctctgtcaaggtgaccttgaagcaccaggctcggaagctgaagaagaagcagactaaacgagctaagcacaagatcaaccccgtgtggaacgagatgatcatgtttgagctgcctgacgacctgctgcaggcctccagtgtggagctggaagtgctgggccaggacgattcagggcagagctgtgcgcttggccactgcagcctgggcctgcacacctcgggctctgagcgcagccactgggaggagatgctcaaaaaccctcgccggcagattgccatgtggcaccagctgcacctgtaaccagctgcccagctgcctcccttcttggacagccctgacccgtcctctgcaacctcctttctgtgcccctttcctcattctgacacccagaagacagtgacagatgtgtttgcaaggctgggatggctctctcatcatactcttgtttcttagaaataagcaagacagagcaggaaatggaatatgcgggtcacactgaggaatgcattttgctcatctgtgttattgaaggaggtgcttattaaatacagttcctatgcctgttttataggtggggttaggccagatgcagagaaagctaaatgtgggaatcatggatgcaaagaagaatttggctttttgaaaaacaagcatttcaaaaatgatgaaggaagtgaaagtatcctggatcaactcctagagttagagattgcccaggtggaaagaaaccttagccagcgttcaatcaagctcaccatgcagggcagtcacccggcagttctcaaactttagcatgtgaagagtcaccagcagattcctgggctcgcctggagacattcctagtcggtattcctggtcgaagcccaggagccttcctttttaacaagctgatgtagagggtggagcactgtatgtggagaaattccttctacaatattccacacaggtttttggccacagtccttgatggagtcccaaaaccatggtgcagccagttccaatgctggacacctcaaccatcagggtgaaatctggggcctcagctttttaatttaattattttaattcttaatactttaatttgtgcatttcataagccccctgctcttggactgaattttgtgctttttattgaagaattttattgtttttatcttaaaatcagtttctattatccttggggagaccatccctaacaaagtacaggtgggatctcctgtgagtcattggctgggttctgattgctagatgtcacacccaccagcatcaccaaagtgactctgagatagaccggtcccttctcagcgttccagtcacttcaggaggaatttagttattgacttagtctatgacatctggctacatgtaggtagagaagaaagacaattttaaaaaggaaatcaggtcttttgcaactgtgcctccctctgtctgttttcacttgaatgggtaaataaccagcagctaggttttgaattcctaccttgttattctaaacagatgtccacattgttaattaaatctaaattatgagccttgctgagtggatacggtacttacacctgaaccaggattcctgggttctgttgttgacattgcccttcagcacctgtttggccagctgtataagataggactaatgactaggaagcctaccccaatgaatgatatactagatgaaatagtgttcaaaacctgtaggcactctctggctaaaaacaaactctgaggccaccagcagatcatctttaagctaagttactatttttcacctttttttttagacggagttttgctctttgttgcccaggctggagtgcagtggcacgatctcggctcactgcaacctccgcctcccaagttcaagcgattctcctgtctcagcctcctgggtagctgggattacaggtgcccaccaacatgcctggctaatttttgtacttttagtagagatggggtttcaccatgttggccaggctggtcttcaactccagatctcaggtgatctaccctcctcggcctcccaaagtactgggattacaggcctgagccaccgcgcccggcctatttttcactttaatttggcagctgagaatgcccaaaaagtgccagaagcatcgtggcatttccagaaccatggattctgcctttggacccctctctattaatattaaaactctgggccttcagatgtcaccctaatccactgccctaagacagaatttctggacaagatgggtaagggcttcattccttcaacaagtcaagtcatacttggcctctccctgagaatctgagcaggagccttataacctgtggtcattattttttctttctgtacagaaatagaaaagcattagaaataacttctaaccatcctctgaaaaaacagaaaaaatatcgaatccctctttcatgagaagtcttttggataattggaaaccttcatcactgaggttggccagcccctgccaagtgttgtgtaggcaaagcacttgttagtggcttcctatgaaatgttttagagatctcttcaccatactggtttcttctctttggttggtgtgggtaaaagaaaacaaaacatttcctataagctgaaagctgaccagcattctcttcttggtaacatctactactccaacctagaaaatttggattctagaccaaaaatcaggaaacatggctccttataaatctgtgcagctgccttatagtaccatcaaaggaatttcaggtgggctgggcggggccccgatcccagaattatcaactccacccatcatcatttggtcatgaagcatcctttcattcttcttcttcttttttttggggggggcggggcgggggagggatctcaaagttttagtcttccagaatccaaattaaaggttgcccctgatgggggccaggttccgccacagaacatcttagatgtcagccttgacctcacttagcagggattacagaaatgagatacattttgaaggagagttgtctgttatgttcactgtattctaagtgcctgggataaagctgtctcatgggtgctccatatatattcatatatatttgttgagtgaattaatgaattaagagtggctggcagagtaggcagaaaaagacactgcaaatggcataaaaattaaagtcctagctgagttctcaatggtaaaggcatcagatgtcttagcagtcaagctagaaattcatgacaatgagtattactatttgcctaatgacaactcattgctctccatgtaaatgtaatcaacagatgaagagaatataattgctctgcttttccactaaaactccatcttagtgaattttaaattatccagagatgtcaaactgccaaataaaaatatttcagtagtctttgcatcagcttaccttgtaccagaaacatttccaatttactatcaaattatagtaactgagcctgtgtgaagtatctcatcattttcgaaaggaacaccttgtgtgatgccagtgagcatttctaaaaagggtgtgaggtagaggtaaaaataaggtgagagaccatttcagaatgcactgttgctcaaaaaggtgatctggttctttcttcagagatttctacggggatagaaaatcgggagtctgccctcattaatctgtgactccacctcttgcatcaaatcaatatctatttgttgagcacttattgattaagaccttgcatatgtctgtccattttgatttgagatacaactttttgtgtgggttgaatgacaaatcactccaaacaaaactgggcacagagaatcagctaggagaccagttattcagggtccatttctcttggatgtaaaggagtcctgggtaaaatgtggctgtaacctaaaccaactagtccttgtgatttgtttctgccctctgtgtttcctgttgtcaaatgctaagtgtgtgttttgcagtcatgaactaaagcacaaaaagatgcatgagacattgtagtcatatgtctggtgtgacactttggagcaaaaaccttgcagtggtaaataaaaaatttccaacagggt

SEQ ID NO: 3657 - DNA, 391 bp, Homo Sapiens
tttttttttttttttttttttttttggcatataaccatttatatatttatgatttctaattttattataaaataaaagcagaaatatttcccgaagaacattcacatgagggcattacggggagacggcaagttggcggctcggggggcgcgctcagccgggagcgctgtagtcacagtcccgggaggaagagcgcggtgtggcggggcctcgccaagagagaaggaggaggggcgtatgacgaggcggcgtttaggggcttctgtggcgctgccctttctctttcacttaagttactagacgaaaagtttacacctgcagctcccactgacccacatgggcgagggaaaaggcctcaggagatggcctaggttcaaagtccctgtctttt

SEQ ID NO: 3658 - DNA, 768 bp, Homo Sapiens
  misc_feature (734)..(734): n is a, c, g, or t
  misc_feature (760)..(760): n is a, c, g, or t
gacaaagtgagaccctgtctcaaaaaaaaacaaaaaaaggaaaagaaaacaattgcaattggattgatctgtttataaggctgtattaaaattagctttagcatttataatacactggcacaaagttagaatttggatttctcttttgaacaagatttttgtatacattaataagaaatagtaaaagatttttgtttaccttttgagtaaactgcaaaaaatattagtaataagaggagagaatttccctaatgctgtttttattatgtcttttgattgtttggaaaactgaatctcccctctgtcaaagagtaaaatttttgctttttgaaatttttgaattatcagtttggctaaatgaataactattatcttacagtgacctgtaatcttattttgatcaagtgttttaaacctttgatatttgacaaactttccaaaatcaaatgtaaaattctaacttaaatgttttcgacctcaagctaacttttgggcattaaagcccttggaagtccaaatagggcccctggaagtccaaaagaaacatattaggctaatttggtatattaaaatcatacaggaagctgatcaaataaaaatgttgtttaattttctttgagttgtatttgataaatctgttattaatatgcatcccaaaattgtatcatattgcttaaatgttgatagaatcttgtatatgttatttgtaataaattgtatcctgttaattattngataccactgcattacagagattatngtttacct

SEQ ID NO: 3659 - DNA, 475 bp, Homo Sapiens
atccttaattaaattaagctccccccccccggctgccgccgtcgcgggggccgtcaccgccgccaccgctaccgaggccgagcggagccgttagcgccgcgccgccgccgcctcccgcccgccccggagcagccccgggcccgcccgcccgcatccagatttttgaaaaatacaatgtctaatggttatgaagaccacatggccgaagactgcaggggtgacatcgggagaacgaatttgatcgtcaactacctccctcagaacatgacccaggatgagttacgaagcctgttcagcagcattggtgaagttgaatctgcaaaacttattcgggataaagtaccaggacacagcttgggctatggctttgtgaactacgtgaccgcgaaggatgcagagagagcgatcaacacgctgaacggcttgaggctccagtcaaaaaccattaaggtgtcgtatgctcgcccgagctcag

SEQ ID NO: 3660 - DNA, 548 bp, Homo Sapiens
  misc_feature (392)..(392): n is a, c, g, or t
  misc_feature (481)..(481): n is a, c, g, or t
  misc_feature (502)..(502): n is a, c, g, or t
  misc_feature (520)..(520): n is a, c, g, or t
tttttttttttttttttacattcaggtttatttatttccatgctaagacacacagcggcgtcactggtgtagatggtgaaggcagtgtggggtgggtcttgctactccctgtgggacacagggagaggctgggttagtgcgttaagccgggccactgtgttcatacaggtggcggctagaaccaagatggagccgggacagcagggccactgacccctctggcctccaggcggcgtggggcacgggctgtggggaccctccgtccaggtcccctggtgtccagaatggctttctcctccagggcccaagcccttctcctgctctgtgctctgcgggcctccgcctcctacacacacctcgggggcctctgagctctgtccctggtgccctangaaactctcaagttatcctcgcctgcctggaagagcgccctggctgtgctgtgcccattccaggggcatctgcagtggcttcccctaancggtggctgtggctgtcctgngttctgagtgtgaacaancgtgtgtgtgtgtgtgtgtgtgtgtgta

SEQ ID NO: 3661 - DNA, 738 bp, Homo Sapiens
gaacctttgaaacaatacttagatctacaggtcaaacacaaaaacaacagtacacgattaaggaagtaaggtgcctccatagtgactgcgcctccctggggcacaggttgaacagttcacctacagcactgacatggcctaagcgaatgtcctgtcaatctgagagccaggtttctccctgtcacaggaagaaactacacataaggaaaggggcaggtgagacaggaacagcaggaactagacagctacagaaaccaacagggcgggtaaatgcacaagcacgtgtcatagatccacttcccagctctgtcccaggagggcccagaagcaacaagcacagccagtgcccaggtcttggttgctaaatcccagtctccagtgagggagggctccctggagaagcagctgggtgcagagctgggacaaggaaaactgaagacatcccaaaataaacaagtgcttaaataaggatagggcacaggagacaatctccaggagctcccaatggccaaagcgtggaaacagtatcagattatgactcacagaatccaacaaacagcccttgcgttcatactgatatataaagaaagaaatcgtaggtcaggcacagtggctcatgccttgtgggagggcaagcgggcggacacttgagctcgaaattgagacagctgagcactgggaaacccatcttacaaaataaaatcgtggctggggtaccgtgttgtccaatatcacgga

SEQ ID NO: 3662 - DNA, 234 bp, Homo Sapiens
ttttttttttttttttttttttttaagagatgggaagtttgtattaagttcaaacacttttggcaagaatttatacaatttcaggtaactgggcattttaggcaaagcacacaacttcatgatgtatcactgaggaggataagataaacagttctaaaagctggtacaggtgacaaattttgtgcaattttaagttttacatttttttgtacaaataggatcttgctatgcagt

SEQ ID NO: 3663 - DNA, 4369 bp, Homo Sapiens
gcggcggcgggcgggtactggcttctggggccaggggccaggggcggtgggcgccgggaccgcggagctgaggagcggggcccggccagggctggagactttgcgcccgggggcaccggggctgcgcgcggtcgcacacatccaccggcgcggcttccctcggcggcccgggctccgctcatcctgcggcgggcggcgccgctcaggggcgggaagaggaggcggtagacgcgaccacagaagatgtcgggccaaacgctcacggatcggatcgccgccgctcagtacagcgttacaggctctgctgtagcaagagcggtctgcaaagccactactcatgaagtaatgggccccaagaaaaagcacctggactatttgatccaggctaccaacgagaccaatgttaatattcctcagatggccgacactctctttgagcgggcaacaaacagtagctgggtggttgtgtttaaggctttagtgacaacacatcatctcatggtgcatggaaatgagagatttattcaatatttggcttctagaaatacactattcaatctcagcaattttttggacaaaagtggatcccatggttatgatatgtctaccttcataaggcgctatagtagatatttgaatgaaaaggctttttcttacagacagatggcctttgattttgccagggtgaagaaaggggccgatggtgtaatgaggacaatggctcccgaaaagctgctaaagagtatgccaatactacagggacaaattgatgcactgcttgaatttgatgtgcatccaaatgaactaacaaatggtgtcataaatgcagcatttatgcttcttttcaaagatcttatcaaactttttgcttgctacaatgatggtgttattaacttactcgaaaagttttttgaaatgaagaaaggacaatgtaaagatgctctagaaatttacaaacgatttctaactagaatgacacgagtgtctgaatttctcaaggttgcagagcaagttggtattgataaaggtgacattcctgacctcacacaggctcccagcagtcttatggagacgcttgaacagcatctaaatacattagaaggaaagaaacctggaaacaatgaaggatctggtgctccctctccattaagtaagtcttctccagccacaactgttacgtctcctaattctacaccagctaaaactattgacacatccccaccggttgatttatttgcaactgcatctgcggctgtcccagtcagcacttctaaaccatctagtgatctcctggacctccagccagacttttcctctggaggggcagcagcagccgcagcaccagcaccaccaccacctgctggaggagccactgcatggggagaccttttgggagaggattctttggctgcactttcctctgttccctctgaagcacagatttcagatccatttgcaccagaacctacccctcctactacaactgctgaaattgcaactgcctcagcttctgcctccactactacaactgttactgctgtcactgctgaagtggatctctttggagatgcctttgcagcttctcctggggaggcccctgcagcatccgaaggggccgccgcaccagctaccccaacccctgtagcagcagcacttgatgcatgttcaggaaatgacccctttgccccgtctgaaggtagtgcagaggctgcacctgagctggacctctttgcaatgaagccacctgagaccagtgttcctgtagttacccctacagctagcacagcccctccggttcccgcaactgctccttctcctgctcctgccgttgcagctgctgctgctgccactactgctgccaccgccgctgccaccaccactaccaccacctccgctgccaccgccaccactgctcctcctgctctagatatctttggtgatttatttgagtccactcctgaagttgctgcagcgcctaagccagatgctgctcctagcatagacctgtttagtacagatgctttctcctctccaccacaaggggcctctcctgtgcctgagagttctctcactgctgacctcttatctgtggatgcatttgcagcaccatctcctgcaaccactgcctcgccagcaaaggtggattcttcaggtgtcatagacctttttggggatgcatttggaagtagcgcttctgaaccccaacctgcatctcaggctgcttctagttcatcagcatcggcagacctactagctggatttgggggttctttcatggcgccttccccatctccagtgactccagctcagaataacctgctacagcccaattttgaggcagcttttgggacaacgccttcaacttccagcagcagctcctttgatccatcagtgtttgatggtctaggtgatcttttgatgccaaccatggcaccagctgggcagcctgcacctgtctcaatggtaccacccagtcctgcaatggcagccagcaaagcccttggaagtgatcttgattcatctcttgccagcttagtaggcaatcttggaatttctggtaccacaacaaaaaagggagatcttcagtggaatgctggagagaaaaagttgactggtggagccaactggcagcctaaagtagctccagcaacctggtcagcaggcgttccaccaagtgcacctttgcaaggagctgtacctccaaccagttcagttcctcctgttgccggggccccatcggttggacaacctggagcaggatttggaatgcctcctgctgggacaggcatgcccatgatgcctcagcagccggtcatgtttgcacagcccatgatgaggcccccctttggagctgccgctgtacctggcacgcagctttctccaagccctacacctgccagtcagagtcccaagaaacctccagcaaaggacccattagcggatcttaacatcaaggatttcttgtaaacaatttaagctgcaatatttgtgactgaataggaaaataaatgagtttggagacttcaaataagattgatgctgagtttcaaagggagccaccagtaccaaacccaatacttactcataacttctcttccaaaatgtgtaacacagccgtgaaagtgaacattaggaatatgtactaccttagctgttatccctactcttgaaattgtagtgtatttggattatttgtgtattgtacgatgtaaacaatgaatggatgttactgatgccgttagtgcttttttggacttcacctgaggacagatgatgcagctgttgtgtggcgagctatttggaaagacgtctgtgtttttgaaggtttcaatgtacatataacttttgaacaaaccccaaactcttcccataaattatcttttcttctgtatctctgttacaagcgtagtgtgataataccagataataaggaaaacactcataaatatacaaaactttttcagtgtggagtacatttttccaatcacaggaacttcaactgttgtgagaaatgtttatttttgtggcactgtatatgttaagaaattttattttaaaaaatataaaggttaacgtccataataaatacttctctttgaagctaccttatcaagaacgaaaaatcgtatgggaagaatcccctatttatcactgctatattaaaatatatatattttaattatatttgacaggttttgcatctaaattgacctatttattcattcttgattaaatgcactgaaaagtaaagggtctgtttgtgtcatgttcatgaaaatgcggttagagaggtgctattcaagtgattctgaaggcaccccaaggtatatctgtaatttaaagattactgcaaatatctttactttactgtgggtttttagtacatctgttaatttagtgtttctttgtgtgttttgtagactagtgttcttccatccttcaactgagctcaaagtaggttttgttgtaacattgtgattaggatttaaactaattcagagaattgtatcttttactgtacatactgtattctttaagttttaatttgttgtcatactgtctgtgctgatggcttggcttaagattttgatgcataaatgaggtcactgttgatcagtgttgctagtagcttggcagctcttcataaaagcatattgggttggaaaggtgtttgcctatttttcaaattatttaatagatgtatggtaccatttaaaagtggttgtatctgaatttactgtggggataacatacactgtaatggggaaaaattacctaaaaccaatttcaaaatggctttctttgtatttcagtttaaaaacccagtgcatgtacgccctctgagatgcaataaacaccttgaacaaag

SEQ ID NO: 3664 - DNA, 413 bp, Homo Sapiens
  misc_feature (348)..(348): n is a, c, g, or t
  misc_feature (387)..(387): n is a, c, g, or t
  misc_feature (392)..(392): n is a, c, g, or t
ggaactgagattttgtaatcaaatagttaacatcaggaagttaatttggctggcaaaattctagggaaacttggccagaaaactggtgttgaaggcttttgctcatataaacaagtgccattgagtttcaaatgaccagcaaatatatttagaacccttcctgttttatgtctgtacctcgtccacccctcaggtaatacctgcctctcacaggtacagctgtttcttggaaatcctccaaccaaatagcagttttcctaacttgattagcttgagctgacagactgttagaatacagttctctgggccacagctgatgaggggctttctgtactggcacacagattnttgtaacttgcaccccagttccagggtggactgggtaancccantcggagttgttggcccgtggg

SEQ ID NO: 3665 - DNA, 524 bp, Homo Sapiens
tttcattatattctgtatattctttggtatatcgttttaacagctctgccttcagctcttctgctttgggaaatgcaatctcctttaatttctttactgtgtctttcttttcaggaatgacagcagatttgtaatctcgatgttttggtagtttctcaataaagagcgtgatatacttgttatagaggatgaaggcatgttcaatgttgccttcctcagagtaaatggatgccattcggataatctcaactccagagcggaagtaccgacggggtggaatgtcttcattcacctctaccgcactacccagctgggagagagccctcacccggtcttcgggcgggaggctcacatctccatggtcagacatcaggaccaagttctcttgggagaggttcttgtgggttaagaaaggaaccacctcccaaggccaggaagcggcgccggttaccacctggttgagcaattccaaaaaggggatgcagcatggcggccgatccccttcaaagtccaaccacgctcgg

SEQ ID NO: 3666 - DNA, 632 bp, Homo Sapiens
  misc_feature (481)..(481): n is a, c, g, or t
cacgagggaatacattacaaaacaaggtttcacgatccgcaacacccgggtgcatcacatgagtgagcgggccaatgaaaacacagtggagcacaactggactttctgtaggctagcccggaagacagacgactgatctccgaccctgccacaggttcctggaaagactctccaggaaatggaagatactgatttttttttttaaatcacagtgtgagatattttttttcttttaaatagttgtatttatttgaaggcagtgaggaccagaaggaagttttgtgctttggcagactcctccatgttttgttcccttccccctgagtatgcatgtgcctgttcagagtctccagataccttttttataaaaagaagtctgaaaatcattatggtatataatctacccttaacagagcttttcttattacagtgctaaaatgatttctgataaaatggtccctaactcaactagaaggctaanaatacaagaatgaaagaataagcagagtactcatgatgcctttgagaaaaatcaaaacatcatgtagggtgacctagtttccaaaccataaataagttgtattggtatattaaaggaaaactgttccaatcatttcatataaatcaaggaa

SEQ ID NO: 3667 - DNA, 2154 bp, Homo Sapiens
acataactccccatgtctgttgataaaaaagagaccctaaggaggattaaactgttctcatcctttcgttagggaactgggaattgaagctggagtgactgcagctacttatacacctggtgcattgcatcctcacttggcccattatcacgcacctcctcgacttcatcacttacaattaggagctcttcctttaatggttcctgatatggcaggctatcctcacatccgttacatttcatcaggattggatggaacatcattcagaggtcctttcaggggcaattttgaggaactgattcatttggaagaaagattaggcaatgtcaatcgtggagcatcccaggggacaattgaaagatgtacatatccacataaatacaaaaagaggaaactgcactgcaaacaagatggggaagaagggactgaggaagacacagaggaaaaatgtactatctgtttgtctattttagaggaaggtgaagatgtgagacgtcttccatgtatgcaccttttccaccaagtgtgtgttgaccaatggttgattaccaataagaagtgccccatatgcagagtggacattgaggcccagctgccaagtgaaagttgacaccatgtttcagaactcttgccctccctctcattcccatccttcctggtactgcagtcaaccaaagatggcatgacttacctgcgcagatttggaagcattgaacttagagtgctggctctgctatatggtacaactaatgctagacctacagtttatgtatacagttgattttgatgtatttataaaagcttttttttctagatttgacatttttctgtatcattttactgtatttttgcatggttccttgtattgcatttctttgcacatattatgggcttgtgaccctaaacttgcaggcaaggttagctgctttagtaagtagaattttgtggtctttttgttttttacatagtaccaagccttgataattatgaattttttatccattactaacctttaatttaatcaatcatgtactttagtttaatgtataaagatcctctagaaaatgataatattgtgtattaagacattccttaattaggacaaaatggctgctgtatatttactatatggagttctgagttaaataccatccttaatactgggaacagaatacaacccatataaatcagatgcaggtggtagtcacatcaccagagtgatcagtataaattttcttggtgtatccttttcctttcaacacagtgcagataagagttgaatattgatatcatacatttagactgctgttctgattgcatttatctttttcctacatcatttagaattttatttccctgattcagtttttgctgctgtgaaacagctctgatgaacactaaatattaatttcaattagctagattgtacatacttgcagatttaacaaaattttagggaaattgaaaaagacatgtagaatttgttgtcttctgctaagcacgaaaagttaagatatctgcttacattgattttgtagacacattaagtcaagatttggaatttaagtcactggcaggtatctgtgcattcatagaacttataaaggtcccaggatcacttttaagggatttttattagtttaaaggtaaataaagtcagctgaatctacatgtctcttgttttatttctctctaaacttgaaaacagtaaatctgcagatactgtgaggcacaaattatactgtcaacctactgttgctatggttatatactcccacttcatacattaccaagagtcgatcactgatttaaaatttttaatttctatagttaagatttactgcataatatagaatataaagttaagttaacatactaacatttctcctttggaggaagttttaatctacttcaggatgcatattattatcaagatactttcatatacaggatagcctaattttatttgtttaaatatgcttaatatgccccagattgcaaatgcatccagtcagtaatatcactgtctgtatgtggaggacatgttcccatggatcatatgtgaagatgtcaataagcttgcattaagccacctgctttgtaagtggattgattaataaataacttatatttctaaaaaaaaaaaaaaaaaaa

SEQ ID NO: 3668 - DNA, 1666 bp, Homo Sapiens
cctctatagatgggctttagtaaagactgtcccaaagagcccctacttctctaatgccccccccttttttttttaggaaaagaacatgcagttttactcatcacttcttcatgacaccaaatccattgctaggtttagctcctggtcccttttcagcaagattcatgttatccgtcttacaactttgattttggaaagtattatgtcctaaaaatgcactgcttaacacagtggggtttttttcccccgaggtgtctttaactggggaagtaccacaaacatagagcagagactttaatttctatattctacaatagaccatcaccaaacatcttatcatgttgttgctttctgagtaataggtgctacgcaggtaggcgggctttctctaggactaggtgtacgtttattttgtaataacagggctatctacaaggcctctcagccttactcctggcttcataggacacaggtagcatccctctagtcattggcaatggctctttcagctcggaggaagcttggaggaaactcagattacttggtatcttttcctgttgctgcattgcttagtgtttccttgttgctgggtcctgctctctagtagatactaaactgctgtgaagtacaccatacacatttcactaagattccagagccaccttggtgacataacagaaacaaaatcatgttggttacaaaacaaattaaatctctattgttaacttttaagcatttcacaaacaacattgtaaatgtgcgatgttacgttttaaatcagaccacagtggtccccaaatattatgtacatatggcaatttcataggtaatcgaacctatgctccaatgttaaattatttgtgtatatgtaaaatacacaagctttaagctatgtgtgtatgaatatgaaagttaatgcaaccatatcaattgtaaaaatggattataattatttttgatggtattaggttatgtagtttcaaactctttgctgtattttgttttgcacctgccattcatttgctaatttttgtggcgtggagattcttttttattaatttgagctcacagcacaagtgtatcactgtttaatgttacccaacaagagttagtgttaagtgatgatcaagttcccatttcacctgctctacttttgctgcattaattaatgacacccggatgaggagacgtgcgctaacttcattgctcatctgggatagtgcatgagcccattgaattagagctgctcctactagataactgagcagtacacataagtgcatgttatgaaacatgaatcacatagagcagtggagttttaccaagtggtgtgtgtggtttttgttttttactatgcaaagatgggaaatgcacaaacttttcaaagactagtgtctgaagaactttacaaacaatacttgaaccctttctttaaagttatcccatcatgttttatagtcattgttgcttccattgttagtttccattttcaagtgctttgtaattttttaagtgcactacctgaaattttgtttgaaattaataaattcattcgtatcttgttggctgcctatgaatggagattcagtagtcattgtatgcatctttaagtcaaatgtgtattaaaactttcgttaacgtagaaaaaaaaaaaaaaaaaaaaaaa

SEQ ID NO: 3669 - DNA, 410 bp, Homo Sapiens
tgaatggatagcttctgtataagggataggaaagcagacttaactatttaacctgaccttgtatattaatttgtgctcttttggggagaaacacagcctattcattccaggcatgcagtgaatgctaaaaaaatatccacaaacaacatagaacagtgattttcagaagaagggatctagtgtgttctctgtgttcttaaagacagtgctttgtctgatatttttgcaaaaaagttgagtcttaagtatggtgcttggcaaaagttgctttatggaaaatggaaggcaaataagcaaaaagagatcatgccaaaatactccctgttttcagggcagattgttattccatatggggaaagaatatgaaaaagttctcccacccaagaccatgaaatttaagccttcattca

SEQ ID NO: 3670 - DNA, 271 bp, Homo Sapiens
tttttttttttttttttcacgcaagactgcagctttattaagtgttgagttcatgttgtgtttgggaggatgcaccacttggaaaagatggtcaaaataagacactgatctcagtcactcatttctctgtttccactcctcagatgcctcccttttttcataacaatacttctccataaaagtaactgtggctttaaaaacaaagtgcctagtggtcctcaaggttggggaacagtgccagtttgaaaagggaggatgctttgcttcattc

SEQ ID NO: 3671 - DNA, 1556 bp, Homo Sapiens
cggcgggcgaggggcagggcagggcggaccctggacgcgcgggcgcgcgcggaaggtagcgcggggccgcgttggcgcgcacgcgcctgagcgtgcgcccggtggggccggccgggactcgccgctcgcacgcccttgggccgcggccgggcgcccgctcttccttccgcttgcgctgtgagctgaggcggtgtatgtgcggcaataacatgtcaaccccgctgcccgccatcgtgcccgccgcccggaaggccaccgctgcggtgattttcctgcatggattgggagatactgggcacggatgggcagaagcctttgcaggtatcagaagttcacatatcaaatatatctgcccgcatgcgcctgttaggcctgttacattaaatatgaacgtggctatgccttcatggtttgatattattgggctttcaccagattcacaggaggatgaatctgggattaaacaggcagcagaaaatataaaagctttgattgatcaagaagtgaagaatggcattccttctaacagaattattttgggagggttttctcagggaggagctttatctttatatactgcccttaccacacagcagaaactggcaggtgtcactgcactcagttgctggcttccacttcgggcttcctttccacagggtcctatcggtggtgctaatagagatatttctattctccagtgccacggggattgtgaccctttggttcccctgatgtttggttctcttacggtggaaaaactaaaaacattggtgaatccagccaatgtgacctttaaaacctatgaaggtatgatgcacagttcgtgtcaacaggaaatgatggatgtcaagcaattcattgataaactcctacctccaattgattgacgtcactaagaggccttgtgtagaagtacaccagcatcattgtagtagagtgtaaaccttttcccatgcccagtcttcaaatttctaatgttttgcagtgttaaaatgttttgcaaatacatgccaataacacagatcaaataatatctcctcatgagaaatttatgatcttttaagtttctatacatgtattcttataagacgacccaggatctactatattagaatagatgaagcaggtagcttcttttttctcaaatgtaattcagcaaaataatacagtactgccaccagattttttattacatcatttgaaaattagcagtatgcttaatgaaaatttgttcaggtataaatgagcagttaagatataaacaatttatgcatgctgtgacttagtctatggatttattccaaaattgcttagtcaccatgcagtgtctgtatttttatatatgtgttcatatatacataatgattataatacataataagaatgaggtggtattacattattcctaataatagggataatgctgtttattgtcaagaaaaagtaaaatcgttctcttcaattaatggcccttttattttgggaccaggcttttattttccctgatattatttctatttaatactcttttctctcaaaaaaaaaaaaaaaaaaaa

SEQ ID NO: 3672 - DNA, 512 bp, Homo Sapiens
ttgggagaactttaacttatttaatttatagtgtttatagcccaagaagaaagaaccagaagatatatacatattttttctacaaataaagctgatcagtggcctcctttttcagggtagctgacacagttctcagcaccaccctacagctgcattttgggttcaacagacttttgtggctggcctgggaagcagatcaccatttataacattgtttctaagggagacacattccaagatccaaacaatgaatttagtaaagaatgcttggcttccaggctggatgagctggtctggctgtaccttgggggttggcctgaggctcccttcccctttggtccgcagacactgcagggttggggataggcacgtgagggggagaactctgagtagatagggaacctgcagccgggctgctcaagggcctctgtgtactgggggcgccaggaggtccagggatggaaaagggggaggtgagaaatggacaaagaaacttggccttcttggcattg

SEQ ID NO: 3673 - DNA, 444 bp, Homo Sapiens
caagttgaatgttttaagttcactgtctaataatttgagtaaatgcagaacaataaaaagacggcacgcagagatggaaaatgaaatttaaaagagaaaacgttaatcctggttaatcatcagtattgacgagaaccatcaactcaattcctcagcaatatttactgagcagctcccaggtgctcagtgctgagtcacggatgagggatatgtgatgtttccaggctggaagtggggacagatgcaaacaataagacttgtaaatgtaataaatgctgcctttgaagtttgattaaagaactgttgaaataaaggagcagttaactaggctcctattatttgagagcattgtgctaagtcctagtgaggcaagctgatataaaatcatttcttgccctcaaggccctgataatttatttgaataaacagggcctgaacctaaaa

SEQ ID NO: 3674 - DNA, 445 bp, Homo Sapiens
tttttttttttttttttttttttttcacagcagggaacatttattgagcactctttgggtaccgggcactgcaccagccaactaaggagcataatttaatttcatcctcacccaatctgggaggcagggctgttgctaatcccatggcactggaggaaactgaagctaaaggggggggatccactcccacctatgggaaaatccaaagtcacacagttacaaaaagagcccaaacctgcctggtttaaaaacagggggggagctccccattgctggaggtatccaaaagtctgccgaggggacttcaagttttcaggaagggggagaccccaagatcaatgccccgtggatagtctccatcttcaacagggtttctcaatattggtgctattgaaattgggaactggataattcattgctgtaaaaaaaattgtcctgtgcattg

SEQ ID NO: 3675 - DNA, 260 bp, Homo Sapiens
  misc_feature (245)..(245): n is a, c, g, or t
  misc_feature (257)..(257): n is a, c, g, or t
tcgctttgtgattcttgatccggaactttgtcacccaggaaccccggaagaggtagctcacgcgatagaaacgtgttcgctgcccagaagaagggaaggcgcgagtgaggaaaggaggtactgtagatgccctccaaatccttggttatggaatatttggctcatcccagtacactccggcttggctgttggagttgcttgtggcatgtgcctgggcctggagccttcgagtaatgctttgggangctccccaaaanccc

SEQ ID NO: 3676 - DNA, 2074 bp, Homo Sapiens
ggcgcgggcggtgaggacggacagtcaccgacttagtccagttccctgtcatctcaaaacaattgttgcagcaggctcctggcagtctcaagcagttcatcttcttggtgtactggtttcctattgtgattttatcatggaaaatcaattggctaaatcaactgaagaacgaacatttcagtaccaggattctcttccatcactgcctgttccttcacttgaagaatcattaaaaaaataccttgaatcagtgaaaccatttgcaaatcaagaagaatataagaaaactgaagaaatagttcaaaaatttcaaagtgggattggagaaaaattgcaccagaaattgcttgaaagagcaaaaggaaaaagaaattggctggaagagtggtggctgaatgttgcctatctggatgttcgtataccatcacaattgaatgtcaactttgcgggtcctgcagctcattttgaacactactggcctccaaaggaagggactcaattagaaagaggaagtataactctttggcataacttgaactactggcagctattaagaaaagaaaagttgcctgttcataaagttggaaatactcctctagatatgaatcaattccgaatgctattttctacctgcaaggttccaggaattactagagactccattatgaattattttaggactgagagtgaagggcgttccccaaaccacattgtagtgctgtgtcgaggccgagcttttgtctttgatgtaatacatgaaggatgtttggtcaccccgccagagcttctcagacaactgacatatatccacaagaagtgccatagtgaacctgatggacctgggattgcagcattaactagtgaggagcgaactcgatgggctaaggcacgagaatatctgattggtcttgatccagagaacttggctttgttagaaaaaattcagagtagtttactggtatattccatggaggatagcagtccacatgtaacaccagaggattattctgagattattgcagccatccttattggagatccaacagtacgctggggtgacaaatcctataacttgatttccttttctaatggagtatttggctgtaattgtgatcatgctccttttgatgcaatgattatggtgaacatcagttattatgtggatgagaaaatttttcagaatgaaggaagatggaagggttcagagaaggtacgagatataccacttccagaagagctcattttcattgtggatgagaaagttttaaatgacatcaaccaagctaaagcccagtatctcagggaggcatctgatctacagattgcggcttatgcctttacatcttttggcaaaaagctaaccaagaacaagatgcttcacccggatacgtttattcagcttgcacttcagctggcctattacagacttcatggacaccctggttgttgctatgaaacagctatgacaagacatttttatcatggccgtacagagactatgcgatcatgcacagttgaagcagtgaggtggtgccagtccatgcaggatccttctgtcaatcttcgtgagcggcagcaaaagatgttacaagcttttgcaaagcataataaaatgatgaaagattgttcagctggaaaaggatttgatcgtcaccttttaggtctcttactcatagcaaaagaggaaggtcttcctgttccagaactctttacggacccacttttttccaaaagcggaggaggtggaaattttgttctctcaacaagtctggttggctatttacgagtccagggagtggtagttcccatggtacacaatggttatggatttttctaccatatcagagatgacaggtttgttgtggcctgttcagcctggaaatcctgtcccgagactgatgcggaaaagctagttcagctgactttttgtgcttttcatgatatgatacagctgatgaactctactcatctttagagatgaatcatctattaagcacttaccaaaacatatcattaaactgagtgctgggagtgagttggtaatatgagatgggaaggaatgttgacttgctaa

SEQ ID NO: 3677 - DNA, 382 bp, Homo Sapiens
ttcactcagacacgctgcaactgtttattccagaatcagaggttggaaacccaactgtatatagactgaaagcaaaacaaatacacaactgaacacaatatatgcagttatccagcaagacaggcaacgcaacacaatatatgcagttattgacaagacaggtgcacaggcacagcacacagagtgagatgaaggcagcctagcgagcagaggctctgcagcacggagggctgggaaggccatcgctcgagttaatccaatcccagtgcttcaggacaccttgggccacgttgacatctctcttttcctgagaggagccctagggtacagctgcatggttccatggagtttcaggcgtctgccagctctgtttcactgtttg

SEQ ID NO: 3678 - DNA, 1023 bp, Homo Sapiens
ggaattatttgaaaaatgaaaacgcgtgatgcaatgtattatacaaagaaaggtcttaataccataataaaagtattgttggagggaaacagaagccagtggccacctgccctgggaaggtaggcactcagtgaaacaatgaaattcatttcaaggaactaccctaactggaaacccaggtgtaaaggttaaaaacagaagaaaaacaaacgccaaccctatccctgcaaactgaaatgtgaaagagtctgttataagtttgagacaactgcattatcaccaagatgtaaccgaaccccctcggttagtccctatgagtggtaatcagtttcatttagggccttcaaacctgaggtagttgagggtcacctgaaagacatgtctggaaaaatctactctcagaatcgaacccaagcagcattgaattgtttcctgttgctttggctcctgacaacaccacggtgtggtgctgatcttgtatattggtctggacctgggagaggaaggaatttggcagcaaacagctggctggtctgctgcgccgatggctggcaggtccgtggtggtggttttctatgctacaggtggtgcagtctctggaggacaaggatggcagagagagggcaaagccagtttgcttggaaagccaatgtaggaactggaggctttcactggcaggattaccagagatacggaaacggtggcagaaggtagcaagatgctgaccggtgatccaaagaccagggtcaaatgggagccaggagaaccctctagaagcaggagctaagagggaacatgccaagatgacaaaactgagaacaagctctgcaacaaggatcaatggaggcacagcacaacataatcagagaaccgaaagagacagtggttccatggtaagtcccggtttacactaatgagtactaaaccatatagattaacataaataacatgggaacagagtaaactaatggagtgtcagataaaagtgaatttaccacgacacaggagataaagaaaacagat

SEQ ID NO: 3679 - DNA, 412 bp, Homo Sapiens
ttttttttttttttaagacaaagctaaaacatttatatgtggtgatgattaaaacaagaacaacagactttaaggggaatgggcttctgaaggttattgtaatacaaaaagtatggaaggtcccactttgtataaaaactgtgatgtaaaatttctggtatagtttaaaaagaaaagaaagaaaaggccccagagaaaaacaaatattttcgcacagcttttttttttttttttttttgagactgaatctcactctatcacccaggctggagtgcagtggcgcgatctcagctcgctgcaacctctgcctcctgggttcaaaagcctccctagtagctgggattacaggtgcctgccaccatgcccggctaatttttgtatttttagtagagacagggtttcactatgttgg

SEQ ID NO: 3680 - DNA, 335 bp, Homo Sapiens
  misc_feature (10)..(11): n is a, c, g, or t
  misc_feature (220)..(220): n is a, c, g, or t
  misc_feature (330)..(330): n is a, c, g, or t
gctatgccanncaagaggatcgcctcgctggcctactctctcctcccgtacggcgccggaatcccagctccacttaccaggccgcggctaccccgccgtcccccccgactcccgccaccccgctctctcaggctcttcaggatccaagtccgtagccctttaaggggtctagttgccgtttgcgaggccctgggactttggtccagacagcggggatccngatggcttccgtgcggatccgagaggccaaggagggagactgtggagatatcctgaggctgattcgggtgaagactgcaggccggtaacccgggggttcagagttggcgnggcca

SEQ ID NO: 3681 - DNA, 477 bp, Homo Sapiens
ttttttttgaaaaagtcatggaggccatgggctgaagttgtgaaaaggcagaggcaggagagccagggggagtggtctgcgccagggaggctcaaggagagagcagaggcagcacctgcagctcctgtcccacttgaagttcctctggggccgcccactgcccaacccttggagggctcagagctgtgtttcattagggatgggtcccctcagagtcacatcccgggccagcaggccaactggagggagccccaggggccgtgctggacagcagactggcccgcactgtcagtgcactgggaaaggcatgggtgcctgtgggtaacacgaggggagcagcagctcctggacagtagtccccatcactttctccccacagagacgtgtaggcagggaggcaaggtgagtaacacctctttactcagcaacgtgctcctccctcgggggaccttccccagtgcccctccatgctcgaag

SEQ ID NO: 3682 - DNA, 428 bp, Homo Sapiens
gtgatactctgttacccgggcgacggaagttgcagtgaggcgagattgcaccattgcactccagcctgggcaataagagtgaaactctgtctcaaaaaaagaaaaaatgatataaagtatttatttgtgtttatattttatggatacgtgtctatgtttatagattgcctgtatggtaccaacttgacataaataaattagtactcataaattaagtaaataagcccaaacgcttttcaagttcacagggcattagtaatctgtggtaaatgaagatagtttaaaatttggggtaaaataaaatagaaacattttctgaatttaatttagatatttttctgggtctatttgttagacaggtttacactatctctgctatttttttaaggacctaaaactgattggacatagaaattgaggaaagaata

SEQ ID NO: 3683 - DNA, 481 bp, Homo Sapiens
  misc_feature (408)..(408): n is a, c, g, or t
  misc_feature (479)..(479): n is a, c, g, or t
cagacaatgaggatgaagatgaagatgtcaaagctgaaagactaaaggtcaaagagctgatgggttgccagtgttgtgaggagaaaccatccattatggtcagcaatttgcataaagaatatgatgacaagaaagattttcttctttcaagaaaagtaaagaaagtggcaactaaatacatctctttctgtgtgaaaaaaggagagatcttaggactattgggtccaaatggtgctggcaaaagcacaattattaatattctggttggtgatattgaaccaacttcaggccaggtatttttaggagattattcttcagagacaagtgaagatgatgattcactgaagtgtatgggttactgtcctcagataaaccctttgtggccagatactacattgccagggaacntttttgaatttatggggctgttcaaagggattgagtgccagtgacatgaaggagtccttagtccgattacncc

SEQ ID NO: 3684 - DNA, 4999 bp, Homo Sapiens
gaggaggattcgcagttcaacatcaaggtccctgtgcgttttattgcgacctgccggtgggaactttgtctccgagtcggagcagcatggagcggcggagcgagagcccgtgtctgcgggacagccccgaccggcggagcggcagcccggacgtcaaggggcctcccccagtgaaggtggcccggctggagcagaacggcagccccatgggagcccgcgggaggcccaacggcgccgtggccaaggccgtgggaggtttgatgattcctgtcttttgtgtcgtggagcagttggacggctctcttgaatatgacaacagagaagaacacgccgagtttgtcctggtgcggaaagatgtgctttttagccagctggtggagactgcgctcctggccctggggtattctcacagctctgcggcccaggcccaaggaataatcaagctgggaaggtggaaccctctccccctcagttatgtgacagatgcacccgacgcgacagtggccgacatgctacaagatgtctatcatgttgtgacgttgaaaatccaattacaaagttgttcaaagttggaagacttgcctgcggagcagtggaaccatgccacagtccgcaatgccttaaaggaactgctcaaagagatgaaccagagcacattagccaaagaatgccctctctcccagagtatgatttcatccattgtaaatagcacatattatgccaatgtgtcagcaaccaagtgccaggagtttgggagatggtataaaaagtacaagaagattaaagtggaaagagtggaacgagaaaacctttcagactattgtgttctgggccagcgtccaatgcatttaccaaatatgaaccagctggcatccctggggaaaaccaacgaacagtctcctcacagccaaattcaccacagtactccaatccgaaaccaagtgcccgcattacagcccatcatgagccctggtcttctttctccccagcttagtccacaacttgtaaggcaacaaatagccatggcccatctgataaaccaacagattgccgttagccggctcctggctcaccagcatcctcaagccatcaaccagcagttcctgaaccatccacccatccccagagcagttaagccagagccaaccaactcttccgtggaagtctctccagatatctaccagcaagtcagagatgagctgaagagggccagtgtgtcccaagctgtctttgcaagagtggcattcaaccgcacacagggattgttgtctgagattctgcgtaaggaagaagaccctcggacagcctctcagtctcttctagtaaacctgagggccatgcagaatttcctcaatctgccagaagtggagcgagatcgcatctaccaggatgagagggagcggagcatgaatcccaatgtgagcatggtctcctcggcctccagcagtcccagctcctcccgaacccctcaggccaaaacctcgacaccgacaacagacctccctattaaggtggacggcgccaacatcaacatcacagctgccatttatgacgagatccaacaggagatgaaaagggccaaggtgtctcaagccctgtttgccaaagtggctgcaaataaaagtcagggctggctgtgtgaactgctccgctggaaggagaacccaagcccagaaaaccgcaccctctgggaaaacctctgtaccatccgtcgcttcctgaaccttccccagcatgagagggatgtcatctatgaggaggagtcaaggcatcaccacagcgaacgcatgcaacacgtggtccagcttccccctgagccggtgcaggtacttcatagacagcagtctcagccagccaaggagagttcccctcccagagaagaagcgcctcccccacctcctccgactgaagacagttgtgccaaaaagccccggtctcgcacaaagatctccttagaagccctggggatcctccaaagctttattcatgatgtaggcctgtacccagaccaggaagccatccacactctttcggctcagctggatctccccaaacacaccatcatcaagttcttccagaaccagcggtaccacgtgaagcaccacgggaagctgaaagagcacctgggctccgcggtggacgtggctgaatataaggacgaggagctgctgaccgagtcagaggagaacgacagcgaggaaggctccgaggagatgtacaaagtggaggctgaggaggaaaatgctgacaaaagcaaggcagcacctgccgaaattgaccagagataatgtgaacttctactaggcaaagcaatacatcggtccaaggattttctgctttcatttctttaaaagttttttgttagtttgttttttgtttttgtttttgggtttttttggctttatttttgtctttttatgtctgttttgtttttcttacccttttggacatttctttgttgcacaggatacacctatagactgaataagttcagtatttccgaatcagacatcgccttggcaaagacactaaagcgttacactttatcccgtctctatgactggatcatagtcattataatcacaggagactctgccttcattatccttgcacttaacggaagttacatcaggcaagttccaggatgaaaagaactatgaaataaatgaaggaagctacaagtgtgtgtgtatatgtatatgtatatatctctatatttacatatatatattaaaattgcatgggacagagactttgcaatccgaaagaatagactgtgaaatgagttcttaaagaaaagacttgtttatgtattaaaaaaaccacttcacagtgagtcgctttggctttttgataaactgcggcctgctctcagggtggggtgactatttttgaattcctatttattttttgtgtttgtccctgatttttttttttaattctatggcttcctatctggcagcttaatgggtaatttttgaggtatgtatttaacaaaataaacgacactgccgaaaaaaaaaaaagtgaagtgaaaacaatcagggcacattaaaatgatacaagtcaaataaatcttaaagacacaatgcacacttaaaatgactcaataaaatgacttgctacgttccgttattcaatttgtcattactgtagtgaacagatgcatttctgtggaattccaaataagtaaaactgaaattcagtgcagagaaaactttgtccactagtgcaagtcttgatcaaatgacattttgacattggacatatggaattcatagtatgagccacattttgttgtgaaatttatttacctgcttgtggcttcaaatctgaaaattaataagcctgctcgtttaaaagttgtttgttgttgctgtttttttgtctttttgttttttactagaaaatagttcagtgtaatattaagttagaaaagaagttgctgcccagttaaaggggctccctctcaaataaatctccatccttccctctcccaaaagacatttctgatttctgcttcactttgggcttcctcttcttcgtacacattccatctacctaatcaaacattttcagtccctgatctctcctgtcccttttcctgggatgacagccctaacaagaactgtttttgaatcgttgtgcagctccaggcaatagagtatgtgaagcgatttcagtagaatcacttactcatcctaaaagaaaacattatcccagttacctacatcgcaattaccttatgtaaagcagaactaatgctgactggatgtttaatgggatgagcattaaagctgcaatctactatagtactccagatctctttcggcttcctatgagaaacaccagaagcattactttccacttctacttacagtaattgcaagaggagacctcacattcaggactggcctagtgaacgtaatccatgctttaaactggccattaaacagtcccacatggttggattttttttttttttttgagttgtgctttcacaaaaccttgtcaaagacctcatgcaatatcactttgaaagttattttctgtttactacacaaacattgtaatataactgttaatactatttatatatttgaaaggtataaaaggtaggagttaaaaaaaaaacctctatgtgtagatattaactcagaacttacaatatacagggagaagacatgttgcaatacaagctaattctagctgctcagtaacctctggagtttttaaagggacattttcctgtactttttcaaataatgatgtttaaaaattatcttgacataagcgtcatatacctttgcaaaaggatggttgtttgcagttagccctggccccatccttcctatttctgtagtatgctgcagctttaatcagaaagtccatggttgctgcttcctgatctccgagttactctttccaaattgtcttcttacactgttgctgaaggtcactctgtacacgtaatggaaactgattttgccaagctcttacaaggtggttcatctatcgatggcatccgcatttggtatcttttacacttcaaccaaaaatttattaggtatttttcaatgctaagtcttgccttttattttttaatttcactgccaagtttgcagtggttctaagtgaatctgtgggcattttagcctgtggtcttgccagatctttgcgaattacaatgcatatatgtctatttattcaatatctgtcatataatatctatttggaagaagaaactttctcttgtagtgcctcttgacaaagcacaatttcccgcctttttttttttttttgtgaaatgaaaaaaacaaattgtgttttattgcggtatcaacaatgtgaataaggattaacatattgtaaatgttcttttttccatgtaaatcaactatctttgttatcactaagtgataattaatttttaacttatgtgcattgttaggctgttagaattttttggttgttaaaataaacgcattcaataaatatg

SEQ ID NO: 3685 - DNA, 536 bp, Homo Sapiens
  misc_feature (514)..(514): n is a, c, g, or t
tcggggcgaacgacgagctgatccccttccaggacgaggggggcgaggagcaggagccgagcagcgatagcgcctcggcgcagcgggacctagacgaggtcaagtcgtccctggtcaacgagtcggagaaccagagcagcagctcggactcggaggcggagaggcgcccgcagcccgtccgggacactttccagaagccgcgggactatttcgccgaagtgagaaggcctcaggacagcgcgttctttaaaggacccccgtaccctgggtaccccttcctgatgatcccggacctgagcagcccgtacctctccaacggacccctgtctcccggaggagcgcgcacctacctgcagatgaaatggcccctcctcgatgtcccctccagcgccacagtcaaggacacgaggtcaccatctccagcacacttgtctaatcagcggcgccgcgctcagtacccgtatcacatgcatccgctgactccactcatcacctacagcaatgaccacctctncccagagatcgatgcaatgaca

SEQ ID NO: 3686 - DNA, 430 bp, Homo Sapiens
ttttttttttttgacggaagctcttgttacatttactacagtggaaaggtttttctcctgtatgcgttctctggtgtgtgaggaaatgggaacgctgattgaaggtcttgccacactcaggacatcgatagggcctgtctcctaagtggattcgctgatgggtaataaagtgggagctctgattgaagctcttcccacactctccacatttgtagggtctttctccggtgtggattcgttggtgcttaatgagggcggagctgtcggcgaatcctttcccacagttttcgcacttaaaaggtctctcacctgtgtgtgttctttggtgcgtgaccaaatgtgagctctgactgaagcttttgtggcagtcaggacaactgaaaggcctctctcctgaatgagtgctcatgtgagctacaaaatgagaact

SEQ ID NO: 3687 - DNA, 420 bp, Homo Sapiens
tttagcgtttaactatttttttttaacttttggaaagcaaggtgtaggaaggggatttagtttttccattaggtcgtggcatgttaagacttgtttctttttccaaaatgttcaagttgctgaagagaactatggactatgggtcaggaagtccgtcggtttcgggtcacattccgctcccgcaggcctgcgggccgccccagctggtttgttcccggcgtgttagaggtcagaggccgaggccgcactcagtgcctgggtctcgcgcagctccagggctctcaggcgacactgggcgtttcctttccggcttcggaaagttttgttttggttcaaggaaaggcgccctgttgaccaaaggcttctcagtctcctccgggtggccagcggccaagtttcctccagcccagcgagtccaga

SEQ ID NO: 3688 - DNA, 329 bp, Homo Sapiens
  misc_feature (324)..(324): n is a, c, g, or t
gcagattattttaagttgattagtaggttctgttacagtttttcttttgatcgtgcacttatagtcttcatttaattcctcatagaatcccagtcacctttatatatcatattattggaagagattcatcttcataatctccagttttttcacagtgcctcacagagttaatcatgccttttggagctagaaggactttagaacttatctagttatgctcctttatattataagtaagggaataggaatcaataagacagtttctgcccaaagtccatgttaccagttgggtgacagagctgggaaatacgtaggagatctatnaccct

SEQ ID NO: 3689 - DNA, 314 bp, Homo Sapiens
cggccgcgggggtctccatgaggtggtacctacttgtcaatggacaggcggaagccccgcctctctttccacaaccggaccccaaatctcagccccagtagtgagcccgccccatgttacgtcaccaagaggcacgaggtcacgcccccgggttagcgggcgcgaccctccacgcaacccacgcctctcccttaaagagcgcacgggcccgagcctgatccccgaccccgggccaggctgggtcgaggtcacatcgcatcaggatgtggttctcccacaccagctcgacccccgacgctattcacctcgtgccg

SEQ ID NO: 3690 - DNA, 2075 bp, Homo Sapiens
gacctgtaagagccagcggctgatgctgcaggtgggcctgatctacccagcaagccccggctgttaccacctcctgccatataccgtccgtgccatggagaagctcgtgcgagtgatagaccaggagatgcaggccatcgggggccagaaagtcaacatgcccagcctcagcccggcagagctctggcaagccaccaaccggtgggacttgatgggcaaagagctgctaagacttagagacaggcatggcaaggaatactgcttaggaccaactcacgaggaagccattacggccttaattgcctcccagaagaaactgtcctacaagcagcttcccttcctgctgtaccaagtgacaaggaagtttcgggatgagcccaggccccgctttggtcttctccgtggccgagagttttacatgaaggatatgtacacctttgactcctccccagaggctgcccagcagacctacagcctggtgtgtgatgcctactgcagcctgttcaacaagctagggctgccatttgtcaaggtccaggccgatgtgggcaccatcgggggcacagtgtctcatgagttccagctcccagtggatattggagaggaccggcttgccatctgtccccgctgcagcttctcagccaacatggagacactagacttgtcacaaatgaactgccctgcttgccagggcccattgactaaaaccaaaggcattgaggtggggcacacattttacctgggtaccaagtactcatccattttcaatgcccagtttaccaatgtctgtggcaaaccaaccctggctgaaatggggtgctatggcttgggtgtgacacggatcttggctgctgccattgaagtcctctctacagaagactgtgtccgctggcccagcctactggccccttaccaagcctgcctcatcccccctaagaagggcagtaaggagcaggcggcctccgagctcatagggcagctgtacgaccacatcacagaggcagtgcctcagcttcacggggaggtgctcctggacgacaggacccatctgaccatcggaaacagactgaaagatgccaacaagtttggctacccctttgtgataatcgctggcaagagggccctggaggaccctgcacattttgaggtttggtgtcagaacactggtgaggtggccttcctcaccaaagatggagtcatggatttactgaccccagtgcagactgtctaaatgcccccagcccacccctgcccccatttgcagccttggtgttcgttctaacactgcattttcctacacccctttcctggactgctctctccagaaacagcacagctcatggagggtgagatcatgttagggaaatcaatttttatctagtcatttgttcagattatttgtatttaaagtcattaacttgatccctttctccagactggccatgccgccatatacctttccttttgtattccattgtggaagcttctaggaggctgagaagcaggagatccaagctccagtcctgggtgttaccctgaggggggaagtcacttcccttctctcagctgagtttttcacgtgtaagatgagaatggctgatggctgagagcccaccaaccttccccaccccgtatcagtttgaccacgggccttttgctacattctatccagagagcaggcctgccagcccctctccactgagaagttgggctgagagtatggggaaaagaatcaagagacctgactgccgccaactcactagtgacttagatacatcccctccccctgctggggcctcagtttccccatctgtaacttgagaaaatagaactagatctgtaaagtctggaactagatttgtaacgtccttataggtgtcactagggggttccatgagaggtgtgtgacaggcagtctgattcctctcattctccatagtctgtttcctggaaagtcgatgtaattaactgatggcccaaaaactacctcaagagacctggccctgttaagacggcttaaccactgagatcccgttctattgatttaataaagtcaaactattggaaaaaaaaaa

SEQ ID NO: 3691 - DNA, 3826 bp, Homo Sapiens
gaattcgggtggagtcctgaaggagggcctgatgtcttcatcattctcaaattcttgtaagctctgcgtcgggtgaaaccagacaaagccgcgagcccagggatgggagcacgcgggggacggcctgccggcggggacgacagcattgcgcctgggtgcagcagtgtgcgtctcggggaagggaagatattttaaggcgtgtctgagcagacggggaggcttttccaaacccaggcagcttcgtggcgtgtgcggtttcgacccggtcacacaaagcttcagcatgtcatgtgaggacggtcgggccctgaaaggaacgctctcggaattggccgcggaaaccgatctgcccgttgtgtttgtgaaacagagaaagataggcggccatggtccaaccttgaaggcttatcaggagggcagacttcaaaagctactaaaaatgaacggccctgaagatcttcccaagtcctatgactatgaccttatcatcattggaggtggctcaggaggtctggcagctgctaaggaggcagcccaatatggcaagaaggtgatggtcctggactttgtcactcccacccctcttggaactagatggggtcttggaggaacatgtgtgaatgtgggttgcatacctaaaaaactgatgcatcaagcagctttgttaggacaagccctgcaagactctcgaaattatggatggaaagtcgaggagacagttaagcatgattgggacagaatgatagaagctgtacagaatcacattggctctttgaattggggctaccgagtagctctgcgggagaaaaaagtcgtctatgagaatgcttatgggcaatttattggtcctcacaggattaaggcaacaaataataaaggcaaagaaaaaatttattcagcagagagttttctcattgccactggtgaaagaccacgttacttgggcatccctggtgacaaagaatactgcatcagcagtgatgatcttttctccttgccttactgcccgggtaagaccctggttgttggagcatcctatgtcgctttggagtgcgctggatttcttgctggtattggtttaggcgtcactgttatggttaggtccattcttcttagaggatttgaccaggacatggccaacaaaattggtgaacacatggaagaacatggcatcaagtttataagacagttcgtaccaattaaagttgaacaaattgaagcagggacaccaggccgactcagagtagtagctcagtccaccaatagtgaggaaatcattgaaggagaatataatacggtgatgctggcaataggaagagatgcttgcacaagaaaaattggcttagaaaccgtaggggtgaagataaatgaaaagactggaaaaatacctgtcacagatgaagaacagaccaatgtgccttacatctatgccattggcgatatattggaggataaggtggagctcaccccagttgcaatccaggcaggaagattgctggctcagaggctctatgcaggttccactgtcaagtgtgactatgaaaatgttccaaccactgtatttactcctttggaatatggtgcttgtggcctttctgaggagaaagctgtggagaagtttggggaagaaaatattgaggtttaccatagttacttttggccattggaatggacgattccgtcaagagataacaacaaatgttatgcaaaaataatctgtaatactaaagacaatgaacgtgttgtgggctttcacgtactgggtccaaatgctggagaagttacacaaggctttgcagctgcgctcaaatgtggactgaccaaaaagcagctggacagcacaattggaatccaccctgtctgtgcagaggtattcacaacattgtctgtgaccaagcgctctggggcaagcatcctccaggctggctgctgaggttaagccccagtgtggatgctgttgccaagactgcaaaccactggctcgtttccgtgcccaaatccaaggcgaagttttctagagggttcttgggctcttggcacctgcgtgtcctgtgcttaccaccgcccaaggcccccttggatctcttggataggagttggtgaatagaaggcaggcagcatcacactggggtcactgacagacttgaagctgacatttggcagggcatcgaagggatgcatccatgaagtcaccagtctcaagcccatgtggtaggcggtgatggaacaactgtcaaatcagttttagcatgacctttccttgtggattttcttattctcgttgtcaagttttctagggttgaatttttttcttttttctccatggtgttaatgatattagagatgaaaaacgttagcagttgatttttgtccaaaagcaagtcatggctagagtatccatgcaaggtgtcttgttgcatggaagggatagtttggctcccttggaggctatgtaggcttgtcccgggaaagagaactgtcctgcagctgaaatggactgttctttactgacctgctcagcagtttcttctctcatatattcccaaaacaagtacatctgcgatcaactctagccaaatttgcccctgtgtgctacatgatggatgattattattttaaggtctgtttaggaagggaaatggctacttggccagccattgcctggcatttggtagtatagtatgattctcaccattatttgtcatggaggcagacatacaccagaaatgggggagaaacagtacatatctttctgtctttagtttattgtgtgctggtctaagcaagctgagatcatttgcaatggaaaacacgtaacttgtttaaaagtttttctggtagctttagctttatgctaaaaaaaataatgacattgggtatctatttctttctaagacatacattagtaggaaaataagtcttttcatgcttatgatttagctgttttgtggtaattgctttttaaaggaagttattaatatcataagttattattaatattttgaacacaggtggatgtgaaggattttcatttaaaaaccaagtggttttgactttttctgttgaatgaacaactgtgccttgtggaatttttgcagaagtgtttatgctttgttagcatttcaacttgcattattataaagaggtattaatgcctcagttatgtgtttgtcaatgtactggctgaggattctatctcagctgtcttttctaactgtgtaggttgagttttgaacacgtgcttgtggacatcagcctcctgccagcagttcttgaagcttctttttcattcctgctactctacctgtatttctcagttgcagcactgagtggtcaaaatacatttctgggccacctcagggaacccatgcatctgcctggcatttaggcagcagagcccctgaccgtcccccacaggctctgcctcacgtcctcatctcatttggctgtgtaaagaaatgggaaaagggaaaaggagagagcaattgaggcagttgaccatattcagttttatttatttatttttaatttgtttttttctccaagtccaccagtctctgaaattagaacagtaggcggtatgagataatcaggcctaatcatgttgtgattctcttttcttagtggagtggaatgttctatccccacaagaaggattatatcttatagacttgtcttgttcagattctgtatttacccattttattgaaacatatactaagttccatgtatttttgttacaaatcttctgaaaaaaaacaaaacaatgtgaaacattaaaattaaaaggcattaataataaaaaaaaaaaaaaaaacccgaattc

SEQ ID NO: 3692 - DNA, 560 bp, Homo Sapiens
  misc_feature (473)..(473): n is a, c, g, or t
  misc_feature (552)..(560): n is a, c, g, or t
atttggccctcgaggccaagaattcggcacgagggaataatttaaccaagcccctctccacttcttttatttaaaagcactgattcaattgctaggaatatttttgcagatttttctttacagtattccataggcaggtccactggaaaactgcagaaaaatgtgagctctcctggtaaatagtatacattttataagctatattttaaaggcctaagaacatggcaagtatttacttttatcttttttttaaaaacactcatgacagaaaacagtttaataatatctcattctaaaataaaacactggttgcagggtcttcaggatgcctattttgccaagaaacttcagtatacaggttagaaatatgcttttgtttttgaacaataatatactggtttgctttaaagaagggactaaatatgactttaaagagacttcaaaatattgagtattttaaaaatttaaaagtnagtcagtttataacgagtaaatacctaacacaccaagaatgtgcagtgaacctcaagcattttaaaaaaaaaccccccnnnnnnnnn

SEQ ID NO: 3693 - DNA, 408 bp, Homo Sapiens
tttttttttttttcatgttattgagtctcactgtgccaagggcttaagttgacatagcaaatatgaggaatacagcaataatattattaaaatatgtaatagaaaatggataaaaatatttaagcatagcacacatagtattacttttttgaaatttttactttagtatatatattacatatacacacagatacacatatatacttgtgtatgtgcacatatgtgtacaggatcctgatataaggtgcatttttttactggggctttttgggaaaaaattctggaagccactgtcctagaataccagagcaccaagaatacattgtgtatcagaaggagcatcaaatttggtattgaatgggatcagttcctaattcgctcctgtgtacaagagcagagtgatggcag

SEQ ID NO: 3694 - DNA, 444 bp, Homo Sapiens
tccaaaataatttcttcattctcatgtcataattaagtgtccatttgacagctcctgagaaaaaaactggttcaaagttctttatccaaagccaaaaacatgattgattaaatggatattttggagttcgttcatgtcttttctctctaaagattgtgttttgggagactagcttccacataagtacttaaaaaatggaaaaagaggatcatcgataaatgagagaagagtctatattcgttgatgggtgagtgttttgttttgttttgtttttttgaggcagagtctcgctctgtcgcccaggctggagtgcagtggtgcgatctcggctcaccacaacctccgcctcccaggttcaagtgattcttctgcctcagcttcccgagtagctgggacttcaggcacgcaccaccatgcccagctaatttttgtattttttgtaga

SEQ ID NO: 3695 - DNA, 285 bp, Homo Sapiens
tggtgggctaggcatttttgaaaacattgcctcatgtgacagcactcttataaagtatcatctccattttatgaatgagtaaactgaggcacacagtggctatgtgacatgtccggggtcaatagctagtgaatgactgagctggaatttgaactgcagcgtggtcctgagcttgcatctgtgcttctccatctgttagctgctatgagcatgtgagggttacaatgagatgccccctgtgaaacagtgaataaaagaaacagggctcccgggaacatcaattta

SEQ ID NO: 3696 - DNA, 584 bp, Homo Sapiens
  misc_feature (318)..(318): n is a, c, g, or t
aaagactgttggagcagaactactgagaaaaaccaggcatagtatcttcagttgtcatcaagttcgcaatcagataggaaaagctcaacttgaagctttctgcctgcagtgaagcagagagatagatattattcacgtaataaaaaacatgggcttcaacctgactttccacctttcctacaaattccgattactgttgctgttgactttgtgcctgacagtggttgggtgggccaccagtaactacttcgtgggtgccattcaagagattcctaaagcaaaggagttcatggctaatttccataagaccctcatttnggggaagggaaaaactctgactaatgaagcatccacgaagaaggtagaacttgacaactgcccttctgtgtctccttacctcagaggccagagcaagctcattttcaaaccagatctcactttggaagaggtacaggcagaaaatcccaaagtgtccagaggccggtatcgccctgaggaatgtaaagctttacagagggtcgccatcctcgttccccaccggaacagagagaaacacctgatgtactgctggaacatctgcatcc

SEQ ID NO: 3697 - DNA, 493 bp, Homo Sapiens
  misc_feature (448)..(448): n is a, c, g, or t
ggatcaattctggtcatttcaagaggatggaggcctcaagtgtgggaacttcccctactccctggatgtgtgtacctagcacacttccttctcccacccctttttccagttggatttgtttttctgttctcttctgtcctgtcttatactgcaactgtgtctcctaggggacagatggccttctttgtcatcttcactctccacccccagagaggagtcagagccataactcaatcactcagcccctccaaagatagttgatgtgtgataatctcataatgttgagaaccctgatgagatacattgtcttcctctccctacaatgcctctggggccaaggcacccattcttcttgctatcctccatcccccttgaggcttccactttttttttttttagacataaagctgggcatcagcaactggcctgtggtgatgcaaagctgctntgctctgtatctggctggactgatctgtctcacaagaagccatga

SEQ ID NO: 3698 - DNA, 387 bp, Homo Sapiens
gtgtataacccttttctcaggcaaaacctaacatctgaccgcaccctttttgctattaaaaaaaaaaaaaagcttctatttttttcctcctgtcgttaagataaattctccagtagacaacctctcccactaattgtgtattagcaacgtattttatcttgagagcttgtacactgggctctcaacgtggtgtggaaggtagcctgttacagtgctggattcataaaagggcctttatggtttgtgaaagaatatctgtgtgcttagggaggaaactttttgatctgcagaaaagccagaagacatctaggacatccataaaaattcatcagagagcattttactactgagctgcaaaggtaggaaaaataaattttttttggttag

SEQ ID NO: 3699 - DNA, 551 bp, Homo Sapiens
aatatcttgtcagttatttattatgtgtcattctaaagactagcacatttacagcatacatggctttgaatgacctaagaatatataaaacagtaactgtatgtttatatatatatagtaatactgcccaaaacaaataaataaaggtatcataatgcactaagcttggcaaatacaattgtgtagggaaaaaactgtattatacaatatttttacatctttaaaggaaactaaaggcaactgtgctctgtaggagctctgacagaatccacattacattcccagttttccatagatctcttttctttttaaatggggaggcatcataaggaacactggacggaacctctgttttacggtaacctgtaaaactgccttccctgcacctctgaaaacccaaagctcctacagaagagaggagctggcttgcctctgtgccacacaccctcaccctggcaggcactggaagcgtgtgatgctgccggaagcccaggaatgatgccttcagagagaatactgaaacctggaaaccttttctatagcattgccaa

SEQ ID NO: 3700 - DNA, 1568 bp, Homo Sapiens
cgtccttcctcagccgcgggtgatcgtagctcggaaatggcgggatttggtgctatggagaaatttttggtagaatataagagtgcagtggagaagaaactggcagagtacaaatgtaacaccaacacagcaattgaactaaaattagttcgttttcctgaagatcttgaaaatgacattagaactttctttcctgagtatacccatcaactctttggggatgatgaaactgcttttggttacaagggtctaaagatcctgttatactatattgctggtagcctgtcaacaatgttccgtgttgaatatgcatctaaagttgatgagaactttgactgtgtagaggcagatgatgttgagggcaaaattagacaaatcattccacctggattttgcacaaacacgaatgatttcctttctttactggaaaaggaagttgatttcaagccattcggaaccttacttcatacctactcagttctcagtccaacaggaggagaaaactttacctttcagatatataaggctgacatgacatgtagaggctttcgagaatatcatgaaaggcttcagacctttttgatgtggtttattgaaactgctagctttattgacgtggatgatgaaagatggcactactttctagtatttgagaagtataataaggatggagctacgctctttgcgaccgtaggctacatgacagtctataattactatgtgtacccagacaaaacccggccacgtgtaagtcagatgctgattttgactccatttcaaggtcaaggccatggtgctcaacttcttgaaacagttcatagatactacactgaatttcctacagttcttgatattacagcggaagatccatccaaaagctatgtgaaattacgagactttgtgcttgtgaagctttgtcaagatttgccctgtttttcccgggaaaaattaatgcaaggattcaatgaagatatggcgatagaggcacaacagaagttcaaaataaataagcaacacgctagaagggtttatgaaattcttcgactactggtaactgacatgagtgatgccgaacaatacagaagctacagactggatattaaaagaagactaattagcccatataagaaaaagcagagagatcttgctaagatgagaaaatgtctcagaccagaagaactgacaaaccagatgaaccaaatagaaataagcatgcaacatgaacagctggaagagagttttcaggaactagtggaagattaccggcgtgttattgaacgacttgctcaagagtaaagattatactgctctgtacaggaagcttgcaaattttctgtacaatgtgctgtgaaaaatctgatgactttaattttaaaatcttgtgacattttgcttatactaaaagttatctatctttagttgaatattttcttttggagagattgtatattttaaaatactgtttagagtttatgagcatatattgcatttaaagaaagataaagcttctgaaatactactgcaattgcttcccttcttaaacagtataataaatgcttagttgtgat

SEQ ID NO: 3701 - DNA, 387 bp, Homo Sapiens
tttttttttttttttttttttttttttttttttttttttttggaaggaggagggtccccctcacaaatttatttctcggggggggggaaaaaggggggccctctctcctttccaggggggggggagtaggtctcaaaaaaaaaatccactctgaccctccaacctccccaagcctttgagtcccatcctctgccacccaaagaggcaggcctggcatttaaccctcactttgggtaggccactttttggtctgggttgtagctcaccaaccaaccagtcaaaccccagcaggggtagcacgaggtccaaaacctttgcttagggggcccgtatcaataaacccaacctgaaccaattttgggttcctttccccattatccctactgg

SEQ ID NO: 3702 - DNA, 480 bp, Homo Sapiens
ctgctttatatttaagtgtatgtttattatacagtaaaactatattttccttctaattattttttggcttttattgcttttattctaatgatgatatttttgttgagataataattatttatctccattttcttagcttctattatacagtattatcttttttctatttttcttagtttctataacacacaatattttcttttttctatttttctgtttagctacttaaatacatctgagattggggtatgatatgtggtgagaatattaatttatataataaatgacattggaaaccttagctagcttcttgaaaaatattggccattccttattctactaatttgtggtattctcttaatttatattaatttatttctataactatctcatcataaaatgtgcagaataacaagtaacaatttagaatgccaatttgtgcagatgaacttcggttataatgaaacacagataactcac

SEQ ID NO: 3703 - DNA, 413 bp, Homo Sapiens
  misc_feature (326)..(326): n is a, c, g, or t
  misc_feature (332)..(332): n is a, c, g, or t
  misc_feature (372)..(372): n is a, c, g, or t
  misc_feature (410)..(410): n is a, c, g, or t
ttgtattgtactaagaatgtaatcaatgtctactttagttgtaaacatttctgatgtcaaaactttattcattactgttgattttaagaatacgaaatcactgcctaaatattaccaaaagccactgtctctacccgaacttcccagtttgggaaagaatcgttagataaaacaaaggctctgcctttctgataccaaactccacagatactttctcacatcttttaaaacattttgcaataacatattgtttatagggaagtttacagggtatgcaatgattaaaacttttaaggtgaattgatagttggcaaaggaagggatantatttnagggtcgtgagtaggcaggacatcttaagtttctgttatntctgggctctctgtttatttttggaggcaagtttcccntta

SEQ ID NO: 3704 - DNA, 393 bp, Homo Sapiens
  misc_feature (359)..(359): n is a, c, g, or t
  misc_feature (374)..(374): n is a, c, g, or t
aataaaattatatatgtccttgggaaatattatgacagttgactttaagatcaaaaggaaaggaagacctgaaagtcatttgaacattttaggaaaagaatattggagagaaaaaggtattaaatatatagaaataggtttttaacctaacaaggtctgcctcttatgacgagaatgcaacagcttggtaaatcataaaagaaacatttaagctaatagggattttcgtactgtctctatagctgtagctttaaaattcaacgtatataattgggcatgggaaacttaatttgcagtcttttcaagcctttagggatagtgttgatgtgtaaccaaacaacctcaaatgtggaatgccntggatttatttttangggggaccttaggctacag

SEQ ID NO: 3705 - DNA, 4193 bp, Homo Sapiens
agcagcgctcatggcgaagaggcttaaggccacaaaaccgtgggacagcaggaggaagagaagccaggtatctccactccagctgccctgcctcagactcctcagtttcgcacgtgaggatcgtcttgcaggcactgactggagatggaatcctaaagcataggtgaagcggaaatcctccttcagggagagcccactgaggaagccagcggctagcacgaggcaggacaggatacctccctcttcgcccacggcggcctctctgtcatagtagccaccgttctgccactcatgcagctttctaagacacctctcggttccccagcgctttcagtggggcggccggccactcccgagggttgcaagaggaggcccggggtgctgagccagcctcgctgcccccgcgtagaaagccggcccgccggcgagagccagcctaaggcgcggacaaccaacgaggtgtcaggctcggcaggggattgcttctgtctggggcccggccgaggttgcgttcgtgcctcgcgcgcacacgctccgcgttcactcagccaatccggtgctactcgcgcgcccaggagcgatccgcggtcctactcaggctgggccggctccttcccgctcccaatactcagcacccgagctctcactcctcccctcactctccacgagttccacgcctaggggtgtagctccgcccttgtccccgagtccgcccccgcaacctccagagcgtgtgctatcctttcctctcagtcctgccatctagctgccttgggtctcgcgctccgcagagcgttccgacactctccggcctcgttctgccgcctccgcgcgctctccccgtgcggccaccgcgccccccaagcttgcctccttcttgccggacttggggccgcgcgccctgactccttcccctcccgcggacccgcgcactcccggcgcggcctctcccccacgcaggccaccgtgcactctgtggcctccccctccttccccgctctcctcgcgcttctctggctccctagctgtcgcgctctcctcggcgagcgcgctcccggcccgcgcgctccgggctccggtttctcccggctcctgtcagtgcggtgactgcgctgggaaacatggcgaccgagggaatgatccttactaaccacgaccatcaaatccgtgtcggagtccttacagtgagtgatagttgcttcaggaatcttgcagaagaccgcagtgggataaatctcaaagatctcgtacaagatccttctttgttgggtgggactatatcagcatacaagatagtaccagatgaaatagaagaaatcaaggaaaccctgatagattggtgtgatgaaaaggaacttaatttgatattaacaactggaggaacaggatttgcaccacgagatgtcactccagaggccacaaaagaagtaatagaacgggaagcaccagggatggccctggcaatgctgatgggatcacttaatgttacacctctgggcatgctctctaggcctgtatgtggaatcagagggaaaacgctcataattaacctgccaggtagcaagaaaggatctcaggaatgctttcaattcatactgccagctctacctcatgccattgaccttttacgtgatgccattgtaaaagtaaaggaggtgcatgatgaacttgaagatttgccttccccacctccccctctttcccctcctcctactaccagcccccataaacagacagaagacaaaggagttcaatgtgaggaagaggaagaagagaagaaagacagtggtgttgcttcaacagaagatagttcctcatcacatataactgcagcagccattgctgccaagattccagactccatcatttctcgtggtgttcaggtgctcccacgagacacagcctccctcagcactactccttcagaatcgcctcgtgctcaggctacatctcgcctctctacagcttcctgcccaacaccaaaagtccagtccaggtgcagcagcaaggagaacattctcagagccagtcacagtgctgtcgatatcaccaaggtggctagaagacatcgcatgtctccttttcctctgacatctatggacaaagcctttatcacagtcctggagatgactccggtgcttgggacagaaatcatcaattaccgagatggaatggggcgagtccttgctcaagatgtatatgcaaaagacaatttaccccccttcccagcatcagtaaaagatggctatgctgtccgagctgctgatggcccaggagatcgtttcatcattggggaatcccaagctggtgaacagccaactcagacagtaatgccaggacaagtcatgcgggttacaacaggtgctccaataccctgcggtgctgatgcagtagtacaagtggaagataccgaacttatcagggaatcagatgatggcactgaagaacttgaagtgcgaattctggtgcaagctcggccaggccaagatatcagacccatcggccatgacattaaaagaggggaatgtgttttggccaaaggaacccacatgggcccctcagagattggtcttctggcaactgtaggtgtcacagaggttgaagttaataagtttccagtggttgcagtcatgtcaacagggaatgagctgctaaatcctgaagatgacctcttaccagggaagattcgagacagcaatcgttcaactcttctagcaacaattcaggaacatggttaccccacgatcaacttgggtattgtaggagacaacccagatgacttactcaatgccttgaatgagggtatcagtcgtgctgatgtcatcatcacatcagggggtgtatccatgggggaaaaggactatctcaagcaggtgctggacattgatcttcatgctcagatccattttggcagggtttttatgaaaccaggcttgccaacaacatttgcaactttggatattgatggtgtaagaaaaataatctttgcactacctgggaatcctgtatcggctgtggtcacctgcaatctctttgttgtgcctgcactgaggaaaatgcagggcatcttggatcctcggccaaccatcatcaaagcaaggttatcatgtgatgtaaaacttgatcctcgtccagaataccatcggtgtatactaacttggcatcaccaagaaccactaccttgggcacagagtacaggtaatcaaatgagcagccgtctgatgagcatgcgcagtgccaatggattgttgatgctacctccaaagacagaacagtacgtggagctccacaaaggcgaggtggtggatgtcatggtcattggacggctatgatggtcaccagcaggagaaagctttgatgcatgtccacatatcattgactgtatcctgtaatatgcaacggcacagctagttttcccgatttggataaaagttgatctgtatagtcaacatcttgaactatatttcaaatgaatttaaatatcttttaaagaaaaaaacacctaaaaataaatcttaacagaaaattctgttctgattatatcaaggcaaatttttcctttcttgcaaattgctttgtgtgttcaatgctaggtctgatagcgatagcttttagtagacagcggtaggtgcctgcagaacttgtgtttttctcatctttaaaatacaactacttatgctcttaaatcaaggctgtctgcttatttatactagcgtaggcaacacttggatttcccttcttagtatgcttcataactgctttacagagagcttttgcttgttctttctcatgtatctcgtgtttatgtgcacagtgccaaaagaagactgactgggtggaggctctgccttgcctcaagaaccatcccctgcagagcatccagggaggtttctcgccccaatagcctcacggcacagtactcttgggcagtaactggacaccttttatttgaagaaacaaactgaagaaaaaatgcttccttaagtgctgacagcctttttaaccaatacatttaaaattgtacagaacaaaaaaataaaatcaaagactgatcttgtacagatattagtgttaccagcattcatgtggaaatcaagagcaaagacaaaataatgttaaacaattctgtaccataacattttctgtaatgatactgaaacttaatgaataaaaaaattccttgatcattattt

SEQ ID NO: 3706 - DNA, 341 bp, Homo Sapiens
cagggaagtgagaacactttaatggatctgaggtctgtccatctcttctctctcctcttcctcatttctggaacgcagtgtccagcactcagggctgacacagggatgggctggggatgaccctaggccacatgcgcaggataaaaggggccgtgcaaaatcctgttctggccaccagatcactcctaagaaagttgggtgggggctgtggaagatgcttccttctgaagaggtaagggcaagcccccactgtggcccaggtcccaggtcccttccttgggagccagcactcagagagaagctaagtgctggtacccccatttctaacttgggtgcaggca

SEQ ID NO: 3707 - DNA, 416 bp, Homo Sapiens
ttttttttttttttttttttttttttttttttcagattttgcagcacttttaatacacaaagcaaaaggtaataggctggatgggtgaccaaccttcattcacatacagagcccaagtatagatacagactaattgggaaataagttagagtttgcagggccttagggctgagagccagaaacactgtccttttggcagccatggaagcgaggatttccttttctggtttcagtgcatgtacgccttcggctgctccatagcctggtgtgcctgcagcacggccactgcctcggtctatcttggcatggagggattctggagactccagcatgagcacaagcccggagttgtcaatctcccaacagcatgccggtgattttgccaccaactgggtttggcaaccatggaaaagggg

SEQ ID NO: 3708 - DNA, 1667 bp, Homo Sapiens
tggcacgagggttgttttgagtgggtttcttgttccttttttcatttaaaaccttctttgttgactggctccaggcttgtttgcctaaattcttaggtagtttacacaagttctagaatcttttagaactttaactccattggaagcaaacctaactaatcggagtttgagatcctggttggtttcaataggtattctggaattctggcagaacacctaaagatttttttttttttagaaggttttagatacattatcttacacaaactgtgacctaatggcaataattacctcaaatgtgggcattcatcctggttttagccttttttgaaatcatgtagccagcttgatcttggaatttaaagactatgaattctctgtgggctgaaaataatgattacttcatacccccggtcatcgttgcttaagtgaattctgaaaatagctcatctttacaacaaaaattaaaccaaggaagagattattctttgtgtgttgtactcaaatgcgatgttcaaatgcacatgttaagtatatatgtttttagctactgtaaaatgctgttagccttctaagctatcaaaacagtcacattttaaatgagtaaactaaacaattgactgtggatacttaagcatatttctggctacgttttatagttaaagtgttttatagtttacatttagactggtactttttaaagaaaagttctgtttataactgacatccgcaaaccccagtgaatgcctcttagttggaggttgtgtctcccccaaggcaagtgtgttgtcccagactcttctgtagtccagcatgcgcacttccctctggattattactttccacgtgaactcaagagaacatgaaaggcaatccagatggagggaaaaggtgtgagtccgcagcccgggccagatgcgaaggtctcatgcgtgtcgtctaaacacttgtcttcaaggccttctctctgacatcttggaagagtcattgagaacagataacctggttcattgatttttgtcttgatttgaatatttaacttattaatagatccactgatttccaggcaccaggcagtagaagagactgggattcaggtgaccatgaaggcacagctgctacttctgggccgggggtgatattttgatcagcgttttgtaggggaggaccatatacccctattcccatggtcgctggctgggttttccatatatctgctgtcatttattcgttttccccttaaaagcaaaatcaatgtaaaaggctatgtttacgttttactcattgtccagcttagactcaaagtctagttcggtgggagggggaccttagcatcctctcagagatggtcagggctgagcaggaggaggcagagacagaggggcagctcagcctggtccattgagacccactctaaacagacatcatatttggaacaagaagatgcttcgagacaggaatgggccccactgtcatgcagaaacagactgggggaatggcagtttccctgagtcttggtttcttttatgttttctcttgtgccaccaccaaactgcagaggacctgctgtgacctaaagggcattcctttagcagataagaccttgaaaactgcaaaacacctgggaccagggagcttttaaaaaatacaaaaaaaaaaaaaaaaaa

SEQ ID NO: 3709 - DNA, 386 bp, Homo Sapiens
tggcacctcacatattatactcttaaaaaaaaacactaatttgtgaattaccaccacaaggcaatggcagtcctacatttaagaatagagctatgcaaactctgtgtaaaaactatgaggaaaacttatattagaacttttgagatatactaaaatactgattatcttaatcacattttccccagagataaacattgagagaaccaaagccaaagtgtcatttaagagagatatatatgaaaaagtaacattaatatatagaactttaccattaccagccgtagttgatatgaaaatattaggttcagaattaccctcctttaaaaaataagagactgtgtggtttcttttaatttctatgaataaaagaaatttttaaaaacttt

SEQ ID NO: 3710 - DNA, 431 bp, Homo Sapiens
ttttttttttttttttttcaaaatatattttatttctttcttacatgtattttgcaaaatttccaaggtaaacattagctccacatacagaaataaaagagttctttaagaactagcattgaattcatcacaagaatcatcaaattatgataatggaaaacaaacttgcctatgaccaaagctactgagctgaagtgaagagctgtctttacaaagatccctctcattaagcccactgccctgcagctgactcaagccatcatcatgtatgtacgtgtataaaaaaggacactggccgggcatggtggctcgcgcctgtaatcccagcactttgggaggctgaggcgggcgtatcacgaggtcaggagtttgagaccagcctggccaacgtggagaaacccccgtgtctactaataatacaaaaactagct

SEQ ID NO: 3711 - DNA, 293 bp, Homo Sapiens
ttttttttttttttttttttagctataaaaatataaaagtttatttttcttagtggttctatccatgcagtcattcagggattcaggttccttttcatttcttgctccaccttccccttgggtatgaccaaagctggatcataggcatgtgttatgttccagctcataggcaaggaaaggatgtgggggagcccccacccagaccccgtgttggcatatgtcacttctgaccacattctgttgtcaagaactcagtccatgctgcacctggatgcaagggagctgagatggtg

SEQ ID NO: 3712 - DNA, 471 bp, Homo Sapiens
tttttttttttttttttaccatttagcaacgatttttatttaaaaagataccttcccctgcctcactccctatcctaaaataaattatagatggattaaaaatttttaatgtttaaaaaaatgctagattatatttagtaccttgagattagaaggtccaacataaggaaaaagactgataaatttgactatacaaatttaaaatttttgtgtggcaaaatataatacaaacaagattgaaaaattatgaactcgaaaaattgtttacaaaacatatgacaggaattaaaatgactacaacataaagagctttttcaaatcaaagacaaataggccaagtactgagaaaaagacaactcacaaagacagaattaacaactggccaatcaacaagcaaaattatcagagagacacagacaaaacattgaaacatccttcttcacataccagattaatcaagattaacaatac

SEQ ID NO: 3713 - DNA, 388 bp, Homo Sapiens
tttttttttttatcttttggggggaaatattttgtttactgaaactgcgaggaaggtagactttaaaatgcaggacaaagactgaacatactgatatactgattctttgaagggaagtttagaactcattgtttctaacattattcaggcttaaaacagtttccaatccagtgggaaaagtcactccatatattccgtgaagtcaaccagttccatcaaggagaaagtcagggccgctgggagcgcgtggaccgtgggctccggggcggcgcctgcccgggcaccccggccccgtccacgccccgcaagaggagctcgctggccccgccacgcgggaaggggtcgccccggggtcttgggcgggagggccgtgcgggctgcggaaaca

SEQ ID NO: 3714 - DNA, 434 bp, Homo Sapiens
tttttttatcccctttgcaatgcttttattagtactccaactttaatgtacattagaatcacctgtgatacttgttaagccattgaagatgcccagatcccacccttagaaaggtccagaaacaatgctgagaaaaattggctgaattttttaaattatacttgactgctgtattttctctctgttgtaaaactctgcagcatttgaagacagaagaaaaagagaaattcataaaacaattcaatcatgtaaaatatttgtcatacagaacaaaaactactttaaaataatggtgttttgacagtttattttgaaggtcattttaaaaacaaagttaaagacaatctgagaaaaaaattgcacagaatacactcattaaataggtatggtttatggtgattaaatcaaaataagggaaatatgttatcttctgc

SEQ ID NO: 3715 - DNA, 680 bp, Homo Sapiens
caggctagtacgaggcctggtggtatggagctgctgtacgcgcgcgcctaggtcggctcctcaacgtggagcgatgggaggccttcagaagaagaagtatgaacgaggctcggccaccaactacatcacccggaacaaagcccggaagaagctccagctgagcttggctgactttaggcggctgtgcattctgaagggcatttatccccatgaacccaaacacaagaagaaggttaacaagggttctacagcagcccgaacgttttaccttatcaaagacatcaggtttctcctccacgaacccattgtcaacaagttccgtgaatacaaggtgttcgtccggaagctccggaaggcttatgggaagagcgagtggaacactgtagagcgtttaaaggacaataagcccaactacaaactcgaccacatcatcaaggaacggtatcccacgttcatcgatgccctgcgggacctggacgatgccctctccatgtgcttcctgttttccaccttcccgcggactggcaagtgccacgtgcagaccattcagctgtgccgccggctcactgtggagttcatgcactacattatcgctgcccgtgccctgcgcaaggtcttcctgtccatcaaaggcatttactaccaggccgaggtactggggcagccatcgtgtggatcac

SEQ ID NO: 3716 - DNA, 2900 bp, Homo Sapiens
gagagtgacccagtcagcgttggttcccgtcttggccatggcctcgttcgtgacagaagttttggcacactccgggaggctggaaaaggaggatctggggacccggatcagccgcctgacccggcgggtggaggagatcaagggtgaggtgtgcaatatgattagcaagaagtacagtgaattcctgcctagcatgcagagcgcgcagggcctgattacccaggtggataagctatctgaagacattgacctgctgaaatccaggatagagagtgaggtccgccgggatcttcacgtatcaaccggtgaatttacagacttaaagcagcagttggaaagagactcagttgtcctaagtttgcttaaacagttgcaggagttttccactgctattgaagaatataattgtgcattaacagagaagaagtatgtcactggtgctcagcgtctggaagaggcacagaaatgcttgaagttattaaaatccagaaaatgctttgatttaaaaatattgaaatctctcagcatggagctcacaatacagaaacagaacatactttatcaccttggagaagagtggcagaagctgattgtatggaagttcccaccatcaaaagataccagcagtttggaatcttacctacaaactgaacttcatttatacactgaacaatcgcacaaagaggagaagacccctatgccacccatcagttctgtcctcttggcattttctgttcttggagaactacacagcaagcttaaatcatttggtcagatgctgctgaagtatatccttaggccgctggcatcttgcccatcccttcatgctgtgatagaaagccagcctaacatagttattattcgttttgaatctataatgactaacttggaatatccatcaccatctgaagtttttacaaagatcagactggtactagaagtgctccagaaacagcttctagatttgccacttgacactgacctggaaaatgaaaaaacatctactgtcccattggctgagatgcttggagacatgatctgggaggacttgtctgagtgcctcatcaaaaactgtttggtttattcgattccaacaaatagcagcaaattacagcaatatgaagagatcatacagtccactgaagaatttgaaaatgccctaaaggaaatgagatttttaaaaggagatactacagatttgctgaaatacgctcgtaacatcaattctcattttgcaaacaaaaagtgccaggatgtgattgtggcagccagaaatctaatgacctcagaaattcataacactgtgaagattattcctgattctaagataaatgtgccagagttacccactcctgatgaggataacaaactggaagtacagaaagtatccaatactcagtaccacgaagtgatgaatttagagcctgaaaatacattggaccaacattccttttccttgcccacatgccgtatcagtgagtctgtgaagaaattaatggaactcgcctatcagactttactagaggcaacaaccagtagtgatcaatgtgctgttcaacttttctactcagtgaggaatatcttccatttgttccatgatgttgtaccaacatatcacaaggagaaccttcaaaaacttccccagttggctgctattcatcacaacaactgtatgtacattgctcaccacttgctgaccctcgggcatcagttcagattgcgtcttgcccccattctttgtgatggcactgctacttttgtggatcttgtacctggcttcaggagacttgggacagaatgctttttggcccaaatgcgggcacagaaaggtgaacttctggaaagattatcaagtgctaggaacttttcaaatatggacgatgaagagaattattctgcagcaagtaaagcagtccggcaggtactgcaccaactaaagagacttggaattgtgtggcaggatgtcctgccagtgaatatatattgcaaggctatggggactttactcaatacagcaatttctgaggtcattggcaaaattactgccctagaggacatatctactgaagatggtgataggttatattccttatgcaaaacagtgatggatgaaggaccccaagtatttgcacctttatctgaagaaagcaagaacaagaaatatcaagaagaggttccagtctatgtgccaaaatggatgccattcaaggaattgatgatgatgctacaagccagcttgcaagaaattggggatcggtgggcagatggaaaaggacccctggcagctgcgttctcttccagtgaagtaaaagctttaattcgtgccttgtttcagaacacagaaagaagagcagctgcccttgctaaaattaaatagctccatcttcttaagaaagctatgtcttgaatatgtggattcttcccttggcataattactcccttaaagacttctttgaatcgcccattggttttggtgaaccagtacatcttggaagtttgactttacagaagaacgtcttacctcctggcctgtacgaggctttgtttaagaactgtttattaagataaattgtcaagtaaagcacctcaattcattgactttctagccatcttcctttgattagctaacaaactgtcaggcagcattatttcatgctgcttccagagccctctgggagctatatacattgtaaatgcaggccctagctttggaacgaggaattgggagattccaggagtcagggtagagaatttctgagcaaatcggagatattttaggggtgtggaggaggggaagggaggaatgggccaccatatttggccttacaggaattaaggagacttcctgtaatatttctttccaataaatattgctttttacaaaaaaaaaaaaaaaaaa

SEQ ID NO: 3717 - DNA, 2230 bp, Homo Sapiens
gcagcccactcttcccgagaggccccgacatctcccggataatctggagctttcaaaatgtttgccaaagcaaccaggaattttcttagagaagttgatgctgatggtgacctgattgcagtatcaaatctgaatgactctgataagttacagcttctaagtctggtgacaaaaaagaagagattctggtgctggcagagacccaagtaccagtttttatccctcacccttggcgatgtactcatagaagaccaatttccgagtccagtggtcgtggagtcggactttgtgaaatacgagggcaagtttgcaaaccacgtgagtggaaccctggagactgcactggggaaggtcaagctgaacctggggggcagcagccgcgtagagagccagtcttcatttggaaccctgaggaagcaggaggtggatttgcagcagctcatcagagactctgccgagagaacaataaatctgagaaaccctgtgctccagcaggtgctggaaggaaggaatgaggtcctgtgcgttttgacacagaagatcacgacgatgcagaagtgtgtgatctctgagcacatgcaggtcgaggagaagtgtggtggcatcgtgggcatccagaccaagacggtgcaggtgtcagcgacggaggatgggaatgtcaccaaggactccaacgtggtgctggagatcccagctgccaccaccattgcctacggtgtcattgagttatacgtgaaactggacggccagttcgagttctgccttctccgagggaagcaaggtggcttcgagaacaagaagagaattgactctgtctacctggaccccctggtctttcgagagtttgcattcatagacatgccagatgctgcgcatgggatatcttcccaggatggaccattaagtgttttaaagcaagcgaccctgctcctggagaggaatttccatccatttgcggagctgcctgagccacaacagacagctttgagtgacatcttccaggcggtcctatttgatgatgaactactcatggtcctggaaccagtgtgcgatgacctggtcagcggcctctcgcccacagtggcggtgctgggggagctgaagccccggcagcagcaggaccttgtggccttcctgcagctggtggggtgcagcttacagggtgggtgtccgggccccgaggatgcaggcagcaagcagctgtttatgacagcctacttcttggtcagtgccctcgcagaaatgccagatagcgcggcagctctgctgggcacttgctgcaaactccagatcattcccacactgtgccacttgcttcgtgctctgtctgatgatggagtatctgatcttgaagacccaaccttgactcccctgaaagatacagaaaggtttgggattgtgcagcgcttgtttgcctcagctgacattagtctggagagactgaagtcatctgtgaaagctgtcattctgaaggactctaaagtcttcccactgcttctttgtataaccctgaatggactctgtgctttaggcagagaacattcatgatgtcatatgtgaactagaagtacgtgttactggccaaggctatttttcagaactgttaaaggtcatatgcacgttaaaagttgaccaatgaaatgaatttacagaacagtttaagaagtggtgacattttgcatgatgaatgacctgacttttagccaccaggtactctttaaacagttttccttatcagaggccctcctgtgctggtgacccagcatctgagttaggttccagcatgtaaagagctgggagggcggagaattcttagcatacattcagacgttttttctgcacaataataagtccatctgtcacttgcattccactttttgttacatagaaagagtctgaccctttaatccaaaaggtctttttacattgtgaatgctgtgggaaggcaatttctctgcacacaagaggctacgttttggaagtgatgtatgttatttgatgactgaaaatgaactgtaaatgctcctagagtatattcctctgctgaacaaaattaaacttcaaaaaaatctaacagtaacacacccctgcttgggaccctagctatatgcattttatgtgaccttgccatgcttcagtgaacatactaattctatgtctagcacatgttgatttcctatgtattctgggtattctattaaaggaaactttgaactattaaaaaaaaaaa

SEQ ID NO: 3718 - DNA, 457 bp, Homo Sapiens
  misc_feature (445)..(445): n is a, c, g, or t
  misc_feature (455)..(455): n is a, c, g, or t
ttttttttttttagagtagaatacagtttttattatattgaagtatttgcagcaaatctatacattgaaaacatgtatgtacacacatttatatactatatataatatatacgatatttgcaatacaggcaaatacatagcatctgtgtgacagggaatcagctgacaaaggatggcctgaggtactagaaagtggctggtcttgctcgaatgtttgcaggatgagcgttaatgagcagaatcgaatgacatgatgatgagcataaaagctattggatagtaagagttacacaatagcctctttaatgtgtcgcatctcatttaacctttgcaaaaatcagtttttatttccaggataggagatgcacctaaatgttttctgaaccccagtgacttagaggaaggattgaagtgttgtcccaaaatggctttctgacctccgctntcccggttgnac

SEQ ID NO: 3719 - DNA, 410 bp, Homo Sapiens
ttttttttttttttttttttttcatcaccatagtttttaatgaaaaaacttgtttaaaattgtaaaggaaaaaaggggaaggggacggcaaaatcttaccagcaaaggggttaaacaaatggaaaatattaaggcccaaacattaaaatattaaagcatatatgtggcatataaaatacagtccaaacccaggagttgcactatactgattagggcttaacagaaaaaaggattaaattggttcctcccagaagtatatacacagttcatttccacagcattttcctatatagccagcaggttattttcttcagttattcacaccttgatcaaacctgaattataaacttagcacttacaaatatgaaaattcattcacagggaaaaacagtttttccatttccccaata

SEQ ID NO: 3720 - DNA, 1963 bp, Homo Sapiens
gcgcggcgtgcaggtcgcagctgtggctcgggtgctggcaggtgctggcgggactggcggggatcgccgtggactgcctcaggggcgccgcagcccgctcggcccgagggcccgcctaaccgcgccgcccgcgcccgctcctcctcggcccgcgcccggagcgcgggggccgccggcgctgggtactcggcggccaccggggatcggggctgagcggtcggttcccgcccccgtgccgccgccgccgccttccggccgaccgcccggcttggccgctgctgccgcgtctggcccccgggtccccgccgctgggggcgcgggcggggtcgggggttgccgggcgccgccccccgtgcgcctggagtccacatcccgggcccggcggccggcgagcatggaggagaagtacctgcccgagctgatggcggagaaggactccctggacccctccttcacgcacgccctgcgcctggtgaaccaagaaatagaaaagtttcaaaaaggagaaggcaaggatgaagaaaagtacatcgatgtggtgattaataagaacatgaagctgggacagaaagtgttaattcccgtaaaacagttccctaagttcaactttgtggggaaacttttgggtccacgtggcaattctctgaagcgtttacaagaagaaaccttgacaaaaatgtccatccttgggaaaggttccatgagagacaaggccaaggaagaagagttgaggaaaagtggagaagcgaagtacttccatctcaatgatgatctccatgttctcattgaagtgtttgccccacctgcagaagcttatgccaggatgggacatgctttggaagaaatcaaaaagttcctcatccctgattataatgatgagatcaggcaagcacagctccaggagttaacatatttgaatggtggttcagaaaatgcagatgttccagtggttcgagggaaacccaccttgcgtacaagaggtgtaccagccccagcaataaccaggggaaggggaggagttacagcccggccagttggagttgtagtaccacgagggacgccaactcccagaggagtcctgtccacccgagggccagtgagtcggggaagaggacttctcactcccagagcaagaggagtccccccaactgggtacagacctccaccgccacccccgacacaagagacttatggagaatatgactatgatgatggatatggcactgcttatgatgaacagagttatgattcctatgataacagctatagcaccccagcccaaagtggtgctgattactatgattacggacatggactcagtgaggagacttatgattcctacgggcaagaagagtggactaactcaagacacaaggcaccttcagcgaggacagcaaagggcgtctacagagaccagccatatggcagatactgattgtactgtctgatgttgtgaaatagccaatctccaccagtcctgtatactgttcaaagtaatttttttctatgaacaatccctttttaaataaatcaaaatgcttaaaatctgaatggatggaacttaaaactactttgttgaaacatcaacctgggcagaaaaaaagaaaaaaagacatgtaaaattttgttatttccagtctgtatatgaaaaaataggtcatcaaaaggaaaaaaaataactttgattaactagtgttaaacaaaaaataggtttactaaatatgttaatctattcttttaacataagcctcacctttcattttaaaggtttccatagaatttagttattttatctttcagccatatgctagtttttttttctcttgccaacatgcgtaaaaagggaagccaattacaagtgcaaataatgtggtattcttttgtaactcaagtcttgaaatgttctgtagtgttaagcaaagtctcctcttgcttgatactaaataaacttttgaaaaaaaaa

SEQ ID NO: 3721 - DNA, 467 bp, Homo Sapiens
aggcagccctcggatctgcccctgcccacctcacgctgcgttccatgctggccccaggcgatgtcagtcctgctgcaggccaggactagttccacggccctgagcatgcgttagccccttcttgcctccatgcctcagtttacctcggagtgagctgcgggagacgtctccctgcctggccggggcggctctgtcgtagcggagggcagcggtacgagccggccgcgggctcggggtgtcccaggtggtgcagagccggagccggagccggagccgcgccgcgccgcaccatggcgcccaccctggccactgcccatcggcgccgctggtggatggcctgcacggccgtgctggagaacctcctcttctcggcagtcctcctgggctggggctcgctgctcatcatgctcaagtcagagggcttttactcctacctgtgtaccgagccagagaatgtcaccaatggc

SEQ ID NO: 3722 - DNA, 5217 bp, Homo Sapiens
gccgcgggaggggcgcgggggcagacaaagccgcggtaatgaatggagcgtccgcccgcgccgccgtcgtccgcagccggccgggagccgccccagaggccgggccgaggtaatgcacaagggtcacgtgtatgctctcaagatgatcaggcagatcctgtcctcaggaccagaagcacgtctctgctgcacacattgttgtctacaccatgagtgtttagtagcaggactcttggaaagcagtgatctatgctgtaagaccatgagtcacagattctttttttcagtactatttatgattagccatatttctagaaacatcctgaaagatggaattatgacgaaaaagtgaagataatctacattcgggggcacaaatgagcacttggatcagtgttttatgaacctaagatacagccggagtagttatggtcagtcatggagaataacttgaaaacttgtcccaaagaggacggtgatttcgtttctgataaaataaagtttaaaatagaagaggaagatgatgatggaattcctcctgatagtttggaaagaatggactttaaaagcgagcaggaggacatgaagcagacagacagcggtggggagcgagcgggcctcggtgggacgggttgcagctgcaagcccccggggaagtacttgtctgcagagagtgaggatgactatggcgcgctgttctcccagtacagcagcaccctatacgacgtggccatggaggccgtgacccaaagcctcctttccagccggaacatgagctccaggaagaagtctccagcctggaagcatttttttatctctccccgagacagcactaaagcaatatgcatgtactgtgtgaaggagttcagcagaggcaaaaacgagaaagacttgagtaccagttgtctcatgaggcacgtgaggcgcgcacacccgaccgtgctcattcaggaaaatggcagcgtgtctgccgtgtcctcgttcccctctccctcactcctgcttccaccgcagcctgcggacgcgggtgacctcagcaccatcctctcacccatcaaacttgtccagaaagtggcgtctaagatcccgtcccccgatcgaataacagaggagtctgtgtctgtagtttcttctgaagaaatctcctctgacatgtccgtttcggagaagtgcggcagagaagaagccctggtggggtcgtctccccacctccctgctctccattacgatgaacctgcagagaacttagcggagaagagccttccacttccaaagagcacctctgggtccaggagaaggtccgctgtctggaagcacttctacctgtcgccactggacaactccaaagctgtctgcattcactgcatgaacgagttcagccgggggaagaatgggaaggacctgggcacgagctgcctcatcaggcacatgtggagggcacaccgcgccatcgtgttgcaggagaacgggggcacgggcatcccgccactgtactccacccctcccactctgctgccttccttgctgccgccggagggggagctcagctctgtgtcctcgtctccggtaaagccggtcagagagtccccttcggcctcctcctcccctgacaggctgactgaggacttgcagtctcacttgaaccctggagatgggctgatggaagacgtggcggccttctcatcttccgatgacgtaggggaggcctcggcgtcctctcctgagaagcagcaggctgatgggctgagtcctagattgtttgaatctggtgccatcttccagcagaataaaaaggtcatgaaaagactgaagtcggaggtctggcatcacttctccctggcccccatggacagcctcaaggccgagtgtcggtactgcggctgtgccatcagccgggggaagaagggtgatgtgggcaccagctgcctgatgagacatctctaccggcgccatccagaagttgtcgggagccagaagggcttcctgggtgcaagtctggcaaactctccgtatgccactttggcctctgcagaaagttcctcttccaaattgactgacttgccaacagtggtcacaaaaaacaatcaagttatgtttcctgttaatagcaaaaagacctcgaagctgtggaatcatttttctatttgctccgcagactccacaaaagtcgtgtgcttgcactgtggccggaccatcagccgggggaagaagccgactaacttgggtaccagctgtcttctgagacatttacagcggttccatagcaacgtgctgaaaactgaggtctcggagacggctcggccctcctctccggacacccgggtgccgcggggcacagaattatcaggcgcttcctcttttgatgacaccaatgagaagttttacgattctcacccagttgccaaaaaaatcacaagtctcatagctgaaatgattgcacttgacctccagccatattcttttgtagacaacgttggctttaacaggctgcttgaatacttgaaacctcagtactccctccccgccccttcctacttctccaggacagctatcccaggtatgtatgataatgtgaagcagataattatgtcccaccttaaggaagctgagagtggtgtgatccacttcacgtctggaatatggatgagtaaccagacccgtgagtacctgaccctcacggcccactgggtttccttcgagtcgccagcccggccgcgctgtgacgaccaccactgctcggcgctgttggacgtgtcgcaggtggactgcgactacagtggcaacagcattcagaagcagctggagtgctggtgggaagcgtgggtgacctccaccggccttcaggtgggcatcaccgtcaccgacaacgccagcatcgggaagacgctgaacgagggggagcactcgagcgtgcagtgcttcagccatacggtgaacctgatcgtcagcgaggccattaagagccagcggatggtgcagaacctgctgagcctcgcccggaagatctgcgagcgggtgcaccggtcgcccaaggcgaaggagaaactggccgagctgcagagggagtacgcgctgcctcagcatcacctcatccaggacgtcccgtccaagtggagcacttccttccacatgctcgagcggctcattgagcagaaaagggccattaacgagatgtccgtcgagtgtaacttccgagagctgatcagctgcgaccagtgggaggtcatgcagtccgtgtgccgtgcgctaaagcccttcgaggccgcgagccgggagatgagcacgcagatgtccaccctcagccaggtcatccccatggtacacatcctcaacaggaaggtggagatgctcttcgaggagacgatgggcatcgacaccatgctgcgctctctgaaggaggccatggtgagccgcctgtctgccaccctccacgacccgcggtacgtcttcgccacgctgctggatcctcgctacaaggcctccctgtttacggaggaggaggcggagcagtacaaacaggatttaatcagggaactcgaactcatgaattctacctcagaggacgtggctgcctcccacaggtgtgatgctggctccccgtcgaaagactctgccgcagaggagaacctgtggtcacttgtggccaaggtgaagaagaaagacccaagagaaaagctgcctgaagccatggtgcttgcgtatctggaggaggaggtgcttgaacacagctgtgacccgctcacctactggaacctgaagaaggcgtcctggccggggctgtccgcgctggccgtcagatttttgggctgccccccaagcatcgtcccttcagaaaagctgttcaacacacccactgagaacggtagccttggccaatccaggctcatgatggaacattttgaaaaacttatctttttgaaagtgaatcttcccttaatatactttcagtattgaaactcacgacggcaccactaggccagaggcgtggctgccccagcgttagcagcctgtaccaggtctatgacccgctctgcccacggctgtgtacgacatcagaccaggcactctcagggccgctctccagctcaccacagtgtctccacgtgccttaccccttctccttcaggccaagtttcgcggggtgttttattaagacgtccactagaaatagcttgtcctgtcaactatgaatatggtgactagattttaattcataaccgtaaagttttttaaagttttgggttagtaatttgttttactagaatgacaaagaagatgtaaaccattttattctgtaggctttttactcaattatgtacaaaccacaaatcaggtactgtattttagtgaagcattgctttaattgcaacagaatagcttttgtggctatcaaatgaaatctgtaaataggaggtggagggcaagccatcctgactgagcagtttttaaccgcaggttctaaagtgtcccgcggagtacagataatattctggaaggtaactgtttactacgacagagacgtggcatttggaaacgaaacttagatgtttcatggagcttattttgagaactttcccatttcaggtttctgcattcaggctttacatggtcagttaactcagagataccccagctgtttatcatcagctcctctgaaatgtgatccctttgtaactgtgctcatcacttcgccagtgcgttcaatgacacgctgatggcaggtggtccctgctgaaacccccacgcctccgcttcagcatctccacgctctgaagctgtctttcaaaatgtgtgcactgacccccttgtttgatcaaatttgtgtaaaatttttttagaagagatggcttattaacagggaagaagcttgttatattccagttgtaagaatagccttagtgtttagatttttttatgatagggaagatgcggccatcactgggatattttcaaatcccaaggacatcagagtgaagtgtcagttgtcagatgattttaaaagttatgtcttcagagaaaaaaagattcattttctcattttaagccaattaaatattctgagtgagactaatcactcatttgcctacgaccttttagaaaagttgttttgttgaaatactgtacatacgcttaatctaaatttgcattgactatgttttagtgtatttataaatggtgaactcagtttctgaaattaaacttcttatttgcaatttt

SEQ ID NO: 3723 - DNA, 389 bp, Homo Sapiens
ttttttccacttatatgattattttcttcatcagcaaagggttaagagcagtttacaccaaaccaagttaccaagcagatcacaatcagttcacaggttggataagtcacggcacgcaggccagaaaatgtactcagacttcagtcaacctaatgggacagtgtactcacactgtggttttgttgttttggagtctagaagctccatctacccattctccatggtctaccaccatgttaacacagatttaccacaggcgccatctgtaccaagcctaggatagactctttaaaaaaaaaaaagacctggccggtcacagtggttcatgcctgtaagcattttgagaggacaaggtgggtggatcatgaggtcaggagttcaagaccagc

SEQ ID NO: 3724 - DNA, 602 bp, Homo Sapiens
  misc_feature (329)..(329): n is a, c, g, or t
aggtggtgggagatgagtctcaaagctaagtagtggaagctgggcacagtggctcatgcctgcaatcccagcactttgggaggccaaggctggaggatcacttgagcccaggagttttatatcagcctgggcaacatagcaagacctcatctctgctaaaaattaaaaataaataaattagctgggtgtggtggtgcatgcctgtgatcctagctactcacgaggctgaggtgggaggatcgctagagcccagagaaccaaggctacagtgagccatgatcatgctactgcactccagcctgggtgacaatgagaccatggctcataanaaaaaaaaaaaaaaaaggataagccgtggaggccgaatcatggagggtcttgaatacctggctaaggagtttaaagtgtatccaagaggacgtgggagccactgatggttcatgaggaagagaagggcaggaccaccactgattgaaaaggagggcttgttcagtgtggaggaagaatcagaagggggaataagttaccttctccgagcctggaagaaccaaaaaacaaaaggcagaaattaaaatccggtttcacctgctttttatatattt

SEQ ID NO: 3725 - DNA, 390 bp, Homo Sapiens
ctgagtctctggcgtccatgctgagtgggcggctggtcctgggtctggtctccatggctggccgcgtttgtttgtgccagggcagctcgggatccggggccatcggtccggtggaggccgccattcgcacgaagttggaggaggccctgagccccgaggtgctagagcttcgcaacgagagcggtggccacgcggtcccgctggcagtgagactcacttccgcgtggctgtggtgagctctcgtttcgagggactgagccccctacaacgacaccggctggtccacgcagcgctggccgaaggaagctgggaggtccggtccatgcgcttggccatccaggcacggacccccgcccagttggagagagaactctcagctggacactagcc

SEQ ID NO: 3726 - DNA, 380 bp, Homo Sapiens
acatgggttatttagtttaactctggcaaaaaaaaaaaaaaaattttgtatgttgatgtttgtataccgttcagtataaaagtgtcctaagcatattagccaatcttttcacagtagagcatacttaaggctgcttggtactgagtatacttaaatataactccagaatccagggacttggtgttaaaacaggattagagcatgtaaaggtacatctagattcatatttgaatcttaaactgtatttttctcttagtattgctaatgagtaaagaaaagtctcataaggtagccaaatgaaaaagaatgaaagggaaagtgaaaaattaaggggacaaaagatgggatgtgaaaagaagaattctagtttgatggtgact

SEQ ID NO: 3727 - DNA, 3099 bp, Homo Sapiens
attcatgccagttcttccctgaatggcagaagcactgaagaagtaaagcccattgatgaaaacttggggcaaactggaaaatctgctgtttgcattcaccaagatataaatgatgatcatgttgaagatgttacaggaattcagcatttgacaagcgattcagacagtgaagtttactgtgattctatggaacaatttggacaagaagagtctttagacagctttacgtccaacaatggaccatttcagtattacttgggtggtcattccagtcaacccatggaaaattctggatttcgtgaagatattcaagtacctcctggaaatggcaacattgggaatatgcaggtggttgcagttgaaggaaaaggtgaagtcaagcatggaggagaagatggcaggaataacagcggagcaccacaccgggagaagcgaggcggagaaactgacgaattctctaatgttagaagaggaagaggacataggatgcaacacttgagcgaaggaaccaagggccggcaggtgggaagtggaggtgatggggagcgctggggctccgacagagggtcccgaggcagcctcaatgagcagatcgccctcgtgctgatgagactgcaggaggacatgcagaatgtccttcagagactgcagaaactggaaacgctgactgctttgcaggcaaaatcatcaacatcaacattgcagactgctcctcagcccacctcacagagaccatcttggtggcccttcgagatgtctcctggtgtgctaacgtttgccatcatatggccttttattgcacagtggttggtgtatttatactatcaaagaaggagaagaaaactgaactgaggaaaatggtgttttcctcaagaagactactggaactggatgacctcagaatgaactggattgtggtgttcacaagaaaatcttagtttgtgatgattacattgctttttgttgtccagtagtttagtttgtgtacatatatacacatatatattttgcactacacaaacgataacattttaaggactaatattgctgatacttgaataatcaatctctactaggttataagtagtatacacagatttaccctgcccttgaacttgaaggacattaaattattaatgatcatttggtaacatgtttacctgattatcttccatagagtaacataagctgcttttcaaaggtaccattgtgataatgagatcaaatttataagttattatttttaattttctaaattaaataaaagaaagaatgcaaaccaggagtgaatttcaaatgagatgtaatcgactttatatcttagtcacggagttgccatggcatgtagtagaaaaccacaggaagaatggtcatattcactttgtgggctgcccataatctttcttgggcattcacaactcttgagtttggtgttcaggcatcattattaaaaagtggagtcctatgtaccagactgagtttttacaaatgatttgcaggctagacataacccactgatggaaatggtgaagaatgagcttcatgtaggtttaaaagtgtattctgagcctgtagatgattaatcaggtttttattcaatcatataaatgtattcctttgtaatcatttttgtttaactgaggatatctagtgtctgcttcatagggtgctttgaaatataaaatgaaaacttatttatactgtttttacaacagtcaaaaaggaaacacgaaaatcacttttctgcaactgatgaactatatagactggactcttaacctcttagtgcctcagtttttccttcggggtatactattttagatacacctacttcacaggagtactggagggatttgcaagctaacgggccaaatgcttccataggaataaggcatgcccagctaacagaaatttaagtccctcttccccacctctctcatctagaccaaaaagaagactacaatttagatccttggagacttttcctgtatgccttccaaaacttcctgctcacttagatgtaccttgtgctttgaagatttctttgatgcagtctttgtaacaaataatttttttttttaaatggagtttctctcttgttgcccaggctggagggcaatggcgtgatcttggctcactgcaacttccacctcctgggttcaagtgattctcctgcctcactcccaagtagctgggattacaggcatgcaccaccatgcctggctaattttgtatttttagtagagacggggtttctccatgttggtaaggctgatctcaaactcccaacctcaggtgatctgcctgcctcggcctcccaaagtgctgggattagaggcgtgagccactgcacctggcctgtagcaaataatttttaagcattctcaagatgtatgatgttgggtttaacatcatatgttcacagtgttttaaataagaaataatctgtctttagtatacaggatggttctttgtttgcctgaaaagtataagaatacaatttacttttcccaaactctttttccttatttttttctttcaaataactttaattatttaatcccatactgattaaaatatgtctgtctaaagggatctactactatttgcttttaaaaaagtgttccctatttatttaggaaaaagtgaagcaagcaactgaatttatatgtaaaaataacatttagacctgtggatcaaagattattttcaaaaatgagatatcaatttggtatcagtaaaaagtgtcttttctcttagtatataaataaataaaatgcaaattaagagtgtaagcagttgtgaatcattacaagcagtctgggataactaactcctagggataaccatttctatcctgttccaaagtcttattttatagtttgaaaagcactttgcacacagttcttgtatataaaagtaaagatgtaattataggatatagtgttcctgctttgtttaataagaacctcatttaaacttgacagctatggtatttttttaatgataacttcttttctgtttattgtaaaactaagttaaaaataaaaggttaatgagaaaaaaaaaaaaaaaaaaaaaaaaaaaaaaaaaaaaaaa

SEQ ID NO: 3728 - DNA, 288 bp, Homo Sapiens
caaccactgtctcatgagagacagcagatgctgtgctggcatgctgctgtcctctagtttacatatcctatctgaggtaagcgggtaccaagtatggccatggcagtctggctgagttagaatgtgaaatgtaaagtgacttctgtgggtcatagccacaaatagtgtcaagatgtactaacttgataaacatattccagatgtttggttaaacctaaaaagacctctctggtggatgtagcagtacatcatttcatatgtattaatttcataacttttttattttaa

SEQ ID NO: 3729 - DNA, 329 bp, Homo Sapiens
catgacgatttgatttctctgattttatttttacatttttcattttaaaaatacaaagcaatttttttggggcatgctgaaaggtaactgaagaccgcaaaggaaaaactattgtcatggctgaaggagagaatgaagtgagatgggatggactctgcagcagagattcaactactagggagacagcattggaaaacattaggcaaaccattttgaggaaaaccgagtatcttcgttcggtgaaagaaacacctcatcgtccatcagacgggctttcaaataccgagtcttcggatgggttgaataagctacttgctcatctgcttatg

SEQ ID NO: 3730 - DNA, 446 bp, Homo Sapiens
ttttttttttggtttagaagggtgtttaattcatgacattactaagaatgggtgttttttgggatagaaaattggtcacatataccaaatacacattttatattccaaaataaaaactgagatttcttttaaaacagtggaatcctgattttttctttttttttttttttttttttactttctgtgagcttatgaggccattctgcacattatcaaaatgaaatcattatgcagtaaccttatatatataaatccaattttttcctttgtagaagaaaaccaaaataattttacaaactacatttaacttagaatataaagaactgactagtgtaaaattttgaaaatctaccactttattttgaaggaaagtacacatccttcaaaaccccgctaacaattcctagttcagttttctattatacaaatcaaaaagttaaattcct

SEQ ID NO: 3731 - DNA, 260 bp, Homo Sapiens
  misc_feature (129)..(129): n is a, c, g, or t
  misc_feature (222)..(222): n is a, c, g, or t
  misc_feature (236)..(236): n is a, c, g, or t
  misc_feature (247)..(247): n is a, c, g, or t
acaaaatccatcagatgaagtgtaaatggataatcttttaatggatctaaacctagaaagtttcacttactgttcatgtccgtgttccagaattgtgaaatggtgtgtggttttgctttccaagttctnctctgcctcctcttaattctctaattccatgtcttacagaagaatgagaaatttctttcttacttgagtatcatgctctaaaaaacttggctncagtcacagaaacnctgggcgtctncttgtgcttataa

SEQ ID NO: 3732 - DNA, 425 bp, Homo Sapiens
  misc_feature (383)..(383): n is a, c, g, or t
  misc_feature (420)..(420): n is a, c, g, or t
gagcaacaacctaagcaccgttatcagtgcctaggaatgttcaaggcccaggctggggttcagacctgcagaggaaaacatcagctggctgggtcaaggcaccatgtgttacttggtcaggacagagacaaaaatgaggaaaactaggggaccccacacacatgtggctaccatactcctgaacaggtctagctagttatttgtttttttggaagttaatctggggtagaaatgtatggtgatttttattttctctgtctgaagaaccagccatttttaaaaaggttattattgacatcccaatattttgtcttggtggggcttacttcataagtccaaacattttatttctcaacaggtgttaaaacagggcagagcatttntaaaaccacatgggtaggtgcttttggttggagggantgctt

SEQ ID NO: 3733 - DNA, 553 bp, Homo Sapiens
ctcctgaatccctgcggtcccagcgtcgctccggacgctgccaacctgttctccaccgtcgctcgacttccacctctaagactcccacgaaactcaggttgaataattcatcaaattacacaactgaactcaagacatggctgcccagtgtgtcacaaaggtggcgctgaatgtttcctgtgccaatctttggataaagatatagggtcaaagtcagaccctttatgtgtgtgttttgaatacaagtggtcaacagtggtatgaggttgagcgcacagaaaggattaagaattgcttgaatccccaattttccaagacatttattattgattactactttgaagtggttcagaaattgaaatctggggtttatgacatcgacaacaaaactatggagctgagtgatgatgacttcttaggggaatgtgaatgtacccttggacaaatggtttccagcaagaagctaactcgaccactggtgatgacaactggcagacctgcaggacacagggagcattacgatttcagctgaagaactcacgataatagagtg

SEQ ID NO: 3734 - DNA, 383 bp, Homo Sapiens
ggccttaggcacacatcgcactctgtatatagagggggtgttcccatatactgtgttattaagcacaatttagaatgagatttttagggtactgtgctgtggagtcaagatgcttgggatctagactttcattagcccctatctgtaagtttgctgatgggaggaaccttgtgttggtggtcaaggtgtccctagtgctagcatggagtctgcacatatatacttgtgtcacagagtaagtcagagctgaccaaggtctctgtgttctggagtagaggacttctatggttcctggaagctcagaactttcacacttctgtggctgtacttatacgaaatcagagaccacttgctgtactctaatttgaatcactcagtcacca

SEQ ID NO: 3735 - DNA, 463 bp, Homo Sapiens
gcaaaaaaaggaattggaattttaatgagaaccatctggagtgttttccaagggtgtaatgtttggtacaagaaagtaattccttagctcaaacaaggagaagagaaatgaaggaaacttatattgtgcttactcaccgccccccaactcaaaaaacgacgctgagcagaaccacctaaacgcatgaatcacacgcgaatgagggtgtagtgggggctttggagcaggagaacccgagattctggctctgacttgccgcagcaaggagaaatgcttttcctctgccaaagagactttgagggatgcgttgtggtgggcctggggccagtgcctggaatttgggtaaccatggaaacagacctttacatctatgacaaaaccattgttgaaagtgcaagtcgctcaggcttctctgcataagatccatgtgagacatttccttttagaatgaagctctgaggct

SEQ ID NO: 3736 - DNA, 684 bp, Homo Sapiens
aatttgacacaagatttcttggagagatcctgagggtgaccctgtagggcaaaaaagaaaacttaaaaaacatctatttctgggagatccacccatgagtcaggacatggcttcagagggcgtcttcttggcacatgtgggactacctggctgtgacccgtgcggtacgctattacagttaaaccatgtgggagggaagaggggctgcaggcggtgccctctacccagaggaatccaggtcctggctccaggaaggctcaggcggctcctcattcatcgtccgggacttcccggagcccttcgctgtggcgcgaatgcccactgatctccagcagggcctgggcctcagggtccgcatccaggatgctcttgttgcccttggccaactgctcctctgaggggtctccaaccgcccacacctccatcttatcaaactggaagttctcctgagccgacagctgcgggctgttgtacgtggtgcacgtgggcttggctctgctgtgtcctttccaaaatcaacatccacccaaagcccaaagtaattgtgctgcccccccatacccagtccgttcgggatcgtctgctgtccatgggtcaagtacatgtagtgggtcgtgtagcccgtgtggtgtacacagccatgctggggcagatggagaacaggaagcatctgttggccccttg

SEQ ID NO: 3737 - DNA, 410 bp, Homo Sapiens
tgttaggcagcaacagtgctgatgctggactgtggcaggcagagggtgctatcctgacacacttcaccttagtgcaggaaacttcaatttggtggaagaaaggcgatttcgaggttccaatctgggcgacacttcccagttggagagtcagcaaaagggagagggcaattccaagaagagggaaaagcttgtgcacagtgtacctcctttattcctgaagcccgggcagtgcttgacctggtcgaccagtgcccaaaacagatccagaaaggaaagttccaggttgttgccatcgaaggacttggatgccacgggtaaaaccacggtgacccagtcagttggcagattcacttaaggctgtccctcttaaaagtcaccaccctcttgcattggccagtggaggaaagatc

SEQ ID NO: 3738 - DNA, 342 bp, Homo Sapiens
gcgtcgactttttttttttttttttatcatcagtggaaactgtttattaaaagggaggagtatgggatacacaaatagcataaatcgaaatctcacacttaatcctttaatgttaattgcatttcagactgagtaaagtctgactaaaaatcacagcaatgggacaaagcactgctttgttttaaaactgcacatgtgctttctcccctgagaacctttggcttagactttttgtacagtaagacatttcattaaatatggttagatttgcagtctaagaccttaagtgacacactcaatgacaacattcttataaattatagccaattataagtcctcctt

SEQ ID NO: 3739 - DNA, 387 bp, Homo Sapiens
cgggtggatcacgaggtcaggagttcgggaccggcctgccaagggtggtggggccccgtctctactaaaagtacaaaaattagccagacgtggtgatgcgtgcctgtggtcccagctacttgggaggctgaggcagagaactgctaaaactcaggaggcagaagatgcagtgagccaagatcgcgccactgcactccagcctgggcgacagagactccatttggccttccaaaagttaagctataattttgccctgtaacttctggctagtgatggaacgactttcctgggctggtttccttactacgattgaagctcaggtccatgtaataaatgtgatacctcaatgttgctgttaaaataaatatcagttcatactccctaaga

SEQ ID NO: 3740 - DNA, 395 bp, Homo Sapiens
ttgtggcttaaacatttattttttcacaattctggaggctacgactcttaagattaaccctgtgggcaaggttgatttcttctgaggtctctctccatggtgtgtcgataactgtcttctccctgtgtcttcacattatcttttctctgtgtgtgtgtccagtcttctttacttataaggacaccagtcagattggattcagacccacctcaataacttcattttatatctttaacgaccctaactctaaatgcagtcatattttcaaggacttcaacatatgcagcagggaggagggtaaatcagtctataacaagaagtgcagtaattagtcttccaaatactatatgaactaagtattccacaggtggctcaaacccagcaggaccaagact

SEQ ID NO: 3741 - DNA, 404 bp, Homo Sapiens
taatgtagtttcggatttggagttactaggcttcgatccccacttacttttaattaaatctttggtacttctggaagacatctctgaaatggtcgccaagtccaaagaagcgatcgaagagacaacggtcttgaggcgcccagccgggtgccaggcacgaagtgagcgccagggaaaaggactgttatcagagcgggcagagattgaatcccgcggacgcgatctgcccactgacctgccctccctggcggtccggaccggcccggccccggggctgcgggtcctggccgcccctcgccaccctccgcggtcgcctcccttgggccagctagcagctgaagcgaagcgcggcgctcgcgtcggccgagtccctcgtgccgaattcttggcctcgagggccaaat

SEQ ID NO: 3742 - DNA, 317 bp, Homo Sapiens
aagatccaaaaatctgtattagcttagaagcaataaaaatcacaaaacatcaacagatatataaagtttttttataaaaagaattatttaatggaaaaatcgttgttaaaatatggcaaatggttatatttaaaatgcaaataactgataaactaaaaagataacactccccatctccccagtagataaatggacgaaagaacgaataacaaagggagaaatacagctaggaaaaggaaaaaatgtttaagctcactataagtgggggaaaggcaaattaaaatatattcaaatattattttcacctcatcaaaaat

SEQ ID NO: 3743 - DNA, 1949 bp, Homo Sapiens
ggaaccgcccgctgccagcccggccaggcacccctgcagcatggcctggaacaccaacctccgctggcggctgccgctcacctgcctgctcctgcaggtgattatggtgattctcttcggggtgttcgtgcgctacgacttcgaggccgacgcccactggtggtcagagaggacgcacaagaacttgagcgacatggagaacgaattctactatcgctacccaagcttccaggacgtgcacgtgatggtcttcgtgggcttcggcttcctcatgactttcctgcagcgctacggcttcagcgccgtgggcttcaacttcctgttggcagccttcggcatccagtgggcgctgctcatgcagggctggttccacttcttacaagaccgctacatcgtcgtgggcgtggagaacctcatcaacgctgacttctgcgtggcctctgtctgcgtggcctttggggcagttctgggtaaagtcagccccattcagctgctcatcatgactttcttccaagtgaccctcttcgctgtgaatgagttcattctccttaacctgctaaaggtgaaggatgcaggaggctccatgaccatccacacatttggcgcctactttgggctcacagtgacccggatcctctaccgacgcaacctagagcagagcaaggagagacagaattctgtgtaccagtcggacctctttgccatgattggcaccctcttcctgtggatgtactggcccagcttcaactcagccatatcctaccatggggacagccagcaccgagccgccatcaacacctactgctccttggcagcctgcgtgcttacctcggtggcaatatccagtgccctgcacaagaagggcaagctggacatggtgcacatccagaatgccacgctcgcaggaggggtggccgtgggtaccgctgctgagatgatgctcatgccttacggtgccctcatcatcggcttcgtctgcggcatcatctccaccctgggttttgtatacctgaccccattcctggagtcccggctgcacatccaggacacatgtggcattaacaatctgcatggcattcctggcatcataggcggcatcgtgggtgctgtgacagcggcctccgccagccttgaagtctatggaaaagaagggcttgtccattcctttgactttcaaggtttcaacggggactggaccgcaagaacacagggaaagttccagatttatggtctcttggtgaccctggccatggccctgatgggtggcatcattgtggggctcattttgagattaccattctggggacaaccttcagatgagaactgctttgaggatgcggtctactgggagatgcctgaagggaacagcactgtctacatccctgaggaccccaccttcaagccctcaggaccctcagtaccctcagtacccatggtgtccccactacccatggcttcctcggtacccttggtaccctaggctcccagggcaggtgaggagcaggctccacagactgtcctggggcccagaggagctggtgctgacctagctagggatgcaagagtgagcaagcagcacccccacctgctggcttggcctcaaggtgcctccacccctgccctccccttcatcccagggggtctgactgagaatggagaaggagaagctacaaagtgggcatccaagccgggttctggctgcagaagttctgcctctgcctggggtcttggccacattggagaaaaacaggctcaaagtggggctgggacctggtgggtgaacctgagctctcccaggagacaacttagctgccagtcaccacctatgaggctcttctaccccgtgcctgcacctcggccagcatctcctatgctccctgggtcccccagacctctctgtgttgtgtgcgtggcagcctccaggaataaacattcttgttgtcctttgc

SEQ ID NO: 3744 - DNA, 190 bp, Homo Sapiens
agattggctcctgtcagatgctgttgcatttcctgcctgccactttttgccatgacaccagactctcttttaaattgtaatattgtaataaggctgtaaattaagaatctcggaaacataaagtacccctttcagaacgataggcatttagtgatctatggcagtaaagcctgaagcttaagcggatcag

SEQ ID NO: 3745 - DNA, 423 bp, Homo Sapiens
ttttcctacaacatgaatttaattgaattgtgtgtttaattcacacattcctgatacaaaaaaaagtacattattggaggtccaggcacggtggctcacaactgtaatcccagcaccttgggagtctgaagtgggaggactgcttgagcccaggagttcaggaccagactgggcaacacagtgagaccacgtctccttcagattcttcagtcatttctccaccattatgagtagtacaattttcactttctgaagaacaattccttgtggaagctatactatgtcttccagttttggaaactgcatcatgtccaactggagtctcctgaaattctccatgtatgtcaagaagtgaggatttgatatatgtggctaaagtttcaacaggactctctccagcagccattagggaattatactggt

SEQ ID NO: 3746 - DNA, 474 bp, Homo Sapiens
gaccttcagctcacggctccaggcctgggccagttcttgctgctcctgccgtctcccccgactggctgtgtctgagtaactggaacatgagactgtatctgcaggactggccccatggtggccgagtcagaagtctgtttcctgtgagtcgccaccgttcactcagtcttgccctcccatgctttggagccagtctggtggctcctgtaaggttctcaaggctggtggcagctcagtctggggtcaggacatgtcggggtcatgcgtttctggccctgacataagctgtctggcctctctgtgacatgatgaaattgaaatcaatccacagtccatgaaattgtgacactccaccagattaagttagggcataacattaacttggaaatggccatgtcatcacccctgcggctgtcctatagctgagatgcgtgggtcgcaggggaggtgatttctaggcatattgctgtccct

SEQ ID NO: 3747 - DNA, 521 bp, Homo Sapiens
gctcgatgggcttctcctgcgcgccgcccggtgtctggccgagtccagagagccgcggcgcctcgttccgaggagccatcgccgaagcccgaggccgggtcccgggttggggactgcaggggaaggcagcggcggcggcggcgggagccccaccggggtctgggactggggaactgcctccggcttcacgatgccagtatggacagaatagcttatgatgcttatccccacccaccacttccgaaacattgagcggaaaccagaatacctccagccagagaagtgtgtcccacccccctaccctggtcctgtgggaaccatgtggtttatccgtgacggctgtggcatcgcctgtgccatcgttacctggtttctggtcctctatgcggagttcgtggtcctctttgtcatgctgattccatctcgagactacgtgtatagcatcatcaacggaattgtgttcaacctgctggccttcttggccctggcctcccactgccgggccatgctgacggaccccg

SEQ ID NO: 3748 - DNA, 292 bp, Homo Sapiens
  misc_feature (45)..(45): n is a, c, g, or t
  misc_feature (120)..(120): n is a, c, g, or t
  misc_feature (227)..(227): n is a, c, g, or t
  misc_feature (234)..(234): n is a, c, g, or t
aatgaatcaaagaatgtcagaataatagagatgggtgagcaaganctgctcaatgttcatatcatgtgtacaaataaaataacaactatggtttagtgcttcagaatattctaccatttnctaatccttacaatattttataatctagatggaaccaccataaagacagttaattttcacaaataacaattaggctaaaacaaccacatgtacagagtatataatanattacanacaacttacaaccttaaaggacttaatatttaactctagtgattttcctttaataggg

SEQ ID NO: 3749 - DNA, 392 bp, Homo Sapiens
caaagcgggacaggtccagcggttgttctgtgtgaagtcgcgcggcttccacccacgcaggttctaagtgaaggccagaaactcgctcgccatgtcggctgcagaggcgggggtgtgttttccacagagccaggggtaggaccctgcgcgcgtttcccgcagaaaaggaaagcgaatggaaaggcccattctacttcatcctgggcgcagacccacagtttgggctgatcaaggcctggtccactggggactgtgacaatggcggtgacgaatgggaacaggagatccgtctaactgagcaagccgtccaggcatcaacaagctgaaccccaaacccaaattcttcgttctgtgcggcgacctcatccacgccatgccaggtgtcagagtcg

SEQ ID NO: 3750 - DNA, 5623 bp, Homo Sapiens
cggccgccagcacccgcggtgccgcggggccgctccgaggagcctgagagacccacggaggcttcgcgggaagacgcggcggcggcggcggaggatgagcctgcagagcgcgcagtacctccggcaggcagaagtcctgaaggctgacatgacagattctaagctgggtccagctgaagtctggacatccaggcaggctctgcaggacctgtaccagaaaatgctagttaccgatttggaatacgctttagacaagaaagtagaacaggatctctggaatcacgcctttaagaatcagatcacaacactacaaggccaggcaaagaatcgagcaaatccgaatcggagtgaagttcaggcaaacctttctctgttcctagaggcagctagtggcttctatactcagttattacaagaactgtgtacagtatttaatgtagatttaccatgccgtgtgaagtcttcccaattgggaattatcagcaataaacagacgcataccagcgccatagtgaagccacagtctagctcctgttcctatatctgccagcactgcctcgtccaccttggagacattgctcgatacagaaaccagaccagccaggcagagtcctactataggcatgcagctcagcttgtcccctccaatggtcagccttataatcagttggctatcttagcttcttccaaaggagaccatctgaccacaattttctactactgcagaagcattgctgtgaagttccctttcccagctgcctccactaatctgcaaaaagcactttctaaagcactggaaagccgagatgaggtgaaaaccaagtggggtgtttctgacttcatcaaggcctttattaaattccacggtcatgtgtacctgagtaagagcttggaaaagttgagccctcttcgagagaaattggaagaacagtttaagaggctgctattccaaaaagctttcaactctcagcagttagttcatgtcactgtcattaacctgtttcaacttcatcaccttcgtgactttagcaatgaaaccgagcagcacacttatagccaagatgagcagctatgttggacacagttgctggccctctttatgtcttttcttggcatcctgtgcaagtgtcctctacagaatgagtctcaggaggagtcctacaatgcctatcctcttccagcagtcaaggtctccatggactggctaagactcagacccagggtctttcaggaggcagtggtggatgaaagacagtacatttggccctggttgatttctcttctgaatagtttccatccccatgaagaggacctctcaagtattagtgcgacaccacttccagaggagtttgaattacaaggatttttggcattgagaccttctttcaggaacttggatttttccaaaggtcaccagggtattacaggggacaaagaaggccagcaacgacgaatacgacagcaacgcttgatctctataggcaaatggattgctgataatcagccaaggctgattcagtgtgaaaatgaggtagggaaattgttgtttatcacagaaatcccagaattaatactggaagaccccagtgaagccaaagagaacctcattctgcaagaaacatctgtgatagagtcgctggctgcagatgggagcccagggctaaaatcagtgctatctacaagccgaaatttaagcaacaactgtgacacaggagagaagccagtggttaccttcaaagaaaacattaagacacgagaagtgaacagagaccaaggaagaagttttcctcccaaagaggtaaaatcccagacagaactaagaaagactccagtgtctgaagccagaaaaacacctgtaactcaaaccccaactcaagcaagtaactcccagttcatccccattcatcaccctggagccttccctcctcttcccagcaggccagggtttccgcccccaacatatgttatccccccgcctgtggcattttctatgggctcaggttacaccttcccagctggtgtttctgtcccaggaacctttcttcagcctacagctcactctccagcaggaaaccaggtgcaagctgggaaacagtcccacattccttacagccagcaacggccctctggaccagggccaatgaaccagggacctcaacaatcacagccaccttcccagcaaccccttacatctttaccagctcagccaacagcacagtctacaagccagctgcaggttcaagctctaactcagcaacaacaatcccctacaaaagctgtgccggctttggggaaaagcccgcctcaccactctggattccagcagtatcaacaggcagatgcctccaaacagctgtggaatccccctcaggttcaaggcccattagggaaaattatgcctgtgaaacagccctactaccttcagacccaagaccccataaaactgtttgagccgtcattgcaacctcctgtaatgcagcagcagcctctagaaaaaaaaatgaagccttttcccatggagccatataaccataatccctcagaagtcaaggtcccagaattctactgggattcttcctacagcatggctgataacagatctgtaatggcacagcaagcaaacatagaccgcaggggcaaacggtcaccaggaatcttccgtccagagcaggatcctgtacccagaatgccgtttgagaaatccttattggagaagccctcagagctcatgtcacattcatcctctttcctgtccctcaccggattctctctcaatcaggaaagatacccaaataatagtatgttcaatgaggtatatgggaaaaacctgacatccagctccaaagcagaactcagtccctcaatggccccccaggaaacatctctgtattccctttttgaagggactccgtggtctccatcacttcctgccagttcagatcattcaacaccagccagccagtctcctcattcctctaacccaagcagcctacccagctctcctccaacacacaaccataattctgttccattctccaattttggacccattgggactccagataacagggatagaaggactgcagatcggtggaaaactgataagccagccatgggtgggtttggcattgattatctctcagcaacgtcatcctctgagagcagttggcatcaggccagcactccgagtggcacctggacaggccatggcccttccatggaggattcctctgctgtcctcatggaaagcctaaagtctatctggtccagttccatgatgcatcctggaccttctgctctggagcagctgttaatgcagcagaagcagaaacagcaacggggacaaggcaccatgaaccctccacactgaggccaaagtggcaacctgggaatgaaggctccataaaccatggcatgttgggtttgcaggactggcccacacagtcccctgcaggtggcagccctcttttctgtttctcgctgtcaagagggtgtaagtattccaccagcccgctgagtgtgcacgaaatgttcgcagtgcaacaaaaagaaaaatccatcaggaactctccgtccccccggggccttccggagggagagagagaggaactgctgtttatctcactcagttacttggtatcaccgcctctcaccttctccatcgtgcatgtccccagccacatgggaagtgaaagctgagaagggaaggcagatgggagaagccaatgggaacttctcagtccttttttcctctttggggaataaaataggaatccattaatgattgctttgctgactgagaatgtagttgaaattaaacatcttttattattattactctcagtagtaaaatatcacactgaattcttccatacacaggtgtgcttctagtcagtgtgtagcaaggaaagccccgttcactgctcctgtgagaggttggtggtgacaggatggggaaccgacctcttcagccagtggaaatgttccataagggagagttcaaggcctgtcagaaggctctggtaggccttcctctggccaggagactccagcagggaatgcccttcactctgtaggtgctcgagccccaatcgaggatacagtgtgggtggtggtgctgggctggactagcaggtagactgctgtaggatttcaaattacgtttttgattcctgtacattttacagtcgcacagcaagcagtctcacagaaggcaggctagtccattcacagcctgacacgttctaataggtagaagctttcagtgtggttattttttctttggttggtttttgtgcccccattctacttcccaccctcctgccccatctccatcccttcttttacccaatgctgtatgctagtaattgtttttattcctaatgtgtgcaacatcacatctccccaagaagcaacagcatggggtccagcagttggggcccaaaagacagtctgaagaggaaggaagcagcagtatctgcgtagcccacagagggcccaggcccctgcccagctgcagtctcccagcctccactttcagagtgaaattcaaggcagcacggacatgtgcccatcaggcacagaagaaaacacgacgtcgtccattttggaagagacgaaagaaaggaaaataaactctttgtatgatatttattaggaggaaagaggactgaaaatgttcttgtgtagaaacagaaggacagcatttctgttagtcatttcctggaaaagtaatattttaaggggaaattatggaaacaatctaattgttcaattgctgtgctagtggtagggtttattttctgggaggtctctcctttgtgtgtctgtatgtttgtgtacacacacgtgcccatctgctgtcccagaggggaggggttgtgtgtgcgagtgtatggagttagtgtggaacttaagagctggaagacagctgtagagcaaagcacatccaggagccccagttgtcactgcagtctgggcaaccccagcaatgaaaaggggtgagataacgctcattgctcttcagagagagtggttggagccccccccgccccgtatgcttacattattgctcttttagtttgacatggtgtttgggttttgtttttttgaaaggtctgaaaaggtgaagccccctacccaatggcaatatgaaaccttttgtgcttctcttcagccccttccctgtgtccacctttctctcctcttcccaagcctttttcctactacctttacccagtttgtgtgtttgagctctgcattcaggcagctgcaacattccagtgtttgaactgtcactgattcttgcgccctagacaagctaaccaggtttaccatctcactcccagtaatacccagctcctatctaaagccccattctgcatgagaatttggtgtttggaatgttttctgactcttggggcgggattcctcgccttatcatcctcactgtggagtaatgagggggaggagaatctttatcagaaactggttttgtgtagtaaactttcttttgtggttttttgttttgttttctgggttttgttttttgtttttgtctgtgcaagacctgcagctgctgaaaatcagctttgcctttaattaaaccatgttctctccaacc

SEQ ID NO: 3751 - DNA, 641 bp, Homo Sapiens
  misc_feature (541)..(541): n is a, c, g, or t
tctgtattggattttaccagcttgacttttactgctcagatgctttctttcccccccttagacgctgtaattctcttgggaagagtaactattcttaaggtttttacagatacccaccttagttgtaaattggatagtttatatttctgggactttttaaatgaaaatgtggaatgttaagttacaaaagacttttcatcagaaaatttcaaacaaagtaaacatggcgttttatagtcctctaaaatctaggtgctcccacccaccaaaggcatatcctgcaaagggctgtgaactatcttggtgaactgtcttgggtcccctttccatgtatgttttcttgtcactgaaaacaaacaacgctgagtttatcaagaaaatttaaattgggggatcataataattccaaccaagtgacaactctgacatcaaggttattaggagctgtacatccaattcaagttttatttgctgctattctgggagaataaacttgtatatggagaataaactaataaacttgtatcgaggaaatccatanagttattaattagcctgaaaaatatttcaggtaatggggtggattggcctgctttgacttttagccaccaacagagatctttgcaaccttggtcctagct

SEQ ID NO: 3752 - DNA, 489 bp, Homo Sapiens
gaaagggtctcactcttgtcacccaggctgcagtgctgtggcacaatcacagctcactgcagcctcagcctcccgggctcaagcaatcctctcacctcaggctgctgctttttttttctttttttcttatttttgagacagggcctcactctgtcacccaagctgaagtgcactggcacgatctctgctaactccaacctctgcctggacaaagaagagcaaaactccctcaaaaaaaaaaaaaaagaaaagaaaaaactccaggagactttgctttgctttagaagtaagcaatgagcagagcttccatttcttgctcagtcccaagacggcagacatatttggcttttgatgatggcaacagccaatgctagccatttcccggtgattgcaatgcggagtacctgtcaatggaacagcaccagaggcaacaacagtagcatctgcaatcaaactgagtgtctagtatttagtgttcagtatccctgg

SEQ ID NO: 3753 - DNA, 341 bp, Homo Sapiens
tcaggaaaccaggcccagaggatataagccacaatgcttctttctccttcaaaccactctttggatattccggttcccactgcttcactgcgcttcactggtcagtgcgtcactcaaactagctgaaagaattgtctaacccatacacagggacaaagtccagcaagcttatttaaccggttacacaattgcctttggtttttacagtttgttcctaagtgtttccagaggcttggttcctcttcacctgaggtagagattgaccaattatttattccagttaaaagtaggcttatttcaaaaggcagagaatttgaagctatcggggaaaggaactgtgg

SEQ ID NO: 3754 - DNA, 302 bp, Homo Sapiens
  misc_feature (184)..(184): n is a, c, g, or t
  misc_feature (208)..(208): n is a, c, g, or t
  misc_feature (240)..(240): n is a, c, g, or t
  misc_feature (294)..(294): n is a, c, g, or t
tatcactgacgtggatgaaatgaaagttccagattgtgcagaaacttttatgactctactcttggttataactgacaggtataaaaatcttcccacaacttcccgaaagcttcagttcctggagttacagaaggacttagtagatgattttaggatacgattaacacaagtgatgaaataaganactagagcttcccttggctttcgntactgttgcaattcttaatgctgtgaactacntctcaacagtacgagccagattgggctgacaatgttttcgttccacaactttcnaacagggt

SEQ ID NO: 3755 - DNA, 384 bp, Homo Sapiens
gagaaagcggccacttggagatcgtgcacatgaagactacagatattatgaatacaaccatgatctcttccaaagaatgccacagaatcagaggatggcttgagccaagaggcagaggttgcagggtcaagatcgcaccacttgcactgcagcctgagagagagagagccagaccttgtctcaaaaaataaaagataaaaaaataaaaacaaaataaggaatccttttaaagcatgttgagaaagtattttttggtatgaatgggtgacgggccttttaatctttcaggaatacatataagcaggaatacttagcctgtattgggaaggtgcgtgaatctcaaagttgctaacatcatcttccttattttcagccagtgctgtt

SEQ ID NO: 3756 - DNA, 1789 bp, Homo Sapiens
gcgcgctcgtcgccgaggcgagctaagccgccgctcgccatggggagccccgcacatcggcccgcgctgctgctgctgctgccgcctctgctgctgctgctgctgctgcgcgtcccgcccagccgcagcttcccaggatcgggagactcaccactagaagacgatgaagtcgggtattcacaccctagatataaagataccccgtggtgctcccccatcaaggtgaagtatggggatgtgtactgcagggcccctcaaggaggatactacaaaacagccctgggaaccaggtgcgacattcgctgccagaagggctacgagctgcatggctcttccctactgatctgccagtcaaacaaacgatggtctgacaaggtcatctgcaaacaaaagcgatgtcctacccttgccatgccagcaaatggagggtttaagtgtgtagatggtgcctactttaactcccggtgtgagtattattgttcaccaggatacacgttgaaaggggagcggaccgtcacatgtatggacaacaaggcctggagcggccggccagcctcctgtgtggatatggaacctcctagaatcaagtgcccaagtgtgaaggaacgcattgcagaacccaacaaactgacagtccgggtgtcctgggagacacccgaaggaagagacacagcagatggaattcttactgatgtcattctaaaaggcctccccccaggctccaactttccagaaggagaccacaagatccagtacacagtctatgacagagctgagaataagggcacttgcaaatttcgagttaaagtaagagtcaaacgctgtggcaaactcaatgccccagagaatggttacatgaagtgctccagcgacggtgataattatggagccacctgtgagttctcctgcatcggcggctatgagctccagggtagccctgcccgagtatgtcaatccaacctggcttggtctggcacggagcccacctgtgcagccatgaacgtcaatgtgggtgtcagaacggcagctgcacttctggatcagttttatgagaaaaggagactcctcattgtgtccacacccacagcccgaaacctcctttaccggctccagctaggaatgctgcagcaagcacagtgtggccttgatcttcgacacatcaccgtggtggagctggtgggtgtgttcccgactctcattggcaggataggagcaaagattatgcctccagccctagcgctgcagctcaggctgttgctgcgaatcccactctactccttcagtatggtgctagtggataagcatggcatggacaaagagcgctatgtctccctggtgatgcctgtggccctgttcaacctgattgacacttttcccttgagaaaagaagagatggtcctacaagccgaaatgagccagacctgtaacacctgacatgatggttcctctcttggcaattcctcttcattgtctacatagtgacatgcacacgggaaagccttaaaaatatccttgatgtacagattttatttgtaattttaaaagtctattttattatgagctttctttgcacttaaaaattagcatgctgctttttgtacttggaagtgtttcaaaaaattatatgaccatatttactctttctaacctttctttactccatcatggctggttgatttgtagagaaattagaacccataaccatacacaggctatcaacatgttattcaatgtgacacctaactcttttctattttgttttttaagtaagacttttattaataaaacg

SEQ ID NO: 3757 - DNA, 181 bp, Homo Sapiens
ttttttgtggaagaatacagaaatatgtttaatacttagtatcaaactaaaaagtaatataaaattacaaaacttcttttttttcatgcacaggctttttctggtaaggaccgctgggattgaacagaagcttccggtaaataagggccccgtcggcaagacagcatactgctgtcacaag

SEQ ID NO: 3758 - DNA, 735 bp, Homo Sapiens
  misc_feature (538)..(538): n is a, c, g, or t
  misc_feature (639)..(639): n is a, c, g, or t
tgatagttgaactgtaatttctactcttaagtgagatatgaagcattatccttttgttcagttgccccgggcttttgaacagaagagtaaatacagaattgaaaaagataaacactcaaccaaacaatgtgaaaacgggttctgtagtatttgtaaaaaggcccggcccaggaccactgtgagctggaaaagggagaaaggcagtgggaaaagaggtgagccgaagatcaattcgacagacagatggtgtgtatgcccctccctgtttgacttcacacacactcataactttccaaatgaaaccccacagtatagcgcatattttcgatatttttgtgaattccaaaaggaaatcacagggctgttcgaaatattgggggaacactgtgtttctgcatcatctgcatttgctccccaagcaatgtagaggtgtttaaagggccctctgctggctgagtggcaatactacaacaaacttcaaggcaagtttggctgaaaacagttgacaacaaaggggccccatacacttatccctcanattttaagtgatatgaaatacttgtcatgtctttgggcaaatcagaagatattcatcctgcttcaagtcagcttcagaaatgttttataagggacttttanctctggaactcaaaatcaattttattaagagccatattctttaaaaaaaaaaagctggataataattttttggaatatttcaagcctttaccaagc

SEQ ID NO: 3759 - DNA, 422 bp, Homo Sapiens
gcagcgagttcggcacgagcgcacggtcctttgtcgcaggtgtgcctgtgctcctaccccagcgtggtgggagtgcgacaccaggcttctccctcctccctggcctcctgtgccttcagcctccacatctcctgagatccttcccaccccacacttacacaggtccccacacgcccctgtggcccctaaaccggcacccaaccccacttaccctggggccgggactggggtgtcagagctgagccagggaccttgggaggcggctgggaccggcgccttctgctccctctttcattttccctttcggatttgcgccaggatggaggacaggacaggatggctgagaggggctagcgcttccccttctcttaaagggacacgggtgaccctgctggctggctccgcccttgtgaacaggcacg

SEQ ID NO: 3760 - DNA, 483 bp, Homo Sapiens
cacgaggcctgcggagggggtccctgcttacatatccctgcacaggctcctgaggaagatgctacgagggtctggcctcccagctgtgagccgggaaaatccagttgccagtgactcctatgatgctgcggtgctctccctggccactgggctggctcactctggaactgactgctcccagctggcccaggggcttggcacctggacctgctcctccagtttgtaaccctcaattcagcccatcaccgtggagatcaatgggatcaacccaggcaacaatgattgctgggtgagtaccgggctctacctcctggaaggacatgatgcagaagtctcactgtctgaagctgctgcctctgctggcctgagggtacagattggctgccacaccgatgaccttaccaaggccaggaagctatctcgagcccccatggtgactcaccaatgctggatggacaggactgagcggtcagtctcctgcct

SEQ ID NO: 3761 - DNA, 1196 bp, Homo Sapiens
aggtccggcttaccgtcgtttacgacagtgtcaggatcgcgggcttgctttccggtagcgtgggctgacgcctcgctcaatttctcacagggctgcgcaggtttcccccgtctgcgaatggaccactggaggggttcaaaggttcgcgtcccagtacgggaatgagcctctttgatctcttccggggctttttcggctttcctggacctcggagccacagagatcccttttttggagggatgactcgagatgaagatgatgatgaggaagaagaagaagaagggggctcatggcgccgtgggaacccaaggttccatagtcctcagcacccccctgaggaatttggcttcggcttcagcttcagcccaggaggagggatacgtttccacgataacttcggctttgatgacctagtacgagatttcaatagcatcttcagcgatatgggggcctggaccttgccttcccatcctcctgaacttccaggtcctgagtcagagacacctggtgagagactacgggagggacagacacttcgggactcaatgcttaagtatccagatagtcaccagcccaggatctttgggggggtcttggagagtgatgcaagaagtgaatccccccaaccagcaccagactggggctcccagaggccatttcataggtttgatgatgtatggcctatggacccccatcctagaaccagagaggacaatgatcttgattcccaggtttcccaggagggtcttggcccggttctaacgccccagcccaaatcctatttcaagagcatctctgtgaccaagatcactaaaccagatgggatagtggaggagcgccggactgtggtggacagtgagggccggacagagactacagtaacccgacacgaagcagatagcagtcctaggggtgatccagaatcaccaagacctccagccctggatgatgccttttccatcctggacttattcctgggacgttggttccggtcccggtagccttgttaaccctcagaggccttcaagtcctttccacctctcacccattgcccaccattaataagcttagcttctcttgccacctcaggggcttggatatgtggaatagtgaactggggccatgtcagtttgtcactcacccaaactgaccaataaaacctttatttatgctaaaaaaaaaaaaaaaaaaaaaaa

SEQ ID NO: 3762 - DNA, 3247 bp, Homo Sapiens
ggagatgagacataagcaggtaaaagaaaatcgcttaagacgtgagaaagaactggagtaccagagaatagaaaagaccctgaaaaaatcggccttcttggaggctcagtgtctggtgcaagaagagaagaaaaggaaggctctggaggccaagaaagaggaagaggagattcaaagggagatggtgaagctgcggagggagataattgagaggagacgcactgtgaaagcagcatggaaaatagagaagaaaaggcaagaagagaattctcaaaatagttcagaaaaagtcatgtttcaaagtactcacattcttccagatgaggaaaaaatggtgaaggaaagaaaaaggaaattgaaagaagtattaatccaaactttcaaagaaaatcaacagtgtcaaaaacggtatttcgctgcctggcacaagctgattcttgatcataggattaagctggggaaagctgggaccctgtctgactggaagattcagctgaaggtcctgcgggcctggagagactacacaagattccagaagttggagcgggagactcaagccttggaaaatgatcttagggaagaaaacagaaaacaacaactggccactgagtataaccggaaacaagttctccgacactgctttacagaatggcagcattggcatggcgccgagctcctgaagagagagctggctctcacaaaagaggaaactaggaagaagatggatgcactgctgcaggcagcatcactggggaaactcagtgccaatgggttatcaggcatcagtctacctgaggaggcaacagccatggtgggtccaccagtaaaaaatggacaggagactgctgtgccccctttgtgggaaaagcctcccttgggaagcagtggttgtatgctcagtcctcccctgggaagaacaacaacaggcaacttgcagggttcccttcagaatgtctctctgagtgcacctggcaataagcagcacaagaccctgggtgctgaaccctctcaacagcctggcagcaacgagacactcagaactaccagccagaaagcagaaccgctttgcttgggtcatttccacaaccgccatgtcttccagcaacagctgattgagaagcaaaagaagaaacttcaggaacagcagaaaacaattctcgagctgaagaaaaacctgcagctggcagaggctcagtgggcagcagagcatgccttagcagtcacagaagcacagagccacctgctgtcaaagcccagagaagaggaaccaagaacctgccagatgcttgtgaattcacctgttgcttcccctgggactgaaggcagaagtgactcccgaaattctctttctggactcagaaggaaaccaaagcaattgatgacaccgcatcccatactaaaagctatggaagagagagcaattcaacgagctgaatgtaggcggatcttggcagagaagaagaaaaaacaagaagaagaaaaattggcccagttaaaggcccaagaggaggaacgtcagaaaagggaggcagaagaaaaggaggcacagcttgaaagaaaacgagaagagaagagactgaagaaaatgaaagaacttgagaagcagaagagaattaagaggaaccagcagctggaagcaatagccaaagaacattatgaaagggtcttgctaaggaaaaaaggtctagagccttggaagagattgagaatgcaaagcaaacaaaacatccaggtggcagaagaacattactctttgttcctgcagaggaaatacatgctgacgtggttccagcgtagtcaggaaagtctggctagaaagatggcccaggctgatcaattttattcccaaatactgcttaagagagtcatccagagctggctacagtacgtgattgatctgcaggaagaagtaagaaaattttgtgtacattttcttcaaaagaagattttcagggcctggtttaacatggtcagggaggtgaagatcgattctcagggcaagcatgagattgcagcggagcacagtgacaggaggatcctctggatcacccttcggacatggaagaagtttgtaaaatttatgaaagaggaaagagtaaaagaagaaaggcgacagcaacttcgtaggaaggtagttgaaattcttccagacttccaggtacctggaaggtaccacgagctatatcagcaatcagatacttggtccttgagtaagacaagtctggtgaacgaatgagccagattagtgtaatatttaggacaggaagctcgactagtctgtatgtgtgttatctccacccacccacacacatacatacatacacctggtttattctctacgagctacttcttagatcaaaggaattattttgagaatttttattcccttctttgacttttcctggattgctagtcattcactatagcatttatcacagtgggatcatccaaaggaacattctagagatcgtctgttcaaatatatcctatatatttttagcatagtaaactttaaaaaggacaagtgtttgcctgactgagcctgtgaagaaaatgtgtccgtatagcacgacaggagttgctgatgtgaccttaatgaaacagaaataaacaggggtgagtgctcggaaaggaagggcgggccaaggcactcagccttctagtgcagtagcatcagtgacacgcaccccaccagacctcgtccactttcaccacccctgaaggcagaccatgtatgaaaaggttctctacacagctgctgcagaggacagcagcttatcctgatttcagagaaactgaggcaccagagatgcttctcttccgtgcaccttgataagcatgaaggacattccaaaaggtaataactctatcatgacagtccagcaattcattaaattatctgttcatgctcccacctgcaactgctgaataatacactcagtttgtcttctagtactcagctcagtttgatctagatattgagatacctatcttgaattcaaagaatgttttcatctttaagatgctataaagactgataaaatgctctcttctatgaattgtgttagagaattacctgctagaaaaataatttttcattataaaatacacatttattatataacaaattcaagtagtccataaatgcatatggtaaaatgagaaagtcctgtgcagtcctgagatgattactcttatttggtgtgctgaaaatttgagttgacaaaataaaattctgtggtttttt

SEQ ID NO: 3763 - DNA, 2153 bp, Homo Sapiens
tcgggaaggaagagtctgtcgcgagcgcgagcttctgagctcgacgggccgagctggcagctggttggtgcttacaccttggccgcagcggcaggtccttccacgtgctttcggcggcgacatggagctggaggagttggggatccgagaggaatgtggcgtgttcgggtgcatcgcctcaggagagtggcccacgcagctggatgtaccgcatgtgatcactctgggactcgtggggctgcagcaccggggtcaggagagtgctggtattgtgactagtgatgggagttcggtgccaacattcaaatcacacaagggaatgggtcttgtaaatcacgtctttactgaagacaatttgaaaaaattatatgtttcaaatcttggaattggacacaccaggtatgccaccacaggaaaatgtgaactagaaaattgtcagcccttcgttgttgaaacacttcatgggaagatagctgtggcacataatggcgaattggtaaatgctgctcgattaaggaaaaagcttctgcgtcatggtattggtctgtctacaagttctgatagtgaaatgattacccagttactggcgtatacccctcctcaggaacaagatgacaccccagactgggtagccaggattaaaaacttgatgaaggaagcacccacagcatactccctgcttataatgcacagagatgttatttatgcagtacgagatccttatggaaatcgtcccttatgcattggtcgtcttattccagtgtctgatataaatgacaaagagaaaaaaacatcagaaacagaaggatgggtggtgtcttcagaatcttgtagcttcttatctattggtgcaagatattaccgtgaagtcttgcctggagaaattgtggaaatatccagacacaatgtccaaactcttgatattatatcaaggtctgaaggaaacccagtggctttttgtatctttgaatatgtttattttgcaagaccagacagtatgttcgaagaccaaatggtttatacagtaagataccgttgtggccagcagctagcgattgaagcacctgtggatgcagatttggttagcactgttccagaatctgctacgcctgctgctcttgcttacgcaggaaagtgtggacttccatatgtggaggtgctgtgtaaaaaccggtatgtagggagaaccttcattcagccaaacatgaggttaagacaacttggtgttgcaaaaaaatttggagtattgtcagacaactttaaaggcaaaagaattgttcttgtagatgattcaattgtcagaggcaataccatctcacctataataaaactgctcaaagaatctggtgcaaaagaggtacacattcgagtagcttcaccaccaattaaatatccatgcttcatgggaataaacattcctacaaaagaagagctcattgccaataaaccagaatttgatcaccttgcagaatatctaggagcaaacagtgttgtgtatctgtcagtagaaggactggtttcatctgtacaagaagggataaagtttaaaaaacagaaagagaaaaagcacgatattatgatccaagaaaatggaaatggtctggaatgttttgaaaagagtggtcattgtacagcttgtctcactggaaaatatcctgtagaattagaatggtagctggtagggttggatgtgtgtagtttcaagatagaaagttggtcaagaagttatagtggtcacacctcatctatttactgttactcagttggtacaatgtaaaatgccatgcttatgtttataagttttgagatttttttttttttctgaaaaggataccaaagtgcgataactgaacatttccaattgcatataatacaacaatatgtggtgttcttttttttacacaagcattggctagcctttttaacctggtcagagaaggcaggtggtcactgacatttcccaagtccatgctttaaagggtttgcaagaagttagggttaaggagaggtgatgccaacaagacaggtgagttaaatataccatttcacacaaagtttgaatagaatacattatacctcataggtgtctagcctctacagttctggctgtagttatgaccttggcttccctgtctaactgtagacaaatcttt

SEQ ID NO: 3764 - DNA, 5114 bp, Homo Sapiens
gataaggtggcggcggcgaaggcagcggcaggtcgggagcaagatggcgctgcggccaggagctggttctggtggcggcggggccgcgggagctggcgcggggtccgccgggggaggcggcttcatgtttcctgttgcaggtgggataagaccccctcaagcaggcctgatgccgatgcagcaacaaggatttcctatggtctctgtcatgcagcctaatatgcaaggcattatgggaatgaattacagctctcagatgtcccaaggacctattgctatgcaggcaggaataccaatgggaccaatgccagcagcgggaatgccttacctaggacaagcacccttcctgggcatgcgtcctccaggcccacagtacactccagacatgcagaagcagtttgccgaagagcagcagaaacgatttgaacagcagcaaaaactcttagaagaagaaagaaaaagacgccagtttgaagagcagaagcaaaagctcagacttttgagcagtgtgaaacccaagacaggagagaagagtagagatgatgctttggaagccataaaaggaaatttagatgggttttccagagatgcaaaaatgcaccctactccagcatcgcaccccaagaaaccaggcccttccttggaggagaagttcctagtatcttgtgatataagtacatctgggcaggaacaaattaaattaaatacttctgaagttggccacaaagccctaggcccaggttccagtaagaagtatcccagtttaatggccagtaacggggttgctgtagatggatgtgtaagtggtaccaccactgcagaggcagaaaatacttcagatcaaaacctgtcaattgaagagagtggtgtgggagtatttccctcacaggatcctgctcagcccagaatgcctccttggatttacaatgagagtttggttccagatgcctataagaaaatcttagaaaccacaatgactccaactggaatagatactgccaaactgtatcccattctgatgtcatctgggcttcccagggaaactcttggacagatatgggccttagctaatcgaactacacctggcaaacttacaaaagaagaactttataccgttctagccatgatagcggtaacacagaggggcgttcctgcaatgagtcctgatgctttaaaccagttcccagcagctcctattccaactttaagtggcttttctatgactctgcctacaccggtgagtcagccaactgtgataccttcaggtcctgcgggctccatgcccctcagccttggacagccagtcatgggcattaaccttgttggaccagtgggtggagctgcagcccaggcttctagtggtttcataccaacctaccctgcaaatcaggtagtaaagccagaagaagatgacttccaggattttcaagatgcttctaagtcaggatcccttgatgactcattcagtgatttccaagagttgcctgcttcttcaaaaacaagtaactcccagcatggaaacagtgccccttctttgttgatgccacttcctggaactaaagcattgccttcaatggacaaatatgctgtgtttaaaggaattgcagctgacaagtcctctgaaaatactgttccacctggagatcctggtgataaatatagtgctttcagagaacttgaacagacagcagagaataaacctttaggagaaagctttgcagaattcagatctgcaggaactgatgatggtttcaccgattttaaaacagccgatagtgtatcaccactagagccaccaacaaaagacaaaacttttccaccatccttcccctcaggaactatacaacagaaacaacaaacacaagtgaaaaaccctctgaacttagcagacctagatatgttttcctcagttaattgcagcagcgagaaaccattgtctttttcagctgtgtttagcacatcaaaatcagtttctacaccacagtcaacaggttctgctgctactatgacagcattggcagcaacaaaaacttctagtttggctgatgattttggagaattcagcctttttggggaatattctggtctagcacctgttggggagcaggatgactttgcagattttatggctttcagtaatagctctatttcatctgagcaaaagccggatgacaaatatgatgcccttaaagaggaagccagtcctgttcctctaaccagcaacgtgggcagcacagtgaagggtggacaaaactcgactgctgcgtctaccaagtacgatgtcttcagacaactttctctggaagggtctggactaggtgttgaagacctgaaagataacactccttcaggaaaaagtgatgatgattttgctgacttccactccagtaaattttcttccataaactcggacaaatccctgggagagaaagcagtggctttcagacacaccaaagaagactctgcatcagtgaagtccttagatctcccttccattggtggcagcagtgttggcaaggaggactctgaagatgcactctctgttcagtttgacatgaaattggctgatgtgggaggagatcttaagcatgtcatgtctgatagctctttggatttaccaacagttagtggccagcatcctcctgctgcagatatagaggacttaaaatatgctgcttttggaagctacagtagcaattttgcagtgagcacacttacaagctatgactggtcagacagggatgatgcaactcagggcagaaaactctctccatttgtcctctcagcaggaagtggatccccctcagccacctcaattcttcaaaagaaagagacttcatttggcagttctgaaaacatcaccatgacatctctctccaaagtaacgacctttgtaagtgaagatgctcttccagagaccaccttcccagctcttgccagttttaaagacacgattcctcagaccagtgagcaaaaggaatatgaaaacagagactataaagatttcacaaaacaggacctgcctacggctgaacggagccaggaggccacgtgtcccagcccagcgtccagtggtgcctctcaagaaaccccgaacgaatgttcggatgactttggagagtttcaaagtgaaaagcccaaaatcagcaaatttgacttcttagtagccacttcacaaagcaaaatgaaatccagtgaagaaatgatcaaaagtgagctggcaacctttgacctttctgttcaaggatcacacaagaggagtttgagccttggtgataaagaaataagccgttcttctccttctccagctttggagcagcctttcagagaccgttccaatactctgaatgagaagcccgccctgcccgtcatccgagacaagtacaaagacctgacgggagaggtggaggaaaatgagagatatgcatatgaatggcagagatgcctggggagtgccctgaatgtcattaagaaggcaaatgataccttaaatggaatcagtagtagttctgtttgcacagaagtaattcagtcagctcaaggcatggaatatttattaggtgttgttgaagtgtacagggtaaccaagcgtgtggagctggggataaaagccactgcagtgtgcagtgagaaactccagcagttgctgaaggacatcgataaagtatggaataacctaatcggcttcatgtcactcgccacactcacaccagatgaaaactcgctggatttttcctcctgtatgttacggcctgggattaaaaatgctcaggagcttgcctgtggagtgtgcctcttgaatgtggactcgaggagccggaaagaagagaagcctgcagaagaacatcctaaaaaagcattcaactcagaaacagacagtttcaagctggcctatggagggcaccagtatcacgccagctgtgccaacttctggatcaactgtgtcgaaccaaagcctcctggcctcgtcctgcctgacctgctctgaacaactcctctgtgaagcattgacttttttttttctgtgacaccccacggggtgacagggaccaataaatagaatgcgagcactgcacagttcgcttccctgaatcgatatgaagaacaccgcaagggacggggcccccgtcatccccacggccagtctgcaggacttcaggtaaaattgtcccacccaaactgcacgtggcaccagaagcttgctcacttatctctacttaagattttctgaaatacggaccacggctttcttgatctaaggaagaacttgctgctgcagtattgaaactgtgaagaactgacatttgaagaaaaatagattaccgttgcgggactagaatgggcgactgcttggagccagtgcttgtttttatctaggacacttactgtcctgtgaagtagaatacatttatctgcatttagtttgttaatgtctgaaatgaataaaaagaggaaattgcgattaaactgatgttctgctttttatggagaagattctgcccatctcccctggacagtagcaggcaggtgagggcagattttacccacttggttgtcacaactgaaccagttctctactccttcccttcacttctgtccactctcaagactttttcccaaaacatgcctgggcactctgcagccgtgaagaatgctcattttgacagaggcccaaatcctgtgtattaggataatatccttccccccgggagccttcgctgcaaacctgttctgccgcatgcaaagactgtgaccatggagttttctcagacaagatttggaaaggcagtggaatgaaatctctttgcagtggcctctctccaaatttccaaagatgactgcatagggaccaacactgcctgactttgcagtatctgtgagaaaaacctgaaaattaattcagggtgaaaatgtggagctctcggcctagtgtaaagtatcaagatgtatatttatgggatagatacatgacttagaagaagtagaagaaaattgtccagaaacagtactgaattttagatagaaaaggctcatgcttcctggagtagggaattgtctttgccatttaatgtgaatgcataaaattaggggaaaaaccaaaaaaaaaaaaaaaa

SEQ ID NO: 3765 - DNA, 798 bp, Homo Sapiens
  misc_feature (477)..(478): n is a, c, g, or t
  misc_feature (568)..(568): n is a, c, g, or t
  misc_feature (590)..(590): n is a, c, g, or t
tgcttttcctggcttccgtggtgtgtgcctgccagcctcatggtgggggcgggggctctcagtgacagtctgcaggagtttagcaacacccaggttcattcaccacggtgggaaggattcctgctaagcttccttgcctctgtccagctcccagggcgtctgcctccctcctgccccagggagagcttctgggtgagtctcgctggcactcctgccccgggcttcctgctctcaggccttggcctgctgcaccttggccaactgcaccacccggcacatcatagccccactcaggtcagagctgtgtctcagccgacgtggggttctgaggttctcaccaagatccagactcaacgcttgtgggtttgttgtctcagtcctggcggtggaggttctcccgaggcctcagcgcctctgttctcggaagtctctttacatgttagtggaaccctctgttcctgttgaatcattcttcgnngtaaatggttctgtctcttgactgatacatgatagtcatcatgtatgtattctgcggctgcttttgattttttctctttatccctggttntctgtaatttgataagctttanggtattgtgtgtgtgtttgggggggttgtcaagaatttgaggctttgtcatttttatgccatttggaaatatctagctatccggcctctccccctgctcctgcagccccagtactcgatgggctgtttgtgtggacaatgggtccgaagttgctcatcttttcagttgggtcatttttggagatttgttcacgcttaagccatgtctt

SEQ ID NO: 3766 - DNA, 3025 bp, Homo Sapiens
gcacgagcaggcagttcagattaaagaagctaattgatcaagaaatcaagtctcaggaggagaaggagcaagaaaaggagaaaagggtcaccaccctgaaagaggagctgaccaagctgaagtcttttgctttgatggtggtggatgaacagcaaaggctgacggcacagctcacccttcaaagacagaaaatccaagagctgaccacaaatgcaaaggaaacacataccaaactagcccttgctgaagccagagttcaggaggaagagcagaaggcaaccagactagagaaggaactgcaaacgcagaccacaaagtttcaccaagaccaagacacaattatggcgaagctcaccaatgaggacagtcaaaatcgccagcttcaacaaaagctggcagcactcagccggcagattgatgagttagaagagacaaacaggtctttacgaaaagcagaagaggagctgcaagatataaaagaaaaaatcagtaagggagaatatggaaacgctggtatcatggctgaagtggaagagctcataaaaatggaggagcagtgcagagatctcaataagaggcttgaaagggagacgttacagagtaaagactttaaactagaggttgaaaaactcagtaaaagaattatggctctggaaaagttagaagacgctttcaacaaaagcaaacaagaatgctactctctgaaatgcaatttagaaaaagaaaggatgaccacaaagcagttgtctcaagaactggagagtttaaaagtaaggatcaaagagctagaagccattgaaagtcggctagaaaagacagaattcactctaaaagaggatttaactaaactgaaaacattaactgtgatgtttgtagatgaacggaaaacaatgagtgaaaaattaaagaaaactgaagataaattacaagctgcttcttctcagcttcaagtggagcaaaataaagtaacaacagttactgagaagttaattgaggaaactaaaagggcgctcaagtccaaaaccgatgtagaagaaaagatgtacagcgtaaccaaggagagagatgatttaaaaaacaaattgaaagcggaagaagagaaaggaaatgatctcctgtcaagagttaatatgttgaaaaataggcttcaatcattggaagcaattgagaaagatttcctaaaaaacaaattaaatcaagactctgggaaatccacaacagcattacaccaagaaaacaataagattaaggagctctctcaagaagtggaaagactgaaactgaagctaaaggacatgaaagccattgaggatgacctcatgaaaacagaagatgaatatgagactctagaacgaaggtatgctaatgaacgagacaaagctcaatttttatctaaagagctagaacatgttaaaatggaacttgctaagtacaagttagcagaaaagacagagaccagccatgaacaatggcttttcaaaaggcttcaagaagaagaagctaagtcagggcacctctcaagagaagtggatgcattaaaagagaaaattcatgaatacatggcaactgaagacctaatatgtcacctccagggagatcactcagtctgcaaaaaaaaactaaatcaacaagaaaacaggaacagagatttaggaagagagattgaaaacctcactaaggagttagagaggtaccggcatttcagtaagagcctcaggcctagtctcaatggaagaagaatttccgatcctcaagtattttctaaagaagttcagacagaagcagtagacaatgaaccacctgattacaagagcctcattcctctggaacgtgcagtcatcaatggtcagttatatgaggagagtgagaatcaagacgaggaccctaatgatgagggatctgtgctgtccttcaaatgcagccagtctactccatgtcctgttaacagaaagctatggattccctggatgaaatccaaggagggccatcttcagaatggaaaaatgcaaactaaacccaatgccaactttgtgcaacctggagatctagtcctaagccacacacctgggcagccacttcatataaaggttactccagaccatgtacaaaacacagccactcttgaaatcacaagtccaaccacagagagtcctcactcttacacgagtactgcagtgataccgaactgtggcacgccaaagcaaaggataaccatcctccaaaacgcctccataacaccagtaaagtccaaaacctctaccgaagacctcatgaatttagaacaaggcatgtccccaattaccatggcaacctttgccagagcacagaccccagagtcttgtggttctctaactccagaaaggacaatgtccctattcaggttttggctgtgactggttcagctagctctcctgagcagggacgctccccagaaccaacagaaatcagtgccaagcatgcgatattcagagtctccccagaccggcagtcatcatggcagtttcagcgttcaaacagcaatagctcaagtgtgataactactgaggataataaaatccacattcacttaggaagtccttacatgcaagctgtagccagcccttcagcaccactgcaggataaccgaactcaaggcttaattaacggggcactaaacaaaacaaccaataaagtcaccagcagtattactatcacaccaacagccacacctcttcctcgacaatcacaaattacagtaagtaatatatataactgaccacgctcaccctcatccagtccatactgatatttttgcaaggaactcaatccttttttaatcatccctccatatcccccaagactgactgaactcgtactttgggaaggtttgtgcatgaactatacaagagtatctgaaactaactgttgcctgcatagtcatatcgagtgtgcacttactgtatatcttttcatttacatacttgtatggaaaatatttagtctgcacttgtataaatacatctttatgtatttgaaaaaaaaaaaa

SEQ ID NO: 3767 - DNA, 421 bp, Homo Sapiens
  misc_feature (137)..(137): n is a, c, g, or t
  misc_feature (144)..(144): n is a, c, g, or t
  misc_feature (378)..(378): n is a, c, g, or t
tagtcggattgattattctcctgtagataaccatttgtccctgctttttctgttaagtgttcaccacttgtatcattggctggcaatacctggtttgtcatagtttcacattaccttaaacagatgcccagactggnacagtgngctcatgcctttaatcctagcactttgggaggctgaggcgggtggaacacctgagatcaggagttcaagatcagcctgaccaatatggtgaaaccctgtctctactaagaatacaaaattagccaagcgtggtggtacatggctgtaatcccagctactcaggaggctgaaacaggagaattaccgagaacctggggaggtgggaggttgtagtgagccaagatcacaccattngctctccaagcctgggcaaccaagagtgaacctccgttaaaaa

SEQ ID NO: 3768 - DNA, 409 bp, Homo Sapiens
  misc_feature (357)..(357): n is a, c, g, or t
  misc_feature (381)..(381): n is a, c, g, or t
  misc_feature (391)..(391): n is a, c, g, or t
gttcgcaaacttgccggtgaaaaacagcaacagatatgatgtggaaatgacagatgaactcgttgggttacctttttcctctcatacctattcccaagcctctgaattgcccacagatgctgttgattgtatgagcagagagcttgtgtcccttactagccgaaatcctgatcaaagaaaagaatctttgtgcattagtatcactgtgtccaaggtagacaaagaccagccttccaatttaaactcctgtgaagacccagttccaggggatgttgttttttttgccacctgggtcagcacttgtcagactattcccagttggaatgaaaagcacaacaaaaggagtctttcagaggnccagccagcttagaaggatgctgntggggggttnacagtggctcttgaggga

SEQ ID NO: 3769 - DNA, 440 bp, Homo Sapiens
ggcacgagggcttgaaggaattagaaaccttgagatttggagcaatcaactgtagagagtatgaaccggaccataacctggaatcaaactttattacaaacccgaggaccctcttagggaagaagccctacatttgcagtgattgtgggcgaagctttaaagatagatcaaccctcatcagacaccatcgtatacactcgatggagaagccttatgtgtgcagtgagtgcgggcgaggttttagccagaagtccaacctcagcagacaccagagaacacattcagaagagaagccttatttgtgcagggagtgtgggcaaagctttagaagtaagtccatcctcaatagacatcaggggactcactcagaggagaagccctatgtttgcagcgagtgtgggcgaggctttagcgagaagtcatccttcatcagacaccag

SEQ ID NO: 3770 - DNA, 158 bp, Homo Sapiens
ggttccgagggaccagtggaggcatagcacagcatcgtcgggaccagactcgtctcaggccagttgcagccttctcagccaaacgctgtccaatttaaactcactaccatgagaattgcagtgatttgcttttgcctcctaggcatcacctgtgccat

SEQ ID NO: 3771 - DNA, 383 bp, Homo Sapiens
  misc_feature (37)..(37): n is a, c, g, or t
ggaggcgtcgctgattccagagagctaaagccgatgnttcgggagcaagttctgcttgaacctagccgacggttatggaaacccattgacattccaaaacaatatatacacacacacataaatcagccaaaatcagagaaaaggaacagggatttaataccttttttatgcttatttttgtcaaacatgtactcctttcatacgggtggcttttacaaggcaacttccgtcatttaatgttttcaactgtaattgtcttaatggaaatgttaaaattcatatctgattaacatttttaataacttagaggagattttaactttatttaaaaataggtaaaattattgtacctaattatgtctaaagtttattcaggggtaatt

SEQ ID NO: 3772 - DNA, 458 bp, Homo Sapiens
gcggccgcaagccgtcgccccctttaagagcctgctccgcgggactaacgttcgaacgggccctggcgcccctcctcgggctccgattggccgtgcgcggcgcacgagggcgcgccggccagccccggaacggttggcggcccttcgtgattggcggtcgagaagcctatataaggcgcggggcagccaggctgccctgtttagcgaccggacccgaaacggggaagttgtcttgtttggagaggttagtagagcagcgcgcgcgtcaccagagtcgtttctcttcggagtcttaggtgatcgagggtgtgcccagggggcggacttgtttgcgcctcccgttccctcccaatttccaaacgtgtcaccccggcgccgacggccctgtgcaggggaagcagatggagttcaagctggaggctcatcgcatcgtcagcatctctctgggcaagatctac

SEQ ID NO: 3773 - DNA, 136436 bp, Homo Sapiens
gatcatacattgcatataattgttaggttcatctagttttctttaatctaggagagtctcctgatgtgtttgggtgggtgggtgtgcatgtctttcacgacattgactttttaaaaataatttcaagccatttgtcttgcagaaagttgctcaaatagaatttaccctattattccctcttaattaaaaaaagctaggtatattgagaaaactacatagggccaggtgcagtggctcatgcctgtaatcccaacactctgagaggccgaggcaagtggattgcttgaggctggaagttcgagaccagcctggccaacatggtgaaactctctctgctaaaaatacaaaaatttgccacgcgtggtggcaggcacctttagtctcagctactcaggaggctgaggcgggagaatggcttgaacccaggaggcagaggttgcagtgagctgagatcacgtcactgcactccagcctgggaaacaaagcaagactccgtctccggaaaaaaaaaaaaaagaagaaaaaggaggaggaggaggaggaggaggagaagggagaagggagaagggagaagagaagagaagagaagagaagagaagagaagagaagagaagagaagagaagagaaaaaagaaaagaaaagaaaactacacaggtaaaatgtccttgctagggtattttatcagaaggcacatgatgtcatttggtcaagattctcttattattaaagggagaagaacagtatctggccttcatttcagcagcaagcagtctctgaatacctcttctttgcctggcagtgtactatgtcctgcagacctcaaagatgccctcaaaaacttcacattctgtggggaaacagaaatattcatgcactcattcagtcaataacatatttcttgagctccaacaatgtgccagacaccactctaagtactagaaacaaggatgatatttaaatatttaacaagtttggcatgagcacagaatcagagaagatgctctgctgagcccaataacccttaagttgctggatcatggggaaaccggggaaaaggcagaggagcaagtgggatggctgggatattggggaaggcggacaagcttcagagtagctgctatttatcagtgagtacagagtatttcaacattttaacagctgggaatgacagccgtggcttgggcatggagatgaaaaattcagccaaggtccctgacctcatggattgaccttctagtgcaggagtgggcgaacttctttggtaaatgaccaaatagtaaatatttttggccttgcaggccctacattctctggacagagaggcaaagtcccaactactcaactctgtctttgtagcacaaaagtagtgtgtcagtccattttgcactgctataaagaaatacctaacactgaatgatttataaagaaaggaggtttgtttggtgcatggttctgcaggctaaacaaacatggcgccagtatcttcttccggtgaggactcaggaagcctttactcattgtggaaagcaaggggaaaacaattgtgtcatgtggcaagacagagagagagagcaagagaacgatgccaggctcttttaaacaaccagctcacacatgaactaacagagtgagaactcattactgcagggagggcaccaagccattaatgagggtctgccccctgaccacaacatctcccaccaggccccacctccaacattggggatcacgtttacacatgagatttggagggaacaaacatccaaactgaggtaggaggcgggacttgactccagaccagattgaagaccggctgaaacagggaaaaggcactcaaagctcctctccataagacatgctcaccagtgccatgacagtttaccattgctatggcaacacccagaagctaccacccctttccagggcaatgactcggaagttgtcaccccttttcagggccacgacccagaagttactaccccttatctaaaaatttcttaacaacctgccccttaatttacatatagttaaaagtgagtataaatctgactgcagcactgccctgagctgctgctctcaacacgctacctatggggtagccttgctctgcaggagcagtcatggagctgtaactcaaccagggctctaatgctgctgcctcaatcaagctgcttttatattttattttttttatttttatttttgagacggagtttcactcttgttgcccaggctggagtgcaatggcaaaaatctcagctcactgcaacctctgcctcccaggttcaagcaattctcctgcctcagcttcccgagtagctgggattacaggtgcctgccatcacacccggctaattttttgtattttcagtagagacagagttttaccatgttggccaggatggtcttgaactcctgacctcaggtgatccacctgcctcgacctcccaaagtgctgggattacaggcgtgagccagcacgcccggcctaaagctgctttcttctaccaccagctcactctttttttttttttttttttttttttgagatggagtcttgctcagtcgcccaggctggagtgcagtggcacgatcttggctcactgcaagctccgcctcccagattcacgccattctcttgcctcagcctcccaagtagctgggactataggcgcccgccaccacgcccggctaatttttttttatttttagtagagacggggtttcactgtgttagccaggatggtcttgatctcctgacctcgtgatctgcccatctcatcctcccaaagtgctgggattacaggcatgagccaccacgcccggcccaccagctcactcttaaattctttcctgagagaggtcaaaaaacttcccaggctaggccccagttctggggctcacctgccctacaacaaaactatatcaaatagccacagacagtagtaaacaaatgagtgtgactatgttccaaataagctttatttacaaaaacaggcagcaggctggatttggcccatgggccatgatttgcaaatcccattctagtgaacaagacagacatactcatttgtgtttttatgctacaaatacttatccagcatcttctacatggcaagtattgcactggacactggtatgccgaacaagacagaaggccgggcgtggtggctcatgcctgtaatcccagcactctgggagaccaaggtggatggattacttgaggtcaggagtttgagaccagcctggccaatgtggtaaaaccctgtctctactaaaaatacaaaaattagccaggcgtggtggcgggcacctgtaatcccagctacttgggaggctgaggcaggagaattgcttgaacccgggaggcggaggttgccatgagccaaggttgtgccactgcacttcagcctgggtgacagagtgagactctgtctcaaaaaaaaaaagaaaagataaaagacagacgatgacccctgcccacgttgcacttacatgctggtgggagagacaaaatcttgttacgtaaatgctaagacaaaagtcatcaggaaatacagagggggcagttaactcatccttagagtttagggaaggattcctggaggaggggatgactgtgttgtttgcttagcaggctgtcagtgagatgagcaaagtcaccagagagctcttggaaccttttcatcaggacagcctgaggacctccatccctttccctgtgggttatctgtcatcaccagctcttcccttctgtcccccagtctctgaacagctacaacgatggagactacgaaggagccaggcggcttgggcggaatgctaagtgggtagccatcgcctccatcatcattggccttctcatcatcggcatttcttgtgcagttcacttcacaaggaagtaagtaggctttttgaatccctccccatgtcaaacgccctttctcgaacgcccgttggaatctgttagggtagattaggttatgctccagtaacaaccccaagccaaagggttttcatgttttcttctcagaataaatttgtcccagtccagagggacatatcaacagtgtggatcttctagtgcgggagtgggtgaactcctttggtaaatgaccaaatagttaatatttctggccttacaggccctacatcctctggacagagggacatagtcccaactactcaactcagtctttgtagcacaaaagtagtgtgttagtccattctgcattgctataaagaaatacctcagactgagtgatttataaaaaaagaaggtttggatgcttctttggatcaggtcaacaatatggatccattacatggatcatataggtcagtggaaggtctctcctccacacagtcatgcagggtcccacgctatacaaagctgcaccatcttgtagctgctctatctaggacagaagtcaacaaactttgtctgtaaagggccagatagtaaatcttttaagccttgcaggccatatggtcccgatcatggtctctggcacagctacttagctctgccattttagcacaaaagcagccatagacaatatagaaatgaacaggcgtggctgtgttccaataaaactttatttacaacaacaggcatctgtctgtgggctgtagtttgccaacttcagatctagaacatgaggtgtcctcaggcaaaggcgggggagaggaagactggagaatcccacatgggctttttactgcctagcgacaaatgtcgcttaggcttacattgactgaaatcagtcacgtaatcccacctaactgtaagagggtaggaaatgtgggagaataaatgggatatttaggattgctatttgctctgccctagcacatcatctgctaaataaactcctacttgcatcaaactagcataactgttttagtttaagggcagaaaggtcactacatatttttggtattgacaaggagctctcatctcatgaagagatggatgctgctgatgtgttgtccctctggactgggacaaatttattctgatttctctaaccagctcagatgggctccatctgctagactcaataacactttccgtcagaggtttgacagacagcaaggtcatgtgataggcaactcagacccagaaatgacaagtccagatccatctctgtcttgctgtgtaatttctggtaagacagataagaatgctgagaaattctttcacttttctgccacagcagcatggctactcctatacccttgaccaaagtcctacacccatcaaactgagaaggtcaacctctttctcttggttgacaaaggaggctcacccagatgggtgagggaggaaggagacctcttttgacattccagatcagccaacccaaccttggcaaccaagacagtagcagatgtcatggtagatccacttcctatcagagaaggcagacccaggaacaaccagtggcagctgggtagaggggaagatgtcaaaacagaagtgtcacaaaagaaaattaaatggctttggccaaataaaagagaaaaggacactcaaacatgaaaggaaactcaaggtttcttgcctgcaggatggcaaatttgatgttggcccatgaagaggaagatggttggagaatacacgtgaatgaacctgactatattcttaagagaaggtgtaaggtgcttgtgaacttgtgagcaggggagccacagagtgtgggtttaatggtgcagttttggcaccagactgcctggacccaggtcccagtcaccacttattcactgtgagaccttcagccaattgtttaacattcctgaacctcagtttcctcacctgtaaaatgagaataatagtagtacccatttcataaagctattgtaaaggttaactggatgacccacagaatgtgtaggttggtgtctctgttctttagtgggtgcacaaaaatgtaaaccatttattaatcccattattactaatattatcaatgttactgggaaaggacctcagaattcaagatgccattaaatagaattcaaggctttatatttatgagccaaacaaaggacaatgttctaagggaatgagaccaagccttggcttgactcctgggaacttgggaaaatgcatactgcctagattagtgtttgagctaagtgggttataataatagcagctgacactaacatagaccttgacatatgccaggtactgttctaagctcttaacattaattaatcctcattgagtcttcacagcaacccaaagaggtagataggtattattatccctattttgtagatgaggaaaccgagactcagagaggtaaagtgacttgcccaaagcctcacagctagttagtggaaaaggtaggatttaaaaccaggatagtgtcgctcttcaggctgtgttcttagccaaactctgcactgccgctaagtcaatatgttcctgctagtacacccagtaacaaaggccagtaagtggtacttgctttgtggctaactccaggattgatttacgggggaatggtatggtgaggtttcatcctacagaaatgtgtgatgagtcagggctaaggttcacaaaatcaaaggagtacaggggtcaggggaaggacatacatgaggtagcctggttataggacaataggaagtggtggggaccatggtaatttcaaaagcacagtttaaaggaagcagccaccactctgctccaattgtaaccacttagtatgcaggcctcatggggctcatttttcaagagatgttggaaatctgggattttatgtaaaatctccaaatttttagatgttgacaaccaattcacattactaaaacgcatggttagcaattcacattactaaaacacaaaaacaatatttgcagcctagacactatctactttgcagtctctagtggacagtttgctttcaaagatcagtttgctcatggcaactccatccaagaagtgttggaagggatctagaagcattcatatgttagactttctccagccttaatataagtgtttttatctggggatgaagtgttgatgtctctgcttgtgattgaagctttgttaggaataaaaggtatgagaaggagttgcctctttgatccttcttcctaaaaggcactgttcacaaaggttagagcctatgatttaataccagctttatcaggattcagatcctacttctaccacacaggctatctgggcaaattattaaactctctgtgcctcaatttccctaactataaaatgagaattgaattatttccccatctgtaaggtcaaattccttctagatgcctttccctctgttattaaagaaaacaggccaggcacagtggctgatgcctataatcctagcactttgggaggcaaagatggaaggatctcttgaggccaggagttccttgaccagcctgggcaacatagctagaccccatctctaaaaaaaaaaaattttttttaattagctgggcatggtggcacacacctgtattcccagctatttggaaggctgagatgggaggatcacttgagtccaggaattcaaggctgcagtgagctgtggtcatgccatcgcactctagcctacatgacagagtgagaccctgtctcaaaaactaaataaataaattttaaaagagacccaaatttaaaggctttgtcatatgcatgtaggggcaagagagagagagacagagagaaagaaggaaagaggcagaaaagaactagctgttagagaatgaaatcaattctctcttccaggtaacatggccaatttctcagtaatcctttgaaattaaatctcccagccctcatttacaggagtaactaaatggcaatatgaaacttttaaggcaaaagtacccaagctttagactccataagagttacctggagaggttttaaaaaagttagcatccgagcctcacctccaaagattccaacctgctaaatcagaagtggggttcaagaacatctgcatctttcagctgcccctgctcccaacctgaggattcagatgcaggtggcgggcagaagggtctttgccaaaccttggcaaatatcctgccaccaaagtccacaaggaagaacgtgcgaatggtggccattcatggactggtcggttttcatttacagcaaactcatcatcctaatctgctgtctaacccaatgctagggaggggaatgaagttgccacctagcaggtctacccacagggagcctcctttgtaacaatctatttccacagaggggctggaaaatctgacattagaggagtcgaagcctgaagatgagcccaaaacccatgaatctgtgagttttctgaaagtattcattccaaaatgctgtctcggggctgggtgtggtggctcacacctgtaatccaataccttgggctgaggtgggaggatctcttgaggccaggagtttaggaccagcctgggcaacatagcaagaccctgttgctccaaaaaatatttattttaaattagctgggtttggtggcgcatacctgtcatcctagctatttgggaggcggaagcaggaggatcttttgagcccaggagattgaggctgcagtgagctgtgatcacaccactgcactgcagcctaagcaacagagtgagaccctgtctcaaaaaaaaacaaaaacaaaaacaaaacctgtctgaagtaaattactgccttttaaaaattgtaaattccctgtctttaaaaaaatcattctttatccttattaagaaagctgtaaccaatgtgttagagaacagattgaaatctcaaatggttgaaatcccgggtagtttacttccttggcgtagtctcagatcatgatagtctttacccaaactcataaaaagctctcattcgtcctattttacaggatatctatgtaagccacatggtggctggggcaatgaaacacggggtttcatgacatcaaattcctaagagctgggaattattcaactgaaatattaaaccattttggatagaatcgtgcattgacagcagggaattgttcttgtccagacagaatcatgaacttgcagtctttcaaagtcagaaaactctccgccctcaagctgctagggaaagtgaagaaataaatcacacaggtgaaaggtttaaatatagtagctgtccatttatcaatcctagtaattcaaacccctagtcaaaaccaacctatttgcaggcttttgcttcctgctaataccttgaggactcaagcaaggttaggttattctagtgatgtttctcaaagcacaaatctcagagccacctacgacagattcatctgggatgtttataaaaatgcaagttcctggaccccatttcctgagtagcctggaaatatgacaagccaccttccccaaaaaataattctaaatattctaaagttgcagaactactatcctagggcttgcatttaatgaagaacattcttgcctgtgtggacatgtgccaacaaacaagactttttgcatccctaagataaaagataaacagtttttcttctcttatacactcaacacaacacacagctgtgagcaggtgtgttttgtttcccccacacaccaagcaattgtccagtgactaccaactaggtattctgtaatttagcccgattatgacaccatctactgggagttagagtcagatcccacaggttaatggtttggtcccccaagactgcctcccatttcagatgctaattgcaagccccaggttgtgacctgcgcttctgactggctggctcttagttggagattttcaccaccctcttctcagtttctattaatgcgctaaagtggctcacagaactcaaggcaacacttacttatgtttacccatttattacaaaggatattacaaaggatacagatgaacagtcagatggaagagatgcatagggcaaggtatagaggaaggggcgtggtgtttccatgtgtgccaccttccaggtcccaccacacattcagcaatctaaaacctctcccaaccctgtccttttgggtttgcatgggggcttcattacataggcatgaccaattacatcactggccattggtgcccaactcaaaatcaaccttcaggccatttgtcctccctggagtccagggggtgggactggaagttccaaccttctaattacatggctggttcccctggcaacccactcccaacctgaggctatccaggagcccaccaagagttgcctcattagaacaaatatagtcccatcacccaggaaattccaagaaactggggagctctgtgtcagaaactggagtcaaagacaaaacatcaaaacaaaagattctcctagtacccagtctacaagggtgttaggagctctgtgtcaagaaccagatgcagggatcaaatatttcttattgttattatagcacaacatcacacctaaggtacctggtagaagcttcagttattgctgcttccctggaaagtttacacacctcccaaattttctcttcctccctcccttttgtttttggtttttgagacaggggtctcattatgttgccccggctggtcttgaactcccagcctcaagtgatcctcccacctcagcctcctgagttagctgggattacagggttgagccaccacacccagctcttttcatctctcattgagattaggctcatggtcacttatctgatgctctgtggaattcagcggaacgtccttagcagcagaaagagttgaccaggacaacatttgggtatgagacaaatgtcctctgtgacaaatatgacattcccggatgaccctgctaatacagtggagcttcatgttactcaggagtaaggttctcatgtcagggcacaaggtgagctttgagtataatcaaacttaatcttggaagtatccaaggagggcgccctactggagactcacacatggtatcttgatcagcccagcatagccagtgaatgtttccagtgttggaacaggtgactgttccttgggttgagagcccactgaagtatgtggctgggtttagggttcatggcatctgtttcaacactggaaccacactctgggctcacatagaaggaatagatgtgacatccccatccgtgctcatgatcattgagcggggcggcagtcagaaactccagctctatttaaacagttgctttttttgtttttgaggaacataaatagttgatctgccacatgttaaatgcacatacaatgtaactcccctgaaggtacatctctgagtggtcttgttgaggtgtaaacagccaggtacacacctgtgtgttaaaaatgcttgcttgccattcttaacaacaacagcctttgtgctccaaggttttcattaaggaaaaacttacctctaaacaggggttagggtcccatgactgtgtctcattagcaggcacagagttagaagaccttgacccattctgtactgggaaagcgtctctctcataagcaaattgaaatgaatcctttcctggtctcaaaatatccttcaattgcatcagaattggaaggagacatacatatcaaggtggaacttgacctttttgcaaaagcttaaaagcaaatccctcttcttttctatatttttggctggggaaaggctttctgggaattgttttgatcagagaatttttgtgattccataatgaaaaatgggaatcattacctatttctagaaggttagaagggtctttctctgttggttcagataagttcaggtagagacaaatcagacctaagttgccagcaacaatggaagaatttttgcttggaaaaggatataagctagcagcgcattgatgaagaaatcagaatgaacattaaaaagatgttcaacctcactagtaatcaagaaagcacaaattaaagcaataacaacaaaaatcctacatatttttgtctggcagattgcaacaattaaaaagatgggtaatatcaaggttgaccaggatgtgaaaaatttgacactatactggtggtgaaagagaaaattgggacagtcttttggaaagtcagtttggatgtatctaatataaaatccaggcacccaccaacccagcaattccactgctcagtatccaccttagagacaggtgcacagaaatgcatgtaacacagtaatgcttcaccctagctacgtgttagaatcacctggggagctttaaacatatgccaatgccgctgggcactgtagttcatgcctgaaatcccagcactttgggaggcagaaacaggaggatcactagagctcaggagctggaggccagcctgggaaacatagcaagatctcatctctactaaaaatttaaaaaaatatatctgggcttggtggcatgcacctgtagtcccagctacttgggaggctcaggtgtgaggccagcttgagcccaagaggtcgagggtgcagtccgctataattgtgccactgtactccagcctgggtgacagagcaagaccctgtctcaaaaaattaaaacaaaaaaatttttaaaaacaatgcccagggcccaccctggaccaattaaattagaatctccagtaacagggccaggaattggtagactgtagggctctccaggtaactctaatgtgcagccagggttgggaaccacagacgtgcaacgatgttcattgcagctttgtttgcaataggagaaaccttgaaacaacctaaatgtccatcagtaggcaggttaaattaggagtgatgtattcatatgatgggacgccacactgcagtttaaacatgaagacagggccaggtgccctggttcatacctgtaatcccagcactttgggaggccgaggtgggaggatcacttgagcccaggagttcaagaccagcctgggcgatatactgagatcccgtctctatttttttttaagtatacaggtggagacatccttcttactatgactttacaagccctgcatgatctggctgccacctccccatcctcatctcccatcccacatcctcatctcccctctctctccctttcactccctccacttcagccacatcagagtcctctctgagcaatgcaagcatattcctgcctcagggcctctgcacttgccgttccctctgcctggaattctcttccttctaaaagccaaacagctggttcccatttctccttctggtacttgttcatatattacattagcaaagagactatccctttagccagttttacttctcttccttactactccctgacaaattatatatctatgtctgtttcccccctactggcatgagaactccagggacattttcatttctgttattgcccataataatagagcatggcccttaagagtgcctatttatggccaggtgtggtgactcacacctgtaatcccagcactttgggaggctgaggcgggtggatcacaaggtcaggagatcgataccatcctggctaacatggtgaaaccccgtctctactaaaaatagaaaaaaaaaaattagctgggcatggtggcaggcgcctgtagtcccagctacttgggaggctgaggcaggagaatggcatgaacccaggaggtggaggttgcagtgagccgagatcatgccactgcactccagcctgggcaacagagcgagactccatctcaaaaaaaaaagaaaaaaagaaaaagaggacctatttacaagttagactgctggagttccagtccaggtgcttcctctaagtagctgtgtgcccttgggtatatcttttaagcagtctgtgcctctgttttctcatacataaaatggggataataacagtgcctatctcatagggctgtgagggttaaatggcacaaactacagggcctggcactctgtactcactaggtaactgttgggtattattactatcatcagcacctaaagcagtgcccagcatgtaaataagcattgaataaatgaatgagtaaaacaaaaaaagaaattgcagcacgatcacattgtgtaaacgcatacacatgatgagtatataatttctacatgcttattgatcagtttcaatgcagagaaaaacgcctggagaacttacaccaaactgctaacagcactactatactaatccttggggaggagagtgaggttcggaaatgctcaagaggcatttttccatatccgcattttgtttgttgttgttgttttgttttgttttttgagatggagtcttgctcagtcgcccaggctggagtgcagtggcacaatctcggctcactgcaagctccgcctcccgggttcacgccattctcctgcctcagcctcccaagtagctgggactacaggcacccgccaccacgcccggctaattttttttgtatttttagtagagatgcagtttcaccatgttagccaggatggtctctatctcctgacctcgtgatccacccgcctcagcctcccaaagtgctgggattacaggcgtgagccaccatgcctggcctgtttttgcttttgtttttttgcacgtaccacatgtaagataaaataagttttacaaatagaatatgtttctcaaaaggaagcccctgcttagagtcaaaagtgtgcacgcaggctggtacatttcaacatgtgtttaaccagagtcatcatcatcaaataaggaaggcatcgagctgggaaagccaaccacagaagctcagcccacggtctttctctctctctctctgtctgtaccacacagtgcctgaggaaccagcggtcagtgggctgtgagcgtggaggatggacctcatccacacacaccccaaaggagtttctaaggaatggatccttgacttcagactgtgagatcttttcctccaggactctccagaggcaggtccctggcaaatgaacaagaaaaaaaaaaaaaaaaagtccaaaatttaggcaatccaagctgcacagccggatcagccaaagtcattgatttgtaaaaatgaaaagaaaacagaaaaaagaaaaatgaagtctcactgtctcagtttagcgaatcccgttgtgtccactcctgtcctccagaggcgagcctcaggaaatcacataacttttcactgaggggatccagggggtctccatatagggggagatggaggtttctaggaagagcagcaggtgctggtatttacaatgttgagcacaaacatttgcagcatgtttaaaattgtctagtagagttcaagttgtggatttgcttttccttttattcttataaccttcagtaactcctcctctgggagtcagcactcccatgcccagagttcacccatctggtcatcaaacactcaaagaaggggcttttctggccttttgtcttgatgcttatatttccaaataggccccctcccttgcttgcatccacgttggtcaacttgaccaaaacctcactcttcactcaaacaggctctgagaatggacttagtggccaattctaggtacatgagcacttcctgtatcccagttttgggaataaactggctgtatttatagaatgtgctttttttttttcaatttctcactctctctcctatctctagcaagtctcaggcaagatctttgattttcctggatgccacctggaaatgccacccattgtgtttcttttctgtcaaatgtaaaccctttagatgtgaatgtactggtttaatgatgccattattctgcctgccagaacgcagtaacccagtgtctcacagagcacaaggggtgtgccactggtggtacacaagataatttttaagtagtttctaggaacaacattaagtaataccaaatcacaaagaatgtttccccttttctattcttttttcatcctgattacagcaaggaaaaagtctctgtttagtgctagcaggtcctttacacctttcagacactatggctcttttccctttttagcaaagaaagagcaggcctcagagtcttctgtctagatagaatttaatgatattgttttgtgtcatggtatttattttatttattaccttccatttacagcttcccacagtgggggatgtgacatattgtttctgttcaaataaattaagaaaaacaagagaactcaagaaaatatcaagtaattaacacaccagataagtatatgtggcaaaagtcacttcaaagaattaatgtcagaaagatggtgataatgaagcaaaagaaaggcagattatgctggccgggcgtggtggctcacgcctgtaatcccagcaatttgagaggctgagatcacttaaggtcaggagtttgagaccagcctgaccaacatggtgaaactccatctctactaaaaatacaaaaattagccaggcgtggtggtgcatgcctgtaatcccagctaatagagaggctgaggcaggagaatcacttgaatccagaaggcggaggttgccgtgagctgagactgtgccactacactccagcccggggtgacagagcaagactccatctcaaaaaaaaaagaaaagaaaacgaaagaaaaagaaaaaagaaaggcagattattctaattgaatgaataagaggctgagagtcaatacctagttccaacgcccttttgtttttgcagggtttttattggccactaactagctatgcaagctgattttaggcaagtttcatagcctctctgtgcctaaaattccttcacctgcaaaatggggataagaatgcctgcctacttacctcacagtgctgttatgagaattaattgttgtaatagttgtgactaaccattggcggggagaattctaagtactataccaatacaaatttcagcattttttcatatactgaaccctagcaaaaaaaaaaaaaattctgatgaacatcagattcaacctgtcattttacccggatgttgtgatgagccagcacttgtcccaggaggacgttgaatcagggacacgaaatctcagcacacagagattctagcatcattccaatagattggaccctgatttctgtttctgacatcctgttttttgtttgtgcgtgtttgggtccctggtcttttacccaaatcaaatgaaaagtgttgctcagaggcagaataaaaatggttttaagtaagcctgtgtaccacagtgtgtgaattgtgttttcttggggttccccaccttccagagatttccgtaaccaaaataagctcatctagtccagcatcagtccccagggaagagcccagagaggccagaggtggcgctagagaggcatcactctgaactaatttatggccagaaatgtccctctatgaggcactgaaaatgttggtcctattaaagtaaaaaaataaaataagaaaaatcttgtcattaaatgtgctccttggggtcaagagggccactgatttttgttgggcgtcccccaggtcctaagctctaagaaggacaaaatggtttttgttgggatgatgggcttgtccagagcttcctccaaagctaagactgcccctgctccactcgcaaaagcacagtttaaaaagagattggtggccgggcgcggtggctcacgcctgtaatcccagcacttcgggaggccgaggcaggtggatcataaagtcaggctagcgagaccatcctggctaacacagtgaaacccagtctctactaaaaatacaaaaaattagccgggcgtggtggcgggcgcctgtagtcccagctactcgggaggctgaggcaggagaatcgcttgaatccgggaggcggaggttgcagtgagccgagatcatgccactgcactccagcctgggcgacagagtgagattccgtatcaaaaaaaaaaaaaaggtgtattatcaaccaagagactccttcatcagccagttacaaaaactggctaaatagagcagaaaaagtagagtttaccctcacaagacggaaacttccagggatagcttcagaggcagctggatcctggtgcgcagggtttttgggaacgtgtccctttccaggtctcagccccaacttgctgagttcattttagtttaatagggacaatacgactgccaacagctttggactttttcctaccagcctgtggaaagacagtgtttcttccctaatagctccaggggggaaaaatggttcaattcaatataatgaacaactgatacaaaccagaaaccgacctatcaaaatggataccagtcattaacaaacaggtgtggccactgtaccaacataaatggatgctgtggccaggggtgtgtggtgccctcattggccaggcttgaagtcaggattcaatcactggaactgaatgtgaggtcagctccactcaaaccttatagattgagggtgcgggaaggatggttccccaaaggaaaaccaaagtactcttaccagaagaaggagagagatttgctaggcaaaaaaacaaaaacaaacaaacaaaaaaaacagcgtccatattaagcatgctgcttcttactataccttccatatgcagggcaaagtaatctaatggcttttctttttcttttcttttttttttttttttttgagatggagtttcactcattgcccaggctggagtgcaatggcacgatctctgctcactgcaacctccacctcccgggttcaagcgattctcctgcttcagcttcctgagtagctgggattacaggtgtgcaccaccacacctggctaattttttgtatttttagtagagactgggtttcaccatgttggccaggctggtctcgaactcctgacctcaggtgatccacccacctcggcctcccaaagtgctgggattacaggtgtgagccaccacacccagcctcctcatagcttttcaatttccccgtggtgttgtcactttcatccagctccttctctgaccagtatttatagagcacctgctcaaccacagaaactgggctggtggaaattccagaatgtttaagagagacccctgagaaggtggcagtagtctagtggggggaacagacacacacaaacaatgagaaggaaacatgagagtgcccagacagaggcataaacaaagtattgtgccatcactttgcaggagaacacactggctgtactaaagggaaggaagacagtccctgtcctaccattcttcgcagtgctgaggccaatagggctacagctcttgaagttgccctgtctctgcccacaagttatgggcagaaacagatgcagatataaaatcgctggcctcagctcctggatcagcaaattacctttggcctacagcaggacagctgcattcagcaaaacagcatgatgcacatatcttgatacgtaaccctagattcaggcttctaaatataagagacagttctgggccaccaattaccaaaaaaaaaaaaaaaaaaatcttgtaagataacgttcatactcatgggttacaaccaattcttaaaaaatactcacgaatattgaatatttaagtctggggaattgccctataaaaatatgtccctgcaccaaaacactttgaattctggtttggacaagcacaaagagaggcaggcataaagatgactcaggcatcacctacacttgctggagaagccacagaaagaaggaattccctttccaatacattcattcattcattccagtagacatctatttatcaggggtcaggagagggaagtatgaagttgcctctgtgcattgcctgcatgaggcatcagagagtttcatctcgagtacctgttccaaacctcgggtgagcagccagtcagacctgcaatgacccggtcacggcgttcatctctcttcctgtcccagtgtagaatttcccagtttgcacccacactggttcactgatgcacccaagctgtctgctcctggaactgtgaccaagtgtttactcccccaggtcacgtggaatcccatgcatggggactagttgtactagttgtactagttggagtgaaagtattgggaggaactcataaaaggccaaattctgcctatatagaaatggcctgatcacccccaagaaagaggacctaaagcacgcctagaagggaaggtaaataaatatttcttgagccattaccaaagctcatctaaacaattacagtagcttttttttttttttgagatggagtcttgctctgttgcccaggcttgagtacagtggcatgatcttggctcactgcaacctccgcctcccaggttcaagcaattcttctgcctcagcctcccgagtagctgggactacaggctagcaccaccatgcccagctaattttttgtatttttagtagagacggagttttgccatgttggccgggctggtctcgaactcctggcctcaagtgatccgcccacctcggcttcccaaagtgccaagattaaaggcatgagccacggcaccagtcctacagtagctttcttacagggctctctggtataacaaccattacaaacttaatgagttaaaacaacccaaatttattatcttgcagttctggaggtcagaagtctaaaacgggtcttgctggaccaaaatcaagatggcggcagggttggattcctttctggaagttcgtagagagaatcccttttcttgccttttccaccttctagaagctatccacatgccttgactcagggcctccttccatcttcaacggcagcaaagtcaccatttacttatttattatcttctttattatctacctcctccccttaagatgcctttttcacactgcatctcttttgttctgactccttttcctctctcttccccatttagggacccttgtcattactttgggtccacctggatgatccagaaaaatctccttattttaaggtcagctgattagcaaccttaattccatctgctcccttaattcctctttaccatgtaacccaacatattcacaagttccaggtgtttgtatggggatatcttttggcgagcattattctgtctactacatcttgctttgacatccattcgcttaaaaaacacacacagcagccagggttatctcacaacctagacttaatcacatcattcctctgctgaaacccaacccacacacccagtgaccacccacggaattaaaactcaaactttctttttttttggaagagatgggagtcttgctatgtggcccaggctagtctcaaacttctggcctcaagcaatcctcccacctctgcctccgaaagtgctgggattgtaggtgtaagccaccatacccagcctttaaaatccaaactttttttgtgtgtccttaaaaaggtctttattactaaaagctggaaggtcagtctttaacccccaatcacaaaatgctactttgcctcgacaagcaggctttttagttgagttggtgtctcttttgtagttaagacaagcatttgcccttgttgaccagtgatcaggaatccgttcttgtaattttgccctttcatccttgataggtgaaatcagtaccttttccacaactttgtttattcttcattttttttgtcttcggagtaaaagaccaagggacattaacaagttgatggtcccctagatatgggctctagtgccagcgagtctgttctcttcttcagtgtcaaaaggactgctcattctggagcatctactcttctggactaaaatccaaacttttttttattttttaacttcaagttctgggatacatgtgcagaacgtggaggtttgttacgtaggtatatgtgtgccatggtggtttgctgcacctatcaacctattatctaggttttaagccctgcatgcattaagcatttatcctaatgctctccctccctttgccccccacccccccgacaggccccagtgtgttatgttcccctccctgtgtccatgtgttctcattgttcaactcccacttatgagtgagaacatgcggtgttttaaaatccaaacttttaatgataccccgcaaagccctacatgatcagacccttggctgcctctcagatctcatcttctacctcgcccccactctactcagctgcagccacacactggccccaaacatgacaagatcattctggtctcaaggccttatgtgtgctgtttcctccattcataacaccattctccagattttcacatagctggtcctttcttccccatgccctaggtcacagtttctcagagaggatcaacctaacccccatctctaaggcaaccaccccacccctcatcacttgctattacaccaccctgttttacttcctccatggggtttgccaccactaacaatatttttatttaactgtttacttatttattatcttctttattatctatctcctccccctaggatgttgaccttgtgagggcagagaccttgtctgttctgttcactgatgtgtccccagcatctagactagggcttggcccatggcagatactctatagctatttgctgaatgagtgaaaggttcttttccccatgtgcccttcctcctggctaatgtccactcctttatctcagattaagtgcctcttgttcagaggtgccttctctgatatgccaacgtttcaagaacatgagggtctcccttttgcatgctcacacttccccgtggtttcactcaaggtcatatcacaatggtagttagatgcagtttgcacaattaccatttaatatctgtctttcccagcagatcatgagcccccatgagggcagggaccatgttcatcttgttcacctctgtcttcctggtccctagcttggtacctggcacataagtttccaatagttatttaatgaatgaatgaattaattaattaattaatgaggtagagagaaatggaagaagaaaactgagtcaaagcttcctccatcatcatagctttatttttacattgttatctgacaagatttaaacttgaattttaaagcaagatgaagctaaccaaggtattggctgtaaatcctgtctcaaaactttctcacatattccttatcgtgatggtttagaaaaaggaagaaatgaaaatcgacttataccaaaaaataatttcaagaagatagagacccggctgggcgcggtggctcatgcctgtaatcccagcactttgggaggccgaggtaggaggatcacctgaggtcagaacttcgagaacagcctggccaacatggtgaaacccaatgtctactaaaaatacaaaaattagccgagagtggtggtgcatgcttgtaatctcagctactcgggaagctgaggcaggagaatctcctgaacccaggtggcggaggttgcagtgagccgagattgtgccactgcactccagcctgggccacaagagcaaaactctgtctcaaaaaaacagaagaaaagaaaaagaaaaggagaagagaaaagaagagaaaaagaaaagatagagacccaaatgaaccccagcctcctttgtgcctgggatgccccctagtggaaaaaatggagaaagacaatttagagtgttccctaacaatttgacaaatatcgtatttctttgctttttatactctctgagttagtgtaggatccagaaacaaactggaagaaaatcacacagctttgatgaagcaaagaagcaagatgttctagagtaataaactttcagtaaaacaaaaactgagcaactgttgctttggaaccagatttttggctgatctctgatggtaatttttgggctatctcactctaagacttatttctgatatggaacttttcaaaaatgatgtagattcaattagtcacacctctgttccttagaaattcaaggtggataagatcatcaaatgccaacactggctcagcggggcttgttcttcagtctctatattctacaattctaaacttagctcttctgtcccacggtagttgtttaactattaaaaaaaaaaaaaaaaaaaaagggccgggcgcgttggctcacgcctgtaatcccagcactttgggaggccgaggtgagcggatcacgaggtaaggagatcaagaccaccctggctaacacgttgaaaccccgtctctactaaaaatacaaaaaattagccgggcgcggtggcgggcgcctgtactcccagctactcaggaggctgaggcaggagaatggcgtgaacccgggaggcggagtttgcagtgagcagagatggcgccactgcactccagcctgggcaatagagcaagactccatctcaaaaaaaaaaaaaaaagtgggtaactataataacaaacattatggcttgctatttgccagacattctgctaaacctttgacatgatctctcatttgatcattattaacaaccctagatataaataccattaacttctctttgcatctgaggaaactgagtcatggaagagttaaataatttgtctgaggcacaactgctgaatgttgggccatttgattttaaaatccatgatcttaatcattacactcaattaactcccataaatgataaactaactctcagagtttagttcataactaagcaaaaataacagaactactttctacgcataacagcgtgcaatgacctaatagcctattacccattgtccctaattcgttgcaaacttgacataaatttctgtgagatgaacttttacggccgatttgcattaattataacacattccttttgggattgcttatttgattttgttgttgttgttgttgttgttgttgtttttgagacggagtctcgctctgttgcccaggctggggtgcagtggcacaatctcagctcactgcaaccttcaccccccagattcaagtgattctcctgcctcagcctccccagtagctgggattacaggcatgagccaccacacccagctaatttttgtatttttagtagccatcgggttttgccatgttggccaggctggtcttgaactcctgaactcaagtgatctccccactttgacctcctaaagtgctgggattacaggcacaagccactgctcccggcctgcttattcgatatttaagaagctctgaggtctcacttcaatgtctaagatatattttctatgcacaataattaatatacacaggaaagaaaaaacagctacatttctactgttgaaggatatgagtccatccgagtatacgatttaggatgctttgggttgtaagcaacagaaaatccaactggctttaataagggcagttaccagttctcacaatggaaaatttcagatagaagacaaacttcaaggttggtttgattctgcacatcacaaatttaataggctatggctctgtttccctttgattttctcagctttgtccacctttgtgtattctttgacctcaaactggtttctctcatgggagtagctcttcaggctacaaacttcctcatcaatgtcctgagagaaggaaggcctctctaccctaaaccttcagacaaaagccccactgtattcttactgtaacagttaggtcatacaaccattcctgaacccagtgctccagtctgggttatgtgaccattccgaaaaaaactgcagcaagaagggtaggattgtccagtcaggacctgccttaagaattgctcagtaggccaggtgcagtggctcacacctataatcccagcactttgggaggcagaggtgggtggatcatgaggttaggcggtcaagaccatcctggccaacatggtgaaaccccgtctctactaaatatacaaaaaaaaaaaaaaattagctggatgtggtggcacatgcctgtaatcccagctactcgggaggctgaggcaggaaaatcacctgaaccagggagtcggaggttgcagtgagccgagatcattccactgcagtccagcctggcgacagagtgagactccgtctcaaaaaaaaaaaaaaaaaaaaaaaagaattgctcagtaaacagtagctcttagaaatttttattctaataaatgaaaatttctgtacccaagtaaagtataagtagaatgactaataatgaaaagttagtccacctcactcataaatcaacaaaagcataggaaaccaatggcatacaacttttattaatcagactaccaaaaaaatttaaaaattaataatgcttagtgttgaggaggatgtgagaaacagatatcacaaacatcattgctgcaacacttttggagagaaatttggcaatttctagcaaaagtgtaaaggtatgtacccttggacctagtgattccatattagaaattattcccactattttactcagaaaactatgatatgtgagctaggatatgtgaatcagtcacattgtatggatataccaaggcagtgttatgtgtgaaagtttaaaatgagaagcaaaaatgtccatcaatagagactaattagatttctggattttagtagtggaggagtaacttatattgggcaaattccattgcctagtacagctacaaactctgaacaaaacatttttacaaattaaagacacctgagaacaactaaaaactggagggtcagtaagaatcctcataaaatgggaatcatccacatttacccggcttttcctctgaagggtcacccagtctgcatagcacacagagaacagagctcaagccaaaagcaatagtcttattaggcagcagaatcacaggttagagtttggggcccccatggtggctgaaatttgatgagagaaatcccagaaatgatagagccacagaaaagggacctaaaaaatctgaatataaactcccctcaaatccttggctgactcaaactgtatttgtgaagcccgacagaaaacaaaaccaaaccaaaaagctggaggagaatgcaaagaactgcattgatcagtgctggggaggcagagtttggagctcaagttctaccaaattagagaaacttaaactcctcagtctttctgttgaaacccagaggggtcacaaattagtcagaaagaccacatccaagaactagtatgtagaaggcacaaaaccaaaatggatccacccaaaagaagtcccaaaccataccttcgtaacataagaacgagtcactagtaatttcactaccagttaaaacaaaactcaacaattttctgagaaagataatagaatccagagcctctgctatattatccacaatgtgcagtataaaattttaaaatcactgggccgggcacagtggctcacacctataatcccagcactttgggaggccgaggtggatggatcacgaggtcaggagatggagaccatctggctaacacggagaaaccccgtctctatcaaaaatacaaaaaattaaccaggcaaggtggtgggcatctgtactcccagctgcttgggaggctgaggcaggagaatggtgtgaacctgggaggcagaggttgcagtgagccgagatcacaccattgcactccagcctgggtgacagagcgagacgccacctcaaaaaaaaaaaaaaaaaaaaattaatcactaaacatgtgaaggagcaggaaactgtgatagtcaagagaaaaaatagttaatagaaacagacccaaagacaatgcagatgttgaaataagtaggcaaatattttacaataactccaatacatatgttaaagaatctagaggaatagattaataggtgaagaggtgatgagtttcatgaagctatgcaatgtaaaaaaaaattaaaaaattttttaaaaacccctgaaaatcctagaactaagaaaacaaatcctgaaataaattatttgtatgggattaagcatacagaagaaaggagcaatgatcttgaagacaggtaaataaaaattatccaaactgaagcagcagcaagaaaaaagatttaaagaaaaaaataagcagagcttcagtgatttgcagagaagtatcaagcattctaccatatatgtaattagagtcctaaaaataaaaggagagaaagaatggagcatttaaaaagtttgcttaagaaaaattgatttaaatgtttccaaatggtattaaaaatatcaacctacatatccaagaagctaaaaaaaaaaaaaacaaaaacccaatcaggataaatgcaaaggaaaacacacctaggcaaattactggaaaaagaaaaaatctaaaaggcagccagagggaaaaatgatacatcacgtacatggaaacaaaggtaaaaatgataattgacttctcttttttttcaggtcttggcatcaagacttgattctcatcagaaacaattaaatacagaatagagtagaatgacaactttaaaatgctgaaagaaaaaaggtgtcaagctctagtgaaaatattcttcaacaatgaaagcaaaataaagatatttttagttaaaaacttagagactttgttgccagcagatctgcattacaagaaatgctaaaggaagtcctttggcctacagggaaatgaaaccagatgggaattagtatttaaaggaaaaaaaatgaaaagtagtaggaatattaaatttgtgaataaatattaaagaccataaatctatggtctaatcaaaatctcagcaagactttttgtagaaactgacaagtggggtctaaaatttatatagaaaggcaaaagaactggaattgctgaaacaatattgacaaagaaaagcaaagttggagaagttacattgcctgatgtgaagacttgccataaaattacagtaattgagacagtgtgaagctgggcacagtggctcacacctgtaagctttaggaggctgaggtgggaggattatatgaggccaggagtttaagaccagcctagacaacatagcaagactccatctctacaattttctttaattagccagacatagtggtacatgaatatagtcttagccacttaggaggcttgagcccaggagttcaaggttacagtgaactatgatcatgcactgcactccagcatgggtgacaaagcgagacgctgtctcaaaaaaaaaaaaaaaaaaaaaaaaaaagacagtgtggtattgataagacagacacatagatcaatggaacaaaatagaaacttcacaaatagacccacacatatatggttaattgtttttgttttgttttgtttgtttttttgtttttttgttgttgttgtttttttgagacggagtctcgctctgtcgcccaggctggactgcggactgcagtggcgcaatggctcactgcaagctccgcttcccgggttcacgccattctcctgcctcagcctcccgagtagctgggactacaggcgcccgccaccgcgcccggctaattttttgtatttttagtagagacggggtttcaccttgttagccaggatggtctcgatctcctgacctcatgatccacccgcctcggcctcccaaagtgctgggattacaggtgagccaccgcgccaggcctgttttgttttgttttgagacagtctccctgtgttgcccaggctggtctgaactcctggcctcaagtgatcctcccacctcagcctctcaggtagctgggataacaagtatgagccaccactagattaagtcaatagattgttttttggttgtttgtttgtttgtttgttttgagacagagcctccctatgttgcccaggctggtctgaactcctggcctcaagtgatgctcccacctcagcctctaaggtagctgggacaacaagtgtgagccaccactagactaagccaattgatttttttttttttttttgagacagggtgtctctctgtctcccagctagagtgcaatgcgatcatggctcactgaagcctcaaccacctgggctcacatgatcctcctgcctcagccccacaagtagctggggccacaggtgcatgccaccatgtccagctaatttttttactttttgtagagatggggtctcactatgttgctcagggctggtctcaaactccttggctcaagcaatcctcccacctcgacctcccaaagtgctgggattacaggcataagccacggcacctggctgtaaattgatttttggcaaaggtgcaaaggtcatccaatggagaaagaatagtgttttcaacaaatgatgctggaataattggacatccatgtgcccacagatgaacttcaacccatagttcacaccatacataaaaattgattcaaaatagatcatagagctaaatgtaaaacctaaaatgatataatttctgaagaaaatataggaggatgtggagaaactggaactcttgtgtactgttagtgggaaatggtacagcggctatgaaaaacagtatggcaattccccaaaaattaaaaatagaattaccataggatctggcaattccatttctgtatacccaaaacaactcaaagggacatgaagaaatatttgtacacctgttttcttagaagcattattcacaatagccaaaaggtagaagcaacccaactgtccatcaatagatgaatggataaacaagctgtggtgtatacatacaaaatatgattcagccttaaaaaggaaggaaattctgatacatgctacagcatagatgaaactcaaagacattatgctaagtgaaataagccagttacagaagcacaaatactgtttgattccatacatctgagatacttgcagcagcaaaatttatacagacagaaagtaaaatggtgcttgctggggtcaagggtaagatggaatgaggagttactgtttaatgggcataaagtatcagttttgcaaaatgaaaaaactgtggatggatggtgatgatggctgcaaaacaatgtaaatgtacttaatgtcactgaactgtacactttaacatggataaaataataaagtttatgctatgtatatgtattaatcgcatttttcattttctatatcttatgaggcttgacatcttggggacttaccaacctgaaagagactgtttgtcccagggttagctcattccaagagatagcagatgaccttcctgcaatatgcagtccaaccaattcagagcccatactctgaaccacctcctctctctggcttttccactccgagaggcaagtttcccctgccctaatcatcccagggtcaggtatcagacagttagagactacccctatagcccacagctggcctgaattattcaaactatccaatcctaagccctaatcatcccagggtcaggtatcagacatttagagactacccctatagcccacagctggcctgaattattcaaactatccaatcctaagccctaatcatcccagggtcaggtgtcagacatttagagactaccccccccaaccccctatagcccacagctggcctgaattattcaaactatccaatcctaagccctaatcatcccagggttgggtgtcagacagttaggtacgacacctatagcccacagctggcctgaattattcagactatccaatcctaagcctgttcagctgcttaccttgcctcgcccattcctcctggcaaaaaccacaataaaggctttttcctaggctttcttctcatcctctctggctgtgaccaacctcaaagttctctcctgtggttctgcatggcatggcgggctcctgccccttgggaactgtattagactgttctcacactgctgtgaagaaatacctgatactaggtaatttataaagaaaaggggtttaattgactcacagttccccatggctgggaagccccaggaaacacaatcatggcagaaggagaagcaaacaaatccttcttcacaaggaggcaggagagagaagtgccaagcaaagggggaaaagccccttataaaaccatcagatctcataagaactcactcactatcaggagaagagcatagaggtaatcggctccatgattcaatgaccgcccccgccaaattcctcccacgacacgtgggaattatgggacctacacttcaagatgagatttgtgtggggacacagccaaagcatatcaggaactgtgagcaataaaactatatttttaatggcaatggtcttccgatccattggccttaccatacatgaataaacccaaagtcccaggtacattctagaacagtatatcctacaacattttaaaaaatacattaaggaaatgatagattcagtaccttaaggcagcagtccccaaccgccaggccacggaccagtaccatggtacgttaggaaccaggccgcacagcaggaggtgagcagtaggtgagcaagtaaggcttcatctgtatttacagctgctccccatcgctcacattactgcctgagctctgcctcctgtcagatcagtggtggcattagattctcacaggagcacaaactgtattgtgaactgcgtatgcgagggatctaggttgcatgctccttatgagaatctaatgcctgataatctgtcactgtctcccatcacccctagatggaagcatctagctgcaggaaaacaagctcagggctcccgctgtttctacataatggggagctgtgtaattatttcattatatattacaatgcaataataatagaaaagtacgcaataaatataatgtgcttgaatcatcccaaaaccatccccccaaccctagtccatggaaaaattgtctttcacgaaacctgtccctggtgccgaaaacactggggaccactgcaatatagtacatctgtgcagcagtagttttgcatggtggctaagagcatagactcaagaattaaatttcctgtatctaaatcctggcttcaccacttactagctttgtgccattggacaagttacttctccacttgtgccttagttttttcttatgtaaagtggggataataacaaaatgcacctcttaaagctttataagaagtacatggcttaaagcaaggaaagtgcttaggacagtggcaggtgtacagtaagcactctatacatagacctcttcttgttatgaaatctgcagtcattacaaaactgaggtggcgggacatggtgacacacaactgtagtcccagctactcaggaggctgaggcaggaggatcacttgagcccaggactttgaggctgcagtgagccatgattgcacctgtgactagcctctgcactccagcctggcagcatagcaagaccctgtctcttttaagaaattttttttttacttaaaaatttttttaattaaaattttaaaatgaggtggagctgtatatgctgatatggaaagatatgctaaggaaaaaaagtactaattgcttgcatttttaaagaagagcgatgtaagtactttttctatagttataattataggaaattataattataataattgtaacaaaatatacccccaaaaagtatacaagaaactctcaacaagttatttgaggggaaaggaattaatgatgtaggagaaggtgtaagggagacttttgtttttgattctgtaccccctcccatactgcttgaagtttttaaccatgttcatccatactttaaaatacatacatttaattttttgaaaggccataggaataatctttgttgctctttattgccacctaggggatgctaggggcattgcctgccatgatcactcattgctgttaaccctattgactatttaataattgattccaccttcttgattagtacgttacacccagcaagtcatggcttccaactttcagatttttattgagttttgtaacaataagaaacatggttgggaaattgatgctcttttgaaaaaaaagaaaagaaaaaacaaacatggattcgtagttagaaaattttttatttttttaatttttattttttaaaatataataaagatggggtctcgacagcttgctcaggctggtcttaaactcccggactcaagctatcctcccgcctcggcctcccaagctgctgagagccactgcatctagcctagaaaatttaatagatattaaaacaattgaacacctagtttgttctccctctctgaatgaccattccagctttatacttataatctagatcagcccaatccattggcccacccaaaatgatttcatccctcactcaatgatctgtccgtggtggctaaaatgttgacatctgtctggttgcctgcatttgaatgctggtttcatgactttctagttgtgtgacctcgaataagtcacttcatctctctgagcctcattttctcctgaaaaatgcaagtggtaataatagtagatccctcaaaggactgttggtggcattacatgagttcatacatcaaacacaatgccgagtgcataataaggattgataaacaactttcactttaacacctacaatctccaaatctcaacttgattgtcacttccttcagcaagcctcctctgacctcaggacttggtcacatccttctcactaggtcacacttctccttcttagcgtttgtcacagaagactgttggatgattgttcgattaatttctctcttccctactagatcgtaaacactcaggacagagcctgggtttgattttgcccacaattctctccccagtgtctaccacagtgcccggtggataggagtttttgccatgaaaaagttattgataaagaaatgaattaatgcaattagaaaactgaaggcctctgaaaaaatcaatattaactagaacaagtgccatgaactagttaggttctgatgggctagatgacatgagtcatgagacacttacagggaaggacagggtgcggagaggtttattttgtaagacagttgcagaaaataaattggaaaaaagataaactgtacacctctaccatttgttctaggactaaccctattttctttgaggtaaaattcatacaacataaatgttaattttaaagtagacatttttaagtgaacaattcataggcatttagtacattgacaatgttgtggaaccaccatctatgccaagtcttaaaacattttcatcattccaaaagaaagccctcattccctcttccgccaagcccgtggtcaccaccagtctgctttctattgacatggatatatctattctgtatatttcatataaatggaatcatataatatatgaccttttgtgtctggcttatttcacttagcataatgttaatatttttgaggtcatccacattgtaacatgtaacagtactttattcctttttgtgatagaagaatattccactgtatgaacataccacaatttgtttataattcattttgttattgttgttacagagtctttctctgtcgcccaggctggggtgcagtggcacaatctcagctcactgcaaccttcgcctcccaggctgaagcaagtctcatgcctcagcctcccaataaactgggattacaggtgtgcgccactacaaccagctaattttttgtatttttagtacagatggagtttcaccatgttagccaggccggtctcgaactcctggccccaagttgatctacccacctcggcctcccaaagtgctaggattacaggtatgagccactgtgccagcctacaaactcatctcttggtggacatttggattctttccaccttctgtctattatgataatgctgccgatccctgttttttaaaagtctccatggttcatcatatcaagaagaatgataatctcacagtaccctggaccagaaaccaagacataagatccaaattatgatctatgaccactaactttttctataattcagcaagctattgtccctcctcatctgtaacctatgtggttgaactaggattttcatgcaattagtgtgtcttgggaggtgtttctgagtatttatttggaaggtgctcctaaaaagagataaagaaaaggaaaggaagataatcaatgaattccttgatccaattactgctgtggacatctagggtgcatttccactggggacctctgagacacggtagggaatatatcttagttatacgagagctaaaaagaaattatttagacagttagtgagggtaagagagtcctcagtaaggtttttcttttaataaaaacgcagtctccaaatcatttctttttttaacaaaaagcagcctgaaaaatcaagctgcaagcatagataagcaagctagaggcttgcataggtaaataccagcagctgtgccaatagaaaacagatagctggaaaccaggtatattcaacatggaggttccctcttcccttttctttgttgccacgtgtgcagataacatggcaccagccaggttttttaaaattccatttgcataataaaagattagagtgggatgaccagcctcttcacgggctatgaaaatggcacatctggtccaaccaatccactacaccccatgtaaatcatataccatctcctcacgctcatccctaaaaccaaccacaccttgccccaaaccagggaaacccactcaggaccccttcttctgcatgaggaagctctcttccttctttcatctatttaactttccactcttaaacccactccttgcatggccatgtcttcaatttccttagcatgagacatcgaacctcgggtgttaccccagaaaaatgacgctgcttcattagagttagcacatccaaggggcaagggaactggctcctctgtggttggctgagggcttctctcagggtgtcttctctggtccccttgggttcccacttgtgtcgacaaagctttctccagaaggccctcagagttgcacctgctcacagttaggaagtttggggcatgcgcagaagggcacatgcagatggggtatgatggtcccaacagcatatgttaaagtgattatgaaactttgatattcaaatccctgggagcttacattttaaagagatgagacagagacagacttcctctcattgttttcacctccgttggatctttgcctggatactgctttagtttgtcacttgtcctctagaaaaggggtagaaagtgtacatccttttctcctccattccttcaaagctcttaaaagaggatagagatgccaggtgcagtggctcacacctgtaatcccagcactttgggaggccgaggagggtggatcacctgaggtcaggagtttgagaccagcctggccaacatggtgaaaccccgtctctactaaaaatacaaaaagtagccaggcgtggtggggtgcgcctgtggtcccagctacttgggaggctgaggcagaagaatcgcttgaacccgggagacggaggttgcagtgagccgacattgcaccactgcactccagcctgagtgaaaagagtgaaactccatctcaaaaaaaaaaaaaaagaggatagacttgaggtgaactttattaagaacattgtgttaccttgaactgggcacttctcccttctaggtttcagcttaccctgtgagtgaagctatttatttaaaaaaaactttattgaaaataaaataaagatacaggaaactacacaaaagaaatgtatggcttagtaagttactacaaggcaaacatgttaataattaccaacccaggtcaagaaacagaattttctcagacaacctaaaagtcacaaaatgaggctatttgccaattaaggttgtagaccaaatgctgtagaatgaacttcttttaattctatgttgatgactctctgtcacaatattcacatctcagtgcaaagagaacacaagaatgtctagcaagaaaagatggacaagtttctcaaacattggcagtgttacttacattggctaggcaaaattcagaaggcctggtggaaatctggttaagccctaaaagtaagcttgtaattctatcctagcagcccacacacatttgagtctgtcttagtcagctcagactgctataacaaatcatcaactgggtggcttaaacaacagagatttacttctcccaggtccgaaagctggaagtctaatatcagtgatataatttggatacttttccccctaaatcttacactgaaatgtaatcccatgttggaggtgaggcctccaacatggtgggaggtgactgcatcatggaggtggacttctcatgaatagtgtagcaccatcgtcttggtgctgccctcacaagatctggttgtttaaaagcgtgcggcacctcctcccactttttttcttactcccactcttgccatgtgatacatcaatacatcggctcccccttggcttcctgaggcctcaccagaagcaagcagatacccagagccatgcttgctgtacagcctacagaaccataagccaagtaaacctcttttctttataacttactcaacctcaaatatttctttatagcaatacaagaatggcctaatacaatcagggtgccaggatggttgatgtgtggtgagggctctttccctgagttgcagatggccgccttcttgctttgtcatcacatggcctttccattgagcatgggcgtgaatagacagcatgcgagcaagctctccagcgtctcttcttcccataagtaccctgatctcatcatgggggccccactctcatgagctcatctaaccctaattaccccttgaaggccccacctccaaacattataaaattgggagtgggagtgcaaatgtatgaattttggggggatacaatttagtctacagcatagtccaaatgtgaaatttcttcctccagctaccgatgtttagtgagaacactgcctgttctcaccacatgtgcatatgtgtgtggactctttcctctggagggcaagaacttggttttgttcactgttgtaaccaagagttacaacagtgcctggctcataattggcactcaatattgccattgagttatttgtgatcagagccctggctgttcttagatggggagggttcttcagaacagtacaaatgtttgtagacaggccagctggggaaccaaaggtctttttgatgaggtgccatgaccatgatgtagtggggagtggccaggtgatccagaattcagtctcagtatgacctatgatcatctgagtgacctcaggcaaaactgttcgatctctgggacttagactcttccttatataaaacaaatgggttggtcagttcagaagtgctatactgattctaatccatcctatggaggaggccccaaaacattatccttaacccttttaatcataaatttaaggataaatgagattttatctcactctgggtgacttttaaggacttgaaaacctacttctttttgtgcttggagctggagtgaatttgaagccagggttgcgggggtgggggaggggtactcctagctgtggctgtgttaaaattgccctggtttgtttgggggagaatctagggtatttatcatttgtctttgccctggtgccagacagacagcagtgagtagatgatgccttttacacagcaatgtgctaacagttatacttcctggcacacctccagcccccaagatggaatggtctgacatccatatcagcagagaatcagagaaagatgagacgctctgatgcttaggaaagtcacaaaccattgttacacagataagtaacacaaaatgacccaagagagacacagctgggacccaagtagacacttgtaattggcgagtctaccctacccatgattttcaatatggggtcaatagctgatagataccaatgttagtttctttgtcatgaaatcttgatacaatgtggtaagagtttccaatcagcagttggtggcatcctcaggatattgttgattgtatttgacatcaagggccacccatgctttcactgttatcttattcaagctagtgcagatgtcttaaaactttcttcatgcatcaaagcatctgcatagctcagataaagaatccacagctcatgtgttctttcttatctctccggctgtttgggagagatttcaaaactcaacaccccactgtctcatgtaaccaagtcagggccactattagaaaagcagctcaaagaagatatcctgggtcatccacagtatcttagcttatttaattcagcaagcacattcaacatttctgattatactgaatacattcaaattctcagtcatcagcttcaggaagaccctcctggctcccatcccttttcctggctcccatcccttttcctggcctggcttaagtcccttctgggctcccacaggatcccttacctagctatattattgcttttctgtgggtcggtgccagcctgtactgtattaattcctttggggctggaaccatatcttatttttttaaattaaaaagtagtacatcctcacaatagaaaacttttcaaatacagaactatataaatgaaaagtgaaagtcccttttctgtctgctcctatttgcaatctccctcctctccccacagaagaccactattaacaatgtgttgtatacccttccagaactttccatttgctagcctaatagtgctaataaaagtgttaacagttattgagtgtttactaagagtcaagtgctatgctcagcatttttatgcacgttcccaattaattcacaaaacaagcctatgaagtaggtgttatttttgttcccatttcacaaaagaagagactaaggtgacagttactaaatggtaaagccagaatctgaacatggccaggctgaattcagagctcctgcccttgaacttgttctctcacttgcttccggaccttgcaatatcatagacacttccccatagtgacctaaaaatggtttctccctttttaaaagttgcttggtattctacaaaatgaatgtattccattcattttgccattctcctactgaacaacttttaggattttgtagtttttcatttccttatttcaccaagtgtaagattccattattgtaaaaagcatccagtttcagaaattaaaatatatgggggcatggggggtgacaagtgcatcttagaatatatttttgcatgtaaatattttgtagataatgcttgtaaataattttcatgtgtgtatttctgcacaagtttcctaggagtaaaattgtgtgtcaaaatgaaggtgcatttttaaattttgatgcatactgctgaattccccccaggaaaccttatcttagtcatcttgtgttcctcatttccttagcacaatgtctggtacttttttaggtactaaataaatgttcagtgggtgaaatgcatgacctgacccggcaaatgcaaagtattttgagatattcacacaccaaaaaacccacaaaatatgacaatgactgacaatgagaagatgagaatattttactaccgtatttgtatgcacttcttgttgaagcactgaccagagtaaatgacaaacgctaatgcatcttatgcagaaggatgtttccgaagtgattacaagatatcttgcaaaattacctatcaaaagattgcacactcaataaaaatacacgaataactccagcattttacaacccccaacctactagacataagaaatttccagagatcttatggtctgccattttttcaaatacctgcaagactgcctgcacccccgaccctaatctgtagaaatcatgattctgcaggtctgcagtgggggatgcatttaacaagcgctccaggttaacctaatgcactgtaaagcgtgagaacacgtgcattaaaagggctttaagaagtggagtttctgaatcagatttgcattttagaaagatccctctggctgcagagtgtagaatcaactataagtgagcaaagatagctaaatggcattattcagcccagcgcatgaacggctcagattgcccgcgcgctggggtgccccctgccggccctcggcagcgcctcgtcctgggcctggccctgggcggccggctgctgactgcgactgcgcgctccgaggcctgcagagacggcccggggcacctgttaccgcaccgctcaagaccggaagcggaaatggaatcgagatagcctcgcgcgtttagctggccgccgccacctccacgccctaggccgggccgacttacggagtcgccggaagcggaagtcgctgaggggtggtgaagcggttgggaaagtgtcggtttatcttcgcgccccttgcgttcttgccgcggcttgcctgggcaggtaaagcgcgattgcgagagctcggcaaccctgccgactcagccggaaccggctcccggcccgaggggcgtggtgtcctggtgctccgactccttccgcaggctccttgggacccgcggttccgggagtcccttgctcagggtccctttcctgcagtgaggcgccgtccgccttccctgtgtccccgcagacccccatcatgggcaataccagcagtgagcgcgccgcgctggagcggcatggtggccataagacgccccggagggacagctcggggggcaccaaggacggggacaggcccaagatcctgatggacagccccgaagacgccgacctcttccactccgaggaaatcaaggtgcgagcggtgtggaggaacccgattccccttgactaatgttgaggagaggaaccctccactagattcccgtcacatcctttcgaaaaacaccagaacggagagggaggtggtacattacccggtgcacttaaaagccagatggtcctgtaagagttctcttagcggtccaagaacctgtgtctaattaccaatatgagaaagtcaccctgagggaggaggtgctcacttggtttaacatcattaaggagaaagcagctctgggacagagtttcaaattcttaattaattcagagtcgagctaacagtaattgagccccagcttctgcttttctcttaggtgtaattaattgcactgctttgagacaaattccctcacctttacacaaactggagcttttgtaaaagttagtttgggaatttatccattttggaggcaaaccaggtacatatacaagctgaaagtagagcggaacagctgacggcagttgccagaggtgtttagttctgcccaacacttttgattcaccctacttattttttaaaagacggtggtctcactaattagccgggcgtggtggcgggcgcctgtggtcccagctactcgggaggctgaggcaggagaatggcgtgaacccgggaggcgcagcttgcagtgagccgaggtcgcgccactgcactccagcctgggcgacagagctagacttcgtctcaaaaaaaaaatataaataaaaataaaaaagacggtggtctcacaatgttctccaggctggtctcgaactcccgggttcaagcaatctttatgccttggcctcccaaagtgctgggatcgcaggcgtgagctacggtgctggccggttcagcctacttttttttttttttgagaccgagtctcgctctgtcgcccaggctggagtgcagtggcgcgatctcggctcactgcaagctccgcctcctaggttcacgccattctcctgcctcagcctcccgagtagctgggacgacaggcacccgccaccacgcccggctaattttttatatttttagtagagacggggtttcaccgtgttagccaggatggtctccatctcctgacctcaggagatccgcctgcctcggcctcccaaagtgctgggattacaggcgtgagccactgaacccaccctacttattttttttttttccttctttgagatggagtctcactctgttgcccaggctggagggcagtagcacaatctcggggcactgcaaccttcgtctcccggactcaaaccatcctgcctcagcctcccgagtagctgggactacaggcgtgtgccaccatgcctggctaattttgtgtatttttggtagaggtggggtttcgccatgttgcccaggttggtcttgaactcctgacctcaagtgatccgcccgcctgggccgcccaaagtgctgcgattacaggcatgagccaccactcccggcctcaccctgcttttttttaaagcgtacatagaaaagtctttcagcttctagaggtcagtgggcggtgagggtctgtctgaaggaggcagccagcagctactgaacttctctctagtgttgtttaaatatgacttaatcgtgcttaagcaggccagtgcaaacatttttcttcctgctgcagcctgtttaaattcaaaaactcaggtgacttaactcctgcttcaaccacactcctgttaaccaccttcatatggtggatatttccagccgcagggctcagtccaaggacacttagtgattctggcagctggtatttatgtgttatgtccaaaaggaactaattgtttcaaggaacaaagtaggtttaggaaagataaagctgccctctgcccaacataccctgttagtatccaatttcatgttaatcatcatccatttaattgcttggcagctcattccatctgtgtttgtcctcatgttgagcgaggtgatcacatctcacaccttcttttggatcttagttttgagcctgactacaaagaggctgcttttatgtggccctacaacctgtggtttgaacttgctctctgaatttgttgcattcttgaagagctgtgtgcaaagtgaactttagaatcatgtttctctaatgacttgacgtcctttccccaggaggtaattttggtccctggtcccaagaaggctatttaagacaccaaaggaatcaaaactactttcttcagaagtatttgttctgttactattccaaaactcctccaggaaatgttgagcacacacatcatctatggggaatgatttcaagcagcgtccattctcacttcattagaagttactgaaatccccagataccaaaaaagtcgtgaattcttttaactacactagggtgctattttggtcataattagttatccttagtgtgaagtgattccagtctgttatttaatatgtagatcttgttagaattcaaagaatacaggcatcatttggataagctgaggtcggtatttgagatgaaggtgctagaagcctgcttaactccctgaagagtcttttccagcctgaaccttctgctctttttaagtctttggcttctgactgggaaaaaatctaaaaggtgcatgactacatatgtcatccagatagatttggatgagtttatttcttattctggaatacctcagttatacggagcttaccacactggaggttatcatttatcctaatgagggttcagtctttgtcttgctttattccccagtccctagacagaactttgtgagtagtttttcccttcctcaaaatctggatttgcctattttcaagttgacagctctagaattgttcctcttaaattttcatgtacagtcatacatcacttaatgacagggacatattctgagaaatacatcattaggtgattttatcattgtgtgaacatcatagagtgtacttacacaaacctagtctgttctcatgctactatgtagaaatacccgagactgggtaatttataaagaaaagaggtttaattgactcagttccgcatggctggggaggccttaggaaacttacaatcatggtaaaaggcacctcttcacaggacggcagaagagaatgagagcaagcaggggaaatgccagatgcttataaaaccatcagatctcatgagactcactcactgtcagagaacagcatggggaaaccgcccccatgatcgatacctccacctggtcctgcccttgacacgtggggattatggggattacaattcaaggtgagatttgggtggggacgcagagccaaaccgtatcacctagtctatatggtgtaacctgttgcttatggactataaacctgtacagcatgttattctactgaatactgtagacacttattccacaagtatatttaaggatttgtgtacttaaatgtatctaaacatagaaaagataacaataaaaatatggtataatcttatgggactaccatatacacagtccgtcgttgactaagacatcatgcacatgactgtacttcaaatcttgcttgattaagggaggaacatgacattaagctagtcttggattcgtagtagccccttccaagtgtgtttcatagcttcttctagaattttgatgtcaacttctttaatgacaacaatagctaataattagcactcactgtgtcagacactatatagagcacttacatggactgtctcagtcttcacaaccttaaaaaatatatttctattttgcaggcaaggaaactgaggcaccactagtaagtttccgatcctaaccatgaaccaagatagtaacagctgcgtctttagaatgaattgtcaatattgtctgttgtagggagctcgcttatggctttctgagtaaactgctctgcttctaggcaccagagaaggaggaattcctggcctggcagcatgatctggaagtgaatgataaagctcccgcccaggctcggccaacggtgtttcgatggacggggggcggaaaggaagtttacttatctgggtccttcaacaactggagtaaacttcccctcaccagaaggtaattgcctggggagtgttcacatatttgtcttaacataaattctcttctttctaaaacatctctgagagagaacagaaaatggatgtttctataaaatggatgcctagtggaaaaataattttgcttaataagtcttaaggttcaaatgttaaaccttggtggtctctaggtttagagtacagaagaaagagaatatttctgtgtcacagacatctttcacttcagatcctcagctatctgttcggtcaggacttttccacagaaacacaaaaatctgtcttaatgcagtaagggagcactgggctggaatcttagaaacccacatttgagcccacattggccatgctgtcagtcacctaacgttagttaacctgagcctcagcgttcgtttctgtaaagagggaatattggaccagatcatctctgaggtttcatctaactttgactctgcgtaatactttgtttgaaaagtacatgttggctgggcatgggggctcatgcctatgatctcagcacttttgggggctgaggcaggaggattgcttgaggctaggagttcaagaccagcctgggcaacatagtgagacccccatctctacaaaaaaattaaaaattagctggacatggtggtgcacacctgtatccccagctactcgggaggctgagatgggaggattgtttgagcctgagaggtcagtgctgtagtgagcagtggttgcaccactgcactccagcctgggcaacagagcaagactttgtctccaaaaagaaaagaaaaatacatgctatgtaggtgtcattagcaaggattatagtaagacattttatcaggaaccccagcatggacttctgtcttaagttgtcagtgagagaacacctttagtgagtattcttgataaaatgagggagaaagtgtcaggcctattgtcaggggctgcctgctttccagcgtttccattggagaaggagggagccactcagcacagcagtcacaggtcagttcaagccaggggacaaaacaacccagtgaaggggctcttccggagtttggtttttcagtcattaggcaagtttctttagagaacatttgagcttcctattcaattgatcccttctcctgcccaaggcaaagtgacaaagggtaaaacgaggcagcttctgtttatcttgtgttgtcatcctccttggcatccaggagccttgcgagcttgagacgcacaaatgcctgactgttgaccttttaacattagggatgtggtttcctggtatttgagtaaggtgagttttcaggaaactgtgtcgcactgctgcttccttatagccttttcagattgaggtcattatgctgaattgtctaaatgggctaaaaatgtttgttctcctgcagctgaactcttggttttatgtggaaacgttttgttctgtagctggtttggcaagtaagctcggggggcagcccaccccacggaagtcctctgcttcctttttccttgcagccacaataactttgtagccatcctggatctgccggaaggagagcatcagtacaagttctttgtggatggtcagtggacgcacgacccttccgaggtactcttcctcccacctctggtcctctgggtgcccgcacattccaaacaaatcaccttcccaagagattgccgctaggtccctttgcccagctagtaaaagtccccgtgtgtggcagagctgagtagcagcactacctgtcagacagttggcatacttgaccaagatgagcagggtggctagccaggagatgaggccttccagccaggaattccaagtcctctgaagaataactccgcagaccttccacgttatgatttctgcctatctgtctcttcccagcccatagtaaccagccagcttggcacagttaacaacatcattcaagtgaagaaaactgactttgaagtatttgatgctttaatggtggattcccaaaagtgctccgatgtgtctggtatgaacacagttattttataccacatgcgtgcaggtgggggctgtacagtctagacatactcttgtttctcttgcctctcttgagctgaagctgcccagtcagataggcatttatagcccccacttaaaggccacagaacttaattcctgtcaggttgttgaaatttagccctaagggagctacaagtcatttccctggtcatctcaggtattcagtaggtctgcttggccacagaacgcagacagcagaaatggaaccatagcttgatctcgtgccaagggcagggctgaagaggccctggagggtggcactgagtcagtgacagcccagcactggggaagcctgtgtctcatcccacttgtggtgcctgaagaatttcagcctgacaggtgtaaatggacacctcagtgaccttagcagtcacttatgtggtacattagcaccttgtcagaatccctttggggaggatgcggctccccacgggaaacagcctgcacagcccaactctccttgatgggaagctatttggtacagaaatacagacccagtaaaacttctccatcttgtaagagcctttcaggcatcgaggtttcaataaattgctttccctccaagccccacaggaagaaactacctggaacatgattcatacagttcgggggaagagggttgcgatctaaagtgttccccttcttggaggcgggggcttaacaattcctggactctgagggaggcagtggaaagatgccctggcagaatatctggcgccctaagaaaacagattccgttcgttgacaggagagttcttcatcattgtctagttaggcctggaagttctgccaccaggatttcttgttaccagttcagaaatcacagtggtaaaatgatcacaatgggctcactgtggttgacagtttgttgagcaggacttggaaatccgaaatctgtgcttttatctgggtaattagtcttttagagatatcatctagtttttttgcagatagttgagaatcagggaatggaggaagtgtgcccaaatatcctccaaaatatataacttactgatacatgtaattttaagccacttacaagctttttagtcaaatttccacctagggaaaggaaacggacccctcactgatacgaagctaattccacgttctctacagacttctgtttcgacacttacttcctcaaaatgttatttactccttatggctcagttttctgcacttcatgcttttctcagtttcttgctgtgatatggttgggtcacataaacggggcttgtcccctgaaaaatgacattgagggaattggcagagctggggcatagcagattttccctggaccagtcccaggatctggcgaccagaaccatcccacgcgttctttggatgatggcttggtaccttctggctggccaaacgtcactatccagtgttctagcattatgaaatcctgctcttgtagcagcttctcagtgtatctgaataatccagatactcaagcaagagtttggaaggaacttgagtgtaatggagttaaagagcctttagatattgggctttcaattttcccccccattttgaaatgtgcctcgtttagcctgttttctccacggcctctgtgtaaacagactgcctcatcttctgttgcattgcggccgggggtgcccataacttggacttagctactcaatcctcacttagcctccagcttctttgtggttttgccagcccagcctgaagggagaaggaagtcttattctgccgtgcgtgtgggattaagttatcgagaatagcctccttgtgatctgacgcagactcactggctgggccgtgtcttccaccagggcatctgagttgactactgagttgtatgctagtcacccagattccaaaagggttttctcctctcctctattctgcactcttggaaccagtgcatccttcaagagaatgtaaatctgcattgagggaacaagagacaaggaaaatgagatgatgacaacataagtaaggctgctcctagaatgcctgattttcaaagtaaagtcctgttaccatctcccaacagagctgtccagttctcccccaggaccctaccatcaggagccctacgtctgcaaacccgaagagcgctttcgggcaccccctattctccccccacatctcctccaggtcatcctgaacaaggacacggggatttccgtaagtatgtgggcatctgcccggaccatccgccgtgggtcatgttcagttgctttctttcctgtgtccacctcttgcaaagcagctggtgagcaagctcagtgtcaccccctagtgtgaactgtgccgttcacctctgctgtggggatgggctgataacaagaggttcccagtgtggacaccgctgcctcgtcttgcaaagcctttctgcactactcttccttgtccttcacgcctgcctcagtctaagccctgttcaatttacatttcatgacaaactgtatcaccatctcttcttagtaagctacatgctctggcccccacattttagaatctagttttaatcattcaattgcttttagaaatatcagtactcctggatcaaaatttgggatatctaggtaacacacatttctcctccgggaaattattacatgcagaaaagaagtgtgtgtcctcctggatcttgaagaacagccagttctgttgtgattctgttttctgttccatctaacctggattgcctgcccagtccgcctagctctgggatgcatggcacagccgtaattcttgggaatccaggaattcagcttggtccaagctacctcttaagaggcattgtttacgaggtgcttaaagtaaccatgctgctactgaacactccaccctgaagtggagggcatgtgtgctgagacgaggaatgcacgtgtacacatgcaggtgtccctacagtggtccctgccgggctgccaggacagggtctcagtgcttgttaccctacagggtacccaacagggcttgcctttctcaggtcacctcctgtgctgggagtgcccctgcagctgggtagccatcctggtataggcccagaagaggccagtggtaaggacagcacgcctcagctggcagggcccaccatctttccagcactgagttggcaacagtctcaaataggtcacaggtgaagagtttcaaggacatgtagcttctgccttagaagcacttagttgacactgcttcccttagctctaactttacaaaggttggtgggtaagatgactttcagtgccctcctaagctagtgaggtttgtttttttttttttttttttttgagacggagtcttgctctgttgcccaggctggagtgctgtggtgccatcttggctcactgcaagctccgcctcccgagttcacgccattctcctgcctcagcctcccgagtagctgggactacaggcccccgccaccacgcccggcaaattttttgtatttttagtaaagatggggtttcaccatgttagccaagatggtctcgatctcctagcctcgtgatccacccgcctcggcctcccaaagtgccgggattacaggcgtgaaccaccgtgcctggccaggttttgttttttctagaaaagggaggcatcactagccatcttctctgatggagactgctgctgggaatagacaagctgagagtggcccagggggctgggaatatgagaatgtcaggacccctctgtccaaggtagcactaagctctaatgtaaactgtggttacagttgtcactactaaagggttaacatttattttgccccaaactaatcttaagtgcttttcgtgtattcttattcaagcctcacaacaaccatgtgaagtaggtgcaattattacccccattttagggatggggaaactgaggcacagagcagtagggagaacacttaaaatctactgtcttagagattttcaagaatacattgttactaatagtcaccgtgttgtacagtggatctcttgaacgtattcctcctgtctaactgaaatgttgtattctttgaccagcatctccctacccccaccactcctagccgctggcaaccaccactctactctctacttctgtgagttcgactttcttggattccacataagtgacatcacatgggatttgtctttctgtgcctggctcatttcacttaatgtcctccaggtttatccatgctgtcacagatgacaagattccttttgtaaggctcagcagcactgcattgtgtatcagtacctcatttctttatccattcatccattgtggacacctacgttgattccacgtcttggctattatgaatagagctgcagtgaacgtgggagtacagatatctcgacatgctgatttcatttccttggagtatctaccctgtagtgggattgctagaccatgtggtaattttagttataactttttaggaaccttcatgccattttccataatggttgtactaatttacatgcccatcagcagtgcactaaaagtagcttttaagtgttctcaccacaaaaacatggtaagcatgttctgcgtgtgttgatgagcttgatttagccattccacaatgtgtccatatttcaaaacaacatattgtacatggtaaatatacataattttatctgtcaatctttgaaattgattaattttttaaaaacccctcttaggctcacacagcaactggctgagccagcagtcacatcaggcttggctggtgccagatccttggtagttggtgctctcagcagccaccctgaatggcctcccagcgggagcttgctgagtatttgttgacacaatgattggcccagcctctgggatcctaagcctacagcagttgttctacacttttttccatttgaattgcatttataacagttgggggtatacaatgaaaaaataaatcccgatttctggcttctcttaaaacataggaaggtgcggcgggcagctctgagtgccagcccggtggcagattttccagagtagtggtgtcttgcccaggtatccgtttcattcttcaggttcattgagtcttacagatacaagttttgaatccattgctcaggagcgtttagtgcagatggtctcttcctgtgttctctgaaagtgctgttaatagctgctttcttcctgccccaccctccataagaggacagggccgtggcccacacttgaaagaggccggggtaaatgcctggccagagacacacaccgatgcctccagcaggcatgcagggagctcccttcaggtcagaaggcgtgaccttcatctcacctgtcgtcttggacaagcccttgcgctgcctgatttgggaagagaggtcggcctgagcgctgcctcctgtcctttgatatctggcactgggaagtaaaggggagaatcttggtttccaaatcccaaatgctcaccgctgcctttgttccctcacagtgtgatccagctttgcttcctgagcccaatcacgtcatgctgaaccacctatacgcgctgtctatcaaggtaatgacatgtctgtccccatgagagctgtgttgcccagtgtgtgctctgaggacccccagcagtggaatgacctggcgggactgacttaaagggcagcttccagggtctggcacaggccatcaggctcaggttctgaagctggcccgggaatttgtggttttatgaagcccttaatgattctcatgtcctctgaggcttgagccccttagtccagcctttgatcatttccaccttgttccttaggatggagtgatggtgctcagcgcaacccaccggtacaagaagaagtacgtcaccaccttgttatacaagcccatatgaagagctgggggcggatggtggcccaggagacagcacaccaccaggctccacacgtgcatgctttccccaagagggaatggactgtacattgctcatttcacactcttcagaagacatttcatacctgccctggtcctgcttgaaggtttgtccaggcagagcagctcctgcagcgcctcggtctgtgacagtcctcctagcacccccatggctttgagcctcggggactcatcaagtccaagaaaagagggaggggtggcagaggatctgcagccctggccccgcggtgcatgaggctgggtgcagttctaaacctacattctcgatttttcttaagccaaaaatgaatgctaactcctttgccagtaaaattctgggaaacagggactgaggccacacatcatttccagtcatctgtgtgtttttaaggccagccacttgtccctgttgaggcctggctatggaactaaatacagtgttggtcttgcctgtccttcaaaatcaacaacagattgtctctcggctccagggaggtgtcatttctatagaaattagaagctttctgatttctagatgaggttttacaattgtttcttacagtcatgtgcactaagtactctttttgtaagcagaggtggctggctctgcagccttaaggccattttttaagtcaccacgtctagaagtcacatgaactctgctcagcaataatctgttctcagaacagacttttcaacctgctgccggatttctccattcagctggatgatcctcaggactgaccagttagctggcaggttgtccagctttttattccagtcataataggtgacagtgttaaccgtgaaaacttgagaggcactctgccctcttccctataaaatcacacagcgtgattttacaaggtcccgtggcaccttgctcaggacctctgcccctagttagcaagactgcagcagttgctgttgcttattctgaaaggaatgtagaacttgacagcagccttctgagtctgggtcaggaagatgtcctttggaccaaagcagacttctttatacgcagctcagtttcccgggagtcgccacagatgtacccactagcccaggttgctgtgagtcagcggaagctcccgttatgccctttgctcctggtgggagagggaggagtgagctccctgggttccagtatttacttggtatacctgagtttgggggtacccttttttgtgacttttcaaaacagtgaattactgtcaccttgatggacaagtttcaataaaactttgtaaaaataattggacatgtgcctggaggagctctgattttattcagtcccttggagaagagactggaactcttcgagagttgcgtttcagtaccgttcttgtggctctgagcggacagggctactccagctgcccaggcctgagaaccagtcctgtgactcacacccattcacacagtttggaaccttaagggacccctaaaactgagcccctctgaacagctcaagtcacaaggggaagctgaagaggggtaacagcagaggctcctggcttcggccagttgttggtgtccccaggccagagggtttgtttccttttgctcctaaacaagcccggtgggacagcctgggatcgtgaccctggcgtgtgagagagcaggacgttgtggagtcagagctgttttcatccactaaaagaggccgtgtccctcctccaaaaaggtggaaggttatgggtgttcctttaagccttctcaggtatcaggaaacattttaaatttagcagaaaagcatgctaatgagctctacccactggtgcagaaaacccaagctgaaaatgctatgtaaaataagactggtttactggagccagtcaccccatgagttctccaagccctggggccacaggggacttccaggtgaggtcactgctgagatgatggaggagacacaaaacaagaggacatggtcagagacaacacatctctgtgcgtattcaaaggatttcattttctttaaaaagcacattatagtcggaaagcctgcccaccaagtgaaagcctccatacccaagaagctaaaggttaatggtgattttacaaaggtggaaaaggagaccttgttttgcccaaatcacaggggcaaagccatatgtcaaatcgtgtcctatgaccaagtaatcctttcttcattagcatttcctttatgggtgaggacttagttaaagcttaactcaaattgcttttcaatgaagatacatttttccctctagaagctgatatacagatgaatttatagagccaaattaaagcctaaaaaattactaaaatgtaaatcagtattgcagggctaaggccacaaacaggaagtcaaaaggccagacaagaaaattgtgcctgcacctcagctagctcaattaggaaatctccaaggctcctaaaagactgagagaaaaaacctggaacatcatgatacgatctgtggctgaggtcagagactgaacgagccagtctaggaaagaacaaaatttcattttaattcagttccttttgtatgagcacagtttcactttcaagcatttacttcccatatctgatcctcctctgctattgtgtcaccttcaaaattcaaatgtccccaatgtgatagtattaagaggtagggcctttaagaagagattaggtcatgagagcccctcctctcatgaatgaaattgaggttcttatcaaagaggcttcaggcagcattcagctcatgtgccctggcaccttctgccatgtgaggacacacagcttttctcccctgcagaggacccaagcacaaggcgccatctgggaagcagagagtagccctcactagacaagcaaacctgcccatgccttaatcttggacttcccagcctccagaactgtgagagaatgaatttttgttctttataaattacccattctcaggtattttgttaaagcagcactaaatgggctaagacatccaccaatgtttacaaatggtttgaatgaattgatgaagacccaagacatggaccactcatcaaatcataaagtttctgaggaataaaagcttcagcactcatcttggccagcaaattagtggagaaacaaactagagccttctgccctggtatgccaactataattgtcttcaggagaaaacatggaagttgtagatacgtatacatttcttctaaaaccccagtcatccctattaattgtaaaaacatccacaggatcctcctaagagtcatcgtcactatagtgagtcagacatttggagaagatcccaaaagctggagcagcagccggagccccgtctctgggaccccagccactggctctagaacgagccaccaggctctgccctcagggtgggctcccacaactacattgtcgtcttgtctttcatacaactaaagagcctttccccagatgaggatgccagctcttactgctacctccccctaaaagaattcacccatcccatctgaaatactcagtggccagtgagaacaggccaagatgtgtatacccttggtcgattttttgtttccttttttgtggctctctgaaagacagcctgacttatgcagagtaataaagtcattttcaaggttctttcatctacctctaacaatctctctagggcaaatagagttccgttcatcattaacagactcaagggaaaacaaagtgatcaacactggactctatttccactacccccaccctccccagcttcaggaaacagcttcagcatttgagtgggcaaataagaaactatttttctcatttaacactgtaggcctagagccacggtctacatgctttagacatcattagcagtatttaaattgccaaggaagacatgggactaaaactagaacagaccacggtttctcaaccttggcactattgaggctttgggccagataatgctttacagtggggggctgtcctttgccttgtaggatgttgagcagcatctctgacctccacccattggataccagtagtactcccgagttgtgacaaccaaaaatgtctccagacattgtcaaatgtcctctgggaggagggaagcaaaatctccccatggcttagaaccagtggaacaagccagtgtaaccactgtattctgagaatggaatctgagctggcccccacgaatgctttctatagcaaatcacattcaagaggtccaattctgaagacagtcctattaagcaaattctcttttggcctaaccctccaaatcctaaagttccatggttatggaatttgctatgcaatcaacctctttagtccggtgacaattaagttgtaagcgcagaaaacatgacatctaattttgtgcttatgaaacaggagtggccagcatgaagagttaggcctcattttacggtgtggctgtggaattggttggttgtttctttcgggctattccttagggttcaaacactcttccttggcacttccttttgaaaccaaactatgttgacttagctttggaagttttctgtgacctcccacaatcctctagacaatcactgaaatgcttggttgatatttaacagatgtttttctaatgctacaaggaaagaaaggttcacatttcaccacttcatcttctgaattattttcattcttacaactacgaccttgtggcagattttcatgcccaacagtaacatcgaaaagaacagaattgcatctgtggttcccatcacaagcaacaaagacagatacgactctgcgagtccaattttgaccgtggtcagacgacttcattagaaaataaaaattcaaagactacaacccacaggaaccatgaaaacaaaaacatcaccatttgccaaaacccgtttgtctggatcgagcaagtttatactaacaaactaaagaatgagaaaaaatttatcttgcagactgtaaaagttcctctacttaaaaatggaagtattttcatttttaattacctttgatttgaattcttctctacaaagaaatctacattattaaattgtagttggccttttaatagatgaaagatatcttgagctgacctgttcctggttagctgattatagaactgggtaatccattcttcagtaatcctttccaaatgtcctgtgtgactgcttgaagagctttccagctctgcagtcctataaaatgaccttaatagccagttcatggttcactggaagtattgaccaaatttccacagtcaaactcttggcagagaatgtcaccaatcgcttaattccaggatagcagtgtgccctaaccaccacgtggcttcctctatcccactccagaggaaaaccctccccacaacgtaaagaaggtcccatccatgataatacacctacactgacacgctggtgatagtttttctttcacagtctctcaaaaaaagaagaggtcattgcactaaagcacacattagtttagatcattgctttatttcactaattgttcaacaacaaagttcattcctctcaaggtggatcttgaatcattccttgtgttctcttcctcgttctgaataaaaaaggtaatgaagaaaaagcctgtacttttggagacctagaatcttgattgatgctaataagcttttgacagcaatttcgtgttacggtatatcctgctggcatcttggtggtcacacggagctccccaccctccagtgaagatggctgtccacaactaccaccattgaaaccaaaagtaagtgttgaaaaatgcaccttttacaataaaaaagtagaaaccaattcaatttcctctttttttttttacgaatataaagtttcttgtaaatatgtacagtcttttgagctagttctatatagcagaaagcagttcacagatgagacacacaatatacattttcagggctcaagaagcccatttctcatggagatcctaaatgaaatgccaagactgaaagacccattttcagtgacctttccaaatactgtggaccaagagacaaaacttcagcaaacattcaatcaaatctgccctggggacgggaggggagggagtacgaccccacagactccaagcaacacataaaacgccacagcaggacatttgccaaaggagctaccacatggaggtttgtaggcgtttcaaacaagaaagcacttaggttaagacacgagcaggaaggagctgggatgcaggccaggttgcaatctggaaagggatctgaactgtggacacagttgaaaacacggtcatgttcacctgctgcggtggaaacgggtctacctttgagcctacctaggaggtgcctgggttgttgaggcgggcctaagagtcgtggaggacccaaagcaacagatgccttgtgggagattaaaggcagaaataaggccgcgagttagcttgccaactgcaaagcctctaggttggttctgtaccagttgccaggaatttcgtactctaataggagggtccgcagacccagtgggagccgcactgcacctaaggacttcccaaccctggcggagctggaagagttgagctgcggctgctttctcaaacttcctggtcttaggtctagccctagggaaaggctcatttggaaagtcacagtttcgtggggtagaaccgcgctggattgggtgtgaacagagtcatcctctgcaggcagggaagtgtgaagtttggaggggacactgagtgggaggtggtggtttgctgaaatccttctctggtcgtaaggcttgagcgttttgttttttgtttgttcagtgctacagactgcagcttgtggtggccagttagtcggcaagtcgtcagagggtctcgatttggcaggagctatgggatggtattaatacattggcagagcaacccaagggggcagcacatgcagtgaactgccatgcagaactcccgacgggcctcttccccatcccagagtggggaacaacacgccgtcacagacaaggaagtgggtgcccccgtcccctccccgaccccgagacccaggagtgctgggctccgagcaagtctattgcatgctttcctggccaaagctatatggaaagcgggaacagcaggctggggagatgacgctggggggtggggaaggaaagcgtctcgaggtcccttggccccaagtcactgcctccgagctgaggccccgatgacctccatacattctcagctggtgggaggggaagtcgtcaaggccataaaaggcaatgaaaacagtaaacatttggctacgatgtcaccctggggaaagcagggccatctatgagaatgaacaggaacaaggatgaacctacttggctgcgggaggttggccaactgaccgggactgttctacactatgcctcggtggcaaagacctgatgatgtggtcgagctaaaaatgactacaacaggaaatacgtcgctattcaaatctattaagaattctgttgtcttaaaaaaaaaaaaaaaaaaaggaaagaaacaaagagaaaaaaaaaagaaaaaccaaccaatcctaggatcttaaagtagctaattaggattctaaccatgttgtagttagcatcccggttggtttcctttgatgaactaactggtacaggctagagctaggtacaaaagtttgtgaatgctttgaaagagtaacaaagtgcaaagagatgactgcagggaggtgcccagggcaggcaccgggcgctgacagctccgaagagcctcagccacctgcccctcctggagacaggggtgtccgtgccgaggtgggtctgggccccgctgagccagagggtggctgagcacgtgggcgcttgggtccccatcagcagagttccatagtgtgtttggtgttttcctgcagatcaagatgaggagttggtttttctggctgagatttatactgaagactggtcccagacctaggagtgaaataaggaggagtgttagccatccgaggccagaagttgctgtgctcaccttgcatgatgcaaatgggaatctgcagcccctgggctatccccttcagcagctagcagtgagtgcttggcagggcagcacccgctccagagcctggggaagccagggagtgaaactcactggaaaatcccaaagccgtgtgtgtacctgcgatgctgtaagcatgtgatacacacacatgcacatacacagtttcatcggtcaattgggagggataagaagccatatggatggtgtttccttctttctttaccagcaggtgaactgcaggtggcatcagaaggagaatgccacccagaaaatcagccccaaatggcagaaaggtggctccttgacctgcttagcctgctaaggaggcaccaagcacttgagccatgccctgcctgggggagcccctggtcttccacacccatccctctcctcgatcgcaaacctaaaattacacagatcattcatgcacatgatttaaacatttccaaaagttcaaagttcttctggaaggcaaccactgtgaacactttctgtgtagccttccagaaaaacaatttatatatacacatgtgtgggctgagcgtggtgactcacgcctgtaatcccagcattttgggaggccaaggtgggaggattgcttgagcccaggagttcaagaccagcctgggcaacatagcgacattatgtctctaaaaaaaataaaaagggccgggggtgggggtgggaatcagacagatggtggcttgagcctgtagtcgcagctattcaggaggctgaggctggaggatcacttgagcccagaagttcaaggccgtggtgagctatgatcacaccactgcactccagcctgggcaacatagtaagaccctgtctctaaaacaaaacaaaacaaacaaacaaacaaacaaacaaaaagtgggggaaaaagttagccagacatggtagctacagcccatattcccagctactcaggaggctgaagtgagaggatcacttgagcccaggagtttgaggctgccgtgagctataatcacgccactgcactccagcctggggtaacagagcaagacgctgtctctcaaaagaaaaaaaaaaaaagaaaagcatatgtgtgtatgtgtgtgaatctatatctatgtttgaaaaaagcatgcaacatttcatataggatgctatcatttgggtttcaaaaggagagcacacatatatatttgctggtacgcacagaatatctctagaaactgctaccacttgcctctggagaagggaaaacattttttggtagctattatattttgagttacatgcatacatattttccttttcaattacacacacgttatccatttgcttaggaagctctttttttttttttttttttttttttttttaagacagagtctcgctctgtcacccaggctggagtgcagtggcgcgatctcggctcactgcaagctccgccctccgggttcacgccattctcccgcctcagcctcccaagtagctgggactacaggcaccagccaccacacccggctaattttttgtatttttttcgtagagacggggtttcaccacattagccaggatggtctcgatttcctgacctcgtgatccacccgcctcggcctcccaaagtgctgggattgcaggcgtgagccaccacgcccggccaggaagctatttcttaaggtacattttcttcctaaattcctgtgtctcgcaaagtctgaattacagtcatggagttccttttttaaacaacagtggccccgtgggggcctcagttccccaagtcactcctggcctccgcaacagacacacaggcctcggaatgctgcctcaccttgttcacctgggacagcggggtcctcacggctcccgcaggcagccggcccctgctgctgtcttcaaacagcctcccgggggaccgctctctccgcgtgctgagcatccggccgggggacttctctcgctccagggggcggccaggagacttgtccctgcgcagctcggtccgcccctcgcggtagcggtggggtgtgcttggctctcgcgggtggctggggccttcgggcggcgctgggctggaggccacgcgcttggtgatgtgctcgttgtacgtgggtgggcctcgcttgttggggctgctggcgacacaagaggaacgtagggagctgcgaggccacaaccccagaggggcattttccttcttacctgagcaaccccctccttgacccagcctcaccactgattatcaagagattagacctggagttctttggactttgcctgcatttgattttggtagcaaagacagggaagagagcaaagatggcaacaaaagacaacccaccttcctcagtgcaggctttcatttactgagcacctactgtgtgccaggcctgtgctaagttcttcatctgccatctctcattatctcattaaatcatcacagcagctcctgagctatgaacaagcatgaccctcactgtacaggcaagaaaatggggacagacaggagttaggtgacttgcctgagctaatgagtggtagagctgggattccaataaagaccagtttgataggccaggcgcagtggcgcacacctgtaatcccagcactttgggaggccgaggcaggtagatcacgaggtcaggagatcgaggccagcctggccaacatggtgaaaccccgtctctactaaaaatacaaaaattagccgggcgtgttggcgtgtgcctgtagtcccagctactcaggaggctgaggcaggagaattgcttgaactggggaggcggaggttgcagtgagccaagatcggaccactgcactccagcctaagtgacagagcaagactccgtctcaaaaaaaaaaaaaaaaaaaaaagaccagtttgatgtcataagccccatataatatcctactgacctactatttcccagagcctagaaggcacagaaggaagtcatcaactaggaggtcagcctactaagacccagaagtcagggacccacaaaggccctcagtgcaaggaagcagtttggagaaaccctgtactgatcactgttaactgccatgtctgtcccactcctgggcctcgtgtttggtcacctctgcccccatgtggctttccaagagtctctgacacctgatgcaaatgcagatgctcagaaggtggatggttctcagtcatgacaataagacgaccgagaggtgtagggatcaggcctgatagagtcaggaaactgagcagggcagacaaagtaaagcgggctcagaaaacgtcccaggcctcaaaggttgataattagtaaccaagcagttgaaaacactgcggcctttttgtacaacccaacccaatcctccacccactcctggcctggatatttcaaatgaagatttcagcagacccaggggccaaactccctctctgaagatgtagtaagacctacaaacacagagagaactgaaatgtggccttctgagtcaattctttcccacccttgatcagctctaaaagtactagggtccctattatctcagcataatttgtgcttggaaaaggccctacttaaaatggaggaaaaaaattacagtgaatattacttgaaaacatattttgtttgattgaggctttatcttggaatataaacttattttatgctagatatttttagtatttaaattacaatgcaattacatgctgattccaaaaatgaaccaagcatgaatcacagaatgatttgttttgtgctaattgtctcaacaaaattgctgctaacatgctctgacaccaacgttggacacattggacttttgcagtggatcctaaagaaggctcttcaaaaatatttgaaaaagccgggcacagtgatgcatgcctgtagtcctagctattaggaaggctaaggaaggagaattgcttgagcccaggagttcaagaccagcccgggcaatatggcaagaccccgcttctaaaaaactaaaactaaaaattaaaacaagaaaagtgttttcccaaaggactatcttaatccttgatatttaaatccttctcattggaagaggctataattttatcaacttgttcatttctttcttcaattattggtctaactgtatcagaacctcttctgtcaacgtccataattgagaagcgacagcaaagacagtgtttattgtggaaggagagactctagaacaggcttgagggccaaatccggaagatgcttgtttttataaatacagttttattggaatgaagccatgcccatctggttatgcattgtcttacagctgcttccgcatgaccacaacagggttgagcagctgagacagagaccatatggctcacaaagccgaaaatatttaccatctaaacctgtgcagaaaaagtttgccaattcctcctctacaatataacagagaagttggtgtgcagagataatttcataagggctcagttcatagtgaatagtttcatgccatgctcttgctttcccatgcaactgtaacgtttggagattcagacaacgaatgctcagaaggccagaacccctgtctctgcagcagtaagatttaagataactcagatttcaacatcttgaaatcaaggtttatattcatctctagccatatggctttgaaatctggaagacaaacaaaaaaataaattccgagtaggagaactacattaagcctacttgtaatggaaaagaaatgataagatgtgtccacaagaaactatcataaaacaaatgagagggtgctcactggccaggggaagaaggattgctcaagggaaggccattcaggacgtcagctgagattaacgggaggaaggaacacacccgtcattccaagccaagtgggcagtcttccatctccttatccattaatgacccataatctaccacatcaattttatggttttttggcaaggagttacgtttcctgctctgctaaacagaccagggcaacgaagcctgcagtgaatcagacccagaaagccaaccttctacattctcaactgcccaaagaagtcagcgaccaaaagatcattctataagccaagagataaccaactactgattttccagacatgccacaggaaagcaaacacttttctgcccctcgttctcaggaactggaactgttttgatcgcacagtaagcaactcctttgagagactatataatctcaaaagcaaggtgcctggccacctatccagtgaggcaacggaggaaaaaaatctaattacaatatttcaatgtgtttctggcatgacttgggaactacttaaaaaagatctagacattttcaggggaggactgtggtgcactgagcagtcactcttgaagcagggccaagccaagagttaggagcatttaattattggcacttctggtttttcagcaagttcctcaggttaaaaccacactaaccaaacatttcagattaattaactcctatacatcaacaaaagagagattattcattaggacagtcttgcccaagatcttggtattttgtaatattagttgtggttcttccaccaaattatgggctcctggaatataagaacatgctttctacatctctgtatccccagccatagacattatgtcgggcacatggtatggagtccacataactatttagaaggtagacacaccttataataatccagaagattatcttaggtcatttattcccggggttaaataatctcagaccttctttgcaggccaaggtttcaaacttcctacacctcgagctggatctagctcctagcactgtgtcaagacgaggccagtcccacttccacacgcagctggtgggatggcaaatgggagaagccttcagggcagaaaactccacactgtccatcagatttacaaatccacatcagccatcacccattcacccacacttttctaggaatttatcctacagatagattcctcagcatgtaaaatgacgtaaggagaaagtcatttattgcagcaacagattggagacaactcgaacagccattaatgaagaagcagttaaaccaattaaggtacagccctgataaggaaggttgtgcaggcatctggggagaaatgaatgaataactacttctcacactgacacggagcaatcgccaagacacatcaaggtacaggagagtatgcagaatatgctgccacttgtattaaaaaggaggggtggttgcgtgtagtggctcacacctgtaatcccagcactttggggggccagggcaggcaaattgcttgagcccaggagttcaagaccagcctgggcaatgtggtaaaaccctgtctctacaaaaaatacaaaaattagccaggtgtggtggcgggcgcctgtagtcccagctactcggggggaggctgaagtcgggggctctcttgagcccaggaggcggaggttgcagtgagccgagatcacgccactgtgctccagcctgggcacagagtgagaccctacctcgaaaaaaaataaataaataaaaataaaaaataaataaacaaggaggggaagggcacttccagaatgccagactaaggacctctcacaacctgtttctccataaaagcaacaagatcactggcagttgtcaaaatcaacttttcagagctctagaaattaaccctagccctttgcgcggccactctcgaggcagggtcaaaccaaaagagtcaggagcacgtgggtatttggcacctctgcttttccagcaagttcctgggatcaaaaccacactgaacaagcatgttgcaaaaaaggcctgcaacaattcaaagagtgtttatgcaagaaaaacaaaggaatctcagcaagaaccgaatgttttgtgacattcaacttgccccatacccactcccctctccccagatctgtggaagagttgaaaccaatgtccttggaaccacagtagctgtgaaaaccagcagtctagtagccactagagggagcagatcaggattgaagctccccaaaaagccccatccccagaaaactgttgctatctgacctgcctagcgacgctccgtggaaaagacccattctcagggcagtggatctgactgtacatttggttgtacagttgtcccttggtggcctgggggactgcttccaggacttcctgtgggtaccaaaatctatggatgttcacatctcttatattaaatggtgtaggaccagacacagtgcttcaagcctataaacctagcactttgggaggccaaggcgggcagatcacttgagcccaggagtttgagaccagcctgggcaacatggtaaaactccatctctacaaaaaatacaaaaattagctgggtgtggtggcacacacctgtaatcccagctgctcatcaggctgaggtaggaggatcacctgagcccagaggtcgaggctgcagtgagctggtaccactgcattccagcttagatgacagagaccctgtcccaaaaaaaaagtagggggagtgtatttgcatataacctacacacatcctgttgtacactttaaatcatctctagattacttataacacctaatacaatgtaaatgctctgtaaatagctgttatactatattgtttagggaataatgacaatttgtaaaagcttgaacatgtgcagtacaaacacaattattttttcaaatattttcaatccatggtttattgaatctacagaggcataacctatagacagagagggctggctgtattggcataaaggatccctaaacggaaacacaaaaacttcaaaaaattggttccttcccaggtggggacctggggagagggagtgaggagagttaggaggcaagagagacccagaagagaggctctgtactgtacacctttcttatcctttgaattctgtgccctgtggttagattatcaattcaaaaagaagtaaaatttaaaaagaatgccttttaagaagaggcctttttttggaacatgcttgttcaatgtggttttgatcccaggaacttgctggaaaagcagaggtgccaaatacccatgtgctcctgactcttttggtttgactctgccttgacagagaccactcagagggctagggttaatttccagagctctgaaaagttgattttgataattgccagtggtcccgttgcctttatggagaaacaggttatcagaggtccttactctgaaattctggaagtgcccttcccatccttttttgattttgagatagggtctcactctgtgcccaggctggagtacagtggtgtgatctcagctcacggcaacctccgcctcaagggctcaagcagtccccgccacctcagcctccagagtagccgggattacaggcacacaccaccacacctggctaatttttgtattttttgtagagatagggttttaccacattgcccaggctggtcttgaactcctgggctcaagtgatctgccagccctcacctcccaaagtgctgggattacaggtgtgagccaccgcaccacctcccctcctttttaatacaagtggcagcatatctgcatactctcctgtaccttgatgtgtcttggcgattgctccatgtcagtgtgagttcttcattcttttccccagatgcctgcacaacattccttcccagggctgtactttaatttatttaactgcttctttatcaatggctgtttgagtccaatcctgttcaggaggtctcgcattccagggaaggcacgaggctggccaggagtccctgacctgctctcacgacctcacatctctggacctccaggcatggcttgccttccctcctgcctgagcacccctcactggtctccctgcccccacctcgtatctgatgggaaatcctccctcacctccacgtccaggctttcaaccaccccaccagggcctcatccttccatgccttaatctctgattgccagcatctctcccactgggctgtgagtgccatcagggaggggctacatctgctttattcaccattctccctcccccacaagcccaacaactagcaccgcagaatacctgctaaagcaataaatgcctaatttgtgctccatttctcaccaagccaatgaaaatacccaggagagaaagatcagacctctcccctctgacttttgcaaggtggtattttctaattctcctgatgctcataatggtctgtgttatttcagtgccgcagatcgcaaacaaatgaatggtttgagcttaagaacaaagtgaagattgggaaacattctactggtttagtatcacttccttctgccttgcagaaaagcacgttgcccctggtactgaggaagaggagaagctggttacctgcgggaggtggacgggccccggtggtgttcagtgccggactccttcacgaggtttcccttgcagcaaatgacccttaatttatcctggtatgaggacgccaagtaaatcgctcctgaggaaatggcagggcccaggtagcgcgggttcgggatgtccaggtacgctcgggcaggggtcctgcagagtcccagagttccagttaccttcattgcaggctacctccattgctaggcaagttaggaaggaacatgcggccggccccaacacctaccccaatagctgaagttttccacgcatgggaggacaatgcttaccctgctgaggagcgtgcctggatctcaattacttcgagtgagttgaagtgggtcacaaacagatagggttctctgtaggctgtgtgatcaccatgcaggcacagtgtgggccaaagaatggtgaaaagagggaaaatcaaaatctgactgcaatgcattctttgacccagcaatcctgtgtaaagcaactcacccaacaaatacatatctatgcgccagaacagtcatgcatgttcgaggatattcactgccgtgtggtttgttacagcagaagatggaaaacaactcaagtgtacagtgtagggattggctaaatacattataatacatctggctgggcgtggtggctcacgcctgtaatcccagcactttgggaggccaaggcaggtggatcacctgaagtcaggagttcgagaccagcctggcctacatggtgaaaccccatctctactaaaaatacaaaaattagccaggcatggtggtgtacacctgtaatcccagctactcaggaggctgaggcgggagaatcacttgaacccaagaggcagaggttgcagtgagctgagatggcaccactgcactccgacctgggcaacagagggagactctgtctcaaaaaaaaaaaaaaaaaattataatacatctatggaattctgtgcagctgtaaacatgcatgaaaaggctctctttgtacagatatgaaagaatgcccaaggtacactgctcagtgcaaaaagcaaggttcagaatcatgtgggaagtattctgccttactgatttttaaaaagctggaaaaaagaatatatatattttatgtgctagtatttgcataaagtactggaaggacaagaaactcatatgagcttttttttctttggaggaatagcgatggagaatttgggagatggactctctgggtgagacttttcattgtataccttttaaaactgattgtaaacatcttcaaagaattcaatttttaaaaagactaggttcgggctgggcgcggtggctcatgcctgtaatcccagcactttgggaggccgaggcgggtggatcacctgagatcaggagttcaagaccagcctggccaacatggtgaaaccctgtctctactaaacatagaaaaaattagccgggtatggtgacaggcgcctgtaatcccagctacttgggaggctgaggcaggagaatcacttgaacccgggaggtagaggttgcagtgagctgagattgtgccattgccctacagcctgggcaacaagagtgaaaatccgactcaaaaaaaaaaaaaaaaaaaagactgggttctattttaaaaaaaagactgggttcacagctatttagacattgctggtcttcttaatactctatctctgcatgacagtgtcactgaaactagagcacacaggactggaaatattttctgccttaaagggaaaaagcactattattccttgtggcaagacttggtattagacttttaaagtcatgggctctggtatgcgtgccccggtgcagttccctggccttgaatctgggctgactctgcggtctgctctaaccagtagagcgtggtggaagtgagcacgcttgccagcttccgcttctatattcttggaagaagccagcgtggaaagcaacaaggcctccagccaccagccgcagctaagcgcccacattatggccagcactcattgcgtgccatgtttgtgagcctgtcttgggctttctagttgtcccagtggccctgctgataccacatgaagcagaactgtccagtcaagccacggagttggggccaataataagctgttgtttgaagtcactaagctttcagatggcttgttatgcagcaagagagaaacaaaatagcctcgaagggtatctgggccacgacggcatttcagaacattcacacagatacgtatgtacatacttgtatgtgtatgtgtgtttagtctttgatccaacagttccacttttaggagcttataatcagggggtgctatctaacaagtgcaaaaagattagtacaaggatgttcatcgtagtgttgtttacacttacaaacaaaacgggcatggccttactgctttgcctaattagaactggttaagtgaacaggtgttcagctatgccatgggacactctgcagcctttggaaatgactgaaataaatctacaggaattgggctcctttctatcatgagagcctagcaaatatttcccagggctgggactgtgggctggtgaatctggcgtaggcagctcttcatcgagcctcagaatctttccatgaacagttctccgggtgactgttacacatggcacttggtatctaatggaattcacatgcacagtgcttaggccaaaaaagaaaaaaatttccacttgcaattgcggttttttttgttgtttttttgagacagagtctcgctttgtcacccaggctggagtgcagtggtgtgatctcagctcactgcaacctccgcctcctgggttcaagcaattctcctgcctcagcttcctgagtagctgggactacaggcacatgccaccatgcctggctaatttttgtatttttagtagaaatggggtttcgccatgttggtcaggctgggctcaaactcctgacctcatgatccacccgcctcggcctcccaaagtgttgggattacaggcgtgagccaccgcacccggatgcaattcttttccaggacaccagctgctggcaaaagagaagcccccacactgagcctcacgtaccaaaggccaaaggtaagcgactccacttgagatcgtctgtgcggctacgtcttccgtaagaatccacgaacactccaaattctgcaaggtgtcaagagcacgtgggcattagcacagccaagagcaggggcatcagcgacacacatggtgatggaagaatgaggagcagagcccagggacccctggccagatgggactgactgtgaaaaccagaggccctctgctgagccagctctcagctttattaaaaatgagggactttttaaatttaatttattttaatttattaaattttattaaagaaagagaactcaagtgaaaagaaggaaaggaataagaggaggagagggaaagagaaagagacagagagagaggggaatgaagcgatccggaggaaggaggacagacagggaaagacggaaagactcaggaaagaagggaagggggaggggagggaggggatggggagggggaggggagggaggggatggggagggggaggggaggacccaagaaagaaagaaaagaaagaatgcaacaaagaaaaggacagatagaaggatggaaagggaggggaagggaggggaggacgaaatgaggacagagtaagagaaaggaaagggagagaaagaaaggcaagggatggatgaggaaaaaactgcctgctctttggagagaatgtgataaagttagaccacgctagtatctggtgatggagaggagcatccccaaggggacttggtggtgctggaaggacattctctgtacccctagtcaaacctatcctgccccagagctccatgtaccctcctccaacccctcatgggtccctagtgtccatgaggacccaaaagggcagtgggcgcagccacgactcaccgtggaaacacagcaagtactcctctcgctgccctgcgctgttcacctgcacgattgagacagggaagctgttggaagaggcggcaaacacagcaggtgccaaggaatggtcattcttatccaggaattctgtaaaggcaggcgagaagcggggcttcaggagtgagttctgagtctcagcgcggcctgagccatgggtgggtgcgaaagtggaggtgggtcctaccctcgagcgtgtactgcttcatgtcgatttcgtagaatttattggttccaatgaggatactgtaattggtgaagtggatacagctgcagggctctgaggtctctatctcctgagacatgagagcagaagagaaggatgtgagaggtaacacagggcagccaaggtccacagctgttctgcttctgcctacagcatctagccaagccctggagaacattgtcaccaagcttgttcacgttgtcatagagagccattcatctttttttttttttggagacaagatctcgctctgtcacctaggttagagtgcagtggtgtgatcatagctcactgcagcctcaaactgctgggctcaagcaatcctcccacctcagcctcccaaagcattagaattacaagcttgagccactgcacacgccccattcacctttcatgcctctcaggatgaacagtgatccatttgttttctcttcctattgttccatgcaacccaaaactaagaaaacaaggtcaaactgcagccaaaaaaaggtggggtcagaaacaccattccaggctgggcgcagtagcttacatctgtaatcccagcactttgggaggctgaggcaggtggatcacctgaggtcaggagttcgagaccagtgtagccaacatggtgaaaccccgtctctactaaaaatacaaaaaattagccaggtgtggtggtgtgcacctgtgatcccagttactcaggaggctgaggcaggagaatcgctcaaacccgggaggcagaggttgcagtgggctgagatagtgccattgcactacagcctgggcgacaagagcaaaactctgtctcaaaaaaaaaaagaaagaaaagaaagaaacagcattccaatgaagagacagatcttgaacaatacaacattcttatcacaggaaaaaaaaatacaggaaaaatacaacaactattaacagtggtggtcagcagcaatggttttggtttccttctttttgctagcttctaagtttctagtttgaacctatattacctatgcagtcatcatcatgatcatcattattgtcatcttaattacctgcttcctgattatttttagttgtttttaggccaatcctaatgtcatcaaaaaaccaggcacacctattcaaaatgtgtggccgggaatcataaagaagcaatgatttctgagaattttcctgaagctaacagttcaaattctagtgagcattatcatcatcactgaatatttcttggtcacctactaagtatgggaaaactttgaggaagcacgatatagtgaaatgctaggaaaaaaaatcaaacttcagttctggcctcaactttgtaactgaggattttctgccagcctcagttgtcttacctgaaaattgggaataactgtctctgcttttcagaactgtggtgaaaggtgcttgtaaaacagccagttcagtcccttacagggtgggcacccaatgaacacaccaactaaactaacaccaccctgcccagaatggaacagtttctctaacaggtaatgacccttatatattattcacccttcatttcacttttttttttttttttttttttgagatggagtcttgctctgttgcccaggctggaatgcggtagtgcaatctcggttcactgcaacttccacctcccacgtttatgcaattctcctgcctctgcctcccacgtagctgagataacaagcacccgccaccatgcccggctaatttttgtatttttagtagagacagggtttcaccatgttggccaggctggtctcaaactcctgacctcaagtgatccaccctcctcggcctcccaaagtgctgggattataggcctgagccaacatgcccagcctcatttcatttttgagactaatcatgaaagcaccagaaatatatcaggcttaggaggagtgggacactccgaggtagggacatcagacagcattctccagaagccaggcagatttaaggatctaacacacatctcgtccatattgcagtcatcatcacagctcactctgctccgaaaagaaggagctccctaattacatatcaaaatactgctagcactggttattgcagaaggttatattaatagacacctctagaatttgagaaagattctgataagtgctacctgggactgctaggatcttagaaagagcccccccttttttttttccactggtttttcctatcagtcaactttctgttctaacaaaaggctgaactcactgggctggatggggaggcagttcgcaaatgtgagaagaaaagcaggagggaaaccgcagctactagtggccctggggaatcctccacaaaggaaggatctcgctgacgacagaggtcaccccaggctaaaggcccgcagggtagaaggaacccagtacaggctgtgtcccaggacagtgcactttccacactggctcgctgagagagcaggactggctttcccacgttcaaccaaggcaaggcccaggacttactttccggatgcagtatttgctgaggttttcgttgtagcggagaatgacgactttgctgggcatggctgcacagatgcagagcccgttctcaatctgaaaagcaaccaagaaaagaaaaagactgtcaccagtgtgataccggctgtggggcaaaactaggaaaagctctcaggctcagcgccattgatgattcagaccagatcattctgtgtggtggggggagggctgtcctgggcatcgcaggatatgagcagtatccctggccttgacccactagatgcctgcagcacttcaatgtgtgacaatcaaaaatgtctccagccattaccaaatgtcccctggtaaggcagaattacccctggtcgagaaccaaggctttacctgggatccagagaaggcctcagggaggcacctgacaccacacacctttcccacacatgtgccttctgctggagacagaatcttttgacaaacttcccttgtgaggagggagaagacagaatgagggaagggagaggaaaggtggtagagactgctaaacgaatttagagaaaatttcttttcttctgagacggagtctcactctgtcgcccaggctggagtgcagtggcatgatctcggctcactgcagcctccacctcccggcttcaagccattctcccacctcagcctcccaagtagctgggaccacaggtgcgcaccaccatgcctggccaatttttgtattttaagtacagatggggttttgccatgttggccaggctggtctcgaactcctggcctcaagtgatccgcctgcctcggcctcccaaagtgctgggattacaagtgtgaaccaccacacccggcccacatttagagaaaatttcaatccaaaaggaaaagttcttagctaagaactcatacacgtgcagagttctacatcaaaacgctctttttctagaacagctgaaacccttttaacgtctcctgctacaaccagatgtttatcattcaccaaatgaggcttactgctcaaattagtcctggcacgaaggtcagcagctggtacagtgggagaatgaagatgggccgggataagggaggaacacacaagaaaagggaaattgttagcaatgttctatttcttggactgggtagtgagtgtgtggatgcttacgacattattaggctttatgatttacatatatgttccatacattttttgaacagttcagatattagaatgaaaataatttctaatttaaaaaactaatttttattagctgggcatggtgggcatgcctgtaatcccagttactcaggaggctgaggcagaagaatcacttgaacctgggaggcagaggctgcagtgagccaagatcacaccactgcattccagcctgggtgacagagtgagactctgtctcaaaaaaaaaaaaaaaaaaaaaaaaaaaaaaaattttggccaggtgcagtggctcatgcctgtaatcccagcactttgggaggccaaggtgggtggatcacttgaggccaggagttcgagactagcctggccaacatggtcaaaccctgtctctactaaaaatacaaaaattggcctgctgtgatggtgcgtgcctgtagtcccagctacttgggaggctgaagagggagaatcgcttaaagccgggaggcagaggctacagtgagccaagatcgtgccgctgtgctccagcctgggtgacagagcaagactctgtgtcaaaaaaaaaaaaaaaaaatgttgattgagcggctgaatgaacaaatgtgcagtgtgctctcttctgagggtcaaaatgcgatggttttcaacagcagaacgccagtagcctcagggggtctataaacacctgattcagacttaattaaagttatacatgtacatgtatatatacccgcaaacactcttttttattattttctactttaacttttaagttcacaggcacatgtgcaggtttgttgtatcaataaactcatgtcatgggggtttgttgtacaggttatttcatcacctgcgtattaagcctagtatccattagttatttttcccgatcccctccctcctcccaccctccaccctctgacgggccccagtgtgtgtgttcccctctatgtgtccatgtgttctcatcattcagctcccacttataagtgaaaacatgtggtatttgtttttctgttcctgcattagtttgcttaggataatggcctacagctccatccatgttcctgcaaaggacatgatctcattcttttttagagctgcataatattccatggtgtatatgtaccacattttctttatccagtctaccattgatgggcatttaggtggattccatgtctttgctattatgagtaggctgcaatgaacatacacatgcatgtgactttataatagaatgatttatattcctttgggtatatacccagtaatgggattgctgggttgaatggtatttccatttttaggtctttgaggatccccacactgtcttccacaatggttgaactaatttatactcccaccaacagtgtataagtgttcctttttctccacgacctcaccagcatctgttattttttgactttttgactaaagaagcaaacaaaggtattttatgtgccacttttcaatatgccagaagctacaaatgaattaacttgagttctcatgaactttgttatgtaaatgtcataaattcgaatttttaaatttctagtaatgaaacatactttcatctagttcagacatggagatccacattagattttttttaaggttcatctctctctcacagacacagcagacatacacacgcacatgcaaacacacttatttttaaattatggatcatccttctagttttgttaattttattcccattttgctctcagacatttattttagattcaaaacctgtacaaatttcatggctacacaaattatttcacgtgcctaaaggaggcaacagaaatttaacctagtttgaggatgtacaattgtgaaagttgtcagaatcaaaatggagctgccaatgttaacaaaacgctgacattagagcaggaggaggccatgaagagaggattctcacacttgtgtgcctgataaaaaagagactcgacgaaaaccacaaaggccattgcaatctgttttttttttccctgtcaccaggctggagtgcggtggcgcaatctcggctcactgcaacctccgcctcctgggttcaagtcattttcctccctcagcctcccgagtagctgggattacaggcgcccgccaccgtgcccagctaatttttgtatttttagtagagacagggtttcaccatgttggccaggatggtcttgatctcttgacctcgtgatccacctgcctcggcctcccaaagtgctgggattacaggcatgagccaccgcgcccggccaggccattgcaatcttacacaaaaaatacttctgcaaggacatccgcccagtgactatctgtccaaccttagacaagcgtcagtcttgttattaatctttgaagccaaggataattatttcaaaaagactatggaatcctcacttacaaacctctgtcttcctttatctccctagatacccacatagtttacaatggcacgtgtattcccattgcaaagccctgttcccaaatcaatctcttttctttcaagagagcccctctctgtttgttatttaagttgacactatcttgaaggtcaaatcaacgagctctgtgggaagagaggtagtgtcaatttccagaacattccaccagctaggactctgaggggagcttaccttgcctgccccaaacaagtggcagcccttgacagcttcaaaaatgttgggtgagatgtcgggctgggcaggcaggtgggactgggccagggactgtttcactttcttcacgtccacaagacacagtgcccgctcttctcctgaacaggaaaaggaacaacctctcgtcagtgtgaagccgttaagtaaaggtacgggatggtggttctagttctagtcacaagtaaaagtcacaagaggccacacagatgatctgagttttccacaaatccatataaacacattttaggtccatgatttatttattttttttttttaaatttttgagacagagtcttgctctgttgcccacactggagtgcaatggtacaatctcggctcactaaaacctctgcctcctgggttcaagcaattctcctgcctcagcctcctgagtagctgggattacaggtgcatgctaccacgcctggctaatttttttttgtatttttagtagagatggggtttcgccatgttggtcaggctggtctcaaactcctgaccttgtgatctgcccgcctcagcctcccaaagtgctgagattacaggcgtgagccaccacgcccggcccaagtccatgatttaaatctaagacaataacatttggccttttagtcaagattctgaggagggtggaattctgcagacataaaattggagaatgtgaactgtactttcaaacatgctccccagcaaagtaaagaacgaatgtgtgagggaggaatgaggaggcattctatgaaaaaacagacttggactatccaaatatgtggatgtcaggagagacaaaaggctgaggaaccgttcagattaaaggagactagagagacatgattaaatgcaatgcaaattctgggacattatagaagccacaggtaaaatccaattatgggcagcatagcggatacttgtattatagtaagggtaaatttcctaaatgcagaaattatagtatgtgaaactattctatatgatactctatgtgtggatacatgtcattatatgtttttcaaaacccatagaatgtataccaccaagaaagaactctataatgtaaactgtagacttggggtgacaatgatgtgtcactgtcaatgtgtcaatgtaggttcactgactctaacgaacgtatcactctggtgggggatgttggtagtgggggaggctatgcatatatgagaacgggggtatatgggaactctctgtacctttcaattttgctgtgaatctaaaactgctctaaagaataaaataaggaagagaggaagagacggaggaaaaagagctgagattaagaaaggccagttcttgtccatagtatgtcagtccccggatccagccatgcctgaaacaagacctaactgttgttgttttgaacactgaatcgatatattactcttttcccctttaaaaataatgtcactaacacagacagagagaaataaactgtaccctggttatgtgacagaatgtcttcaatccttaggttgatatactgaagaacttggcgtcatacctgcaactaactctcaaatggttcaggaaagagagagagagagagagagagagagtgtgtgtgtgtgtgtgtgtgtgtgtgtgtgtgtgtgtgtgtgtgtgtgttaagaagacagagaaaaaaattatgacaaaatattagcaaatggtgacttgagagagatcacagagttaacagagcaagcaagctctcagaaggtcagggcccacggtggtttcgttgcaatcaggacaaagggtttggctttagatagtcttcgaggcttagcactcttcacttggcctaacagtgggatgttctttgggaatgtcagactgtgctaaactggatactggaagggaactgaatctggacagagggggtccattagctgaggcttgggcatctatggggacacagagataagagctacaacggctcctctctactattttgtgttttacgagcatgaaacgtggcttcaacatattggctcccttgaaagtaaagaaaaaacaccatgtccttggcctcacacctgctatcatgagtagcttctccaggtccttgataatataaatttggaagactgctccaattcctgggacatgggttagggagtttttcaagacattcagggcgtagagcccttcctcggtgcccaccaacaccacctgcaagggcagaagtccgaaggcagaacataagcacggtcacgtcaccagaacaatctctagtaagagcaacaaggcctccacagccctttctttcttgatggggtgtggctgtaaccagacaccagctggccgtgcccatgcaagcattacctggtcactgaagggcagcgtgcagttcatgtctagacggtcatcaccttccagtttcagcagggagtttccaagcagtttcttttcataggtgaaagaaaagaaaaacagaagacatcgtgaggctgatctgtttatgaccaaaccatccagagaaaccaagagaaggttaaggccaagttattcctggaaatgctcagaaacgcacatatgctcttagctcagcccgtattttgatctgagctccaaatgcaaaatgcgagtgctattggtatctctggggcagctgttaattagcatctgagttataatttggctgggatgcagaaataagggagggtagtagacatggaaagctattctgtaataagaaataagctgaagctaaggagatttcacctgcgcagggttaataagacacatgaaagactccttcccccataaggctgcagcagaagtgcaaaggcgccgtgttagcagcgagccagcacgcctctgcatctctttacctgaacccaggcaggcagaagctcgtaagaaacacagtcgcgggcctattgtacacatattaacaaggatttcagtaaaagctcacgtgtgaaacgaccaacaagtcatccaaacaggtctaaccactgagtaaagcccttttcaggaggcttgtggttaagaatctgccaattgctaacacataaagtgtttattaggagtgaagagtctgaaaagagctgtttggtcttcgctggagcaaacgtcaatgagcaatgagcactgtttgtatcctggaacattttaggtggggtgatgccaatcacagcacacctacgtttctaacagcttaaggataagtaggactccaaacctgcctacggaagagcaaatactgcaaaaacaactgagatgcttatgaaaagccttcctggaggggacacagctgccggcagcctattgtgctgcttcgtggccaaagtgcttctaactcaagccttcaaaccagacaaactcatttgagtaaacaggagagaggatttccttataagtacatttgctgctgcatcaccacaaccaaggtctacaatgccaccagagtaggctactgatgccgattcccccattctttttcctttgcttttacagtccatgcctcgctctgttgcccaggctggagtacagtggcacaatcgtagctcactgcagcctcaaactcctgggcaatccgccggcctcagcctccctactagctggaactacaggtgcatgtcaccacacctggctaactttctttctttctctttttttaagagatgggatcttgctatcttgcccagtctggtttcaaactcctgggctcaagtgatcctcctgccttggcctcctgggtcactgggaccacaggcatgagccaccgcatccctgattcccacattctaaatggatcatgatgccacacaagctaccttggtgcttgtgccttcatcaccaccagactcctggccatgacacagtctagagccatcagccctcagagagagagcctgaggggaatcaaaatggccaatgggattctcgtcgttaacaccagttaccaagtcagccccctttacaaagacaacctccagggcccgctttcatactcacagcatcagcttctgctttttccctagaaactctcccacctgcgacaactgattctaaggcggtgacccagcgctgtttgtcagggaagctgggagctagcaagtagagggttctcccgggccagcaggtggtgtgcgggtgagattccatcttcagtatgtatgggacatctaggagatttcagagagcacaggattgggtgtggatttcccccgttcccactgggagggacgggcctgagagatcaaagatgcccaccaaaccacgcaaatcccagttaccgccaaggcggggagcggaggaagatgggcctcctttgcagagccaatcttccctgtaccaccccttctgtccctgctgattggccaagcccggcccacctccagggcggggctcctccggctcctcctcacctgctttggctgtatttgcgagttcggaagcaccaacggcaccatgaatagatacatccccgtcgggaaggcacagctcaaattcttccaccggcctctgtccagcttggtgcaaagaggaagggcagaaagaaaaacaaaagaacaggaacaagaacaaggggagaagagagagcgagagagacagcaagggagagagagacagggtacgtgtgtaaagagaggcgcacgagaacaaggaagggacagaggtgtgcagagaaggcagagagggaagataaaaaaaaataaagtgtgtcagatgagtagcacagtcaaatttctgatgacgatgcggatttatgggttagttgactgaggcagaagttctcggaaggtgtattagcaggtggaatcttcagggcagcgccctgcgggttcttcaggggggagacctatagatgtgagtatcgcaccaataacctttagagaagtcatttggtttgtaagtttcaaaaatggaaaagcgtagaaggcttgcaaggcagtccaaaaaacaaagccttcgcgccagcactggggagacctgggttagccacgtgcaatgaccttccccctgaattattaatttaccttctctggcttcattgtcataaatgaggacttttgatccctccaggacaatgtacttcctgtcccagccttgctgtcctcgtttgttattcctggggaaagaaagatggaaaagaaaaatgtctgaactcagaagaaacatccggctggaggataggatgagggggtggcagagttcctagaaaagacacttccctagaaaacatcagggacagagtggcttgtgccagcacctgctccagcccaagccaccctgacatggtacctgggcaccttcatccacccttccaggtgcaagctgctgctgggctccttggtctggagacctggggagttcattttgtcacggcagaaggcctcggtgaagtgtgtggcatattcagcaggcaagccgcaggtggctggcaagcacgtggagcacttggggtgacacatcacctgacattctagggaagaacagtgagcaacctgagggcatgctcagctgaccctggacccttcccttcctctgccagccaacgcctgggcttctctaccccagccgggcccagagagtctggccctggcttgcaggtagtctcctgagcttcccctggtgccaggcccctgcagaaagggaaaacaaaagtgccaagtgctcttgacccagttttccaggcttcaatccagaccgcccacaaacaggtgtgtaaagaacacgtttgcatgtttcagttggagtcagcggaaaggtagggagagaccagcctgacaaaaaggggctggaaattagcaaagcctaaggcactctgagcagcaggctggagtcatgagctgcagacatatataaactcacagcttcaacaggggaaaaatagcatcctcctactgaagtaagaagctcgaaaatgaatgcactatatgatgagttagaaaaaaatcacctccacctgatagactttttaagctggagatgcacaggtgcccagcacagatgcacaactactgatcttaccgagacatttggatgcctggcgtccaaagtgcacggtatccagacacacagcacactttgtggctcgcatgttcagtcctacgttgaatcggtgaggaatattgtggtgcatgcgttccttaagacgccgactaaattctggaggaaaatgttttaaaaaatcattagagtactgcaaatgatcccatcaggaaagtgaaaagacaacccacagaaagggaaaaaatacttgcaaatcaaatctctgataagggactcatatctagaatacataaagaactcttacaactcaataataaaaggacaacccaattttaaaatgggccaagaatttaaatagacacctccccgaagaggataaatggccaacgagcaaatgaaaagatgctcaacattatcagtcgttagagagatgtgaatcaaaaccccaagcagacaccacttcacaaccactaggatgtctacagtctaaaaaaaggaagataagtgttgatgaggatgtggagaaactggaaccctcacacattcctggtgagaatgtaaaaatggtgcagccactttggaactcagtctggtagttctgtaaaaggttaaacatagttaccccagaacccagcaattccgctcctggctatatatccaaggggactgaaaacatatgtacccacaaaaatctgtacataaatgttcacagcagcataatttatgacaactacaaagtgaaaacaacacaaatgtccaccaatggtgatatggtttggctgtgtccccacccaaatctcatcttgaattgcagctgccataattcccatgtgttgggagggacttggtgggagataactgaatcatgcgggtggtttcccccatactgttcttgtggtagtgaataagatctgatagttttataaggggaaacccctctcgcttggttcttattctcttttgtcaccgccacatgagacatgccttttgccttccaccatgattgtgaggcctccccagccacatggaactgtgagtctattacacctctttttctttataaattacccagtcttgggcatgtctttatcagcagtgtgaaaatggactaatgaaaatggattaatggataatcagatgtgccatctacacaatggagtattattcagccatgaaaggaatgaagttctgatacatgctacaacatgggtgaaccttgaaaacattacattccatgaaagaagccagacacaaaggccgcatgcagtatgattcatctttatgaaatgtctaagagagcagatcgacagagacagaaagtagattggtggttgctaagaagaacattagtggaaggagaatggcgggggactgataatgtgtatggagtattttttgggtgggggggtgtcaaaattgttcaaaaattagaatgtgatgagggttacacaaccctgtaaacttactgaaaaagactgaattgtacatttttaatgagcgaactgtacggtatgcaaattacatctgaatgaaactgttaaaaccattagaacaggttagttacagattttgaaagtattaacactaacagatgcatctagatttataagactcaacttaaaatctccattatccagtgattaggaatcaggctttaagaacatgttactggtaggagattgactgactatacggtaggctctccttacaacatcaccccccttcctttcttggaaaggtgcaaggaataaataacaggaatgcactttgaaactgtgtggtgcagtatacacaaaggagcaatatactgtagtactatcactattcagggacatttcagtggacaccacagccagaagcaatgctttcctctatcttgtcatcaccattttaatgagtttaaaagtaaagctcttgggctgggcacagtggctcaaacctgtaatgccagcactctgggaggccaaggcaagtggatcgcttgaggtcaggagttcaagaccagcctggccaacatggtgaaaccctatctctactaaaaataaaaatattagccaggcatggtggcgcatgcctataatcccagctactcaggaagctgaggcatgagaatcgcttgagcctgggaggcagaggttgcagtgagccaagatcacaccactgctctccaagcctgggcgacagagcgagactctgtctcaaaaaaaaaaaaaaaaaaaaaaaaaaaaaaaaaaaagtaaagctctttgattcaaggagttatataaacacaggaggaagaaaatgacttcaggctaaagaaaaacaacagcaacaagaaaacaccatctggtttacaaccaaaacaggtttgattgcaatgccatgattgctaaaccacagctctaccctagtgttcctaagacattccaaacagcttccttggccttttcttaagtccttttaatctctaggtaaatggagtacatttgagaccagcaagaaaactcctcacactgttggtagaaataaacattggcacaaactaccagcactcaaaatgtacatgacctttaacccagtgattcatttcccaggaatttctccaggcacaacacccacagaggcacaggatgtcctctgcaaggtgtttacagtaacaggggattggaaacaacctaaatggccatcaacaggagcctggcttaacaggtgaattgcatgctcacaccacggaatactgtgtggttctctgaaagaatggggtaggtccttatgtactaatgtgaaacctctaagatagcactttaatgaaacgaaggtgtcttgcagtgtatactgtagtgtgctatgatatttataagagaaaaaaggcctgaaagataagcttacgttttcttgtttttgtttttgagacagagtttcagtcttgttgcccagactggaatgcaatggctttatcttggctcactgcaacctctgcctcccaggttcaaacagttctcctgcctcagcctcccaggtaactgggattacaggcatgcaccaccacacccggctaattttgtatttttagtagagacagggtttctccatgttggtcaggctagtctcgaactcccaacctcaggtgatccgcccacctcagcctcccaaagtgctgggattacaggcgtgagccaccactataatatttataaaagaaaaaaggcctgagagagagatgtgcttattttttcatattcttttttcttttcttttctttttttttttttttttttgagatggaatctcactttatcacccaggctggagtgcagtggggtgatctcggctcactgcaacctccacctcctgggttcaaatgattctactgccttagcctcccaagtagctgggacttcaggagaatgctaccacacccagctaatttttgtatttttagtagaaacgaggtttcaccatgttggccaggctggtctcaaactcctgacctcaggtgatccgcctgcctcagcatcccaaagtgctgggattactggcgtgagccaccatgcccagcctattttctcatattctttaaatataatcacacaatgtaagatacatgaatggtatagacatgtggtcacatatatgaaccaacactgaggatggggagccaggagactgacttctttcttttttttttttttttttttgagatggagtttccctcttgttgcccaggctggagtgcaatggcgcaatctcggctaccgcaacctccgcctcccggattcaagcaattctcctgcctcagcctcccgagtagctaggattacaggcatacactaccatgcccagctaattttgcatttttagtagagacggggtttctccatgttggtcaggctggtcttgagctcccaacttcaggtgatccgcccacctcggcctcccaaagtgctggggttacaggtgtgagccaccgtgcctggccaagactgactttttaatctttaacccctagtattacttgtaatttttaccatatgcccacatgtcttagtcgactaaaagaaatttccatacaactccaacgtaccctctggagttgaagactcctttctgcggctggatggcggggccagcaggctcatggcactgggctggtgctctggcgaccgcacgatggcggacatggcgatctgctgcctcgcggtggctggcgtggatgggtgtgggtggtccgttgctttgcggtgggcagctgcagagagaccaggacaatgccttttggttagctgggtcgcctagaggaccaaactaagccgaatgtccctgggctatctttcaaggacccaagaccaaaagaatatgcgtcacatcaacttggcaatgcacaggggccatacgtttttcagacatgggatgtctggtctgaaagcgtatgggccataaacgaagacactgagctagttagtcttggctgatctcactgagatcaatcctctgccttttccacatccttgagcattttggagagagtgagcccctaccttcctcccgggcggaccggagctcgatgcgggtcttctgaagggcttcctctagctctgcacagcgagctttctccttctccagggccagcttcagctcattgtactgcagaggaacctgtgtgggtaaagcagggtcctctttccgtcgactaaataaaccctagcaatggaaacagagatatctcctaactcctggaaactggcacttgaaactagctaaaggaaatctgactcgggaggagcaaaccacaaaagccaggagcatactcactgtaagtgtatttagtaaaaatggcatgtgaagggggggaagggtaggctgagccacagcccgttccagccggctgaaaaaaataggggtgcggaagttttcaccaagaggattaaagatgcttgaatggccaccacctcttcctctagcattgccaagacaggagagtcatgtcctgagtctttcccattcaaaaaatggaatcaggagagtatggagtatggagtcaggagagatggttcagaggtcactcttgccttggaatatgtctcatgatgctcagttacaagacacagagatgagtgttttgtaaaaggaagcaaaattttaaaaggaatgctaaaatgaggtcaaaacaaggggcttactcaaaaaaaaatgcaaatgaaaatatttactatacatggaaaaaaaaggaaaacagaataatgcaacttaaaaaaaaggtaactaaaaaaaataacaaatggaaacaccctaactaaatcaagtgacataaccaggtaacagttcactgctaaaataaaaaagattaaatatcataagcataacaaccatatacagtcacgcagcatgcaagaaaatccttcccgtgcagccaacgtctagtgggaggcggcctctgaatgttgtgctcatgcccttacagcgaagatggcaccggaaatattgagacaactgtcaacttcagccctccactccttcctcctaggtattccaagtcatcaaggcctctcctgcaaaaccactgccactgctgctatggtatgcttctgcatttggaaggaaactgcaagcttcttcaagacttttctggaactgagaacacctggccaaacctagtatgaaggctttagtggtttgggaaagcatgtatagatcaggcttatgaaaaacaatcttctcatgtgcactatgtataaccctgcccctagtttgtaatttgtctcctgcaatctaaaagggttgttcagtacttggcagaggggagaagtgtccagtcagacacttcaggcaggtcaccccagctccctgagttctagtctctttgtgagccgatcaaaaggactggactagatcactgttaaagtcctttctggagtgtggtacgagagacctgaactgctgaagccccatacttgtgacttgctaactccctctagagtcatgtatgcatgacttggtataaatctttctctctgcatacatccctctgccccaactgctatgtgtgtgggctggggagggattacttctttaacaaagatactatgatttgaatggtcataaacaaaaagtagtttgttagacttgatcactgatatctttcagtaagacctattataattatctcaaaatctatttttcaacccaaaataaaacaacaaaaaaagtatactttgttttcttctatgttcctatgatcatatatcacagtggtgtccactgagccatgaatgatgagtgaaactgacaattcccacttttcaaacactttgactcacctttttctttttagcaggttggtccattttggcttgcagaaaatcaatgagtttggtttgttgagaaatagtgccttccattttcaccttttcatgagaatagagaacctaaaattcaagaaaacaaactaacctcaaatccagacagaagtatacttttaaagttggtactttaagaaactaaaaagtgaagttgttaggacactaatatatgaaaatccaacacaaacagtactgagtcagtatgtatttagtccagttttactgcaaaagagaaaaaagatatatttatagataaatatgtgaaaaagtaaaaatagcaacaggttccttgtaggtcatggtcactatagaaatcttccaacttctctgaatgtttgcaatctttgaaaataaaatcttggggaaaatacacacaatatgcagcacaaagatactgaccattttaccagatgactgtacaatcatgctttgcctctgcagacttatttatttatttattttcttgagacaaagtcttgctctgttgcccgggctggagtgcagtggtgtgatctcagcccactgcaacctccacctcccgggttcaagccattctccttcctcagtctcccgagtagctgggactacaggcacccgccaccacgccaggctaatttttgtatttttagtagagatggggtttcaccatgttggccaggctggtctcgaactcctgacctcaagtaatctgccctcctcagcctcccgaagtgctgggattacaggcatgagccactgcgcccagccgtgcagaccatttttaagcagattccctctgccagtcctcacctgaatgttttccagctgatactccaagtcacttctttctgtcttcagtagatcagcccgatctagagcttcttgcagtccttgagtcagacggaaaatgtgatttttctgcaggtccatctgctgctgtaatttggcttgctagtggggagaagggccagggaaatgcttgatactgcacacaatacaatttgttcccctgctgttcctatttcaaactaatttcaggcatggcaccagaagtacagcttttgaaatcatctcaattcagaattaccaattgtcatctattccaaaaggatgcaagcacagttaaaatgaatttgcacagaaacctctgctggccaacaagtccgaggatccctaccgtcacaggaagtccaggctgcagggatggccttcccagacagagttccaattgaggatattttggtacattaaggtgaggatattttggatggcatgagccatctgagttgacatctaaggcagttcgactcagtgccatgacaactaagttccaatgtctttattttctgttttcaagatcttaattgttgctatgagaaattactccatgcaggcagtgtgggatacacaaagagaaatcatatcatcccttacttaataaaggtcccattagggtaagagaccccaacaagtacatgaataaccacaatcatgagacatatttctacaacgttgggggaaaagaagaagatcccagttatagtacagagtgttggtaaaacccagaaaagaaattcaattaagtatattgaaaatagttttgtgctgcaaatctcgctccaatttttataatggaagttaaccagaaaataggacaggctataaagacgctggttttgtggttctttttcctaaaatgcatccgtttctaaaaaagcaggagagagcaggcatcctgatgagacagtgcttgattttatccaaaccctggattatagcttaactacacttagtgtggcccaaataatctcttccctggtagcctgggtcctctgcagacttagggacagagagctactcaaagcaataaacatcatcactggagattccaaaaggcctatggcagcccccaaactcctccatcccagcaggcccagagccactgataatctcagcatttcctggccctctctgtctctttgcttctctctacctctgtttttctttccatttatattcctcacctgcccttcctcttaacatgtagctgattccctaaggcatcgtgttgcagtagaaagacctggatgctggattcttacagaccctggtttaaatcctgacttttacacttatcatatcactgatacctgttaaaatctgtatttatcacctctcagagcctcagtttcttcatctgaaagtgggtatactagcttgcctcattggatgacatattgaacaaagtgcccagtatacagtaggtgcttattgaatgtttatcctctccatctcctttgtccttctttcttccctccattcagttaaggtgctccctctcatcctcccgtctgcctttccctaacagtactgccacaaaggaagagctaccaactaaagatcacctggggccaggcacagtggctcacacctgaaatcccaggactctgggaggctgaggtgggaggatcgcttgagcccatgagttcgaagtggcaatgagctatgattatgccactgcattccagcctgggcgacagagcaagaccctgtctctaaaaaaataaaaacgaaaatttaaaaaaaaaatcatttggcccgtgtgcgtaatctggaatttctcaatcaaaccacagagccccctaaaatacaggaaaaaaggaaagaaacagctaagataccctcctccgcagcatgagtgatttcttctgcaaattaccctctttagtttcttcccactattttaggacaacattaattactaggcagaaaccagagaaacaagtgctggggacgagaatctgtttggtgacagccgagcccaaaatatttttctagaataaacgcatcaactgtccattagctttccaagaaataggctggttattccctatacattaaaaaaaaaaaaaaaaaaaagtaagcggggcatttgtactctatgaaatgtttttcagaagcatttacctgcttcccagaaagaagcaaacagaggtatattcatgggccagtgttaggctgaaagggggatcttagctgtgtgtttagacctgtccaacaatttcacgaggaaactgtaaggaaaaagacaggaaactgggaggaaaaagaaagggcctggatgatagaacaagagcatgaaacaacccccgtgggctggaagaatggatcaagaccaacaagaaaaacttcagtagggcggtattttttaaattgtcaatggaataaatctagaacataaagatgtttttaagaaaaagcaaacttgtggaagggcaggtagtgatttaacagaccagtggtgtcaatgatgtgatcaaaactacccaaagagcacaggtaattggcagaggtttagagcccagtatggagacggaaagatcccaatgtattcagtgctattcagaccacatggacttgtagaaactctctgtggaaagacaaatctaccagaaaagaacatccaaagcttgaggggatctaaaatgtttcacttaaaaaagagaaggtggccgggtgcagtggctcactcttataatcctagcactttgggaggccaaggcaggaggatcgcttgagcccaggagtttgagggcaacatagggagacgccgtctctacaaaaatacttgaaaaaataaaagagaaggcaatttggagtgggagagctatttggatatctagttgactgtcacagagataataaaactagttatctcccaggaacattgcaaggactgtaagagttaattcatgtactcagagagtcagtcacatggtaagtgctaattaaacattagttattttaattattaatcaagtaatctattaatcagtattaatctcccattttggttggagatatcagactactttctaatttcatgtgttttaatgtaatagaaccaataggtaaaagtggaaggtttttagttcaaaataagaatgttctaagaatgagagttgctgaaaaatgggttgggatgtccaaagtcattgtaagtatttaggccaaggttcaacggggcctacctatgaggagcgttggggaagggatcttctaccttggatgagagatgaatttgaccaggactagcaaatggactttgatcactgatattacttccaatgaacagatagtggctataaagtgtcatgttggccaggtgcagtggctcacgcctggaatcccagcactttgggaggccaaggtgggtggatcacgaggtcaagagatcgagaccatcctggccaacgtggtgaaaccctgtctctactaaaaatacaaaaaattagccgggcgtgatagcaggcacctgtagtcccagctactcgggaggctgaggcagaatggcgtgaacccgggaggcagagcttgcagtgagccgagatcactgcactccagtctgggcgacagagcgagactccatctcaaaaaaaaaaaaaaaaaaaaaaaaaaagtgtcatgttgagaaagcttctgaagccattttgggcccaggaggaaaaatgtgaaagatccattagtaaagtttgtcaggagcaaggataaagggaatagtgctggaaattcagactggatgatataaaaattctttcaattctgagactttgattctggctccatttaaaagtctccttataggccaggcatggtagctcatgctataatcctagcacattgggaggctgaggtgggcggatcatttgaggccaggagttggagacaagctgggccaacatcgtgaaaccttgtctctactaaaaatacaaaaaaatttagccgggagtgctggtgtatacctgtaatctcagctactcgggaggctgaggcaggagaattgcttgaccctcggaggtggaggttgcagtgagccaagatcacgccactgcactccagcctgggcgagagagcaagactctgtctcaaaaaataaaaataaaaataaaaaataaaagtctccgcacctacgaagaggatacttaggtggaagccttgggcacatatgcttatacagcacacaccaaccaggaggcccaatcacaatgtggacaataaagagcattctttgttccagaatggtttcaactgtcactgaaatctgcctccggctcaatgtcagccagaagtctgtgctcaaaaatctttctgtgaggaacatcctgggaaactggaaatgttctcatgtaggttagaagtgagaaggagggaactgaattgggatcccggcactctattcctagagtcgtcactgactcaccacataaccttggaccaaagtactgggctgtcagggccaactcgccctctcagaaggaaaataggacaggcaagagcattgattatttctgttctttctgtttgcaggatgtgcctaagtgggaacactgtctattcactgcagataaaagaccctaattctctatttgaccacgaggtacatttaacatttccactgtagtgttgttcttaaggccacggggtgaattcctatgtgtgttcaccaaatatacgtgtgtgtgtgtgtgtgtgtgtgtttagtattaattttattttttaaattgtttacagaggcaaaatacacgacataaaatttaccattttaaccattttttaagtgtatagttcagtggcattaagtacactcatgttattgtgtaaccaccaccaccatccatttctagaactttctcaaactcccacccatatttttcattttaatttttaatttttattttgagacaggctctcactctgtcacccaggctacagtgcagtggtaccatcagagctcaatgcagcctcaaacacctgcgctcaagtgatcctcccacctcagcctcctgagtagctgggactagaactgcacaccaccacacttggctaatttttttttttttttttttttttttttgtagagatggggtctcactatgttgcctatactggtctcaaactcttggcctcaagcaatcctcacgcctcagccacccatattttttaaagtatcattcaataaaatattttatactcacccgcaaaaatgtcactatacttttcaaacttaacagcataacaatattatttctatcagcaaagtgcctcaggagctatgggtatcacgtgacaaaacctcatcagccagaacagggcattctggttaattaaactgtcaggctcactaagggttaaacagaatactctttggagtccaatttttcattataaagtgcatttgtccttgcaggtcaatcctaaagaacaaagcggaatcatcagtgattcaacacacagggctctggttggggagtgggaggtagtcatcaatttaaatagccgttctcagagttctgtgaaaaggtaccagccatcacgtaagggatgggtttagaagatcagtctgagcttgtctattatgcttcaaaagcagggcacacattatttttaactaaattacccaatgttcaaaaaccttcatgaaatttggtactcagaataatctgataaaattctgccctgtgcaggaagctaatttgcatggatgtcctatcggcatgaaacttaatatactttggatattagctctaaagaacaatttaactcaatattcattcacccatgtatttaataaacttctatttggcacacacttactatgtgcttgacactccattaagcatcacatagaaggataaaaatgacagagaccctctggccttcatgacatagtcttttaatgtgttaaataccttaagacaagtattacatgacccccatactcttacttgaaaattctaatttcaaaatatctaatttggatctgacaaattgtcaatttcaaaattccacctagaacggaaagctaactactgcacattctcacttacaagtgggagctaagctatgagtatgaaggcatacaagtggtataatagacactgtggattcagaagggggaaggcgaggaggggagtgagggatgaaaaattacctatcgggtacgatatacactatttgcgtgacaggtacacgaaaagcccagacttcaccaccacacaattcacccatgtcaccaaaaaaacacttgtacccctaaagctattgaaataaaaaaatcttttaaagaaatttgtttacaagtccaggcagggcacggggactcatgcctgtaaccccaacactttgggaggccaagacaggtagatcacttgagcccaagggtttgaaaccagccagcctgagcaacatggggaaaccccatctctacaaaacaatacaaaaattagtcgagcatggaggcatatacctgtagtcccagctacttaggaggctgaggtgggaggatgacctgaacccaggaagtcaaggctgcagtgagtagtgattgctccactgcattctagcctgggcaacagagcaagaccaaaaaaaaaaaaagactccagagagaaatgagctaccagctatgaaaagacatggaggaaacctggatgcatatgactaagtgaaagcagctgatctgaaaggctacatcctgtgtgattccagatatgcaacattctggaaaagggaaaactatggagacagcaaaaagatcagtggctgccaggagttgagggtggggagggatgaacaggcagagtacagagggtttttagggcagtgaaactatcctgtatgatacagtaaaggtggataactgtcattacacatttgtcaaaacccatagaacatacaacaccaatagcaaacctaatttaaactatgcatttggggtgatgacgatgtgtcagtgcaggcccattgattgtaacaaatggacactctggtacagggtgttgatagctggggacactgtgggaggaggagacagggagtatgtgggaactctctgtgctttctgctcaattttgctgtgaacctaaagctgctccaaaaaaaagaagcctattaaaagaaaaaaaaaatccacttggcccttctcccaggtatttcacactcacctcttccagaagcctctgtttgagctctcgttcagtctccagcttctgctgtaagcttcgggcattcatttcaagcatagcatgcttcttctccaggtcattgagctagacatttggaaagattggcataatgccacacttaggaatgttagatgctgacaacgtttatgaatgtccacgaaccttcacggagaaagaatattgagttctaaaggtcagaacgtaaaggttgcttttttctaaatacagaagtccctgtcactggtgagtcttccataggttattatatgaggatggaaattatttctaagggatggctcttaaatatggctgtgacaagttctaggaggataactgctcaaggacttatttatctgacatgctttggctgaatttaattaaataatcatacgctgaatgcttactacctgcattatagcttttaggatgaaaggataaccaagctctcaaggatcttacgtcaagtcagaaaggcccataactagacatgtatgcaaataatgactgctctgtcagcttataagtttgataagaaaggcttgggaaagaaattcaacccaattaggagaagatcaagacaataaggtattgcaaagtctggagctttaaaagatatgaaggactttgctgcttaacattttaagaacagtcaactagaaaaaaatatttttcacattaaacataaaaggcctcacatagctctaataaatctagtttcctcatgcttaaaaaaaatggtaacccagtttcagggaactcaggagcattcctgactagagagctctggccttaaacctaataattctgcttctattaatataagtatccggtaagaaaataatcatggatgtccataaagattcatgtttatcatattgttatttatatggtaaaatactggaagttcaaatttccaatacaagtataatgattcaagtaggtacttccatgcaatttattttttttagaatcacatattcaaaaaatattcaactcagaaaaaacctgaagttaaatgatttttaataaaaacaggtaaagctgtatatataatgaaaatctaatttataaaaatacatacgtatgtctatgtatatgtgtgtatgcataaacataagcacagagactgcaaataaatacaccaataaaacaacagcgatgggtgaccagccattatttcttttacttttctgtggtttctatattttccacaatgacccaaataattatttttctatcatgaaataacaaagttatagaaaatataaaatcagatcgttattttattttgtgtgtgtatgtgcatgaaaaagagtgtctatgtatgcatctgtgtgttcatacataaaagtcctctgatcttcactttggtgatctgtaacgctgaagcgcctattctgtatctctctcaagattattagctaaaatctccaaaacattgtttatgactataaatgtaatatggagaggcacatggatggaacacgtgtatttccgatgtgaaatactgagaaccagcatgcgtcatcagaccctatcacgaccctgaacttggaacacggagaagctgagctgcctattactgcagcaattggatgagcattagtcactgccaccaagaacttcccaaagatgcacagcattcaatccataaagccttctggaaataagatgccagacaaccagagagtagaacacccagatcaaaattcgaacttcaagggcctagacacacagattttaaaaagtcactggccgactgtgatcactgggtacccaccgcacccacccacgctactgccaaccaaaaatgtcccatggtaaggcaaaaccatgggacatttttggagtgcatgaacatatgtttatgaaatatgtttgccatggattgcatttgaatttttatcaagcgtgcctttaaaagaaggaaacgaaaatgttttcctaaaaagcagaaggggtgggcgctgaccttgtcagagaggctctcggccttcagcttctgctctttgagagcctgctgcagagcgagaatctcagccttgtgctccttcactgccagctccaccacctggcgagactcggtgatccgctgatcggctctcgccctgccagaaagacacaggtcagcttttggtagccccccaacagctgacctgcggaaagaaggctggtccgtctctaatcctgacgagcaactaaacaggctgcaggccagaaagatgcccaaccttgactcttagttccaaactgtcttcctttccaacagcttacaaagcaaagatttgacccatgttaggcttgggtaaggaaaaacaaaacaggccaggcacggtggctcatgcctgtaatcccagcagtttgggaggccaaggtgggtggattacctgaggtcaggagttcaagaccagcctggccaacgtggtgaaatcccatctttactaaaaatacaaaattagctgggtgtggtggcgtgcgcccctaaacccagctactcgggaggctgaggcaggagaatcacttgaacccaggaggtggaagttgcagtgagccgagatcacaccaccgcactccagcctgggtgatagagcaagactcggtctcaaaacaaaacaaaaacaaaaacaaagttaaatgtttttgggtactcatcaagaaactgaaacttgaggctgggtgcagtggctcacgcctgtaatcccaacacttcgggaggctgaggtgggcagatcacctgaggtcaagagttcgagaccagcctggccaacatggtgaaaccccgtctctacaaaagatacaaaaaattagccaggcatagtggcgcatgcctgtaatcctagctactcaggaggctgaggcaggagaattgcttgaactcgggaggcagagttgcagtgagccgagatggcaccactgcactccagcctgggcaacaaagcaagactccattctcaaaaaaaaaaaaaaaaagaaaaaacaaaagtgaaacttgaatctgatgagtgtctccataaataatgctaaagaatagaaaaaccagaagcaaaataggaaaaaaaaatcacttccctttccccatttaggtatcatgcttcctacttccacactttggcttatacaatctcctccactggccattccctcctttgctactctgcaaactcaaatcttactcagccttcaaggataaattcaaatgctatgatctccataaaactattcccactttctcttctcaggagcaacctcaccttgttctgtaacaaaagcataactgtatttctctcctaaatatatatatatatatatatatatatacttttttttttttgagatggagtcccactctgtcgcccaggctggagttcagtggcgtgatctcagttcactgcaacctccacctccaagattcaagcgattctcctgcctcagcctcccaagtagcttggactacaggcacgtgccaccaaacccggctaatttttgtattttttgtaaagacaggatttcgccatgttggccaggctggtctcaaactcctgacctcaagtgatccacccacttcggcctccccatctctcctaaatatctgaatccatatctcctccagtagactcttaggctcttgaggacaaagattaacaattatattttactcatctcagtatcccatataataccaaaacagaaaaaagaaaaaaaaggaaaagaaaggcacgatcttccacaattgccctgaaagcagacatgaaatgaaagcagactaatgctagtcttcctgagaacagttcataattataccttccatgtatggtcgtgtatttcttgatgctgaagccagatcctaccccaaaaatgatctctgtaggtccctaaaaacagctaggataggagctggacttgagggtgggagggaaggggtctgtgggaaaacaaccagaacttacaatgaggatgggggagtctaaggattcagaaggaagctggaataggagacttaaacagcagtccctcacatcaacaaataccctgagtggggaagctgggaggatctacaaaaaggaactatttctaccatttcttttgaaatgtaagggttttcatcttttacctccaaacttttggagctcaactgaactttgcgtaatccatctgacatatttagttaagcctactatggccaagcaaaagtgagagatagatacccaagtgagtgtaatacagactaattcattgatcgatatttctatggatagctaatcttgcttaaggagttcagagaatcacaggaaggtaagtttcagaggaaggtgacatgagcaagttgatgaaaaatggatccgattcagctgtgcagacaggaagtcacggggcacacactagcccatatcatgcctttgtacaaactggaaagcggcacccgtccttctagaccatttctttccatctgtgaaatgtcacaacgtaccaattttgtcagaaagaaaacacttttctgccatgagctgtgtaaaactgtcataacaactcttccagtctatgacatctttaatgtgaccagcaacccttagaactatggagtatgcaattgtgccactgtggccccacaggaagggaaatctatactggggaactgtggaaacaaaagtgagaaagcagaggaacgatactgcctgaactgattattatcatttcctactaagaaaggagaaaaaaaaaaaaaccagccaggtgtggtggctcacgcttgtaatcccagcactctgggagaccaaggcaggtggatcacttgaggtcaggagtttgagaccagcctggccaacacggtgaaaccccgtctctacaaaaatacaaaaaaaaaattagccgggcatagtggtgcacacctgtattcccagctacttgggaggctgaagaaggagaattcctcccaccctggaggtggaggttgcagtgaactgcgatggtgccactgcactccagcctgggtgacagagactctgtcacaaaaaaaaaaaaaacaaaaaaaacccactaaactattcttgtacagcagtggttctcaactggggacaatggagacacaggggatattgggggcaatgtctagagacatatttgttgtcacaacgtgggaagggggttgttggtggcatctagtgagtagagactagggatgctgtcccgtcctacaatgcacaggacagcccccataacaaagaatgacccagcctgacatgtcaatagtgccaaggttgaggaaccctggggtggagggaagaccaggattaaaatggtaatggttttgctatggccttgctatggtcactctgacaagaaacctcatgagagttttctgcacagaaaacagaggtatttgccctgatgcccaggcctctgcatggggaaaacagataccagtcatagccacagaatccaactcacactatctacgtttacaactagggtgaccaccctatcctggtttgcccaagagtctcctggtttttagcaccaggaggcttgtgacccaggaaacttctcagtctcggcgggaatagctgatcaccctgtccacaactctcaggccgatcctcctgcggtcacctgtcatgagctttccacaaacacaaagccccacctgctctgtttctcggtgtccagcattctctgcagctctcgaacccgacactcaaactgggatttctcatcacccaggacgctcctccaggcctcccactgccgctctttttctagcagctcatcgtttagggcctccaaatccatgacctgttcctccagcatggtgcacgtggtcttcagagcctccatcgtctgcaaatcagtagcactgatttgtgccttgtctttaaacaaggatttcctggagattactttggtcgggtcagtttcagaaaagcacaagtttctaactacagtttgaaatgcggtttgtcttttgcttctgcagcccaaggggaccaggcaagaatggatgaagggccagttctgcagccaccttagaggcaggatccaaagcaaagccaggggaagtgaccaagcttaaaatcaagccatttacattgatcccccaaagcatttgattttgtttttatctatctttattttttcgagacagggtccagctctgtcacccaggctggagtacagtggcatgatcacagttcactgcagcctcgacctcctgggttcaagcgttcctcccgcctcagcatcctgaaaagctggaactactggcatgcaccaccaagcccagctaatttttatcttttttatttttattttttttaagagatggggtctcactatattgcccagactgatcctgaactcctgggctcaagtgatccttctgcctcggcctcccaaagtactgggatgacagggaagagctgccacactggccctattttttaaaatcaaaattaataagaactacacacttttaaaatacatttttaaaaccctaaaggcttggaaaaaagacatgattttaaaaagagcccaattactgtatgaggttcagtgttggaacccttgggagaacgcaccaagcactcctaaaatccttctaaaagtcctccagggatctcacgaccttgttaaccctccttacttgcttctggctggtaagctgcatctctcgttccgtgatctcccggcggagatggtccacttcacttcgcagttgtacaatctcgtcgttggcgccagaagcctcatcgagttgtttggacaagtagaagttttggttgttgagttcagcgttgtcctcggtcagctggtttagctgctcctccaggtctgtgattacctaaaagaggaaaggaatccagttacacgccaagcacattcatttcaaataagaaattgcttctagggctatggatttctgaacccacgtgacactggcaatcaacgtgccgctcatgagtttgcccacctgaccgtgagagccatgtccaagctcctatgcccagccacttaactctaaacacgagcagtggaagaaaaagactcagtttctctctaactcaggacacatctaaaaaatatggcaaaagcaatcaaaagtaatcactgcatgaaacggatgacttcgaatgagatcaaattgacggaaataatataatgtggaaagaaaatgcaaattaagaatagactggtatcaccatccactaattaagctaaaaatgcccatgacactatcactaggaccttattattggagatggccatagtcttagaaagcaaaatgaagttcttatcaaggaagactgacagggaaagacgccaggagttatttcgataatatcacaagcaataaatttaatttcatacaacaaaggaaaaaaacttcagggaaactcagaaaaaccctgaaaatacaatacactgtactatggcatgactttaatggattttactatacagttggctatcagacaatgggaagccatgtatatgaaattgttattttattgagagagatttaatcggggtttgctaaattactctcctgctcagtagcagaatgacttcaatttcagaacatttagctttcctattctctttgctgagatttagtattatggcttgcagagagcttttatgtataataccttggaagtttaagggcaattttctaataatagttggactgaggcacacaggcagtaaattaaattttacgtaacaaaaagaaggaaattaaaaggaaatgccgttaagcctacagttattaattgtttccaattttcaaacctagagtcgatttcgtttatgaaatgttgccattgctttcatgactaattccctattttaaccctctttgattatcaatttaaaaaaaaatcttcccaggcacatgaaattaaagaacatcaattaagtacacttgtccacaaatgtactcagaggagatacaacttttcattttgttaactgagctgataaccttttagtgtatggtctaatggtctagtaatttgctttttaatgtcaaaagccacattaattcctatgtacgattttgaagtacactgtcagctacaagagggggaataaaagttatctggtcaggttcttagctcagatacattctttatcaaggaagacaaataaggaaaatctgtacgtttgccattcctaacagacacttatgacttgcagggtccctgcctttccctttctgtggcatgttaaatctcctaaaaccagaaacaatgaataaacaatgcccagtagttcaactggtctccttcctgtacgtagtaaacccattccttaagatgtttttcataatgtctccatttaactactaattcctccccctacctctttcccaaagaaaaataagacaggcaagctggcttggaagatataaaatggattctggaacccccaataagccatctgacctttgctgggttggtttcttcatctgtgacatgggagtgaacactatatttactcatctgcttttacctttttaattattttaattttcttgcatgttatttgaccttaatgcatcatgtaaacatgaggtcaggagatcaagaccatcccggctaacacggtgaaaccccgtctctactaaaaatacaaaaaattaaccaggcgtggtggcgggcacctgtagtcccagctactcgggaggctgaggcaggagaatggcatgaacccgggaggcggagcttgcagtgagccacaattgcgccactgcactccagcctgggtgacagagcaagattccatctcaaaaaaaaaaaaaaaaaaaaaaaaaaaaaaaaaaaagcctcttggggaataaatagactagactatagaaagtctactcacatgaaaatacatcattgccaaaataatttacttgccattcaaggatgtacttaagactttgggtacctgctttctttgattcacgaaaaaaatgcaatttatcatttgtgatggtagcccatttctgccacctcttcgttttctcccaaagttatattataaaatgctaaagaagaaacacttgaaaaagggcaattttgtatcactcaattgagatgggcccattggaataagaagggtctttctatttccctgttgtcatccagttttcaagggttctcacgcctctaattatatttccggtttgtgattgctggttctatatttggtcatcatctctattttgcccatttgacaagagaagtgttacatgtttttgtaaagtacccatgccgagattgaaggcattttaattgatttggactttttatacacatattctatctacccaagccataacacatttagcttgtgaccttgtttcaagttgctggagtcatgatattaaacgttggacacacccacacacacacacatacgttactgagtttacagatattaaactgacttatgacataggcagtaaattaatggtcttcgtggattttttaaaaaaggcataacaacaggcaatgttcactactgtcctttgaagtaggtattattttatttctattttatagatggggaaattggggaaacagagatgctaggtaacttgcccaaggtcactgctagtaaataacaaagccagaatttgaacccaacactaaaactcaagaatctacattcttgccccctgaaccatactgcctgtctaaaatagggatagaagtgtttattcacttttttattcagatctttgaaaactgaaatgatggaggtaagatatattgaccattcaggacaacccctcttgattttgatccagggaatgtgcaaggaaaattgttaggtctactttctggtcctgggtatattctctacccaccaaggacaaatgatttgtttactatgagtctgttaaccttttaaccccaaagatagagagtaaaaaagagaaactgaaaggctgattccatcttagcagcaaaaaaagatgagcaaaatatcttcacaacgcaggcgccagcagagctttcttatatgctgtttttacagatgagaggtcttggtacagttctaagacagaagatattaaaaaaaaagatctaagctggacgtggtggctcacacctgtaatcccagcactttgggaggctgaggcgggtggatcacctgatgttgagagttcaagaccagcctgaccaacatggagaaatcccgtctctactaaaaatacaaaattagctgggcatggtggcacatgcctataatcccagctacccaggaggctgaggcaggagaatcacttgaacctgggaggcggaggttgtggtgagccaagatcacgccattgcaccccagcctgggcaataagagagaaactcaatctccagaaaaaaaaaaaaaaaagatctactctcagtgtcaaaaagaaaaaaaaacagctctgtttgggcttatctgttgtttttcagtgctatcatggttctgagaagaagatgtgaacctctcacacctaactggaagaccaggagaggaaaattaccaggtaaaagtccaatggcatgttaggggtgaagaaaccagtcagataatgagcatcaggctaaacagacacaggactgaaatcctattttaatgcctggttctcttctgaaggcagctatttgcatattatttatttttaatcttatagctgacagattgattcataattaaaactgtgtcatatgtttgcccaccaactcccctctaaaacagacttaggtagggttttaggtgccagattgaatcaaatcctttttaaatgtcttcaaaatatagaaatggtctgagcttgaaaatcttactgtgcatgagctttttgaaagctgaagagagctcctatcaattgagttattatgggagttgtgggaactcccataataactcatttttaaatgacaaagatgacatttcctagcggagacaatcttgggcaatgccaagaaagaaaggaacctccaacacactcctctgaagtgtctttaaagcggtcttgaacttgcaaaagtataattgagacctactattgtggccaaatgttgttctaaagtagtggtattcaaactttttaaagtagcagcagagccattttccaaacaaaagattatattataagcccaggagaataaaataatagtagtaaccaatgttgtttagtactttctatggatcaggccctgtgcaagcagtttgcacgtatctcatttaattctcgcagcaaccttatgagggaggtactactaccaaatcccatgactcagtgttccataagttgtattgtttctgaaatgtggatacgtggtatactggaaccagcagctctctctcttccctcacccagcccccaaagagcagttattaaataaattatgcatcctacaatcaatgagcgtactgattggaactgagggtatacaatgttatctccattttacagacaaagaaacagaggcttagtaggataatacacgtaggttactaagaggccaatttataatctgaactctatctgattccagagcccatgacttagactactaagttacccagctcctctggctgaaatgtgggtgaagggcatctctctcaggttcacacacacacacttgggaaggcccccataggcttcgccacagaacacagaggtaaatgaagcaaagattagaagtcaccgttccagaaatgcaaatttggagagcattagagttacatgagaaagtaaccaaatgcattctacatactagtgtattccactaaaactaaacttccagtttttaaaatgggggacaagatgaattacaaaggggtataaggaaacttttgagggtcatgaatacaataaatattttgtttttatcgctcaaggataaaatttggataaccttattatccaaaataataacaaaattcattattttgattgttttgctgtttcacagttacacacacattttaaaacgcatcagattatagtacaccaattatacctcaataaaactgtaaaaaaaagttttttagaaagttcttatgccaaaagactgaaaaaggaaaaaagaactccagatgaatggaacaggattactaatgcacacattttttaaaatccaagcttatataaggaaaaaatagtaatataaaaaattccagtcataaaatgatctacattttattcagtgatcattcacgcgcatgtatgtaatataagcaaataattcttgtgtaaaataagaaacgaagacaacaagaaactaaaatcctagggcagaaaactaccagaatgtcaccccccaactcctcaaggaagggaggagggatggaggaaatccacagacattttaaggcaggcccatcccgatccaccaccacatcaggaaatacagaccaaaaaactggtctgtcagttccctactaaagtcaaacagaggcaaatctcatgacctagtaattcttggggatatgttcaccagacgtaagtgctcacagccaccaaaggccttgtgtaacggggtttcctaacagcttgatccattatggaaacaatccaaatgtctaccaacaaggagaatggataaacaaactatagttctattcatacaccagaaacaccacacagtgataaaaaaaaaaaagaacaaattattgataggtacagcaacatggaggaacctcacaaaacatttaagcgaaaaaaaaagctaagccccagagagcacatcctctgtgattccatttatatgacattcaagaacaggtaagactaaactatggttatcagaggtcagcatagtggttaccctttgggtgaaggatgatgatgggaaggggacatgagggagccttcagggactaagaaagttctgtatcttgatctacattggggttacccagttgtctatctgtgtaaaaattttattgagctgtatacttaaaattactacattattatgtgctttactagatacattttatatctaaattaagaaaaaaataccattaggacttaatatttcatttacagtagctaaagaggaaagaaagggctcataacaagaaaataaaatatgtatgtgtgtggaggctgggaggtgtctctggaaattcacaaatgcaaataatacaaacaaggacaagatcactgaggactaagaaggtaataaagtgacaaaaaggccaaagaaaagagagggcacatgaataaggagaacatccccatcttctgaaaggggcctatttcagttcttcactctcatcaaaaatagactgaattcccactgaccctactctattatataacctatggaagatgcttatccactcatagaatttacttctctcaatataaataacatctcccaaagagtcctagattttgaatttgcatgttgggaagccaaattttgcctggtagaaagttacaatttctaggtctccaggagagctcactggtctttcctccgcaggggcagcaatctggacaagtctcacagatacaactgccctggtgacaggggagtctctgacctgggctagccatggaaccttctacattgggacaggaggtggaactgccttgggatttttgttgcggctgctgaaacctattagttgttccactaatagaattattttgacccttccaactatcctcttccccaaaacatgaagaatggtttcagtttttgaaaactggaagaacccccaaaaacaggttatctagggctcaaaaactccaaataaggttgattgcattatcttcttcaagctgcaagttcgtatcaaaactcagtcaccaatattttaaagagacgtccccttttcctcctctgttttagtttcatgttattttaatcgtctttgggtaattaatactcacagtacagctgttacgaagagcatcaaatttgcgctggatttcatctctatgtgcctaaaaggtaagaagttgattataaatttttcatagggtagaatacaattctacatgctacgggtcaaatatagagaatagcaatttgcctggaaagccgagaatgcggcaccagcatctgtttttctaagaactaattaatcaaatcatccccaacaccagaaataagttacaggaatacacaatgctgtgttaataacaattaattctttagaccatacatgcacaccctgtacaaatatttttaacatttatattaacacctacaggctattaggagaaaagggaaaaaaagcaataaaggatgaagttttactctccttcatttgtcctattcccattctgaaaagatgagtattttccctcttccctccaactgactcctccccagcctactccctgacacacacacacacacacacacacacacatacacacagaaacgcacacacaggacaatagccaagacaaagggactttgtgtgtgtgttgttttttcattaaaagctgcggacattcagaaaactctacatcggccttgaaataaatatatataggctttctccaggaaaaagctgccttaaaccagcagcattttttcagttgacaaggacttttttagtgcatactatatgcttgacactgtggaaggatataggcatccatgacccatgccttcattctggtgacggaagatcggaaatgaataagtgcgtgattagagattgggacaaatgttataaagaaaacaaatagggaccagtttaaaaaaaaaaaaggaataagaaaggtaggtagaaacttacttagatgggatggtcaaggagggcttctctgaggaggtggcatgtaagctgaaacctataggatgatgaggagccagccatgcaatggacaggagacggcagagggagcagcatttgcaaagaccctgaggcaggaaagggtctggtgcatttgatgaacaacaacaaccaaaaaaactgagtggctagagcagagtttttcaaactgcaagctgtgacccaatagcaagcatgacaagtggggttttttgttttgttgtatccagtgaagtagaataaaaaagatagaattgaaaacatcagaatgtgccttgaggagtaaacatgaggtctgttataggaaacttctgctttagatactataactaatcaaatttaaggtactttccatggtaaaacctaattttatgtaacattaagaaagaaaaagtgctgttaaactatgacatgtttatgtctgtatatgactgtaatatgcaccttgatttcagatgccttagaaacagtgaaatacagtatatatactcccttctattggattgcaagtaaaatgtattctgtgggttgtggtcaacttttgaaaaagcacagcaaagaagaaaaaaaagtagcccaagatgatgacagggaccaaggcagagaccaagaatcttgaaggtccagtaaagaatttaggtttcattcaaaattcaattaattgaaaaccaatggaaaattttaagaaagaaagtgacggattttactgttgttttaagatcacggtagatgttacagggagaagaggatcaaaatagaacaaaggtagaacgtagcagggaaaccaatgaaggtactgttactgtcattcaagcgagagatgatagtggcttggagaaggatggtggcaaaaacaaacaaacaaacaaaccaaacagagaaagtggatgaaactgagatctcctttgaaaacataaggaaaaggacttactgatagatgtgtggccaagaggaaagaggagtcaaagacgccctaacagacttttcacttgatagacaaagtggatatggtcccatctgcttatgtatgaaaacccaaataagaacccagaacccagtttagggcagatgtaagagtgatccttctatttaattataaaaaaaaaaaaagtctccataagaaggtctataggaggccaggcgcagtggctcatgcctgtaatcccagcactttgggaagccgaggcgggcagatcatgaggtgaggagattaagaccatcctggctaacaggatggtctctactaaaaaatacaaaaaattagctgggtgtggtggcaggtgcctgtagtcacagctactctggaggctgaggcaggagaatggtgtgaaccggaaggcagagcttgcagtgagctgagatcacgccaccacactccagcctgggcaacagggcgagactccgcctcaaaaaaaaaaaaaaaaaaaagtctataagataactgagtcaaaaattttagagctgtgatgttttttctaatatgtctatttttccataaatactattgtcagtttataatggcagattagatactttagaagaaaagattagtgaacttgaagacaagtagaaacaaagaagtagaagacaagaagtagaaaccaaaatgaaacacaatgagaaaagaaaaaggcattttcaaaaaatgcagagcatcagggagttgtggacaacttcaagtagcctaacatacatgcaattagagacccagaaggagtacaggagacagaaaaaatatttcaagaaataatggccacaaattttccaaagttgatgaaagccataaacccacagatgcaaaatattcaacaagtaagtaccaagcataagaaatgtgaagaaaattaacctaaagcacactataatgaaactgtttaagtccaataataaaaagaaaatcttaaaaaaaaaaaaaacagccagagaaaaatacatgttacattaagagaaacaaaaatgagaaagacagatttctcaccaagatggggagaaggagtgggcatgaaaagctagaacacagtaaagcaatatcttcaaagtgctgaaataaaaaacagaagaaacaagcaaaaaaaaaaaaaaaaaaaaaaaacacctgtccacatagaattctatacccagcaaaaatacctcttaaaaaatgaaggtaatataaaaactttttcaaacatacaaaagttgaaggaatttgacaccagcaaacctgtgctataagaaatgttaaagaaagtccttccgacagatggaaaatggcaaccagaaatttggatctacacaaatgaatgaagagccctggagagatggtaaaacaaaacaaaccaaaaatagattagttgctgaaaatagccagaagagaattataacgttcccaacacaaagaaaagataaatgtttgaggtgatggatatcccaattaccctgatttgatcattacacattgtaggcatgtatcaaaatgtcacatgtatctcaaaaatatgtacgactgtgatataccaataaaaaaatacataaaataccaaaaatagatagttgcatagacagaatcacagacagatttataaataaaaagttattgtttagaattgacttcctaaataactagcctatattctatggactaatttaacagatcttaattttttttctaaaaatctacctgctttttgcccagcaataatgagagatttattcctttgttaagataagaatactgcttacccaaagtaagactgtggctatctgcactatgtcaaaatctcatctgtgaccaagcagcagcctagacccaaggaccacacaaccccctttagtgtcttccatgatcaccaaaaaccaaaggcaaggattcttcctagagaaagaataaggcccttatgttaacagactcttggtcaggaatcggcaaattttttccttaaaatgccagataaggaaatttccttaaaatttccagagtatccagtcttggttagaactacttaactctacccttctaaagcaaaagcagccacaaacgatatgtaaacaaacagacatgtttgtttctaatgtgttctaataaaactttatttacagaaaacagtgacagactaaaatttggcctgtaatttgccagtctctgctctaaatgactatttggtgtgaaatctctcaaaaacagaaacaggaagctgagagtggagttagctccttcaaagcataagtggtgaccataaaaaagctcactggcttatccacagggacagaagccctattccactttcttattaacagcaaagtttcaaataacacagcaccattaaaaactcatttaactctcccactggagtctgaaatttcagtcattaatactgatccatttccattaaaattaaccattatggggactttggatcatgtcaagcaatcctctctgaaagttaacataatgaaccacagtcattatggcttttgatttattactgtttatgaaatataaacacaaaatgtagaactgaccctgttgtggttgctagacctactgtaagcacttaactactgaactagtcacagtaagaaaatggtaagtcatatgctttatgttttttgaaataagttataaaacaaatacacaaaaaggcaaaagctcatgcaatagaatatatacataaagacagcaaaacgcataagacaagctttggatgctctcaatgaaatgtgtgagtgttaattagatattaggtgctacagagaataaatatctacactcttaaaaattactgaggaccccaaagagctcttgtttatgtagtatccacctacacttgcaacattagaaattaagactgagatggccaggcacagtggctcacacctgtaattccagcactttgggaggctgaagcaggtggatcacaaggtcaggagttcgagaccagcctgaccaacacggtgaaaccccttctctactaaaaatttaaaaattagctgggagtggtggcgcatgcctgtaatcccagctactcaggaggctgaggtaggaaaatcgcttgaacccaggaggtggaggttgcagtgagccaagatcgtgccattgcactccagcctgggcaacagagggagactccatctcaaaaaaaaaaaaaaattaggcctggcgcagtggctcaagcctgtaatcccagcactttgggaggcagaggcgggtggatcacaaggtcaagagatcgagaccatcctggccaacatggtgaaacccgtgactcactaaaaatacaaaaattaactgggcgtggtgggcgagcacctgtagtcccagctactcgggaggctgaggcaggagaatcgcctgaacccaggaggtggaagttgcagtgagccgagatcacgccactgcactccagcctggcaagagagtgagactccgtctcaaaaaaacaaacaaacaaaaaaattaagacagatatttttcaaatatttattttttatttcttttaaaataacactaacattgcttttgcaccatcagtgcaaatattaacacagtgaaaagtgttaaatgacatcttagtattgttatgaaaacagtctgacaggcaggcataatggctcatgtctgtaatcccagcactttgagagaccaaggcaggcgaattgcttgagcccaggagttcaagaccagcctgggaaacacggtgaaacctcttctttacaaaaaaatacaaaagttaaccaggtgggtggcgagcacctatagtcccagctacttgggaggctgaggtgggagtatcactcttgagcctgggagtcaaggctgcagtgtgctgacattgcaccactgcactccagcctgggtgacagagtgagaccctgtctcaaaaaaaaggaaaaaaaaccatctgatcttgggaaacccaggagtccacagatccactttgggaaccactaacctaggagttgggtggcaaaaatgtggacggacaggttgcagccagtctgcccctaagaccagagagatactttcttttggaagtatttatgccttaattttcaggaaagttacaagaagaagaaagaaaagtaaactacaatgtagccttgagggagcaaaatatctgcagaactgaagaaaggaaacaagcgtgtagatgtctgaccaccttctgggatccatggtcaggattctagaacggttaggcttctgtgcacccaccccctttcagggtgaaggcaggcaccaggcaagaatgtcaccttacatgccccgatttcacatcttggctatcatgccgatggcttactaattaattaaacagagggcttgatatttatgtacgagaatgagaacgtgcactgactcatgattttaacaaatcaaagaggatgactttgggatcccatcatcacgctatgcagggagaaggattcctttcattagtgtctctagctttcaactcttgattattcaacattagtcacttgacagaatcggtaaaagaacagaggagtgaaaacacaaaatgtgttcatgaggcctggccggtgcacacagagcacacagcacgcctcttgcctggtggtcctcttcagagtgatgcttataccacatcacacatcgtgtgctataaggtgtgcagactcaaattatctcccttgagatggagtcttaaatatcaagttcaggctgaaatgtctcttttccagcaataagtacggaagtatcttaaaagcatgtttctgtttaaatttgacaggatgggtgaagtgaaagtggagaagaggcaagcattagaaacggcaacaaaggcctcccagctgcaccgccaagacccttcagtcgagagctttaatttaactgtgctccatctcatttggcccagggatggaggccaaacaaggtaactgctccctttcacaggctaggagatgactgcctcttacaattaaacaatcatagcacatttgactattcccttttattgacaaaacagcctgctgtgaaactcacaaatctcctaggcgatcattatagatccagctgatttcatttgactgatgcttgtgcagggtctccactcaggtctcaaacaatgagaaagttggaaagtatggcattttgggaccattttcgctttttcttggaaaagacgtttttcagaacaaattcaactaacccattcaggcaacaaacacatgctgtccataaccaggtttatggaacataatcaagagaagggggaaggaaaagcccacagccttgaaactgaatggaagcaaatggaaatggagtttggatttccgtatgatgggtttgcaaacagctgttggaggaaggcacttctgccatcatttgaagaagccctgttttttccacagcatcttcatctgcaaaagcaacagagccctagtttctaaaccaagggaggtttgtttccttatttttttttttaagaagatgctttgaggcagtgatctcatctaactaaattaagtcgtgacttgctgctgtgctcagcttccagcagccatcagacacagcacattccaaccagcagcaagaaaggatttaaaggactaatttccccatagataaagagcagtgacacgtgctctattttatgccctcttccttccaaacagggccaggataagatacacagtcacccctccttcccaattccaacagagcagcaagataaatgtgtccttctcggctgctctgaaataaacggatttgaggaattacagaccaatcccctggggagaaaaagctaaagacacagcattgggcccatagcaagggcttattaaatatggattaaattgctgatgtctctttttctttcagaggttgggtataggtacaggaggaaaatattaatatacattgcgttaaatataatagtggttgaaatttaggtgcctccctttaaaagctaagaaatgttatctgtctctctccacccacccaactcccaactccagcaagtctataagccttcttggcatgaactcttatatatcaacttcattcctagctccattttttcttctacagacttattttctctttgccttttgtttcttattttgttctgttttactgtgttgcatctttccaagtggttttcagtccactgtgaaacaagacagtatacacaaagacatactgtggttattttttgccaaagcaaattttgggggcatgatgtggcatcatttaatgagtgttctcatagagactatggaacctaaatgtgcagtcaatatctgaacttggtgtaagtcctagaaaatctaggatgcacaaacatactggaagccactaaaccttggactggtcctatacagaccctggcactgtcagatcacattcccagtttggttcagatactgggatccccaaacccaacaatgggcaataacttctaagaatgaaactacgttaaatatatatagatatagatagatagatagatagatagatagatagatagatagatagatagagatatagagatgtacacgtgcattacatcgaggtaaagtgtaagcaatgaatgtacatggccattcattccacggaagtaaccccaatcaaagagaggtttagagatgttcactgacggaaatggggacagcatctaagttgagtcagaatgaataaggtacctatttaggtggcttattaaaaaaacactaaacccaatcagctgtattgtgactggcccacaggagagggcaccctgaccagcaggcaggtgtgtgcctgtctgcttggcgggtacagtatgatactatgagaaatgtatgagcttggctgacaccagccattaaaattcatttggccttctatgctcacagtctaggtcctccggggatccttccaagattaacgggattttctaagtatacttccctgaatgggaaaaagaaaatgtgaagattggccacccagagtaccctagtcaacttggcagttgcatttcccccttcaagttaagttggcatttcacatatcagatttttgtgagttttgttattctgggtcagtctctgtgggaatgatcaaatgtggggaaaatggccccacaaaaaaatccatttcagacttctaaaaagaactaaggtttcaatccagtaacacccccgctccaagttctacctcctgagaatactctccagctaagtaaactagtctctcagaaagaacaaggaagccaggtcccttttagagaaagaatctttcattcagtagaatttttcccatccagttcataccagatgcatacaaaagacaggaagcagaatctacagcttgaaaaaaaaaaaaagtaacatgagtaaggttaactaaaacaaaaagtaaaaatatggtagaaaaactactataagattattattattattttaaatgattattgaaaactaaagtagaaagccaaggtaaacaaacttttaaacaaactgaaaccaaactttaaaatataatgatgattttttcaaaagaaggaaaatatataagtaaaggaggaactattcaagatactaagaaaagtttgaatataaccaaccaagctcatctactagttccaatgaagcagcagcctatgtaagccaatttcctggccactgaatatctttgtggatcatgttttccctcctggaatttctaagggtgagccagtatactcagtgccagttccacactcatcctagctgaggcctttagcaacctgaagatgttgctccccagacctaccgtgagtgcctggatctcctcttcagcttctgctgtggtctcttccagctctgtcttcgcctggcgaagctggctctccagggccgcccgtgcagcctgcagggctgtcaactgtgactcgcgctcctgcagggagagctgtagctctgtgagctggcgcttgagctccagtttctgctcctcgtgctctagactgacctgagacagagagagagagagaaagagagataaacccttgcttggtctgaacaaaagagaaagtgaagacatgacctgctactcaacctgcagctgaaacctggtcttggaaccaccttctcggcactcgatagaggagaggaaaatgcaacaaaatgggcctgagttccatgcatctctgaattcaacaggagtaagaacaggtaagggctatatctcctaaccaccccttacttacatatattcaaatgcctgggaagactttaaaaggaaaagccacacagcaagaatcactaatgaaaatgatgatgattactcttattagaaaaacatttaaagctaagcagatataaataacaacatattagtaacaaggacatcttttcaattcgattgtaaatgaaacaacagactgaattctatttattttaaacacgctttctctgatgtgtcctcattaggtaatctgctttaatgtcacattagaagttaatcattcttccctccatctgctcatccatccacctatctattcaatctttcatcattcatttaacaaaaatttactcagcaatttctgtggaaaatggaatatggagatgaaagacagtctctgccttcaagtggggagaaaaatgaaaaccaaccatgaccatatatcatggtcaagtgcaacggtcaggacatgtagggatgttgcaggaataccgcaggtgggtagaggagctaactctggatctgttaaattctgttgaagaatatgcaggagtcaaacaagcaggtaagaggtgaaagaaaattccaggcaggggaagcaagacatccaaaggtatgggggtgagggagaccacgacacatctattgacctgacaaacatggacagtgtggtcctaaagatcaatgtcaagcaactcagagatgcttgctgccctcagagagcctgctgtctaaggggactgccaagaagaacacactgcgatgagctatgccctgaaagccatggggataaaaaggagacctccaacccagcttcagagggtcggagaaggctcctccctagaaaaggtggcacccacatcccgaagccataggggtgaagagaagaaacacttgcaaaagatgtaacctgcaaaaccaacaggatttagtggtgaatttgatgtggggcagagaacaaaggacataagggagtcaaagatgactcccagccgggtgcaatggctcacacctgtaatcccagcactttgggaggccgaggtgggcagatcacgaggtcaggagttcgagaccagcctggccagcatggtgaaaccccatctctactaaaaataacaaaaaattagctgggtgtggtggcacacacctgtagtaccagctactcaggaggctgaggcaggagaatcacttgaacctggcaggcagaggttgcagtgggccaagattgcgccattgtactccagcctgggtgacagagcgagactctgcctcaaaaaaaaaaaaagaaaagaaaaaaagatgactcccacatttctggacgggtgaattacacaaatagaccattgctatgacagaataggagagaaagggccagtctgaggcaaaagataagaaattcagtcttaacatgttgaacttgagccctgcgggagacatccaagtggagatgtctaacgtctactaataagtagtctactagtaagacaatgggtcagaaactcaaaagaaaggtctggattggcaacctggatccaggaggccttaacaaatcagtgacagctgaagccatggctattatctctctctagtgatgatggtgatgacgacgatgtcacagcagcaaatacggtcctcacaacacactgggccctgaattaactcatttcattttcagaacaactcactaagggaggtactactattacctccattttacagataagcaaactgtggcactgagagattaggtaactgagcaaatgtcacacagctataaaaatctttttaaaaggcaggactggcattcaaacccagaaagtctggctcaagagtccatgtaacatgttgctgtattcctgcaacatccctacgtgtcctgaccattgcacttgaccatgtacagggtaaacactgtacccttctgtcttactaaaacaccatcagtcacagcagagtggacctctactagcaagcctgaaaatgcttccgatgccatttggcaaaaccaagagaggcaggtgacagtgactcaaggggaggagcgggagctggatgctatacaatgaaggaagaacccgggagcctgcatctttgtgactccacacacctggctagagaagagctaacgctgcacacacaaagttgggggaaggcccaggtcctttaaggcggatcaaactccaggtggaggcctctgccctcaatctcagtagcagcatgtggccaaaagaagagggactgatctggttatatttagagctaaactgcaaaactcccagggagaatatagagcctgaacctctcgtgaaacgtttgaagtttctcttaccatccttgaggggctggctctactgattcaagtgaaaaacaacagcttccctgggacactttaatagcccagatgagctacagcagcagggcaggctcctaagaggaacatttgtgcaaagggaaggcaagagacagccagtcaaggcccccaagctagagaagtccatctggattgtttagactcaaacttaagggcgagtctcccgtgatcttgctgttaaacttacagaagagtgaaagtatagcctggatgataaaagttaaaccatcgcctaaggcttaaggctcatgcctgtaatcctagcactttggaggccacggagggaggactgcttaaagccagacgtcctccttctgagaaatcctgacctaagaaataataaaagaaaaataaataaataaataaagccaggagctcaagaccagcctgggcaacatagcaagaccccattgctagaaaaaatgaaaataaaaccagacactccaggtgaacctaatggaggagttcacaccttgacaacccctaaaaaacatgagataacacattgttactgtcccttggagaactgacttcattttaatactccaagacaaataaagacatgcataaacatgagtactacccaaggcttagacctcagaccgctgtctgcttaacaggaccttccttaagaaagatcatctgctttttgaagaattccatcacaaatatttgagcaactattttacatgagacattgtatcttccctcccagcctgggtgttcagcttccaacaaccactatcctgaactccagttgtgtctctgctggtgccagcgaaccctgctgctaggctaaaagccctcgtgtcaggaacaggtctgtcttgtcgccactgtagacccaggctacaaattggcacacagcagacatctgacaaatatacagtgactacataaatgtaaccttatggcttcaatcaacctcaacatgtctacaacccaatttgttgtattttcctccccaaaacctggccactcttcccagcctccttatgtttttgaagagagctacctttcatcaatcacacctaaatttggttttgtcttttaatctcccaccgtcattatgagacagacctctgccaccagcactgggccaccatggctaagctctgactaggtcacggggctgtcattacatcttgataaaggaggaattgctctgctcccatttgacagatgcacaaattgacacgctccccacaggaccctataaaggagatacattatcactgacattttacagatgaagaaactgaagcccagcagagagatgaggcagcttgcaaaactagtaagaggtcataaaaccagtaaggagtggaggtggaattctaacccagatccccatggcccagtctgttaccagaaggagggcctggggtctaagttgtctattttgaacaaagaattggacaaaacgcacaaagtaacaaaggaacgaaacacaggaacgaagcagcgaaagcagggatctattaaagcaagaacgcactccacagggtgggagtggccccagcaagtggctcaagggcccagttacaaagttttctgggttttaagtactccttttggggttcctattggttactccttatctgaataaaggattcggtctgtggctaattacaggctgaggcgaactggtgccctatgcagatgaagggatagtccctccttggcccgcggcccatccaaggtgctcttcctttccatctgagcaatggtggaaggtggggggagggggttgcagggagagtagtcttccatcttttggagcattgcagggagagtagcctgttccatctttcactactggggcgtgggaagatgaggattttccttttggttcagctttaggaagtttgtgttaattggcctcaggttccctgcctccagccccacgtgttttcctttcgatccagctctgggaagtcagcaggaatgggctttaggttccctgcccacagaacctggtgttttctcttttagaaagctagcacaaattggccaggcatggtggctcacgcctgtaaccccagcactttgggaagctgaggcgggtggatcacttgaggtcagaagttcaagaccagtctggtcaacatggcaaaaccctgtctctacaaaaattggctgggtgtggtgccaggcgcctgtagtcccagctactcgagaagctgaggcacgagaatcacttgaacccaggaggcggaggctgcagtgaaccaagatcgcaccactgcactccagcctggacaacagagcaagactctcttaaaaaaaaaaaaaaaagaggttagcacaagggcctcagattccctgccataaaccttggtgtttttccttgattcagcatgaattggccttaggttccttgcctccagacccttttctcctgcctcaagtctgcccccttaaccaccaagcacaatgtctcttgtatagatattgatttgtgctcgaaagctgacttgttcagagcccgaatcgcccagcaaatcctcccaggagatgactcctcgctctcacctcccgcaatcttgtctccagttccagcagccgattcttgtcactgtggtcttggtggctgatcttctccagctgctcctccagttttcggttctgggcctccaacttcccagcctgtgtctccaggtaaaatttctgttgcctgagttcagaaatcatctcttcttgggccttcctggtgggggtggtgggaggatccaaacaaaatcacagtctcattagggttgagcccgtttccacgggaggtagacggacacggagttagacatgtctcctcactaagtggactagggccattcctgggttagctgtctcctgatctggcctcataagcatgatcccggcatgacgaacgtggggaccatttactcatcaccactcagtgtcagtccctcacatatgggattaagtaaggtccaggaggatgcaagagatactaacatttcactcctttgacaggcctgtttatttcttctgtgagtctgtgtagggacagaagggggcctccttagattaatgtacaagggcaccccagtaactcatgaaggcaggccctggagaaaaaggactaaggagaaagaatggtattccttctagttctctgcagatctccctcacctctccagcaaactgcttagaagtatcaaaacctagaacgactcaaagacccaaaacacagcctactaagctggtttagattaagatgggactgttttgggagatctctgaagagagaaacctaagggggaaaaaaatcctggagattctaattctctgggggaaaagattcagctcaaagtgctcctggaacacagcccttgctgaaccccaaacttccttccatagggtctaacctagtgacaactaaatggatggcccaactgggcacacacaatttcacctcttactaattacaggatgcaagtctagggaacaagaactgcagctttccacaagcaaattataaatagcctcattagagagagcaaaacactctgtaatgtgatggtaattgaaggcatttaagaaaacccgactcaaaagtggcagagtgagaccacttaagacagggcaagatgacgtaagtatctgagggctgggctgagctacagaagtcattcaatccactccagctccatcaaacagaagaagggagtttatgccacaggagaggagaccaaagtgtaataatgtagggcagttagaatttgaatacttacatgttcctttgggtaaaaagactgctatttgctgcaagtttattggcttcagacagttccacaatcctctgttccagggatctgatcttggaatccatagcattgatcatctgaaacacagggcacctatgaaacttcacacaccagaacaggagtaacaggggcagtgcgggccagggtaaaagtttcatctgaaatgacggcaatttggctagaggtaacaaggcactcaactagtctgtactctgaggatcacagatggtaccactcaaatggatggtacttggttgttttttcagtgatgaaatctccccacactggctaagtggcttgcatttaaaacagacataaggacctattcaagaacctaacatcctgggagtaatcaggccttgttaaaccccatctcatctacatgtgacctgggcctgcaagtctcttaactcaaatctgcacattcgcatttatcaccacctcctcgagggttgtcattttctgagtgattccttctcacccagccaccattgctctagactccacagcaggggtctccaaccccagggccacagagcagtaccccattaccggtctgccacctgttatgaaccaggccgcacagcaggaggtgagcggccagcgagcgagcattactgcctgagctctacctcctgtgggatcagtggcattagattctcctcagagtgtgaacccaatcatgacctgcgcaagcgagggatcgaggttgcgtgctcctaatgagaatcgaatgccgccagccgggcgcggcggcttagcctgtaatcccaacactttgggaggccaaggcaggtgggtcacctgaggtcaggaattccagaccagcctggccaacatggagaaatgctgtctttactaaaaatacaaaaattagccaggtgcagtggcacatgactataatcccagctactcgggaggctgaggcaggagagtcacttgaactcgggaggtagaggttgcagtgagccgatattgcgccactgcactccagcctgtgtgacagagcaagactccgtctcaaaaacaaaacaaaacaacaaaaaaatctaatgccttaatgcctgatagtctgaggtggtacggttttatctcaaaaccatccccccacccctgtggaaaaattgtcttccacaaaaccggtccctggtgctaaaaaggttggggacagcttctctacagcaaagtttccccaacttaaaaaatcataagaattggggtgtgggggtactaactaaaaatttaatttcccaggatctcccctcagagatcctgatgtggggtcgggcgcggtggctcgtacctgtaatcccagcactttgggaggccgaggtgggcagatcacttgaggtcaagagtttgagactggcctggccaacatagtgaaaccctgtctctactaaaaatacaaaaattagccgggcacggtggcacatgcctttaattccagctactcgggaggctgaggcaggaaaattacttgaacctgggaggcggaggttgcagtgagctgaaatcatgccactaaactccagcctgggtgacagagtgagattccatctcaaaaaaaaaaaaaaaaaagagagagattctgatatggtaagtcttggtggagtgcagataaataagcaccacaggtaaaccttaggggcaacaagtttctgaaacaactgcctatgtggattagaaaagagacaaacaggcaagtaaaaagaagagaagtgtagggccaggagtggtggcctgtaatcccagcactttgagagaccaagatgggaggattgcttgaggccagaagtttgagaccagcctgggcaacatagcaagatctcgtctctacagaaaacttaaaaattaggtaagcatgggggcatgcacctgtagtctcagttacttgggaggctgaggtggaaggatcacttgagcccaggagttggaggctgcagtgagccatgattgcaccaccacattgcagcctgggcttcagagcaaaaccccacctcaaaaaaaaaaaaaagagcaggaagaccaagagccactggacattttgtcaggggcatttagaaggacagtattttagcagacagcagaacagcatgagttcttgaaaaacacaaaactggccatccagagccaccacctcagttgcttttaggaaaggaaacagtttcagagaaagcctcctattaccaacaactccacaggattcaacagaaggaatttcaccaggtgaaatagagtcttatcaggggtgattcttggcatatttcaaaaaccctcctttgaacactggcttggcaactccttctacctaccgccttctgttcgctgagaattttgcccttctcatgggcctcctcctcgtgtctctgcatcatgttctccagtgtctccttgtcagccaggtctttctttatctgattgtccaacacctacaaaaacaaaagcagcagcaaatgttctcaggagccaagctgaggagggaagactaaacggggacacttgagaaaatctaggaaagaggagaaaagcaggggagaggcccgaggtctccaaattctggggcaaagagaaggcaaaaactgggagtccgcttatcaatcaggataagattgaaaagtcaaatattaccatccaatggcaagtaacaggttgacttgaaccaagaacttattttaaaatcagcagcccaaagaccagagagatatattcaaaatgaggcagactccagaatgagaagggaggaggaaacaagattgctctagatccagacctagagaataaatttcttataatctgcagatattacctggggacaactttttcttcgccagtgcacccgtagttttcagaatattcctcactcctaatttatacagattaattctagatactcctgggctgtgtgcaagagggagagaagccgaagacaggggaagtctatgtgaccaaggatgatgctcagaaacaaccagggacaagaggcttttggccaccaataacgtaggtggatggtcaacagattaaaaagacaacataaaagaaagaaaaaaatgcctctttccctggttctttcctctgatccaactagggggagaaaaaaaagtcactgggaaaagaaacctttcccaggggaagagagatcatgtgttctcagtgctcagaatgccactgtaagcacctactgttcccaagaggaaacataaaacagtaatggtatcaccaatcgccaacttgatctaatgttctttggggcacacacagccctacgagttgccaaaacaacaagcaaaaaggaaggaaaaaagaagacgacatcagaacatgcccaagcctttgaccacaaccctacgttcctcaccacagaggctccattcgacttttccaaagaacaccaacaacatcaaggaggacaacaggatcctgggaataaagctgaaagagctggggtcacagagagggctaaaatctgcctttccaacaatgtctattgtgaaaggactgtcacagctcatggggacgacgtccctaaaaagagccagtcagcggggagggagtccacaggagaaagaaaggaaagaacagatttcaaagaggtctttaaactagaactgactgatgaaaaaaaatagaatggaagttggaagagaagaccaaaaggtgggaacagggtcatgagagaaaggaagaagctcaaaaggatgagaaatggcccactctcttggatgtctgagcatgattctaaaattatgagcaagaacagggtagaatcgagggtatgatc

SEQ ID NO: 3774 - DNA, 388 bp, Homo Sapiens
tttatttcctgagttttttatgaaaagtgatagaaggagaaatggggactggaaactgggaagtcatctaaacaaggaggatgaagttgtcagagtcctgtgtctaggaaaagggagaaaggaggaggcagggctggcaggtgaaaatttgtatctgagctggggtttcaagtcacaaggggcaagtcaagaagcctcagtggtgcgtgaatatttctaaacagaggcagagaatagaaagaagcaagttgcaagatcagtggcaggtggagctgaagagagaacagaggggtggcgtgtgctggggtggggagaaccttcaaaggaccagggatgccctcccctcacccaaggctacacctagcctcatgtcttcttcaccttcctg

SEQ ID NO: 3775 - DNA, 432 bp, Homo Sapiens
gttcgaagtggctgtgggtattgctgcggctggtgcgtcgtcgctctagccagtaaatgacctgcgacataactatttgcaaaacaaatggggaagaccaagataaagataagttatatcacaggaaagcaattgaaaatgcaaaaatgaagcatctgaatgaaggactaataacactgaattcagcttttgtgaatcttatctgcagatatgtacagaccacatcctaagattgacttctgcctcaacagaaatacatgagccagtgccttattggaaatgatttgcgtgttttaagaactggtgtatataggtacatcttgaatgttctgctttccttgccttatgcctgtacttcacctcagccttcaattccattgtgtttccttgctacttggtatcttgaaatctggtacgaaactattgcatgat

SEQ ID NO: 3776 - DNA, 5546 bp, Homo Sapiens
gtgatgagatataatgcatcctccagtccatgcacgcttcctcttgcaatttgggcatcattcctcagtggaaacctttaaaccctgaaatccaggaaaagaaaataaatacattatcatggacctgagggatttttacctgttggctgctctgattgcctgtttaaggctggattccgcaatagctcaagaacttatttacactattagagaggaattgcctgaaaatgtgcccataggaaacataccaaaggatctgaacatttctcacatcaatgctgccacagggaccagcgccagccttgtctacagactggtttctaaagctggggatgcccctttggtgaaagtatccagcagcactggggaaattttcacaacctccaacagaatagacagagaaaaactctgtgctggcgcctcatatgctgaggagaatgagtgtttctttgaacttgaggtggtgatcctccccaatgatttcttcaggctgatcaaaataaaaataattgtcaaggataccaatgataatgcccccatgtttccatctcctgtcatcaatatttccattccagaaaacactttgatcaacagccgctttccaattccatcagcaacagatcctgacacaggcttcaatggtgtacagcattatgaattgttaaatgggcagagtgtttttggactggatatcgtggaaactccagagggagagaagtggccacaactgattgttcagcaaaacttggatagagaacagaaagatacctatgtgatgaaaatcaaagtagaggatggaggcactccacagaaatccagtacggccatactgcaggtcacagtaagtgatgtaaatgacaacaggccagtgtttaaagagggtcaagtggaggtgcatattccagagaatgctcccgtaggtacctctgtaattcagctccatgccactgatgcagatataggcagtaatgctgaaatccggtacatttttggtgcccaggtcgcccctgcaaccaaaagactctttgctttaaataatactactgggctgattacagttcagaggtccttagatagagaggagacagccattcacaaagtgacagtgctggctagtgacggcagctccactcctgctcgagcaacggttaccatcaatgtcaccgatgtaaatgataaccctcctaatatagacctcaggtacattataagtcccatcaatggcaccgtgtatttatctgagaaagatcctgtcaatacaaagattgccctaattacagtttcagataaggacacagatgtgaatggcaaagtgatctgttttattgaaagagaggtcccatttcatttgaaggcggtatatgacaaccaatatttgttagagacctcttctttgttggactatgagggcaccaaagaattcagctttaaaattgttgcctctgattctgggaagcccagtttaaatcagactgccctggtaagggttaagcttgaggatgaaaatgacaacccaccaattttcaaccagcctgtaattgagctgtcagtttctgaaaacaaccgacgtgggttatacttaacaactattagtgccacagatgaagacagtgggaaaaatgcagacattgtttatcagcttggaccgaatgcctccttctttgatctggaccgaaaaacaggagttttgacagcctccagagtatttgacagagaagaacaagaacgattcatttttacagtaactgccagggataatgggacccctcccctccaaagccaagcggctgtgattgttactgttctggatgagaatgacaatagccccaagtttactcataatcattttcaattttttgtgtctgagaatctgccaaagtatagtactgtgggggtaatcacagtgacagatgcagatgctggagagaataaagctgtgactctttccattctaaatgacaatgataattttgtgttggatccctattctggagtcataaagtcaaatgtctcatttgatagagagcagcagagttcctacacttttgatgtcaaagccactgatggaggacaaccacctcgttcctctactgcaaaagtaactatcaacgtcatggatgtcaatgacaacagcccagttgtcatttctccaccgtctaatacttcctttaagttggtgcccctctcagccattcctggctccgtggtagcagaagtttttgcagtggatgttgacactggaatgaacgctgaactaaagtatactatagtgagtggaaacaataaaggcttattccggattgatccagtaacaggtaacattactctggaagaaaaaccagcacctactgatgtgggattgcatcgtttggtggtcaacataagtgacctggggtaccctaagtctttgcacacgcttgtgcttgtattcctttatgttaacgacactgctggaaatgcctcctatatctatgacttgatccgcaggactatggagaccccgttggacaggaacataggggatagtagccaaccctatcaaaatgaggactatctaaccatcatgattgccatcatcgccggtgccatggtggtcattgttgtgatcttcgtcaccgttctggtgcgctgtcgccatgcatcaaggttcaaagcagctcagaggagcaagcaaggtgccgaatggatgtccccaaaccaggagaacaagcaaaacaagaaaaagaaaagaaagaaaaggaagtctcccaaaagctctcttttgaactttgttactatcgaagagtccaaacccgatgatgcagttcatgaacctatcaatgggacaataagcctgccggctgaactggaggagcaaagtataggaagatttgactggggcccggcacctccaacaacattcaagcctaacagtcctgacctggccaagcactacaaatctgcttctccacagcctgcttttcatctcaaaccagacactccagtttccgtgaaaaagcaccacgtgattcaggaactccctttggacaacacctttgttgggggttgtgacaccctttctaaacgctcttccactagttcagatcacttcagtgcctcagagtgcagttcccaaggaggcttcaagacaaagggccccttacacaccagacagtcgcagcgccgtgttacgtttcatctccctgatggctcccaggaaagctgcagtgacagtggtctaggagaccatgagccggtgggtagtggaaccctgatctcacaccctcttcctctggttcagccacaggacgaattctatgaccaggcctctccggacaagaggactgaagcagatggcaactctgatcccaactctgatgggcctttgggtccccgaggattagctgaagctacagagatgtgcactcaagagtgcttggttttgggtcactctgataattgctggatgcctcctggcttgggtccatatcaacaccccaaatctcctctctcaacctttgcaccccagaaagaatgggtgaagaaggacaagcttgtgaatgggcacaccctgaccagagcctggaaagaagacagcaacaggaaccagttcaatgaccgtaagcagtatggctccaatgaaggccatttcaacaatggcagccacatgacagacattcctctggcaaatctgaagtcttataagcaagcaggaggtgctactgagagtcctaaggagcaccaactctaagaaaaggctatatgggacctaataactttaaatagacatgctaataccgtgtgcgtcagagctttatgtattcaatagatctctacaactatgccccttctagcagggatacctataactttgtgttagcaccatggagaatacaatgtttttgcaacatatgagagaagatagttctagccatgcaattttgtttactagaattgattacactctccagagatctctccattgtgcaaattttttttattattgcattttattttgaccctggactgctgctatgaacaatagaatatgcatttggaaagtaagaaagtttcatggattagagtgactgaaaaacatatccagttagaaaattgtgcttttttttttttttttttttgtcattgatttgtgctgggactgctatacttgacattatactgcaaacaaaacttaaagagataagcattaaacctattgtgctgttaacaacgttagtggacacttgtaagtcaatcagtgttaaagtatttgtaaatagaagcaagctattattaacaacttttgtgtacttataatgttcacctaaaaatgttgtagcataattctgtgttttatggttgcttctgtccttctttttatttacctctttgttgttatttttgttgcttctttcagtgaggtgtttctgtgttagtagtctgtcttgacacacattgttcaaacaatctcaagcacttgtgtttaaaaaaggttctgaaatcttgcttctcatatgatagcttatgatgccggaattctgtaaacaataaagatgaaagaaaaaatgaaaactttatacaaaaaaggacttctgcaaaagcttggaaattcagaacctattttttatcatcttattttcaaagtaggcaaaagcaaaatcacttaattagcaccattaagtgagagagtaatggaaaacggttatccaccaaaagtgatataatatcctgtacttgtcactcatgtaaaactaatgtatcaaaattagcatatatggaagaaaaatcactattcaaaaatagtttcaattgggcaaatgtgtgtctacaactttgttgaaatggcacagtctgtgttgatcctcatatacaataatgttgttgtaacacaagtgttattagaccatagccacaaaatatttaatgtgttgtgccttcatgatgtaacagaacattctccaggtagggtagttgggggaaataaagggataaatctctaattattgctgtttaactgtttgttatcatagttggtcaatgcctggcaggtaccagcatattgtcacttaggtcaaaccaataaagtggcaactaatgttaataagatttcagttgcacgtgcaaacaaatccaaattcgaacattcttagaaggtttttgttaaggcatgacagatgatttaaacaaataaatagcatgcaacaaaatgtctttattgaaagaagtggaagttatcttaatgccacggttcaccatcaatttaaaagtaaaaaaaccaaaaaaaaaacaaaaaatttaaaaaaaaggtttgctaatctgatagttaatttgttcttaccaaaaaataaaattactttgtaaatagcagttcacatttttccacagtataatggaaaataatgggtaggggtgcattgcttattgaagtacatttttgtcggtttgtgaggggtgtttgatgactttgacagaataaatatctaaacaattatccttgttactgctttgccagttctacgttatttacaattattcagctcttgcaataaatgttctgaattaccaaa

SEQ ID NO: 3777 - DNA, 490 bp, Homo Sapiens
  misc_feature (347)..(347): n is a, c, g, or t
ctgtttagccatcccactgtaatgctgcactaagccttgagaacaaagagaatcacgcaactgggaaaccaaggctttgtgattttcagccaagccaaacatggtcactctgtcaggaaagccttggactcatccctgactgactggctgtttcagtgagttctttcttggcttaaaaaaaagagtgagaagaagagcagttgtgtggtttgcctgtggggacttgggcaatgggggtttgtagagccaagtggccaccatgataagcgagactgacttccctgtgccccgacatttgggaggaggcagcacccccagcacacgcctgaggttcaccagcccctggnccttggcacagattcctcccttctttgcctggaacaactgtttctgttccccaccccattgtgtcctccaggattcaccgtagagatcaccattttgataagctaatctgcagcggtgaagccttcaccaagtccctcgtgcc

SEQ ID NO: 3778 - DNA, 343 bp, Homo Sapiens
tttttttttttttttgttattttatactgtaatatttttaatgttaaaatgctttttgttaaaaccaacatggattattgaccaattatcttgaccaacagtacttttcaaaataaacaggaaaaactcaaaacagagacacacagatctttaaaagacaatcatgattttaaaaaaatcatggatcatggtataaacagagcacacaaaaggaaaataagaaatgaaaaaaaaactgttgaaattcaaataagttttatacttcagttagtagtattgttctgggctaatatcttactttagataaatgttctacagttatgtaaaacgttaacatgagagg

SEQ ID NO: 3779 - DNA, 380 bp, Homo Sapiens
ccctcctggagttggtaaaacaagtgtgggaagatcagtggccaagactctaggtcgagagttccacaggattgcacttggaggagtatgtgatcagtctgacattcgaggacacaggcgcacctatgttgggcagcatgcctgggtcgcatcatcaacggcttgaagactgtgggagtgaacaacccagtgttcctattagatgaaggttgacaaactgggaaaaagtctacagggtgatccagcagcagctctgctttgaaggtgttggatcctgaacaaaaccataacttcacagatcattatctaaatgtggcctttgacctttctcaagttctttttatagctactgccaacaccactgctaccattccagctgc

SEQ ID NO: 3780 - DNA, 461 bp, Homo Sapiens
agcacctgggagaaggcagaccgtgtgagggggcctgtcgagcgtgctgtggcctcggggagtgggaagtggaggcaggagccttccttacacttcgccatgagtttcctcatcgactccagcatcatgattacctcccagatactattttttggatttgggtggcttttcttcatgcgccaattgtttaaagactatgagatacgtcagtatgttgtacaggtgatcttctccgtgacgtttgcattttcttgcaccatgtttgagctcatcatctttgaaatcttaggagtattgaatagcagctcccgttattttcactggaaaatgaacctgtgtgtaattctgctgatcctggttttcatggtgcctttttacattggctattttattgtgagcaatatccgactactgcataaacaacgactgcttttttcctgtctcttatggctgacctttaa

SEQ ID NO: 3781 - DNA, 2023 bp, Homo Sapiens
cgcccgggcaggtctcccggaagtggccggtccagagctgtggggtgcctccgcgcggtctctggcggatcggggaatcggatcaaggcgagaggatccggcagggaaggacttcggggccgggggttgggccacatttacgtgcgaagcggagtggaccgggagctggtgacgatggggaggcccctggcgctgcaactggaacagttgttgaacccgcgaccaagcgaggcggaccctgaagcggaccccgaggaagccaccgctgccagggtgattgacaggtttgatgaaggggaagatggggaaggtgatttcctagtagtgggtagcattagaaaactggcatcagcctccctcttggacacggacaaaaggtattgcggaaaaaccacctctagaaaagcatggaatgaagaccattgggagcagactctgccaggatcgtctgatgaggaaatatctgatgaggaagggtctggagatgaagattcagagggactgggtctggaggaatatgatgaggacgacctgggtgctgctgaggaacaggagtgtggtgatcacagggagagcaagaagacgagaagccactctgcaaaaacaccgggcttcagtgtccagagtatcagtgactttgagaaatttaccaagggaatggatgaccttgggagcagtgaggaggaggaagacgaagagagtggcatggaagaaggggatgacgcggaagactcccaaggcgagagtgaggaagacagggctggagatagaaacagtgaggatgatggtgtggtgatgaccttctctagtgtcaaagtttctgaggaagtggagaaaggaagagccgtgaagaaccagatagcactgtgggaccagctcttggaaggaaggatcaaactacaaaaagctctgttgaccaccaatcagttgcctcaaccagatgttttccctgtcttcaaggacaaaggtggcccagaatttgccagtgctctgaaaaatagtcacaaggcacttaaagcattgttgaggtcattggtaggtcttcaggaagagttgcttttccagtacccagacactagatatgtagtagatgggacaaagcccaatgcgggaagtgaggagatttctagtgaagatgatgagctggtagaagagaagaagcagcaacgaagaagggtccctgcaaagaggaagctggagatggaggactatcccagcttcatggcaaaggctttgccgactttacagtctacaggaacgacacttcagaaatggcacgataagaccaaactggcttctggaaaactggggaagggttttggtgcctttgaacgctcaatcttgactcagatcgaccatattctgatgtgtaaagagagattacttcgaaggacacagaccaagcgctctgtctatcgagttcttggcaaacctgagccagcagctcagcctgtcccagagagtttgccaggggaaccggagatccttcctcaagcccctgctaatgctcatctgaaggacttggatgaagaaatctttgatgatgatgacttttaccaccagctccttcgagaactcatagaacggaagaccagctccttggatcccaacgatcaggtggcccatgggaaggcagtggcttgcaatccagaagttaccgaagcaaaatccacaaaaaaagtagataggaaagccagcaaaggcaggaaacttcggtttcatgtccttagcaagctactgagtttcatggcacctattgaccatactacaatgaatgatgatgccaggacagaactgtaccgctctctttttggccagctccaccctcccgacgaaggccacggggattgacatcgcccacctccgacacccagtgggcgccttggctggtgcggctgctggtccagatggaggaaaccagtgactttatggggctgagctagtagggaagcccctggaaagatgctgcgttccgaacctgtgcctaatacacgcaagggcgctgtcccgcccaaccccgcct

SEQ ID NO: 3782 - DNA, 390 bp, Homo Sapiens
cagcccccggcgggcgcccccctcgcacctcctgccccgcgcgggccgcgctcccctcccccgcgcctgtgtccccagggcgcagggccgcgcgtccagccccagacccgccggggtccctggggacgcgccagcccggcagtggctcgacgatggaggagccgcagcgcgcccgctcgcacacagtcaccaccaccgccagctccttcgcagagaacttcttcaccagcagcagcagcttcgcctacgaccgggagttcctccgcaccctgcccggcttcctcatcgtggccgagatcgttctggggctgctggtatggacgcttattgctggaactgagtacttccgggtccccgcatttggctgggtcatgtttgtagctgtatttt

SEQ ID NO: 3783 - DNA, 235 bp, Homo Sapiens
  misc_feature (58)..(58): n is a, c, g, or t
  misc_feature (123)..(123): n is a, c, g, or t
  misc_feature (190)..(190): n is a, c, g, or t
ttttttttttttttttttttttttttttttttttcgaatgaatgacaactttattttncttacacttttaaggctgatgaaaaaccttcatttcaattgaaaagtatggtaactgtgtttacncattattattagttttctaaaacacaacttgaaaacatccagcatgcatgtttaatatcagtacaangaattcaagaccaagtatacatgttacattcagcaaggctagatt

SEQ ID NO: 3784 - DNA, 401 bp, Homo Sapiens
tttttttttttttttgtcatgagtaagacgatatctactagattcctcttttgtaaagttcctgtttttttaaataagaatttcatggggagatgctttgaacctatgtaagtaactcattccttattcaacttttccccactagatttagcaaacattgatatttcttgtctgatgattgccaaatggtgattttctaattctgtttactgagtacccccatttttctaagagaaagataactgtgttttaaaacattttttttttcttttctccttttctcctttctcccacttcccacttagttccttagaaatgcaattataatctttaccttcccttcaccagacactccttacagggcaagcttatttaaccatgtgcttttagacctcgtgccg

SEQ ID NO: 3785 - DNA, 260 bp, Homo Sapiens
ttttgctaggaatagccacactgattgttcatttgtttaatttttaaaaatgagtaagcagacaatcttgcaccctttgaatgcccaataaaaatgttcattatgcaaaacagtacaacctttttcattttttaataatactgtaaatatctcagaaaggatgtattgtttctaatgaatatcaaaaaagtcatcacaatgacatgttcccctgcccccacattgccctccccacccccaaagttacccaaatactagta

SEQ ID NO: 3786 - DNA, 568 bp, Homo Sapiens
tttttttttttttttttcagagacggagagatttattttaaggaattgtgtggctggcaagtccgaaatccatagggcaggctggcaggctgaaaagttaagtgagggttaatgtcatagaccggagtcctgagtttgaattccacagggcaacaggctggaaactcagatagggtttctatgttgtagtctcaaggagaattccatcttctttaggaaacctcaatctttgttcttaatgccttcaactgattggacagggcccacccgtagtatggtgggtaacctgctttactgatttaagtgttaatctcatctaaaaaatacctttaccaccatgtccagaccagtgtttgaccaaacaatgagttggcatactccacgcaaggtgacgtgcaaaatgaaccatcacagcacttcttgtgtcttcatgtgcccacctggtacatgggggtacaactatctggcccaaaggggtggtcaatcctgagtgggttaataataggaatttagtcctatgatgtgtcttgatttttcttttcctttcttaccttcctatttttattaa

SEQ ID NO: 3787 - DNA, 11263 bp, Homo Sapiens
gtcgactcgatcctcccatctcagcctccccagtagccatataggcacatgccaccccacctggctaattgaattttcaacaaaggagcagaagtactgcaatgaagaaagaatagtcttgtcaacaaatggggctagaacaattggatatccatacataataagacaaacttcaagccatacctcatactacatataaaaaattaactcaaaatgcatcatggaaaaccccaaactataaaatttctaaaagaaaacataggggaaaatatttgtgtgatcttgggttaggcaaagatttcctacatgtaataccaaggcaaaatttataaaaaagtaaattgatcaattggattttatcaaaattttgaaactcctactttaaaaacactattgagagaatgaaaagacagccacagactgggagaaatatatctacaaaggatctctccaataaaggactcgtatctagaatacataaataatgtttagatcttaaaaagaaacccaccccaataacccaataaataatgggcaaaagatttgagtaggcgtttcactaaagaagacatatggggcttataagcctgggagtaaactgactttttttttttgtaagaaattagatatcctaagttaaacagtcacacaaggatgtgaggagaaagtgctttgacaggaattgctatactagtcacaagtacattaccaaagatttctctataatggatttaatatttaaacacagcacccagtatttgttgaaaaagcaaaactatataataggggtttttaaaataattttttttttgagacagtctcactctgttgcccaggcttgagtgcagcagcacgatcttggctcactgcaatgtctgcctcccgggttccactgattctcctgcctcagcctcccaagtagctgggattacaggtgcgccaccacgcctggctaatttttgtatttttagtagggatggggtttcatcatgttggccaggttcatctcaaactcctgacctcaggtgatccgcctgccttggcctcccaaagtgctgggattacaggtataagccactgtgcctggtctaaaataaagttttttaaaaagtgaaaaaaagaagacatatggatggcagataagtgtataaaaaaattcttaacatcattagtcattagtgaaatacaatttcaagtaataatgagacaacatcacacacttactggagcggctaaaattaaaaagactgaccatcccaagtgttgacaaggctgtggggtaacggatgtctcatacactgccggtgggaatgtagaaaggtacaaccactttggaaagcagtttagcgatttctcaaaaagttgaacatagacctacctgtctgaaccagatactccactcctaggtatttacctggcagaaaagaaagtgtatgtccacactaagattacacaaatgttcgaagcagttttgttcgtagtggcctcaaatggacaatgagcccagtgtccattagcagggaatgaatgagcccaggaaggaatgagctatttacacagcaatgctggatgcaatctcaacataattatgcttagtgaaagagaccgaagaatgcatactgtatagttccatttacacagaatcctagaaaatgcaaacaaatctgcaaagtcctagaaaatgcaaacaaatgccatggaaaagaaaccctgggtagctcccgagtggggaagggtgggagggagagattccaaagaggtgtaaggagccctgtgtgggtgatgggtggggacatattcatcctgattggggtggtggtttcccaagttcaaccaatttatgtcaaaactgacccaatcatacacgtaaacatgtgcggtttattgtatgtcaattctaactcagttaagctgttttagcctgtgtcaacgcactttcctgaccagtaaatcctaagtgttttccttgttgccacataaaatcctagtcataatttatagtggatgcatgttattctagagttgtttggctcttagagatttaaaattaatcagagaaatatattagagcccaaactatagtgacagtaaaaaatgaccagtgcttgccagggatttgtggggaaggatggaatagctgagacacagggcatgtgttagggtggtacaaccattttgcatgctactatcctggtggatatttgacactctacatttgcaaaacccagaaaacttaatagtgcaaagagtgaaccttgatgtacacaaacataaaaatattcaggaggttgagggatgccacagatgaaatgcggaatgtggcaaaacaatccaactgtatttcaaatgcatgaaataaactcacagaagggggcgggggtggagggatgttgaagggccctgacctttgggcacttcggcaaggagcaagggggcactgagattcctgccctggggctacgacaccacccaggaacccctgatctttctgttacttatgactggggtttctccaaaaagcaacagtctcctttgcaaaaagtggccacaccattatcaagcggtggacagtgtaagtttggggctgggaagattctctgggaccacattgcagctctgccattcttgggctgggtgagccgaaggagtgctttcaccctctctgagtctcagtttccttgtctataggatggagtgaggtgagtgccttcctcccagggttgagggctccagtgaggtgggcctatagagcagttggcctgtacttgctcatcatgagctcttgtgaggtggagccctgtggagctgccacagaaggtgaactccagtaccagggagatttcatttgtccatccttttacccacccacccaccgattaatccatcatccacccacccacccacccatccacccacccactcatccatctatctgtccatttgtccatccatccatccatccatccatccatccatccatccatccatccactcatccactcatccatctctccattcatccatccacctatccagtcactcactcacatatccatctatccatccatcctttcatccatccattctttgacccatccacacatccatccctccattcatccatgcctccatccatccacctatccattcactaacccatctatccatccatccatccatccatctatccatccatccttccattcacccattcatccactcatccatccatccatccatccactcacccacccattcatctatccatccatccacccacccattcatccatccctccctcccatccatccatccctgacccattcatccatcccttccatccatccatccatccatccatccatccactcacccatccacccatccatccatcccatccatctacccacccactgacccattcatccatcctacccacccaccctcccatccatccatcctttcattcacccattcatccatccatccacccacccacccattcatccatccatctaacgatctgtccctccctccctccatttatccactcattcacccagccaaccacccattcatccatccgtccactcatttacccactcatttattgatctattcatccatccatccatccatcccatccatctacccactgacccattcatttcccctccctgcttcccatccgtccatctatccatccatccatccatccacctgctgacccattcattccccctcccttcctcccatccatccatccatccatccatccatccacccacccacccacccagaagcaaagttattgagtgcatctgctgtgagggtggccatgggagggcccacatgggctgctgcccttgcagcattcggagcaggatggccagcaagggtcacacagtgtggccagggtggtgagaacagtgttcagtgtgaggatgtgacacctggaccaagtcttgaggggcaagtgccccagggtgtctggactcctgaagcacagctatccacctgatggccctggccctgggctgccctttcctcaatggagcctgcccagtgcccgcctgcccagcagaggcctggactggttgaggcctctcttgatccctcacctgagaacaaacgcctctgtgtgctcacttgctcaccctccacacctcacagagcagtggcaccaacatcccgcctttcacctctgcagtccttgggaggtgaagtgcacacctccaggtgtctccgaacctttggagccccagaaagtggacatgcttggggtgtctgagtctgccctggagatctggacgtgactggtgttttatttgccctcccttgaatcctcagatgctcacctgccagggtgtaggtctgggccttgccactgtgtccctgtgtggggctggggttggagctggggtcctccttggtgtccagagggctgagaaccacggcttctctgggtgtgctctccatctgcccaccaaggcagggccagagctgtggcgctggggttgggtgccagcccccaccaccctggttaagcccagttggctgggggctgggcagcctggtgctggcagggttggctgtggcaggatggctctggcctgcagaatgggtgtgggccagcctggcctcttgtgtcctgagatgctggccttgagatggagacacaagatgctcggtgactcagtttccccttctgtaatgtgagctaataatcagaccaaccacatagggacatggaaaaatggccccagatgacacatgtgactgacatgtgggcagcctgcagttgctggaggccgacatttcagtaatcagcaatgggggccacgtttggaccaacacaggatgtagggagacaggggctgccacgtggggatacctagggctgcggtgtgggcgggtggagtgctctccaggaaagcaggctctgtgactggtctcccgcccccgtgggagaggtattggccacatggggagtgcttgcgggggtgggtggtgatactccagggaagcaatcagtggggcatgggccattacttcaggcagcctagggtgggcctcaggctggagacccccggaggccatcaggaggcagcacgtcctggaggcagcacgtcctgctccttggaggaccaaggtcttttctttcaaggccctgcactgattgtgtcagacccacctgcttcgccagggtcacatttaagaagtcccttcacagcagcatccagcccggcgccatgccaaagactggagccatggccagacaggccgactcacaaagccaccgttcgagcgaccgggacgtgtgcaggggacgcacctgctgtctttggctcccccagcagcataggggttctctcttctcgccccctccccagcctcctcttccccttccccttcctcctcctcctttccctctccctcttcctccggtggctctgacccccacatgcccctcacccgggcttcctggtgagtcaggtttgtggatacacagtaggggggccgtcacttcaggtgccatgtgacgtcagtgctgcctcctccctgcagtcactactgcaaattccatgcagccgttggcaacagtgtcttgtcacggtaaacatgttgggcgtgggcagggtggggagaggctgggggggccaggatgctgtctgtgtgggaagctgtactccaggatgctgtctgtgtgggaggctgtactccaggatgctgtctgtgtgggaggctgtactccatgcagcctcgttctgagtcccagccggggcctgaggctggggcagcctgacatggggctggggatgtgggctcctggctcaactgtgtccggcccgccgttgggtgggtggtcattcccaccactgccatcatgttcttgtcacagaaagcagaaccgacaagcattttcctcggagtggtcaaagcccccactctctccctccaccagggtccctcgaaccccatgggaaagccacagagtggcgatggggtcccagggcaatacggctgcccactctcccactctgcacttgctggaggccgacatttcagtaaccagcaatgggggccacatttggaccaacacaggacgtggggagagaggggatgcagtgctgtggaactgcctggcccccatcgcctccaccaccacagtagatgctgcgaatctggcagtggggaccggctgaggcttggaggcaaagaggctggggacactcgctttgggggtgccagtgactccatagtcgccccggcctgatggagccctcactgtcctcttccccagaacagctccctttccccgttaggaatggggttcagctctctgcaccctgccccatgcagggctgcctgtaacctcagacagggctcctacctgggaccttgccatgggccaagaggggtgttggggtcagacccctgagcctgggaaccaccactgcccatccagaggggacacagggtcagatctaggggacctacctcaggcttcagggctggaggggctgtgctgggcagcttgtgctccgctaggattcctccaatccccccagggcagggggagcctggcctggaaaatctctgtcctgaggcccacctggggcatgtcagggtcaggggactgcagttggggccgtccttgggtttccccagggctcagtgccagtgtgcggaggcccacaccaggaagtgaacaatgatctcctctggcctcgcccagctggctctggtttcctaatccccggtcctcctggcaggggccacacactgagcttcctccacgtgcccaggtcctggcagggagcgcagaccctggggcctggtgctggcgggcaccgcaggagggcgggaggggcttcgtcccaggccctgggtctgggcagcaggtcagccagggaaacaggcttggtgctttgggccccgagtctccataactgttggggtgagtccctccccactgccatcatgctgccggcatgtccctggcatgttcaggccaaagccaggaactcaactcagggcccctctctattttcaggaggagaaaattgtagagagaggggagggcccccagacctcagtttacccactggcgacacaggggtgcctgcctgtgccctcccgggccggggcaagcagtggtgggcccagtggtctcgtagtctggggtcggtgtgagttccggttctccaggcttttttccagacaactgctgggattggtgggcgagaccaaggctcatcaaaggcacagccttgggggcaggatccccaccatgagtcagaggtagttctggggagcctgggcaggctgtcacctcctcagctgtcaggcccgaggtcctcatgtggtccccaggagaaggggcagacggccacttccggccaccagccagctccctgtgtgcctgattccgtaacatgtcccctggctgggcatgtactccccaagttctaattacatgtaactgcagagaagggctcagcctgggaaaaggatgggcatagggggtggttgggggctggggcctctgacacagctccatgagcccggccaagagtcccacacaagtcagtggcccccccggaccctgaaggatcccacatcctccctgcccttggggaggcccctttctggggtcaggcctggaagctgccccagagcttgggccccaggaatgggttggtcctcccagcgtaacgtgagcctgatcaggcctggggacctgctcagcgggtgtctgggggcccatggcgggctaaggagcctgaccagacttgcttctggcaggacacccctcccccggccaccctgggctcgcccctctagtagctgcatgtgttccccgggtgtgtgttggcattcaggctacagggctgcctcatcctgaagaaggctgcgtttacccagggagccataaagagatgacctccgataacctgaatcaatatttccccattggggctcgggcccccgcagctgtcttcttgatcatctggcagatgccacacccacccttggccctcccctgccttcctgccctcctaccctcctgccaggacatataaggaccagacccctgcccccgggcgcaacccacaccgcccctgccagccaccatggggctgccactagcccgcctggcggctgtgtgcctggccctgtctttggcagggggctcggagctccagacaggtgagagagcagacacaggggtctggggcctggcagagtgtcctgggggcagggcgaggcgggcgggcaagtcgcgtctgggaggaggagctggtcccagagtgcagcctgcgcggctctgctgaggctcctggcccgggttggtccctggaagcccccggccctgctgactttcaaggagctggaaggtcggggctcccctgctattcctttgggtttgactgcccgacgacagtgtgggtcttggggccagcaccaggtggaaacagcaggtcaggccccagtgaactgggtcattgtccataggggaggaaggggtggccaggatcccaccagaaggccccattctcaggtggcagagacccttgaagagttggggcagcacagcccttgctggggagcggggtgcccagaatgccctctcctacatcccgcttggcacccggccgcactcctcaccaggccgggggtagaagccctgagacccctgtggtggggtgaccaaggcccagcagagggcccgaggataggaaggaacctttcccggccaggggccctgtgctgggctcgaagctgcttccaggtgcttcttcaggggccttctcgagggtagcttgggcagccttccccctccgggccactcacccctcattccccgctgctccctcagagggcagaacccgaaaccacggccacaacgtctgcagcacctggggcaacttccactacaagaccttcgacggggacgtcttccgcttccccggcccctgcgactacaacttcgcctccgactgccgaggctcctacaaggaatttgctgtgcacctgaagcggggtccgggccaggctgaggcccccgccggggtggagtccatcctgctgaccatcaaggatgacaccatctacctcacccgccacctggctgtgcttaacggggccgtgtgagtgtggtcggtggcacccctcccacatcctagcaacgggggctgatgtttcccaaagggatattccttgtagccctagaagaccccttccgccccagcacacagctcaggagaacagccttgaggtttgggttcaggtcactaattcattcaacaaacactgatgagcccccaccattccccccataggcaaggggtttcagttatccctttgcctgtgtgtccctgacagcccctcccctcggagccctccaggctccggacagacttggcacccctggaggctgcatgtctctggtcctgtgcatggagtggccgtgtgtgccctccccaggctagagttacagaagccggtgcagggggctgtgggacccccttccccatccccagctattgctcccctattgtctccagaacaatgaggccctgtaagtgcgttcccatccagcgcctgcccctcttctgcctggggatttagtttcctgcaaggggccccagcatgggcatgggcaggcgggtggaggccctcaggcatgggcatgggcaggcgggtgggtagaggccctcaggcgtgagtgcgggcgggtgggtggatagaagccgtcacggatgggtgcaggcgggtgggtagaggtcctcaggtgtgggcatgggcaggtgggtgggtagagggcgtcaggtgtgggcgcgggtgggtgggtagaggccctcaggcatgggtgcaggcgggtgggtgggtagaggccctcaggcgtgggcgcgggtgggtggatagaggccgctacgggtaggtgcgggcgggtgggtagaggtcctcaggtgtgggcgcaggtgggtgggtgggtagaggccctcaggcatggcacaggtgggtgggtagaggccctcaggcatgggcgcaggtgggtgggtgggtaggggccctcaggcatgggtgttggcaggtgggtgggtagaggctttcaggcatgggcaggcaggtagaggcccttgaggaccgaggcacagaggctggggtgagtgcctctacctggaccagcaaggggcactggcaggaggtggggtagggcccctgacgttctcaggggcagcctggggggctctggggggtttgggaccccatggggggatgttccaccaagcagggggcctggaagggggctgggcagcctggtccctcctctcccaacctggtgccctcagggcctctgaggggggaccctgcccaggaccgtgccccgaggagggagtggagaggaggggcgtgcaggcaggaggtggctctgccggggaagccccggcagcggagatggacaggtgctctttggccactgcctatgtccctccaccccagaggccggccaagttggtgatcccagggcaggagctgggcctggcagagccatctccaccaccccaggtgcccagcttcagtcccctctgggcggcggggtcccgggaggacaagctggggcgggggggcctgggtggtggacccaagagtgaccccgatgtgcctccgccagggtcagcaccccgcactacagccccgggctgctcattgagaagagcgatgcctacaccaaagtctactcccgcgccggcctcaccctcatgtggaaccgggaggatgcactcatggtgctcaggggtccccggactcgtggggctggtgggggctccgtcaggcctctgggcagaccccaagggagggcagggagggcagtgctctgacccctcaccgagagggcatgggtggggcagggcctcggcagcgcggggcgtcggtgctggacttggggggcagcagcagaagccgacctggccctgacccccccaggcctcagccttcccccaaacgcactcggcttctcagggacctgccctgccaggccgctccctggctgctgaccccagccttcctgccccaccttcctctggctcaaacaagccacgagtcttgggggttcctggcggctgtgggccgggcgggaggccagctcacctgctccctcccgcaacagctggagctggacactaagttccggaaccacacctgtggcctctgcggggactacaacggcctgcagagctattcagaattc

SEQ ID NO: 3788 - DNA, 504 bp, Homo Sapiens
ttttcccccaagttttaattctaaccatagcacagtggcccctgaaacccgactcaggatcccatttcactaacagcaaagtgagtcttcccatctctgaccttccttccttccctctctcctcctccaaatatccacaaaaaattgccaaagttagtggcagaaggaaagtaacacttactgagaccctatgatgtacctggcccgttaatgtgatttttccataatgtaccatataaatcataaccctatttctgcagttaccagagcaaggtgagagtgtaaagtttattaaaccagggtcctctcctccagccccactgatggtctgtcctgactgccaggcacctgcttggtttagaggcagacaacagcagggttccaggcaggcagttgcagtcacctgggactagcaaggttttgatgcttcagtgagtgactgtgtgtctgtttttccagatgggtcatcaagtcacgaaatgaaattttagggacttgctttaa

SEQ ID NO: 3789 - DNA, 525 bp, Homo Sapiens
gcggccgccaccctgctgcacgctggcggcctggcccgcgcagactgctggctgatcgagggcgacaagggcttcgtgtggctggccatctgcagccagaaccaacccccctacgaggccatcccacagcagatcaacagcaccatcgtggacctgcggctcaacgagaaccgtatccgcagcgtgcagtacgcctcgctcagccgctttggcaacctcacgtacctcaacctcaccaagaacgagatcggctacatcgaggacggcgccttctcgggccagttcaacctgcaggtgctgcagctgggctacaaccggctgcgcaacctcacggagggcatgctgcgcggcctgggcaagctggagtacctgtacctgcaggccaacctcatcgaggtggtcatggccagcagcttctgggagtgtcccaacatcgtcaacatcgacctgtccatgaaccgcatccagcagctcaacagcggcaccttcgccggcctggccaagctgtcggtgtgcctgtggacg

SEQ ID NO: 3790 - DNA, 365 bp, Homo Sapiens
aaaaagtcatggaggggttgaaatgtttgtgttcaatgtttagggggaatgtgttaaacaaaagttacttctcaaacgatgcccaaatcttccactaacacatcaacctcccctatcactttttaaaaaaattgtaaagaggaagaggttcatctaactataaaaggaaaagatgaaggcacgtgatattattcggtcccacaatccttaagaaaaacggtattttgcaagtttgtgtgtgtgtgtgctcgcatacatgaaacgcgagtccaaggggccattggggcagtagtccaagggaagctggaaaaggggaacaagagagagtttttagacagaagaaaggaaaaaggaagaaatagagg

SEQ ID NO: 3791 - DNA, 403 bp, Homo Sapiens
tttttttttgggttagcaatacagcagctttaataatgcagagggtccaaagcaaaggaactttgcatgtatgtcttttaaaaactcaactacaactcgaaatgatgcttggggtccataagtcttctccctgtttcacagggtaaatcccatcttagatgaatggcccagtcaagaacactatgatatacgtgacaggatgagtgggaaggggttccctcatggagacatcaccatgccacctcaggggctatatgatgggtattctggagggcttgaaaatcactggttaggtggttggcttggctttttgattcggcttcttgagatgcacagtcaccttttctgattctcacattgctgctacaggggcatgctaaccttgtgtcctagcaagcaaccc

SEQ ID NO: 3792 - DNA, 554 bp, Homo Sapiens
gcggctccgggcgggcgtggccagtgactagaaggcgaggcgccgcgggaccatggcggcggcggcggacgagcggagtccagaggacggagaagacgaggaagaggaggagcagtggttctggtggaattatcaggaattattgattcagacttcctctcaaaatgtgaaaataaatgcaaggttatgggcattgacactgagaggcccattctgcaagtggacagctgtgtctttgctggggagtatgaagacactctagggacctgtgttatatttgaagaaaatgttgaacatgctgatacagaaggcaataataaaacagtgctaaaatataaatgccatacaatgaagaagctcagcatgacaagaactctcctgacagagaagaaggaaggagaagaaaacataggtggggtggaatggctgcaaataaaggataatgatttctcctatcgacccaacatgattcgtaactttctacatgaaaatgaagacgaagaagtggtagcttcagccccagataaatctttggaattggaagaggaagagat

SEQ ID NO: 3793 - DNA, 544 bp, Homo Sapiens
cactgatgcgggcatatgtctatggggttgtgcacatttctctttgtcgtggaggcggctgtggagttagcacagccaacggaaaaggagtgaaaattgaatttgatgacgatgatggtccaatcacagtggcagatgcctggagagccctcaagaatcccagcattggggaaagcagcattgaaggcctgactagtgtatagagcactagtggaagccctacagatggacttagtgttatgcaaggtccttacagcgaaacggccagctttgcagccctctcagggggcacgctgagtggcggcattctctccagtggcaagggaaaatatagcaggttagaagttcaagccgatgtccaaaaggaaattttccccaaagacacagccagtcttggtgcaattagtgacaacgcaagcactcgtgctatggccggttccataatcagttcctacaagccacaggacagagaatgcacaatatggaaaccaagtggaattgagccaaaccaagccatatcagctggtgcgtggagccgccggag

SEQ ID NO: 3794 - DNA, 381 bp, Homo Sapiens
  misc_feature (344)..(344): n is a, c, g, or t
tattggttggacgacagttggggggtgaacatggcgtcctcgacttggtctgagacgtgataggcctgccttctggttgaagatgtggcgagtgaaaaaactgagcctcagcctgtcgccttcgccccagacgggaaaaccatctatgagaactcctctccgtgaacttaccctgcagcccggtgccctcaccaactctggaaaaagatcccccgcttgctcctcgctgaccccatcactgtgcaagctggggctgcaggaaggcagcaacaactcatctccagtggattttgtaaataacaagaggacagacttatcttcagaacatttcagtcattcctcanagtggctagaaacttgtcagcatgaatcagatgagca

SEQ ID NO: 3795 - DNA, 177 bp, Homo Sapiens
agtgacggatgttgtgctcttggtgaatggggttcttcctttttttatttaccggtggctgtgcttccaatttaggaagacctcggcgacctgttcctcacccccgcttcgccctgacactttcgggatgtctgcgattcctgctgaggagagcgaccagctgctgatccgacccct

SEQ ID NO: 3796 - DNA, 1571 bp, Homo Sapiens
ctcagtttcctcatctgctgcctctccagacttctgccagaacattgcacgcgacagtttcaggcacagaactgactggcagcaggggctgctccacgagtgggaatttgctccagcacttcacggactgcaagcgaggcacttgctaactcttggataacaagacctctgccagaagaaccatggctttggaaggcggagttcaggctgaggagatgggtgcggtcctcagtgagcccctgcctccctgaacataggaaacccacctgggcagccatggaatgggacaatggcacaggccaggctctgggcttgccacccaccacctgtgtctaccgcgagaacttcaagcaactgctgctgccacctgtgtattcggcggtgctggcggctggcctgccgctgaacatctgtgtcattacccagatctgcacgtcccgccgggccctgacccgcacggccgtgtacaccctaaaccttgctctggctgacctgctatatgcctgctccctgcccctgctcatctacaactatgcccaaggtgatcactggccctttggcgacttcgcctgccgcctggtccgcttcctcttctatgccaacctgcacggcagcatcctcttcctcacctgcatcagcttccagcgctacctgggcatctgccacccgctggccccctggcacaaacgtgggggccgccgggctgcctggctagtgtgtgtagccgtgtggctggccgtgacaacccagtgcctgcccacagccatcttcgctgccacaggcatccagcgtaaccgcactgtctgctatgacctcagcccgcctgccctggccacccactatatgccctatggcatggctctcactgtcatcggcttcctgctgccctttgctgccctgctggcctgctactgtctcctggcctgccgcctgtgccgccaggatggcccggcagagcctgtggcccaggagcggcgtggcaaggcggcccgcatggccgtggtggtggctgctgcctttgccatcagcttcctgccttttcacatcaccaagacagcctacctggcagtgcgctcgacgccgggcgtcccctgcactgtattggaggcctttgcagcggcctacaaaggcacgcggccgtttgccagtgccaacagcgtgctggaccccatcctcttctacttcacccagaagaagttccgccggcgaccacatgagctcctacagaaactcacagccaaatggcagaggcagggtcgctgagtcctccaggtcctgggcagccttcatatttgccattgtgtccggggcaccaggagccccaccaaccccaaaccatgcggagaattagagttcagctcagctgggcatggagttaagatccctcacaggacccagaagctcaccaaaaactatttcttcagccccttctctggcccagaccctgtgggcatggagatggacagacctgggcctggctcttgagaggtcccagtcagccatggagagctggggaaaccacattaaggtgctcacaaaaatacagtgtgacgtgtactgtcaaaaaaaaa

SEQ ID NO: 3797 - DNA, 666 bp, Homo Sapiens
  misc_feature (225)..(225): n is a, c, g, or t
ttttttttttttttttttttttttttttttttttggatttttttttttttggcatcatttttattacaccaaattaaaggggggagttccaaaatcccattccagttaatatttaaccaagggctaaaattggattttttttaaatctttgaatcctcccttctgcccctcagggatcctgggttttaaggatatggaaacatctaattcttaaaattattccgnagctttggctgattactctgaaatttcagttaaaacttgtttcaaaagacaaatagctgacgggttcataatacattggaatagtgggatccaaactaataaaaataagctgtccaggaactagggctcaatatacattgtataaatttggggaaatctcttggatgggaatggttacttcaaggggcttttattaaaattttctcagacttactgggagggtaaagcaaacccaaatgtgtattattttgttacagagctctgctttataattttggaataaaggttcaatacagacacctgccctgtctggggcgaggatgttagaggttgatagactgacaaaaagacctgacaggggttcatgctataatttccacactttaggaggccaaggtgggaagactgcttgagctcagagtttgagacaacctgggcaat

SEQ ID NO: 3798 - DNA, 756 bp, Homo Sapiens
  misc_feature (560)..(560): n is a, c, g, or t
atttggccctcgaggccaagaattcggcacgagggaaccaactgcattggttttccatgaccttaaggcagtagttctcaactggggggcaattttgcactgaagagagcatttggcagagtctgaagaagtttttggtgtcacagctttgtggggagcatgctatggcatttagtgggtaaagaccagggatgctgccaaacctgccttgcacaggacagcccctgcaacaaagaattatccagacaaaaatatcaatggtgctgaggttgagaaaacctgacttaaggggctgggatgcttttgaactagcttaaggcccaggactgtggagtgtgtggaccaccccacagaggagggactcagatttatttactcttgctggatctgtagtgatggagttccttctggtgtcagccccacaggaggctcccaggcctccctcacttcccatacccagtctaggagctccttctggctcccaagcacccagagctttcctccgccttttagttttggttcctccactggaatgtaagctcctcacgggcgatggctgncttttcttgactttgtatcttcactgccaagcaaaaagtctgccaagtgggaatgtttaataaatattcattgaataatgaatgaaccatcttcgtacatgaataataatactgtcttacgtttttctggggctttattatgtatacattacatctgagtatttaattttattaaattttcaaaaacaatccttta

SEQ ID NO: 3799 - DNA, 281 bp, Homo Sapiens
ttttttttttttttggtttactgagaatatttccatggagtacagaaggggaaagactttaagcaaccatgatgaccttggaaactggttatgtgccttatttaacatataattataattaaagttaactaaagtctattccatcttcctttactatggttgcaagtacccccaaaaaagatggtaagctagatttgacaataccacatgcttcaaaatttaggcttgggaattgaatcttttgttatcatatgtggatatataaaaacacatttttaact

SEQ ID NO: 3800 - DNA, 433 bp, Homo Sapiens
  misc_feature (401)..(401): n is a, c, g, or t
  misc_feature (415)..(415): n is a, c, g, or t
gaactccactatatatggtcacttgaaattatgatgcaaaggtttctcttgcattgaaaccctcttggatattacagtatttttaattgaaagtcctaattctgttaaggaaaggagttgattaaattttaaggtaccactggtattttgggagattataatcagtttgttttcaagataatagaaaataaggtccatgagaatagaagttatgtgatttcagtgagttgatgtgtacagcatggctgtgctccatctgatttaccccattcttaagttctgagagtatgttctcaaggaagatttaactctctttggttttaaattactttttaaccagcctaattaaataagtcttactacttttccataattatttccataatagtttaaaagtaggngtttttttcgtgcntcatttgggcactcaaaa

SEQ ID NO: 3801 - DNA, 405 bp, Homo Sapiens
tttttttttttttttttactcgcagttatggtttattacagtgaaaagtaagaaatgaaaatcagcaaagggaagaggcatgatggggcagggtccaggagagttgcaagtgcaagcttctagttgtcctatcacagtggaactctagacagtgctaattcctcccagcaatgatgtttgggcaatacgcacagagtattgccagccagggaaactcacttgggccttggtgtccagagtttttaactggggcttggttacatagatatggttgactaccagtagatatggttgaccacccattgaccaccttagcttccagccttccagaggttgggttgatattgcaaggcctaaagccccaccataatcacattgttagcatagactatctggcatggtctt

SEQ ID NO: 3802 - DNA, 370 bp, Homo Sapiens
tttgcaaattataattgtgtacgtttaaatattaacttaatatgatgttttccttccatatgaaagaagtatgcactaccttattaaatgctgaaacaagcaaaataccatgtttgccttttaaatgtttgcaaaactgaaccaaaactcagatatttatattaaaggtgtaagagaagaaattatgtaggtggggtgtgtgtgtgtgtgtggtgtatgtgagagagagcacacacatgagagtgagagagcgagtgagcaacagtgacagagagatgaaggataggggataggggatagaggatgggggtgtgggataaggagtggtatgggggaagttgtttttgtattttatttttattttttttga

SEQ ID NO: 3803 - DNA, 547 bp, Homo Sapiens
aactttgaatgtgctttattatgccacaaattcccaggagatttaagaaatagtatttctgaacaggaataataatttcacaaatactaacactttattgacaatagacaagtcttttagggtagtgcacatgtacttaaaaactaccttctaccaatctcaacactttttataaattttcaggtgaaactgtagcagatcctactttatttttcaatggttagtgtaaaattctgtatgtaaaataagtacatattttgagatggaagaaggactgcatgtgaaatgctttgcctaagttgtaaggctcctgtctttacgctatcattaaaggccaaaaaaatcactgctagaaatgttccccaaaaaattcttaaacagctcagtctttaaaagtattaataattttgttttttttttttttggagacagagtttcgctcttcttgcccaggctggagtacaatggcgcaatctcagctcaccgcaacctgggtgacagagcaagactttgtctctaaaaacaaaaaaaaaaggaaaaggaaaaa

SEQ ID NO: 3804 - DNA, 159204 bp, Homo Sapiens
gaattcttttcatattctagatacaagccctttatcagatatgtgatttgcaaatattttctcccacagaaggataacccactgtgtggcttatcttttcattctcttagtagtgtgttttgaagaggagtagatcttagttgcctttttcttttcttttttttttttttgaggtagggtctcactctgtcacccaggctggagtgcagtggcacattcatagctcactgcagccttgaactcccgggctcacatgatcctctcacctcagcctcctgagtaactcggatgagaggtccatgccaccatgcctggcatatatttttatttttaaactttttttaaagatagagtctgactgtgttgctcaggctggccgtgaactcctcccacctcagcctcccaaagagctgagattacaggcatgagccatcatgcctggcctagttcttagtttcaatggagaccaatttattaaggttttcttttggtgtgtgagtgtgtatcttgcttttgctgttgaatctaagaaatttcaaggctaccaagattttcttctctattttcttttataagttttatcgttttagctcttacatccaggactatgatctatttcaagttagtttttataagtgatgttagattttttttgtcactgtcagtttttactcattaatatttctctgcgttcttatcatgtgtgtacataaagagcttccttttgtttttccaggtacaacagcaggttcttttctgattccgcaaagtcctgcatggggtggaggcagagacagaagagaatgtaaacactgggttccaccccctggaaattaagggaagaccccttacccagatagggactgattggagaggtggaagggaacaaggtgaaaggtaggggtcctggtaagagaaagcaggggggcctgagaacacagaggaaagtggttgagaaatgttctctcatatgctctttaagaaaagcaaatgcccctttttttttgtcccagaaagcatgtctctttatctagaattaggccatgtgcccactcctgaaacagtagctatgaccaagggatgagattttgcccaatacctcaggcctggcttgcatgtgccattcctagggccaggagtggagtcagaatcctcaaatgacatgctacacatgaggagggtgtccacactcaagtaaaattgggatggataccaagagaaggggttacgttcccttctcacaatgcctctgttcaagtactacgggcttttagaatttgccatactgtacccccaccccagcctacctcaccctggtctctctgaggaggggccttttacttctctgaatgacctgtggtactgattttctgcatttttcaaattttcaatcatcctacttgttaatttactttctgcagatgctgtcatctccctgctctgctatgtcttcattcctcacagtacctgaacacaaagctgtggtgttatcagactttaactgaaggtttggggtcccgaagaggattataacatagcacaaaactcaaaattgaacattgatgatgtcattatgaatatccaaaagttccctgaccaaactcattttaaggactgcggtaatttaaaagtatgtctacaaattagttgatacttctttattcaaaaggtggagccgaattcccctccccttgaatgtggactaggagttagtgactcactttcaacaaataatgtgtggcagaagtgaagatatttgacttctgaggctaggtcatacaaaggataaagtttctacctggctcgttctctttaggatcaccctgggggaagccagctaccatgtaatgaaggtactcaagcagccctgggaaagaaccatgtgaaaagaaactggggcctcccaccaatagccagcatcaacttgccagccatgcatgccatcttggaaagatatctcctagttccagctaagactttagccgcctataaccccagctgacatcttgtttgcaacctcatgagaagatccttagttgaggggcaaccaaactcctgacccacagaaattgtgagagataataatgcttattgctattttaagctgcaaagttttggagtaatttgctatgtagcaacagataagtaatacagagagtctctcatgggccgttttcttccgtcttatctgccatcttgccttgatccttccgcttttttcatctctttttcttttttccttgccagagctccccaaacccagtctctagagggaatgctcaaaattactgtatttcactttgcagagtaatttaagtcttcttggtctaaacatctcccatctagattaagcccaagggattccatctttttggaccaaacatacctgttaaggtccaaaacagatattctgtcttcctaccaggcccagtggcatcaggtccagtcagacagctgccagcttgccctaatagaagtagatataggcaaagtactataagagcaaaaaataagaagcatgtaagctgacttgggggcttatggaggaggtaacatttgagctgagtttttaaggatatgtaggagttcatttggtagagaagtgaatgaaagttagttatgcagagtaaaagcaagtaaaaaagctcagaggtgagaaaagttataatcaattctgagaactttaaatatgtaagggttctgggtgacaacatctattagtgagcttggaagctgttgggggctagataatatcagacattgaaagccacacatatcaggagactacagacaacataaatctctgattcactgacttaaaaataagaacaataaggaatttagtatttcaaataataagcccaaggtaagactgctccaatatcttaatttagcagcttgatgatgttatcaagaacccagtttgcttctgtatttctattctgttatccccagtcttgtacccccatgattataagatggttacagcagctccaagcatcatgtccttaagattacacctggacagcctgggcaacatggtaaaaccccgtctctaccaaaaatacaaaaaactagccaggtgtggtgacgtgtgcctgtagtcccagttactcaggaggcaggaggattgcttgagcctgggaggcagaggttgcagtcagccgagattgcaccaccacactccagcctgagtaacagagtgagacccatctcaataacaacaacaacaacaacaacaaaaagatcacacctggaagtagaaagggggccttctcttctttttcggtcattatataaatttttttaaaaaagaaatgggctcttgctatattgcccaggctggagtgcggtggctactgataggcacaatcataacatgcatccagaggaaactgcaaatataattgtaaggcaagcctttaaagagcagttaaaaacttgttttgaaatacgggtttctagaatttgtttcaacatgttgagttacagcaaatgaaatggagaaatagtctcaatgctttttaactcgccctgctgactggaaaccttagaactcagccttatgagctgttaatcagataagcactgcaggtttttgcaaagaatcatgcttgacaaatgcttgagggcatacggatttattgaaggaagtattgtccaaacaagactgacaaaattttacaaagaaaatagaattttaaaatgttgggattaaaatgtagatcttatcggagtatggcggtgtgcgcctgtaatcccagctactcaggaggctgaggcaggagaatcacttgaacccaggaggcagaggtggcagtgagccaagataacaccactgcattccagcctgggggacaaagcaagaccccttctcaaaaaaaaaggtagtttcttttctgttttgagatgtagttatgaaatgtaaattagaggatgtttcaatgaacttttgaattataagttaatatagtttaaaaaccatatgaattaagtactatttaaaaaataggtaggaattatacttccactcaaaaacaccttgaactcctggcctcaagggatcctcctacctcagctttctaagtaactgggattacagctgcatgccaccacgcccagccccattatgaaaagttttcattgacttatacctgtatcgtttttttctttcaataattttggtatgaatgtatctctttttaagatgaagaaaactttccctagaaatgtcttccctcctccctgggcattcttctcaacagctgacttccctttcatattattagctaaaattgtaccatatgcccatttaaaccaatattttgtgagggtatgggcccaccatgattgacttagacaatcacaatttatctcctgggactgaggttggagcctagcacccttcaagcacatggccaagcatattcagtgtggttacttgtcaagctaacaaggtagaagagagagcctacttctagaataggctatcagcgggatctcccacgccatgctaaggaatttggaccatatctcattggaataagaaactactatgggatcacaggatgggctaaaaaaataataaggaacttctggaagaaggtacttctggaataggctgtcagtgggatctgccacaccatgcttaggaatttggactatatctcgtcagaataagaaactactatgggaccacaagatgggctaaaaaaaaataaggaactagtgaaggattttagatcaggaagtagcatgatgaggtttcccaatggtaacagaatcaaggggcactcaggaggggcatgggtctgggggcagggccaccagttggaaggcttcattagaagatcttggagaggattttaggcagttgaattaagcacccctagtgactcattggatggaaagggagaaagaaagttagaaggaagatattctaggatgactcccatacaggttcctgctctggtgaatcacagggtattttgtcaagatggagaatatggatggaggaggtttgggtggatatgatgagagtggagagataatgagtttatttgggacaatggggtgcctgaaagacaggtgaagagagatgggtaaacttggaagggagagtgtagaccacatgacactcctccaaattcctttagagggtagggtgggatggagtgtggagggaaggagaatccacaaggggaaatgaagcaaagcaaacaactagcacctaatatgggacctgttgggctgattttgctcagggctgggcatcaagcacatctggagaaaaattgcaaatgtaattgtaaggcaagcctttaaagagcagttaaaaacctgttttgaaacataggtttctataacttgttgcaacatgttgagttacagcaaatgaaatagagaaatactctcagtgctttttaatttgccctgctgactggaaacctcggaactcagccctatgagctgttaaccagataagcattgctggtttttgtaaagaattatgcttgacaaatgcttgagggcatatggatttattgaaggaagtattgtccaaaccagactgacaaagaaagttttacaaagaaaatataatgaaaaaatgttgggattaaaatgtaggtcttttctgttttatgatgtagttatgaaatgtaaattagaggatgtttcaatgaacttttgaattataagttaatatagttcataaaccataggaattaagtactattttaaaaataggaattatacttccactcaaaaacacctattttgtggaacactaaagtttgaaatatatatgtatagagattagacttagaactcacagaaggtaaattcaagaaatttttaaaaattactccaaaacattattttagttctttccatatctattttgttctaggaactgaactgggttctgaaataataaaaataactggtatctgtataatgttgtggttaatcccaactttatgcaactattctattcaatgtggtttctgggggtccagataaaatataacacttgaagcagagtggggattgagggacagagaaaaaaaaactgagaactgagaattgaagaagaaaggcaaattaggaagttcaacaaggttaggagagtagtggagccaaaaaaacaatagtcatgagaactgaatatagaaactggacaatggctagatcttatatgacaattagaactctgacccacaacctctacagcaaccagccgagaataatcaggacttggtcaatgactcagtttccctgttttttgccgcctcctttcttcaactcagaacccactaaagacagccaaatatgctacctaccccaaaccaatcacctaagagacactacttttgttagcccacctccagctttcccatgctaataccctcaagtcagagtatacatgaaaccttccctttttgttcactactaagctttcctggccaggtgcagctgctcatccctgtaatcccagcactttgggaggctgagacaggaagactgcttgagcccaggagttcaagaccagcctggacaacatagtgagactccatctctacaaagaattaaaaaaaaataagctgggcatggtggcacgtgcctgtagagccagctactcaggaggttgaggtgggaggatcgcttgctcaggaggtcgaggctgcagtgaaccacgatcgcaccactgcactccagcctggatgacaacagagtgagaccctgtaggtaattaagtaagtaagtagttttcctaatgtcctgacaggctttgagtcggccaaatgcaagtgatggtgactgactcccttgtcatagtaagctttgaataaataaagcatttgggtggtcttcctccccgatcccccccattcattcatttgcttattaattatacattagttgtgttttatctgccaggcagtggccagtattgggaatatgtggaagcaaatagtccctgccttcaaggatattctgtctagtgggacagacagacagacatatacgtataatagtaattcaacgtgctaagtgaaacaataggcatgtataaaaaaggtgtagtaggtcaagtagggcttttaggggaaggcgacccttaagatgggtggtaagggatgagtaggaggtgatttggctaagaggctgggacggttattcaaggcaggtggaggggcagaatgagcaaaacaggacgcgttgctggagcgtggtaaggaaggcaagtagcggcagaggacggcggtagggcggatcgtggggcgcaatggatgtgccacgttggaaagagcttggactttatgccgtcctcctggaaatgagataacggctggtgtaagcaagaaagaaacacacacacacccacgcgcgcgcgtcgtttcctttgtgttactgtaaggtcaaggagggcggcgacacagaaattcatgatgactggcataagcagacattcaatgaatgaatgaatggacataagcactttggtgtaaacgtcattgtcttcgatttctgttttctcacggggcaagacagtgaggtcggggcatcagtttgggaggtgatagggaaggtttaaggtgagagaactgccattctggtagggagggtcagtgggcacaaaaccaacaataggttatgggcaagggatgcgcttcggtcgcgaacaccctgaacccacctaccggagctactctgtcccaggagcggccgtggagaaagcaaccagccgagagttcgcgccccagggagggaagcgggcacagggccgcccagcgccactcacctgtgagctctccgcgggccctgcaggcggagcctcggtacgacgcctttccgattgggcgcggctcaaagtcccggggcgggcatcagaggccgagcgctctaggggattggccaccctggcggacggacgtgctgctgaccgagctggttcgcccccggttcggctcgtggagagccggcccctccgtgagtcttctgtcagtcattggctccctgcggtttccttggggacgtggcgccgccgccggccgggccctccttccggctgggcaaggggccgcggggagcagctcgggactgaaccgagaggtgccgaaggaaccggcgggccgcttgatcccgtgagtgtgggcgcgagagggctgtgggacccggagggacggggagaggaagcgggacccacaccccgccacctggggacgaccggttcctagaggacagagctggcccacgagaacgccccgctcccaggatgcccgggtagggtcccctgggcctgaggaaccagagcagacggagcgggagcctggggaggaggtgggagccgtggaattcccgtgcaggtttgtctcgtgggctcagtcggacagaagcctgaaatcaaatctttctaggctgcagacgtaggagatgcctgggacaaggaggccaccttctcagggcaaaagaaaaagaaggtgacaggcgttgagaccaccgaagggaacccatggctaggtaaggctgcacactttccctccggctgggagcacggcagaggatggcaggcaggttggggggccctgggaggctgtcccaagtgaggtttgccctggagctgcacttggactttgtattctggttagttggatgcagagacgatcaaagttgtattatttcgagggctgataaataatagtttctagcccatagaccaggagtggtagagtgagtcggcttgctcagctctgtaaagtgcaaggttgtaacattgattcagattcgcatctgagcaaggctaggtgccacttgaggaggttaaacaaagaagtttttttgttttttgtttgcagtgaactttaaaagcagacagaccgaggtccttttgaatcaatatacaaagtgaacttcacagatgaatacacttatccatacattataataacctgaagcttttaaaaaatattaatgtggatctacatgcaccaataagggaaagttataaaataaagtgggggaaagatgcagaacagcaggtatggtggactaccatttgtgtaaaaccgagggaatggatacgcacacacacacacacacacacacacacacacacacagagatatattactgtaaatatattggtgtatatttatgcttgtgtatccgtagaatatccctggaaagatacacagcaacggccaggtgcagtagctcacgcctgtaatcccagcactttgggaggccaaggcaggcagatcacctgaggtcaggagttcaggaccagcctggccaagtagaaacccggtctctactaaaaatacgaaaattagccgggtgtggtggcagtcacctgtaatcccagctactggggaggctgagggagaagaatcgcttgaacccaggaggtggaggttgcagtgagctgagattgcgctactacactccagcctgggcaacagagcaagactccatctcaaaaaaaaaaaaaattacacagcaactgggtagtaatgtttgcctctgagagattgtggggtcagggcaagaatcacttttcactatacaatatatccttttaaactgatttgtcttttactatgtgcttgtataatctggtaaaacatttttaaaatcagttaaataaattttctgaccatcctgtttcttgacagaattcttggttgggaatactgtagttgctctgattctccaatgttatgaggttgcccagggagactggtgatcttttcactaacatgagattaagtctttgaattgcactcaaagtgcagtttggaaaaagggcagataaggcttttctgatatatatagtagaagcaccatgagcttcttctaaaattagagatgacaagaacatttagacttctgttggcatggatttttgcctttattaggagggttttatccaattttaaaacgatatttaagcactcagttgtagaaatgtttcagacttactaatgtttgtctaatttcaggatcagtttttcctacctctgcccagcctcctggtacttcactgtgcccacagtgagtccatttctccgtcagcgggtggcattcctgggactcttcttcatatcctgtctccttttacttatgttaatcatagactttcgacattggagtgcttcattaccacgagataggcaatacgaaaggtgagtcagctttagattttggcactcaagtcataaatattttcataagctgtttaacacactactgactttgacccttttgggtgatactgtacttttattagtaaaattgcatgccatttattacataaagaagattttaagccctattttggcaatatgcagtttggtacaggaatactgatactgcatgaaaggcatctttgtgttttcttgttttggtgggctgaaacttattgtgtgtataaatgtttaggactgtattatacctttatgaatggacccctttatcattattaaatgattttctttatccttgattatatactttgctctgaaatctactagtctggtattaatatagctactccaactttcttttgattaacattagcatgacagatatttcttctatagttttagttttagcctattggtgtctttatataagtgggcttcttgtagtcagtgtttggttgggtcttgtttttttatccaatctgactatctctgcagttaattggggtgttcgggccatttatatttaatctgattatttagtatgtttagttttaatcttgctatgtgtttttcatttgtcacatttgttcttgttctttttcctctttttccctcttcttttcagttgagcacagtttttatgtttccattttatctctcatgttggcttattagatataacttcttctttttttagtggttactttaaagtttatagtgtcatctttaattatcacaatcttccttcaagtaatattactcctcttcacatctagaacaagaacctaacaacagtatactttcattcctcccttccccttggtctttctgctactgtcatgtattttatttctacatgttataagctccacaatatattgttattatttttgtgttagtcaattgtcttttgaagagattttcaatataagaaaaaaaggcttatgtatttaaccatattgttgcctgaaagggtcatataagcaaagtgacccttgaatgctgaagggacggagaaaccaaaggaggaggcaggcaaattgttcgttggtattcattgatttattgagggaatttgcagacagaagcgtggccctgggtagctgcaagacagatagatctccatactgttactccccagacccagggcttatatagtacagggagatggtatatgcaccctgtgcaagacaattaaagacagccctccagaacaggtaagaatgctgcatgtgccatatcctgtcatttgtgtgccaacaccaaggttgacatgttcttacagtagtaaataaagcaggaatcaagaggcatttacgggactgaggctagtcagaagtcaatgtggcagattaacatccaagatggagtcacttttgtctatatttaccatttctggtctgcttcattcctttgtgtagatccatatttccatctggatccatatttccatatttgcttttacctcaagaacattctctagcatttctagtagagcaagtatgcggtgataaattctttcaacttttatatgactgaaaaagtccctattttgctttccttttgaaagaaatgttcattgggtatagaactctaggttgatcattttttttcctttcattactttaaagatgatgcttcactgtcttttggcttgcattctttctgagatgtctgctgtccttttaatctttgttctctctgtatagaatgtatctttttcctctgaatacttttagaattttctgtttatcactggttttaagcaatttgattgtgatgtgctttgatgttgttttctacatgattttatttgtttttttttttttttgagactatctcgcgcatctcccaggttggagtgcaatggtgcaatcatagcccgctgcagcctcaatctcctgggctcaagctatcttcctgcctcagcctcccgagtaactgggactacaggcatatgccatcatacctggctaatttttttgatttttagtagaagtgaggtctcgcagtgttgctcaagctggtctcaaactgctgagctcaacctatcctcctgcctcggcctcccaaagtgctgggattactggcatgggtcaccgtgccctgcttacctgattcttgtgcttgtgatttgttgattcttggatctatggatttgtagttttaatcaaatttggaaacattttgtccattacttcttcagatttttgttgttgttgttctcccctgcttttcctctggggactccagtaacatgtatattgaactatgtgatgttttcccacagctcactgatgttcattttttttccagtcttttttctctctgtgtttcattcgtatatttttttgctgctttcaaatttgttagtatttttttctgtagtgtttaatctactgttctatccagtgaaagtttgacatcttttttcacagatagtacatctgaattattttatatacttttagctataccagttgcacagaaggtctatatttctttatagcagtgattcattttgctatttttttgagattagtttttgatgaagctacaaaattaaataatggcatgttatgttcattatcttcaacatgattttcttattaaaaaatttttttctttagagacagagtctcactctgtcacccaggctggagtacagtggtgcgatcatagctcactataaccttcaattcctgggttcaagcaatcctcctgccttggcatctcaaaatgctgggattacagatgtgagccactgtgcctggcctcatttttaaaatatttacattttctttttttttttttttttgagacagagtcttgctctgttgcccaggctggagtgcagtggcgctgtctcagctcactgcatcctctgcctcccgggttcaagtgattctcctgcctcagcctcctgagtagctgggactgcaggcacatgccaccatgcctggctaattttttgtatttttaatagagatggggtttcactgtgttagccaggatggtctcgatctcctgaccttgtggtctacccacgttggcctcccaaagtgctggaattacaggcgtgagccaccatgcctggcctaaattttctttttattgcttctcagatatgtattagttaagaggctttgggctgcaaataacagcccacattgacttaaacaataagaatgctcacatacctggaagtccaggggtagaaggactacaagttcaacactggctgacaggatgagaggctctgtctctcctgtctgttgtccacagtgtcagtttacttaatggttgaaaaacagcagactgccgggcatggtggctcacgcctgtaatctcagcactttgggaggcggaggcaggtggattgcacgagctcaagagttcgagaccaacctgtgcaacatggtgaaactctgtctctacaaaaaaatataaaaattagccaggcatggtagcatgcacctgtagtccttgcttcccaggaggctgaagtgggaggatcactggagcctggggaggtagagaatgcagtgagctgggatcacgccattgtactccagcctgggggacagagtgagaccctgtctcaaagaaaaaaaaaaaaagagaagaaaaacagcagacagtagcaaccagggcagcatatatattcacttatgtcccgtaggagacagaaaggctttccatgactctcttctaagaatggagaagagccttgccagaaacctctaacaaccatttcctggaatcttttttggtcagaattgggacacatgcctaccctcctttttatttctggattctgtccccagattttctcatttcccattcactttggtcattcattcattcattcatcattcattcattcattcaacaaaaatttgagcagccactatgtgcagacgataataggcatcagacaccagatacagagactttggtacattttctcaagaagcttatgttttcagccttgccttcttctagcagcccaattcatttgtatttttggcttgcttttcttttttttttttctttttaaacgttactgaaatagagatggaggtctcactatgttgcccaggctggtcttgaacacctgggctcaagcgatcctcctgctttggcctcccagagtgttgggattgcaggcatgagtaccatgccagcctcgactttcttttcctttccagaagaggaaacactgtttggatgattatagtaatcaacaactgcccttaagaaatgtactaaatttggagacctaaatccataatttgagtttgtttaatgcttatggaattttcttgacagacctgcgcatagtttctcacttgaagacgacatggtctaattatggacttccatgtaggttagttaatatggctaaagacaattagggagtgaatggtgagctgtatggctggagagctagatcaagctgagtctgttaagctattttagagggtttaggcattaccctcagggcagaaggaaggctttgaaaggttttgaagagtgaaaaggttggaactgctttttaattttttttttttttgaaacagagtctcactctgtcacccaggccggagtgcagtggcgctatctcggctcactacaacctccgcctcccaggttcaagcaattctcctgcctcagcctcccaagtagctgggattacaggcatgtggcaccatgcccagctagtttttgtattttttagtagagacggggtttcaccatgttggccaggctggtctcgaatccctggcctcaagtagtccacctgcctcggcctctcaaagtgctggggttacaggcatgagccatcgtgcccagccagaactgcttcttaaagaaagctcactttggtgggattgtggaaaaagaattggagaggaatgaaaaagaaagcaggaagagtaattgaactagagatgctccttgacttatgatgggttatgtaaattgaaatatcataagttgaaaatgcatttaatacacctaacctaacaaatgtcatagcttagcctagcctactttaaaggtgctcagaacatttacattagcctactgttgtgcaaaaccacctaacagaaggcatattttataataaagtattgaatatctcatgtaatttattgaatactgtactgaaagtgaaaaacagaatggttgtgtggatactcacggtatactttctactgaatgtgcatcacttttgcaccatcataaagctgaaaaatcataagttgtaccattgtaagtcaatgactgtacctcaatagagagatggttgtggttgcaagaggatggagagaggtaaaagcatttaaatgtatgtgggtggcagagtgatctgataattcttgtctatcactgtatcccaagtggtcagagccaataaatacttggtaggttgaattaattgaaacaagttagcaatagagctgaggaacacatagactgtgccactgtggcgacctcaccaaagtcctaacaccctggaatgctgtggctcagagctcattgttacttaatgaaaggttctgtatatattgccacaaatgaccatttatcattaaacttcactcagggcagcctccatgagtcatttaagaggcaaacatttattgagggtttgctgtgtcgatgactctatgatagcactggagtacaaagatgactaaacatagcccctgaactcaaggagttcgtaatctagttagagaggcaggcataaaggaaaaattatttcccagtgagataatagtttaggtacggttgtatagaatcaggagtgaagaatcaggaactatgtacaaggttaagaattaggaacaaagctaagaatcagaaattaaacagaagaagttcttgagcaaccaaatttgatatcactaagttcatgtgctaaaagcacctgtactttactgataagataggctctcacataaagcctgttagcttttattttacacactgttctcatttgcatggttctcacttgtctcagaacacagtagataacagcaaattggaatggtgggtggggtgtgttgttagatgtgggcacattatgacaataatcagttatatctggcatcttgacagtgaagcaggagagaggaaatttaataaagatagactcaataactcaaaatttctacagacagtttctatagtggtaaacagttctacatatgttgttaaaactgttttattacatagtctaaaaatttatgttaatgaaatgataatctttttttttttttttttttttttgagacagagtctcactctgttgcccaggctggagtgcagtggcatgatctcagctcacttcaacctccacctcccaggttcaagcgattctcatgccttagcctcccgagtagctgggattacaggtgcgcaccaccatgcccggctaatttttgtatttttagtagagacagggtttcaccatgtttgccaagctggtctcaaactcctggcctcatgtgatccacccacctcagcctctcaaagtgctgggattacaggcgtgagccaccatgcctggccattaatgataattttaaatcagaggttttcaacctttgtgtatctaaatcacttggggacctttagaaaaatgcaaataattgggactcttctcaaggtgaatctaatataccacctgggttgagaaaaactgctttaagatttggttacatttacttaaggaggtattgtgaggtaagggaaagaatgttaatattagagttaatcagcccatcatttgctagttgggtaatcttgggcaggtttcttaatatcctggaatttcatattctttatatataaagtgagaataaaaatagctgtcttttagtcttgtcatttgcataagaagagtagagcatctaggaatgtcaggtgcattgattgactaatcaaatgtcaatctattatttgaaataatcttgatttttctgttttccaattctcttctctgcctgaaaatatacactgaagataatgggcgttataatctctatttaaaattttgatgaaatgattaagcaagtaactaggaattggtagaaacacttgctaccttaatttaacagcttaaaaaagttttaacacaagcgcctgtagttgtgatttttttatattatattcatatatagacatattttttctacttaaattgttcctaattcacacagtgaaattatatccgtactttgtggtgtccctcagaaagtgtgctgtcttccaggaacccacttacacgtgtcttcatgggagcaagtttgcaaacctttgatcaggaaaatgtgcctagaggaacactacatgcattctttattttattttatatatcttttttttttttttttgtagagacagtgtctccctatgttgccaagcgtagtcatgaactcctaggctcaagcaatccacctgccttggcctcgcaaagtgctgggattacagatgtgagccactgtcctaggcccattcattgttttatggtcttgacaaataaggcattgctttaattagaaatgatagtctctcttgcacattgcatctttgtattttaatatatatgaaagcagttaatgtttaaaatattttaattacttttgcattgaaaacagatatttcaatgtgaactttttataggcattggtggaatttaacatatcacttttcaggggatattaaccaggactttagaagcctgtcagggggttttctctcagtagttccagaactaaagacttacattttttttctttattgtgaacatgtatccatattgcttctggaaagagagagtaggaagtttgcatcaaaactagaatttatttgatacaaaaaaagtaaatttagagagatggggtgtcagtaaggatagaatccaaaactgtgttttttttaatacactttttttagagccattttagttttacagctcatttgagctgaaggtgcagagatttaccacatatcccctgaccctacacatgcacagcagagctgtttttgagaataatacttgtgttagatgtgtggtttttttttttttttttttttttttttgagacagagtcttgctctgtcgtccaggctggagtgcagtggtgcgatctcggctcactgcaagctccgcctcccgggttcacgccattctcctgcctcagcctcccaagtagctgggactacaggcacccgccaccaggcccagctaattttttgtatttttagtagagacggggtttcaccgtgttagccaggatggtcttgatctcctgacctcatgatccacccgcctcggcctcccaaagtgctgggattacaggcgtgagtcactgcgcccggccgagatgtgtgttttaatcaactatttttctggcatgtgccacataagacatgctccaatattttcttcagactcaatacatatcttatatccatttattcatttatctgtttacttattcaacaattatcgagtgtctacactgtggtatcaaatagggtagtcactacccacaagtggctaattaaatttaaattaattaagattaaatgaaacaaaattcagttcctcacttggactgggcacatttcaaatgctcagtggccacatgtggatatatgggacagtgcagatagagaacattttcatcatttcacagagttctgttgacagtgctaagtgtaccatgttttaatttctgctgtggatgctgggtaattgttaaaatttattaatttttcatacagtcgtgtgttatataatgattgggatatgttctaataaatgcatcattaagtgatttcatcattgtgtaaacatcatagaatacttacacaaacctagatggtacagcctactacacactgaggctgtgtggtgtatacgctcctagcctacaagcctgtacacatgttgctgcactgaatactataggcaactgcaacacaatggtaagtatttgtgtatctaaacatatataaaaatagaaaaggtccagtgaaaatatggtatcaaagataaattgggtctggtatggtggctcatgcctgcagtcccagtactttgggaggctgaagtgggcagatctcttgagcccaggagttccagaccagcctaggtaataacatggtgaaacctcatctctacagaaaatttagaaattagctgggtgtggtggtccatgcctgtagccccagctacttgggtggcggaggcgggaggatcacttgagcccaggaggccaaggcttcagtgagtcgtaattgctccgctgcactccatcctgggcaacagagcaagaccctgtctcaaaaataataataataataataataaaataaattgtacacctgtatagggcacttaccatcaatggagctcacagaactggaagtttctcagagtgagtgagtggtgagtgtgaaggcctcggacattactgtagaatttataaacactgtacatttaggctacactaaatttatttaaaaattatttaaaaatttttttctttcttcaataataaattaaccttaacttactgtaacttttccactttctaagctttgaaatttttaaaaactttttgactgttttggactaacacaacttaaaacacaaacatattgtaaagctatagggaaatattttccttatagtattcttattctataagttttcttctatttttaaaaacttaaagttttttttccttttaaaacttatttgttagaaatgaaaacagaaacacacacattagcctaagcctgcacaggatcaggatcatcaagacatcattaagtaataggaattttttcagttccattataatcttatgggaccactgttgtacatgtggtttgctgttgactgaaacgtcattatgcagtgcgtgactgtgtaagaggaacttctagcatgtatacatagtgtacaagacactgtggtaaactgttcttaaatgttctgtttaatacctttcctttttcacattcatgtttaatattgttcactttttggtagcctcactgttatcttcattagtgggtaaaattttgtctggttgaactattgtctgaagaatgtcttttgtagctattgaaaggtggtgccttcatgttcctttaccatctggaaataactgaatgagaggttctgtgtcagcaattggcttggtactggccttccataggtgtttcaattctgtttaattaaagcaagtcaaagagaagcattgcttttggttagaatgctctttagcatatacagatgaaatgattaggttcttatgtgcaatagaacagttcagagatttttgatggtgaaattgaaagcatttattcacgtttattttattatttatagagtgactcaagccatcctcctgcctcagccttcctaatagctgagattataggtgcatgccaccgtgcctggctaaatttctttttttatttttagagacaggggtctcactatgttgcccaggttggccttgaacacctgacctcaagcagtccttccaccttggcctcccaaagtgctgggattacaggcatgagccactgtgtctgtcccacatttattcagttacttgatctttttttttttttttggaaacagggtctcactttgtcactcaagctggagtgcagtggcgtgatcatagctcactgcagcctcaacctcccaggcttaagcaatcctctcacctcagtcccccaagcagctgagaccaaaggcaagcaccaccacacccgactaatttttatattctttgtagagatggggtttcgccatgttgctcaggctggtcttgaactcctgagctcaagcaagccacctaccttggcctcccaaagtgctggcttatagccatgagccaccacacccagcccatttatttgatcttaatggtgttttgagcaggactttaaattatagatgttcctgactgctctgattaatcttgttaggaggcaagcagtaatcttacaatatacttttctgggtatgtattactatcatcagtcatgcacagctactttaactgtaatatcattatatttggttctgagctttgaagagagttgaagagtatgatgacattcagcaaagaattagtagccccatactcatgggggctacttcaattgacttttggcccatcactgagctctgtttgaactctaaagtggtataattagttttgattttgtaagctaggtaatggtttgcttagttacagctctaacgctgttaatgctttcaggataatggcagtgaaaagccattgtcttccaattccaccctgggtgatatatttgtgggtaactttcttttcattgactcagcagtgactagaaggaaatcatgtttcttaaacagaggaggtgtgtgtgtgggtatggtattggggtgagtatgtgtgacagtgaatcagacctctttagggaaggtggatgtgagggatgccaaggcttttgagacttttctcttgggcttttggtcctctttagagattggctagtgtggcatcggcaaaacaggagggtccagcaatgcaaataattggccatgatggctaaggccatggctacaaattatatatgacaaaaaaaaaagaaactatatatgaaaaaatgcatgaaaggtctggtgatccattcattttaggagcctaaatagaggaaggcttctagttggttgaaagtgtaagaaacctgattaggtcataagaggtcagagttccaggaaaaggtaatatggctactgcccagaggggaaaactgttctttagttactagtttgtatgcacaatgagaaaaatggagactttccactgcataaatgccatttaggcctatcttcctctttagtgatcaaaggtcagctgacattttagccaaagcacacatggagacttcgaaaggaagagaaagaaaagttgagttgcaccaaaactggagctgtaaagttccttattttggcaggaatcagagaggataacaagatactttatttggaaagcaattaaaactttctaagaaagagaccagttgattttgaatagagctgtacaaagacacggaggagttaacagaccaacagctccattttgtgagctctaggaccaaaccaatcaatactatttgatacatcttttgggcagagaaacatgagaaactctgtgacaatatcaaggtagtatagataaggtacatgttcttgagaaacttatggtctaaacaggtagagcaagcaaatatgaaagaaatcttaggggctcatactgaaatataaacagggaatattgacgtccacattttagaacagaaggaagaggccttttcaaatcattctgggtactaccagtcagcattgttgggtagaggctttttaagaactgagaagccatgtccaaggagacaggagaggggaaggagtaggtagagaagcagatggatgttaaagagaaaaggaaggctgtattagaacagtggttctcaagagtgtttagtggcctttggagggtctctgagacacttttgggagtctgtgagggtgaaactattttttataatagtactaaaatgttattttgccttttaaaactatggttcaaacatatacaatttaccatttttaagtgtacagtcagtagtattaagtatatttacattgttgtgacacagatctccagaattttttcatcttgcagatcataactctgtatccattaatgaactctccttttctctctctttccagcgagctgctggtaactaccattaaattttctgtttctactttagatacctcatataggtggaatcatacagtatttgtctttttgtgcctggcttacttacttagcgtaatatcctgaagattcatctgtgttgtaacatgtgacaggatttcctcctttttaaggcggaataatatatcattgtatgtatatacaacattttgtagatccatttatctgttgatggacatttgggtcgcttccatctcttgactgttgtcatgttttttacctttttcactgagttgattgatacttgctttgatggtgcaaaagcaatggcaggtaaaaccgctaataatgccttagtgcaaatcaagatagaggcaccacattgtactagtagttactatattcttcattgccacacaattgcattggaagaaaagattcagttccacttatgaatatcttttcaatattctatgtgatgaaaggggaaataggtattaagcacttctgctatatgctgaagttgtctagagtaaaagcacttgggcagttttttgaattatgaggtaaacccagctgcttttatcatggaacactatttttagttaaaagaatgactgccagaaaaactaaggtttcagacttgtgtattttatagacatttccttgaaaatgagtgaaataaacctgtcacttcatgaaaaacagttttcagtatttattgccaatgttaaaatttgaacttccaagtgaaaattagtattttggaaaactgtatctgccactgtgaaattggatagcttcccaatacttaaaagactttttgagtaagattggtagtgatattaatgaatgtgtgtttttttttttaaggattgtagaatgaaatgtatcagtgttaggaagatttgcataactcagtgaaccaattattttccaatagatgatgttatgaaatcatgcttggataacagccattcaaagtgcatgttaaacccatgttttttaatggattttaatgtaacagagtatgaaaagtttttagatagggttttagattccaattgcaactcatctttttttaggggggtggggtggggtggggtttagattccaattgcaactaatttttttttttttttttgagatggagtctcgctctgttaaccaggctggagtgcagtggtgcgatctcggctcactgcaacctctgcctcccaggttcaagtgattctcctgcctcagcctcccgagtagctgggactacaggcgcccgccaccacgcctggctcattttttgtatttttagtagagacggggtttcaccatgttagccaggatggtctttacctcctgacctcatgatccacccacctcggcctcccaaagtgctgcgattacaggcatgagccactgcgcccaatcgtgactaatctttaagaaacgctacttgttgagttttagtatagtatcaaagaagagtattcagaatgatctgaaagggctgtttaatactcctcctgtttccaacagtgtgtctgtgtgaggctagattttcacacaaatgcttcaatttgtgtgaaaattgaaaattgaaatttttcagtattgttttgatatattgtaacagattgaatacggaagtaaatgcgagaatctagggtcttctgttagtttggctactaaagatatttgcaaaattataaaacaatgccactcttctatttttttgttttaggagatatgcttatttttataaaaatatatttatatgtaatgagtttattttatttaaatgaaatacttaacatttttatgttttattttctaatatagtaaatatagatagatacaacctatgtctatgaaagctctttggggttcaataagttttaagattataaaggagtcctaaggcccccaaatttgagaaccagcgcactagagaaaagttattcattatgcagaaggggatgggatccagaatcttgcaagagacaagcagagtgggtggttttcagagaagggaagcaggaagattctgtgaagcatgtgaaatagaaagattgctatgattggaaatgaaaagtcactttggaatgggggtggattatcttgcctatttcttttttatctttggccttttgtgaggtcagtatttgcaagagttctgtgacttgaacccagacttttgcccagctctcatatgatagaagtgagctgttgctagttgattggtggattctagcccagttcagcccagtgatttgatttatgggaagatatgtggtgaaatggaatctttagcattagaaactttctgttatgtaacagatttttaccatctgcttcatttccctcaactcactaccatttcagatccagaaaaaaagttctacctacccctactctcagtaataatttacattatattgaagctcagttccctgttctcttttttaaaaaaatgcattttgcattgtaatataggaaaggtactctacttttttatttcagaattatttctacatgcacttctttttatcaagtttgcttttctgcccaaataaggaatagtgtggttttgtctaacgatgtgaaatcaccaataaacactggctagattggtttcaggagcgtgatgcgtggtttgttgttctgattgggggtggttttattgtgaagctaatgatccctataccttaaagcccctcacttacatgggctttttttctatttgtaatgctgaatcttgtttttaaaagaaggctttccaaattctgttagcttcagacatcacaaaagctggttctgaggggttctgtgtaagagccttggagatctaggagttggctttaaagacaatgttggatgagcagggcagatagctttttttttttttttttttttttgagatggagtctcgctctgtcacccaggctagagtgcagtggcacgatctcagctcaccgaaacctccgcctcccaggttcaagcgattctcctgcctcagcctcctgagtagctgggattacaggctcccaccaccatgcctggctaatttttgtatttttagtagaaatggggtttcaccatgttggccaggctggtctcgaattcctgatctcaggtgatctgcccacctcagcctcccaaagtgctggcataacaggcgtgagccactgcgcccagccaagtgctcagaagtattttaatcaactcttagtcttctttattttctgaacttttaagcctttttcctcagagtcttctactatttactttcccaatgattattctgttaacagcggcagcacagttctgctatgtgtatgatctctgtgagtgtagatacccttcactctccttgttttacagatgaggaaacagtctgagagaagtttattaacttgcctaaggtcacacagcatagaaagcaatagagctgagattcaaaccttgctatgtttcatggaacacctttacttgtttcatcttcctgatgtcagccagccagatatcttggaatgagaatctgaaaaaattccaacacaaaatactaatgtcctaggggccaagaattattattattattttttaaaaatataatttattttttaaacttggtggtaggtacacaggcatttgttttattgttattctttataccctatacatattttattatcattctttttatgtttataaaatatttaggccaggcgcggtggctcacgtctgtaatcccagcactttgggaggctgaggcaggcggatcacgaggtcaggagatcgagaccatcctggctaacacggtgaaaccccgtctctactaaaaatacaaaaaattagccaggcgtggtggcgggtgcctgtagtcccagctacttgggaggctgaggcaggagaatggcatgaacctgggaggcgaagcgtgcagtgagctgagatcatgccactgcactctagcctaggagacagagcgagactccatctcaaaaaaagaaaaaagaaaaaaaaagatatatgtatatatataaaatattgtagaaaagaataattattgtttttatgaattacatttttaatgcaattctagcaatataaatacaaaacaaaaagcaaaaccaaaaagcccaatcaaaaatatcaccacccaggcgaggtgcagtggctcatgcctgtaatcccagcactttgggaggctgaggcaggagaattggttgaatttgggaggcagaggttgcagtgagctgagatcgtgccactgcgctccagtctgggtgacagaataagactccgtctcaaaaaaaaaaaaaaatcacctcccagaaactcattaaatgagaaatcattccacaatattctggatgcatctatacagaaagatagaaaagaagtgattaagattgtctcagttatctagtgtgcgttaacaagctaccccaaaacttaatagcatataacaaaaaaccaattatttattcagggctacaagctctaatgcttgaaaaaagattgctaccttagccagtttcagagctgcccccacacgtggggacatcttttagtcatctaatttcagtggcttctaggcaagtgaaccagctattgtctcaagcacatcagtaaatctgtcaatattgcttcactcattggttaggactggtagtcccatgtgcttagcacatgtaggcacttaatgaagattcatgaacaaatgaagtaagtgagggcgcctttcatggacctgactgcttagcactgatttctctttttgcctgacttaggtatttggctcgagtaggggagcttgaagctactgacactgaagacccaaatctgaattatggacttgttgttgactgtggcagcagtggttcccggatttttgtttatttctggccaagacataatgggaacccccatgacttgctggacatcaaacagatgagagaccgcaacagccaaccagtggttaaaaaaatcaagccaggtactaatcagaatatattttgttgtcagtctcttttaaggcatgaaagaggagacaaaagaagcagaaagcaagctacccctttcttcttgagagtctgggtaatgggagggatatctctttcattgtcaccccctacctctcaaataaataaatgtttaggaccttgaggagaactttatagggtatcagtttcctgagtcttatgtgagccgctttttaaagaaagttttgtctgtttgtttgttttaacttaaggaatctctgcaatggcagacactccagaacatgccagtgattaccttcgtcctctgctgagctttgctgctgctcatgtgcctgtgaagaagcacaaggagacccctctttacatcctctgcacagcaggcatgaggcttctccctgagaggtgagatgcagggtacaggaaacacaggaaaacggtggcacaagagatgaaaggccagtttcatgcactgtcctctgtggttccctggtctatacccctaaacccaattatgacacaatcattcattcccaacttcttgtcatttgctgctttgggatcagtatctatctgggatgactatagtgattcttagtttggattgagggttgggagtagtggtgatggtaatagatttggatcatcgggcacatagagaacataattacagaataaattaggaagagggtcacctgatgacctggatacttagggactagtcagagagctctggtaggaacactaccttttctgtaactctgcctagaaccctggcaataactgggggagtccctcttcttgctgctactgcaaagctcagtctccattgccttaggcctgttttctcagccccagccagtcacatcatttccacttgacctttgcaattcagcctgacaccttgccacctgatccctcttcctgcattagaggaagaggaagagaaggctgtatttaggccagactccttgtttgtgatttctctcctttggtaccaccttgatccgtccatacttacgtaggccgggggaagaatgagctccctgactttttttttaatgatttttattttattgtggtaagcatacaacatgagagctaccctctaaccagatttttttctttttttttagagacagggtctgctctgttgcccaggctggagggcagtggtgtgatcacagctcacttcaacctctgccccccaggcccaagtgatcctcccacctcagcctcctaagtagctgggactacaggtgggcaccatcacacccagctaatttttgtggagccaggtttcaccatgttgcccaggctggtttagaactcctgggctcaagtgatccgcttgcctcagcctcccagagcgctgggatttcaagcgtcagctaccatgtctggcccaacaaatttttaagtatacaatacgttattgttgactgtgtgtacagtgttgtacagtggatcttcagtgcttattcatcttgcttaactgaaattttgtgcctatttatttcccttagcatattgtcgttagtgttcatccaccttgtcacatattgcagaatgcccttttttatttaaaaaagtctaaatagtattccactgtgtgtatgtaccatgttttctttacatattcatctgtcagtgaacatttaggttgtttccacatcttggttattgtaaataatgcttcagtgaacatgggagggctcatatctctttgagatcctgattttaaatctttggaataattagccagaagtaggattgctggatcatatgacagtttgattatttatttatttatttatttatttactgagacagggtctcgctctgttgcccaagctggagtgcaatggcatgatctcggctcactgcaacttccacctcacaggctcaggtgattctcccacctcagcctcccaagtatctgggaccacaggcatgtgccaccatgcctggctaattttttgtatttttttttgtagagatggggtcttgccatgttgctcaggctgttcttgaagtcctgggctcaagcagtctgcacgtcttggcctcccaaagtgctgaattacaggcgtgagccaccgtacccggcctatatttttaattttttgaggaacctccatactgttttgcagagctgctgcaccattttatattcccaccagcagtatgcagagtttccaatttctccacagccctgccaacacttgttgtcttttgttttttggataacagccatcctgacaagtgtgaggtgatatgtcatcggggttttgatttgcatttccctgatgactagggatgttgagcaacttttcatatgcctgttggccatttctgtgaatggagaaatgtctattcaagtctttagcccatttttacattgggttaataggatttttgctgttgagttgtaggagtttctaaaatattttaaagataaaccccttaccaaggtatagttcgcaaatattttttcccattctgtagcttgcctttttactctgttaattttttcctttactgtacagaaatttttagtttgatatagtcttacttgtttatttttggttgcctgtgccttttggtgtcatatcaatgagaccattgccaaccttaactttagaattcatcctcctggaatgttcatggtctcataggcatcaggtatttccttattagcttaaatattttcctttggtcaacagcagtttttttttttttttacaacgtttaaattttatagttggctttctttccttaaatcaacagcaaacaacaaaaacctcagccatacatgtagggctccaaggcttatgtcagacatgtagacaacataacatatagcagcaatgcttctttcagtggactttttttcacagttactggtttactgactggtttactgttgagaagcagattatttatatagccatttgtcaacatgagaggttttttagttccttattgccccatacatttcagtctttaaaaaattttttgttttgtttttacttatctttaaaaccaaactttaaatattgtaactgcagccttaactccttaagggaaatcttaaaaatgaacaaaacaatacaatacaacttacaaccctgctaccctatcaaaactgtttcgttttgttgtattccctcctttctgttcacatatatgtaatttccacaaagttgcaatcatactgtgcatgcaattaagaatttttatttgacataggtgatattcatattgttcaaaaattttagaaaccctgggaagaatatagatgacacaagagcaggtgccacatcacaaagtctataaaaggccaaggaaaggggagggaggccagagaaaaagctgacctggaggttaaaaaggcagaattgaccagctgagctgggcagaggaacccacttggtagtttggctacctttagtgtgtttggaggaaaggagattgttgcctcacctcctggcactgttcggtattacctctgtcaaagaagtttccatccaaacaaaacccactgtgtagctccaccctttttgtctaagatgttagttgtcaatgtggaaactctgaatattaatatttattgtatctaaagaatttttaaagaaatttgccttttttttttctctttcaacttgttttctggtcacctctctaaataatgcatacatctgttctaggcttataaaatcattgctgcctctaagtccaagcgagttgttggcataaatgtgactatcagtataagaacctgttttgtatgattaaaggtttgctaatttattagcatttgtaagcagattcaaaatagggttgaaccatttagactatattttgaatttattagcatttggttttatttctttgccaaaggcctggactaacagaattttttctacctcccttttattttgcagttaaaaaaaatcccttaaaaattacaccataatacaaggtggtgtttaataaaataataatttttattttaggaaatttcacttgtgtataaaagtaaagagaacagtgcagtaaatccccatttacccactacccagctttaacaattatcaacatttcgccattttaaaagcattttaaataaataaacaatattgaattttagaagatgaaagctttatcctgtcactatgtatacatgaagaatgatttgggtttttgtttttttagcataaatggaatcacattatacatactgttttgtaaaatgtattggacatctcttatcttttcatgtctatacatgtagatataagtagacttcatttcttttaacatctgtatagtattacattgcatggctgtgccataagttatttaaccaatccctatggtatggtatttccagtttttcattgttataaataattttcattgttataaataatgctgcagtatttctcttctttattttattgtttgatgatttccttggaattaatttctaaaagtataacagctggatcaaaggttaaacacattgaaacattttgaagcatggtcctggattgccctttagaaaggttgtactagtaatttatttatttatttattggagatggagtctccctctatcgcccaggctggagtgcagtggcatgatctcggctcactgcaacctccacctcccgggttcaagcgattctcctgcctcagcctcccgagtgggattacaggtgtctgtcaccatgcctggctaatttttgtatttttggtagagatggggtttcaccatattggccagactggtctcaaactcctgacctcaggttatccatgtgcctcaccctcccaaagtgctgggattataggcatgagccactgcacccagcctgtactagtaatttgcataactaacagcaacatatgttgttgcccattcttccatatcattgccaaaaccaacgaaccctctctttgaggagtttagaagcatatccaatagggacagaagaataccccttcttggtccccatttgaaattcttattgcaagaatttaatatgtataacaatgaactttttttaagaaactatacttgacattatactggaagattattacttcaaatatagatcttcactttgaagtgctaacaacattcttcatcaagtagtactgacaactgtctgagccagcagaatatttttgtattgaatattttttaatccaagataacttgtcttattttaactaacattttctctagatgcatattattacttctagctttgtttctttgctttcctttgcttgataatattgattacatgcttaaaatgttagaggaaagacaaccctatagatacaaagtttcaagtgttttccccaaattggaaatgttgttatgtcctctggattttgatcctgatctagggttttcaaatggtaagattttcacaatgaaaaaaaaatcaacccttgaaatatggaaaaggagattaaaaagttaattgtggctgggcaaggtgactcacacctgtaatcccagcactttgggaggccgaggcaggtgaatcacctgaggtcaggagttcgagaccagcctgactaacatggtgcaaccccgtctctactaaaaatacaaaattagccgggtgtggtgatccatgcctgtaatcccagctacttgggaggctgaggcaggagaatcacttgaacctgggaggcagaggttgcagtgagccgagatcatgccattgcactccagcctgggcaacaagagtgaaactccgtctcaaaaaaaagttaattgttagcttatgtaaaggattacattaaaacttgtggaaccaacagtacatcttgtgtggtaatgtgaagcattgtttctatgttgtgtaagatttgaggatgagattgtgttccttaatttaacatctttgttttacagtagtgaggaataatgtaattacatcaattttatagtttatgcaacttggctgcagtttcctgtggcttgtttgtactcagcctgtgagagtcatagaaccgtagtctcatagcctcatcttttaacactctttgaataataacatcatataaggggaaagtattactattaccatgttgccttttaggtaggaggctatacctggaggcagtttaaacttttaaaatcaaaggcggtaccaaaaagaagcagggctggacaagtagatgaggtaggtgaacagtgaggtcatgacaaggctaagtagaaggacaagttgaggcagtttatgagaagagagtttagtgactaactttgggattttttgttctttcttgcaggaagcagttggctatcttggctgacctagtgaaagatttaccactggagtttgacttcctcttttcacagtctcaagcagaagtgatctctgggaagcaggaaggtactgggccttaaggggtgcagctggttaacctctaagccaaccatggcacagcctctctaacgggtgtttagaattattctatatatcggattttaatttttctgccaataattttcttgattctgctacatagttgatttgattatttgcatattttgcattggcatctgtttagaatgctggttctggaagtcaaaaatgtatatctctttttaacttagtactaagcaatatgtttataagaatgtattagtatttaatgatttcagttggatatttggttagctaactgtacttttgaaaacatatatagttctaggagttgtattgagtttgtcaaagtcaaatgtaaggtaaattattaaagtaaggagaaactttaattccaagggatgatcagaatgagttacttttgttttgttatgccttcattgcaattactatgcagtattgataattccctggaatctcacactattgggtttgtacttttagagtgaatatgtgttctcatgcagccaaattggccagtttgatgaattatatttccatttcttataaacgagaaggagatttatatgtcttctaattgcagacatatacatgggaaaagatttaccttttaaaatttcagtattgcatttttcagttgtaaaatttctattttgatcttcttaatattctatttcttttcttttctgtttctttgctgagaccttctatctttccattcattgtaggactgcccatatttcttggttatatggttgctctaatatctttgataattccaatatatgtgtcatctcagagttggcatcttttgattgtcttttctcttgtgagttgagattttcctggttctttgtatgccaagtatttttatattccatcctggacattttgaatattacattatgagactctgggtcctgtttaaatcaaagagaactttttttttttgttttaggaggcagttgatctcaagttctgagctgctttctgtaggctgtgaatctttttttttttttttttttgagacagagttgcactcttgttaccaacactgagtgcaatggtgtgatctctgcttactgcaatctccacctcctgggttcaagcgattctcctgcctcagcctcccaagtagcttggattacaggcatgcactaccatgcctggctaattttgtatttttagtagagacagggtttcaccatgttggtcaggctggtctcaaactcctgacctcgtgatccgcctgcctcagcctcccaaagtgctaggataacaggcgcaagccactgcggccggcccgtgattctattagttcatttttcttttctttctttctttctttctttttttttttttttttttttttttgagacagagtctcgctctgtcatccagactggagtgcagtgtcgtggtctcggcccactgcaacctccgctccctggttcaagcgactctcctgcctcagcctcccgagtagctgggactataggcgtgtgccaccacgcctggctaattttttgtatttttagtagagacggagtttcactgtgttaaccaggatggtcttgatctcctgacctcgtgatccacccacctcagcctcccaaagtgctggaattacaggtgtgagccaccgtgcccagcctattcattcatttttcaaagccttggccactgctatttggatttgtcctgtgtatcagccagtggctaatctggaacctgggcagtggcctagcctgtagttcagctctcagagctgtttggatattgtttagggtcagatccatgtatttgtagcttggaggtgagcccaggggttcatacacaactttgctccctactgtctgtgatccctctgccactttctggttccttggagctccctttcatgatcctcctgtcagaataccagggctttaatttgcccactctctgccatgcacttctcatgactgcatctgcatccagggccaagcggtaggaggacagagggagcctaaataaacaataggatttgtttcacagtcttgaagctacagcttctctggtcagagaaaagaattcaaagccctcagagttttaggtacctgctcaaattctacctctgttgcctaaggttagagagaacaaaataagaaagaaaaaaaaagcaggagatttcccttattttctctgaacttttggcattcctttttctgttctttggaccagaaaatgagttgaagttcctctgttcacacctggtgtttactttcatgtttcaagctgctcttaagtctagaccaggtaatatctgagggggaaaaaatgggacactcactactggcttggtggtagtttaaaccctggtctctttcccggtgtgctcattatcatttactttcagagtttccagaaagctgctccatgcattctatctagagtttatatttgtattcagtggggagacaagattgcccagaactagaactccaaaatttacattttttcttttttttcgatatcttcgtgacattcagatgatttatacttcttagacatttgttatacaattaatttctattcattgaggaaatttagaagatgcaaataattttaaaagggaaaaaaatcacaagatgaaagatttgaaattcctacattgagagtatggaataaaatactatgattactttttccaagaaaaagaggaaagagaagccctaagggagaggtgtatacatggcatagcagtagagaattaagtgagggcttttctgtttcttacttaggggtttatgcatggattggaatcaactttgttttgggaagattcgaccacgaggatggtgagtaatattgtctttttatgacagtttacctaagggctgaagatttaagttataacctatcagtagcatgtaaatgcaaattttgagttgtttttcttttttcaaacataagatgcttcattttccagtcctaatttgctttctttgatttctttttaactttttaatatggaaagtttcaaacattcacaaaagtagaataataaaatgaacctccatggacccattacccaggctcaatatttactaatgttttgccatttctcccccatatccccccatgtattaaaggtttttttttctcattgaatgttttaaaaagcaaaccccagacatgtaatttttattttcatgtatgtcagtatgtatctacaacagataaggggtttcaaaatgaacaaaaaatatatccataatgccatttttaaatttaatagaattaacaatttctaatatcatacaatacgtatctaataccctatccaggtatagattttcctgattttctcaagaatgtttattcgtagtgggcttgttcaaatcagaatctgaacaagggtcatgcattgcatttgattaatatgtctctttagtctcttttaatctataattgttaaccttaccacctcactcccctgcctttaaaagcaagaaaaaattggatcacctggtagaaagaatttgccacatgctagatttgattgactgcatctttgtggggttaacatgttttctttaacatgtttcttatcccctcatatgtcctttaaactggaggtcagatatagatgtttgattagactcagattcaattccatctgcaagactaaatcatagaaggcgctgtgtgttttccactactcacatcaggagttttgtaatgtctggttgactcactttttgtcatgctcagactgatcaggtattgagagttcaagtattatcagcctgatctaacttagtattaaaattccttatctgcctttcatggaattgtggtaatagccaattgtgatcattgcttggacatgtttttcattagagattgcaaaatggtgatatttctaattctgtcattccttctgcatttaacagctagaatttttatgtaatgaacttttcttgatcaactctttggttaccctgacatatagttcttatgggaaagacagaataaatccttgattctttttatttatcacatttctgaataatgagttggtgtctagcaacttccaaaggtaaccagtgaaaaaaaagttttaattattattatgaactcatggattttaatatattagatgcattagagcccatcacattattagtattttaaggagcatctttaggttggctgctgtatccttttaatatgaccccaatactcttttatattccccttgctatctggtacagcaatgtattccagggtcatcttgtatactttctaccctagacctggcattggcctgtttttaaaagagccctggtttcttttagtaaaagatggtatttagagattattggtccagataccacaggtggtcattactcctgggatatcattgcttctaggcctttcagtgaacacagctaggaaatatgtattttttagaaagagaaaaataaatgagttcatagtcatatttctgactcatatgtaagattatagggtgctattaatttatttgatttttatacctatatcctttttgttctgttatgctgaatctttgttcctaaagatattgacataaacatttatttgttttattccacaatatgtttcataattttttttttttttttgagacagtcttgctctgtcacccaggctggagtgcagtggtgcaatctcggctcactacaacctccgcctgtcgggttcaagcgattctcctgcctcagccccctgagtagttgggattacaggtgtgcagcaccatgcccggctaatttttgtgttttagtagagacagggtttcaccatgttggtcaggctggtctcgaactcctgaccttgtgatctgcctgcctcagtctcccttcataatttttaaataataaaaccaacaatattgttaacaagactactgcgatgtagcttaagatatttgtttcttttgtccttaggctatatcctactagggatacgtagtcaaaatgtcatgtttaagtaattcacaagaattattctttgtgtaatatatagttgattcagttagtatacttgtttgctttcttttttttattttgagacaggttctctgtcactgaggctagagtttagtggtgcgataatagctcactgcagcctcaaactcttgggcacaaatgatcctctggcctcagcctcctgagtagctgggactacaggtgtgcaccaccatgcccagctaattaaaaaaaattttttttttttatgagagtgtctcactatgttgcctaggctggtcttgaactcctcggctcacataatcctcccaccttggcctcccagtgttttgggattacaggtgtgagccatggcacctgcctgctttcaaattttcaagggattgctgttttgggggtttgacttaattttattttttaattactagggcctttttgttctcttatttatttcagaatcagatgctgaggctacccaggaattggcagcaggacggagaaggacagtagggatactggatatgggaggagcctctctccaaattgcttatgaagttcctacctcaacctctgtccttcctgcaaagcaggtactttaccttttagggaaatttagttgctaggaatgctagtatttgagaaggaaggacactgtctttggacttagaccaacctacctggctctaaatatttgttcagatacttgctagcttgcgttatcttgagtaggttacctctctgagcctcagcttcctcctgtgtgaaaaaggaataataatagtatctacctcataaagttatgaggatgaaataataccatgtttgtaaagcatttagcaaactgtccagcataagtgttcaatacattttaacaattataactatactaggtatctcctgccattgctgaggataaacatgataatgcatttacattctggagcacagtatttgatacatatctattgttcaataaatgttattccctttccccttactgatgattccattctgggccttctaataatccttaccccactagaatgtaaagaatgtattttgagggagaagtttcatcctacacagacactttttgtacagccattatgtacacctattatgtacacccattatgtgcaaggaatagacaatattatgtacaaggaatagacatgtgagttacactgtccctaaaaacttataatttatctgtcagtggagacagcttgtgatatcagggagactgtagcagtgcttaacttgatctaaaccagggcttctcatcgttggcactcttgacattttgggtcagataattctttgtcatcaggggttatcccatgcatcatatgatatctcttgcctataccagatgtcagtaacaaccctcccccttccagttgtgacaatcaaaagtgtctccagacattaccagatgtgtggggcagggtggaaattgcccatcattgagaacatctggtttaaacagagagctgtggcaatatggggactggcagccaacttagcttgcaaagttgaatgggagccattcttgcttcatggaaggtaaagtatttacctgggccttggatgagagtaggcttttttttttttgcagagtggaggctgagggaaggccacctgcatggagggaacactatatacaaaggcacagaaaaagcagcacagaggccagaatgtccagggaatgacgaatagccttttgcagtataggattttcaggtgtgctagtagttaagactgggaagataagatggagctaaatcatgagcagtattgagtgctatcataaggggactggcttttatttccatagatagtggaaaaccaccaaaagtttttgagtaaggcagtcacatgggcctcagtttcatttataaaataattaaactgtgaaggtccttctcagctctgaattttgtgatgatgtcagttgtgtgactgtgatctgatctttttgtagtgaaaaaatttttgtgtcagtaggagaaagaatataggtcacggaaccttgagtgagaagtaataaagggctgagttagacaaagtaagtggaaatgaaagggaggggacagatttcaggggatagtttggagtgaaaacccaatgtaattgagcgattgattgtggtagtgtgagtagggtgggaggatggccagcagtgctgaggatctatcctagataaccagaagactgaggaacccagtaactgagagaagagcaacaggggtaagggcaggggtgatattaagcaaacagtattgtcctgagagatctggatgagagcgtctatctggtcttctagttcagaagttgtaaaactaatgacttcaattttggatatattgagtttaagatacccaaggaacatatatgtcagaatatccacaggactgttggaaatgtgagtttagcagtcagcagagaatttcatgctggggttggaaatgtgggggactaactaggttgtgatactttttagtctatattcgttagtatgtatttaacaggtaaaacgaaggcatggatctgatactaagaaataggtgacaagcgggactggggcttcaagtcttaaagaaatgacttttgtgtgtgtgcagatttagaaaggaacatggttatggaaagcaacactggtacggaatgcatacttgcaagcaacaaattagatttacatatagcaggccgggcacggtggctgacgcctgtaatcccagcactttgggaagccaaggcgggtggatcacctgaggtcaggagtttaggaccagtctggccaacatggtgaaaccccgtctctactaaaaatacaaaaattagctgggcagggtgggcaggcacctctaaccctgctactcaggaggctgaggcaggagaatcgcttgaacctgggaggcagaagttgcagtgagccaagatcgcaccactgcattccagcctgggtgacagagtgagaccccatctcaaaaaaaaaaaaaatagtaactacacatagcaatataatggctcttcaagatgaatcttagtgcttggtaaaaatgaaagaaactgtgagacaatggcatttaaaacattttaaataatcctgaatgcctaatatatttttttgtacaactcacaaagttatgtacattcacaaagttgtgcagccaccactattgaattccagaacatttcatcgccccaaaaagaaaccccatattcactccccactcatttcccattagcagtcactcctcattctctcctctccctacccctgacaactattcatctactttctctctccagtggatttgcctattccggacattttgtataaatgaaatcatacaatatgtggtgttttatgtctggcttcttttatttagcaaaatgttttcaaggttcagccatctcgtggtatgggtatttcattcctttttaatggctaaacagcattccattgtatgaccaaccatgctgtattttgtttatccatttatcagctgatgaacatttcagtggttttccctttttggctattatgcacagtgctgctgtgaacattcatatacacatttttctatgtacataagtttttttgtttttttttttttttgagatggggtttcactcttgtcactcaggctggagtgccatggcacgatctcggctcactgcaacctctgcctcccaggttcaagcgattctcctgcctcagcctcctgagtagctgggattacaggcacccaccaccatgcctggctaatttttgtatttttagtagagacggagtttcaccatgttggccaggctggtctcgaactcctggcctcaagtgatccaccctccttggcctcccaaagtgctgggattataggcatgagccaccatgcccaccccagtttttggatctcttggtatgtaccttggagtgaaattgcagggcacaatggtatttttcacaaattaaaaagaaatacattcaaaacaagaatcctcattttataataatacatatatacaaaaattatacataacacattagaatggttgcccatggcagagaatggaatgagattaagtatgaagataaaagagaataaataaataaagcaaaagagaggctttgccatgataatgtggaatgagctgaggaatatgattaattcagcctctgcccttgaggttcaagaaaaaaatatagcaccttttcattggcggtacaataaaattgaactttcccaatccccaaacctgtcataaggaaccttagggcttcttggataatgttagaaaaggccacagaaccgggcacagtggctcacacctgtaatcccagcactttgggaggctgagaagggctgatcatgaggtcaagagatcgagaacatcctggccaacatggtgaaacccgtctccactaaaaatacaaaaattagctgggcatggtggcacgtgcctgtagtcccaactactcaggaggctgaggcagcagaattgcttgaacccgggaggcggaggttgcagtgagccgagagcatgccactgcactccagcctggtgacacagtgagactctgtctcaaaaaaaaaaagaaaagaaaaagaaaaggccacagaatagatcttatgatgatccacagagttccttaaatttatttttattaaaggatgttttcctattaaaataacacattcccattgagggaattggaaaatacagaaaaatacatgtgagaaaatgatatctgtagtaattctacctcctatataactacagatagtgttttgggtttctaatttcatatttagttcttaatttagtgtctaatttgtaccttttagtgcagtcttgtcattttgtgtctttgtttaaaataatgctatgaggatgaaagaatgcttaagatgttttaaagagtagtcatagaaatgaagcctcgtgtattagcaatgtcatagctttctagaaggcaaccaaaactaaaattccctttttctcttggtattgtattataggaagaagctgccaagatcctgctggctgagttcaacctgggctgtgatgtgcaacacactgaacacgtgtacagggtttatgtcacaacttttctgggtttcggaggcaactttgcccggcagcgctacgaagaccttgttctgaatgaaactcttaacaaaaacaggtacatttgatatgggatctgagtttctgaaatataatgtcaggctgcagatattagggagaaatactcacatcctcctaagacagataagtccctgcttcctccttctttctgactacccctgccaatggggtagcatctcttaaagacctctattagcagtcccactctgggtgagggtgcattctgatctttgttattaggactcataaagtacagtagcttattgtgatctcttgctgtttcccatattcagacctaacatcatgggaaaagggagatgaattaaattgccagtttaaaatgtacaatatatagtgtagctgctagcagttccttctgcatggaagtgttcaagacatgtttgttgaattacagtgcagttgcatcttttgtgagagttcagttctgtagtatgtctaaaagataaaaagcaagcatagttaaaattaacttttaaaatggtctctcatcaaattcataatagtcagtttttcctttagcattggacagatcacagattcttcatttgagtaccagatgaagtagttagaccttaatgtacaaacagtggtgggatttcttgtttcttttttgttttttaagtctgtaaaattatttattttatcattaagcacactgaaggaaagcataagagaaagcagagttcttttccatcattaaatttacacaaaattttggaatgaaaccagtttaagtaattgggtgattgattgtggtggcgtaggtagggcagggaggatggccagcagtgctgagggtctagcctaggtaaccagaagggtgagaaacccagtcacggagagaaggaccacagatgaaagggcagggctgatactaagcaaacaacacacttacctacgtatacttaaccatttagctacgaacactagcttgaagaagtactggtataccccgtttgtaataatttatccacagcaatcaattatcttatatttacggcatgttgaagaaaatattgtcccataagtctattttgtttttgtaagtcttagtctctaggagttcaaggtgctttgggagaatcctggtgccctggatgattgactaatgcattaaaatcaagtggtgtgtttgtattctgaaagtactcctaaatctatacaaacattgcttgggttgaggtgctcagatgtctcctgcaggcaccatgatgtttgaagatcatttgttttgaaagtttcacaccagttttggttttccttcttcattagctgctgtgcttccttttccattttcttcttttgttctactcctttcttttctgtctgctgttttctgctgcctccaaactacttcttgccagactgcatcttcttcccatgcgttggtattttcttgccaagtagctaagtcacctacatcaggtgactgatgagtaaaaggcatatcttgtgtagctgccagtctattaacctatttcctgagatggcaaaatgatcattgtctcttctcaataacaattttctgagttttccttacagttggtgtcacatccttaaaatagtcggttccagttgttgtaaagtgttctgttgtactgcctcattccattctcaccctcggtctttacacctgtgggcgcatcctcattctaagaagtccactcttcaacatctgtctgtttaggaactgatgaataattaactgcaattggcaaagttacttggaccccaacttaatttctgtccttggacagatcttcatactcatcattttgaggaatgagaatatggttgctaggcaagtataaactcaaaataactggacctgtgttacggccatggtgggaatcaaagctttccagtcttctccccactcagaggctccaggctctgcaggtggcttcctggagctggtgctgtgcctgttctgttccagcactgctcattcagaggcaggcatgggctccatcaccattgccagccattgcacatgggccactgccgtggtctgctcttcaggaatctctccccacagtccttcccacctcaccccctaccagttgtatttttaaacattagaaccacactccgcacgataaggtccttgcacttttaggaggtacgtgggaatgaagaccagatggagaacagcagattcacatctccaatttcactacagactaggaaatacacatgttgactaaaatgtcgaacagaattgatcaccatattcctctcttttttttctaaatttaacttgctgaagttaaatgtttatgtgatgaaattgcactccatcctcgtttctagagatatcatgaaaaccagtagtaagatatttctgatgcacattgtgtttcttagactaggttgaatacaggcatgacgtgtttgtttgtttgtttgtttttgtcattgtggcagattgcttggtcagaagacaggtctgagtcccgacaatccatttctggatccctgcctgccagtgggactcacagatgtggtggagaggaacagccaagtcttacatgtccgaggaagaggagactgggtgtcttgtggggcaatgctgagccccctgctggctcgctccaacaccagccaggcctcactcaatggcatatatcaatcgcctattgacttcaacaacagcgagttctacggcttctctgagtttttttattgtacagaggatgtgttgcgcattggtggccgctaccatgggccaacatttgccaaggctgctcaggtaaattattaatgataaacatggcttatgctggcagcagccatttattgaatgcctcactctgtgccaggtgctgtgcaaagggctttgcatacagaatctcacttgttctttgcaggagccctttgaacactcattttacagatgaggaagtggacagagaacttaaggatctagctatgctgtactgccttctaattaactaaatttattttccatggatgtcataccacccaaattattacccaggcataaaatttttgtgttggctaatggtttttcttccaactttccaatagtcttgtttaatgtttatgcccaagaaatgtcacctccagtatttttcctcttgctagctattttctgttgtaatgtgcttttggagatgatatcacccagaggggcaagcccatctttcttttgggttgaggtattaagaggcagagtggtatggggtccctgggaatattagatgttgtaaaaagcaatgatggtggaagtttgtttagatttaaaatagaggagtaaaaattcactctgagcatatataggacttaagcatcatataagtttaaatcattggtacctggacagatgaaagtttagccagctttctatcattttctgctttatttagggccatctctttgaattgttgcgtgtctctatctttttcatcagagaaacgaatgggagaatctgtcctcatatttctttttttcttgagatggggtctcgctctgtagcccaggctggagtgcattggcatgatctcagctcactgcaacctctgccttccgggttcaagtgattctcctgcctcagcctcccgagtagctgggattacagatgcccaccaccatgcctggctaatttttattatttttaatagagatggggttttgccatgttggccaggctggtttggaactcctggcctcaggtgatctgcccgccttggccccccaaagtgctgagattacaggcgtgagtcaccgtacccagcctctcctcatatttccctccctccctcccttccctccttcttccctgcctacctttctctttctttcttacaattctctagggttctcttagtgtaaggcttccagcaaaataatatctgcagtatctgtactgttctgttcccaaaagacagtccttaagaaatactgtgggacacctggtttgtatttgctcctttctctccagcctccaggacgaccttcacgctccctgtttttctggagcccagagctccctaactatccatggcctgactctttctcttatctcaaaacttcttcaaattctattcccttgaacaccaaaaggctcaagttattgggcttaacatattatcttttccaggtaaaagcgatttttttcccttacctttttaactttgactcaaacgttatcttcccagagccaccttctgggaccactctatccaaaatgacaacgctccccatattacctgttgccctttcctgctttatttttccctgagcatttatgttatccaacgtaccgtgtgtgtgtgtgtgtgtgtatgtgtgtgtgtgtgtgtgtgtgtgtgtgtgtttattgtctgtctcctaccactagaatgtaagcttcctgaggacaggaatttttgtctgttttatttactgcatgattccctggcatctagaacagcacctggcacatagcagacatacaaaccaaaaggaatgattattttggtgagaattacaacaccgagggaggccaatgacaggtttctaaccatcctcttccatctgctctccctgctcatgtcagtcctatgtggagtagaatgaaactatctttgtcttttgacgttgctatttgttagtcctaacctcagcccctctgaagcctaagaggctcagaagccacatcaagctggcttggtgctagacatgggatgacgggaataaacaggggtatgacgcagtgtttagtgaatgaacacaccatttctgttttcctttgtcagctggtagcccacaagtaactttagaaatggaacagctgtgactgtggggaaggtagagagtttgcctccaaattcatgttgcactatttctctgtggttgatccaggattactgtggcatggcttggtcggtactaactcagagattcaagaatggcctcttttcatcacatgcagatgagcatcgactcaagtaagttacttccctttcctccttagatgtggacttaaaatctagatggcagattataatggagagtgagcaataatgcagattagatttcatgttgagggagcatttgattattccagacttgattttctcagggataggggccaaaatagtgagcctattatagcaaagccagaagaaatcagtggttaccaaacagagttctcaacaagtgatttgacaacaaaagtgatttttttttttttttgagacagagtctcactttgttgcccaggctggagtgcagtggcatgatcttagctcactgcaacctccgcctcctgggttccagcgattctcctgcctcagccccccaagtagctgggactataggcacgtgccaccatgcctggccaatttttgtatttttttgtagagacggggtttcgcaatgttgccaggctggtcttgaactcctgagctcaagtgatccgcctgcctcgccctcccagagtgctaggattacaggtatgagccaccgggcccggccaaaagtgattttttttttaactttgtattatagataatatcaaacatatagaaaagtagagagaatagcaacataaaccctcatgtaactatcacacagcttcaacaaataacattttgccagtatggttcattggtcctttcatttttaaatgttttagttaaaaattgtttaaaattgccgggcatggtggctcacacctgtaatcctagtgctttgggaggctgaggtgggtggatcacctgagttcaggagttcaagaccagcctggctaacatggcgaaaccctgtctccactaaaaatacaaaaattagcagggtttggtggcaggtgcctgtaatcccagctactcgggaggctgaggcagggagaattgcttgaacccaggaggtggaggttgtagtgagctgagatcgcgccactgcactccagcgtgggtgacagagtgagactctgtctcaaaaaaaaacaaaaattgttttaacataaacaaaactagaatagtgtaatcaactcctgtgtacctgtcaccctgctttcctactaacatttatcagctcctggcccatcttgtttttatctgttttcccatccacaatccccctcttacttcaactgggttgttttgaagctaatcccaaacatcctataattacatttgtagatattttaatatgctctctgaagatagggactcttaaaaaaaagaaaaagaaaaacacagccacagtatcattattgcctttgtggtaaacacaagataagtaggctgacttagaaataacccacttagaggtgaggaaggtgaagcgggaggaggtaggtcttttaataacttgtgggaatacggagtggcttattgcaaaggaaagtattagaattcttttctctttttttaaaatttaattatttttgtcacacagatatcagtgttttaaatcggcttggatgtaccaagtcttacatgaaggattccactttccctatgactacccaaacctgcggacagcccagctggtgtatgaccgagaggttcagtggacgctgggagccattctatataaaacacgattcttaccactcaggtaaagtaagactgaccaatctggtatcttgagctcagaggatatcagttgatgcctcagaatcggtttctttctttttttttttaaccagcttagaataggtcttaagtgaccttcctctctaccccctcacaaaaacaaactcctttacttccatgtgagccactgttactaccaggcatgctcgaacagaaagaaggttgagcattactggtctggagtctcagctttgctgtttcagaaatccagctttatttgtttactcacaacaaaccagtctttaggactgagctcttactaatcacttccaagatactgacaagctaaaatgtcattcttgggttaccctggaaaacacatctgactaaagaacaggggtaggatgtctagagcaatctttcataacatacagaggcactccagacattgtgtcattgacttagaaggctttttggtgggtcagaattagaataaaggacgtgagatgtttttagtggggctactttcatcaaactctggtagcctgataccttacttttatgtactgtcagatatttgggacaatttttaggtacctgtaccctggactatttcagataaactcagatgaattttgtatctttgatgtctgttcctctaaactcaataccgtcagcagccaggcaggcgacagaagtgagggaagtgggctaggtgggggttgcccacaactggagcatgtatcccagttaatgggctggttactgtcacacacaagcactgtcccagcatttgccagttctcatctgtccagaaaagtcagaaatccatattttttatgaagtctttcagtttagagattcgcattctagaagaacactgcaggtcaaaccagacaaaactagatctggatctggactgctgaagagtggcttctgttctagccaggtggaccattacacttggttttcatatcgccttatttttatctgactgtaatacagttgatcaggtaacagctttatttagatatatcctagatcctaaggaaacatagtacctttattttttattatttttttgagacagggtcttgctctgttgcccaggctgagtgtggtggcagtgccgtgttcatagctcactgcaaccttgaactcctgggctcaagtgattctcctgcctcagccttctgagtagctgggaatacaggtgctcgccaccatgcccagctaattttttgatttttcttttgcagagatggggtcttgttatgttgaccaggctggttttgaactcctggcttcaagcaattctcctggcctggcctcccaaagtgctttgattacaagcatgtgccactgcacttggctgcatagcaactttaaaaaaaggatttagacacacacactctgatttctttattggattcaggggataccctattctcattagtactgtatttataagccatattttaagacttatgttacaggtgatcaatctagcctttctgttcattttttgggattcaatttcaaaggccttcccatcttggcttagattctggagggtgtaagcctggaggtcccttctgggggccgtgggaaggaagacacagaagggctcctggggcgggggatgttcttcagctttgcctgctctgtggagctggtgtcataaaatgtttatgtggatggaataaatgtgataacactactgggcctttcaaatcagtaaatgtctccctttgaaacttaacagttttttccacctacaaattcttaattcttccctagggatcttcggcaggaaggtgtccgacaagcccatggtagctggttccgtctctcctttgtatacaaccactatctcttctttgcctgtatcctggtggtgctactggccatcttcctataccttctgcggctacgccgaattcaccaccgacaaacacgagcctcagctccattggacttgctgtggcttgaagaggtggtgcccatgatgggagtacaggtggggccgtgaggctggaccaggactagagaagcttgagcacccccgagttgctgctcattgaattcctccactttcttatatagcctcagatgctgtgatgtctgaccttgtggatatttgcccttggaatttctactttactttctaccgtaattccttctccgtacccaggtcttctctgagagaagctataatttaatctgtgaggaactaaatgacaggagattggtgctaatacgggggaccaagctttgtccaagtgaagcaggcttcgactccttctgagaggtctggtgtgttcctagaatctcaccttttcttcccttgctaaagcatgaagtttggcatttggcacactggaagcctggttgaaatgaaatttgtagcatctgatacaaagccagagacattctagcaagtgcagcagccccttctttctctgtaacagagatatcatttatgtggagatccacaacctttaacagggatccaagatctttgcagttcaatcgaccacataggaatttccaggcaccaaaatgatataacttccttgcttccttgacaaagaagccatcatgggtgtgatccaagatccctgtcgtagtgttgatgatgttagtacatgattttaaaggttagaaccccttctaaatgaatggtctgtggaagattttagtatcttatctgatgcctggtatgatgaggatagaaaatttttccatttttatgtgcctcacaggctgtttgggcattaattttgctttttgagccttaagtgtgttagtaggatggagaaactgtgatggggactgggaacctggatttgtctgattttaggtcactgttccctgggcctgtttttgtgagcccttacacaggaagatataaagagagttctttcatttcactgctaaaatcagtatgtagtatggggaatgtatttgggttgtttttaaagaaaaggggaacagaatcaggagagtgggcaaaggcaataaaatcaaagttcttattaattatttctgagaaatagaagtttctcaatttatgactcttggaatgtctgaaagggagcaaatttggaatagatcaatctgttaataagccatctggcaactttcagaacctctattaagagactgctgagtcacaaacagcacttccattaatgaagcgagaggaaaagccataataattacatcttcacccactacccttccagagctttgcttctcctccacatttagccattaaattgcatgaggatttctcttcatcagggtccgcatggaatctttcttatattttaccctttcctacatgtagccttgaatgtcctttccacgaatatgctcccacggctgggagcattttcttttcttttcgtcacctttgatttttgggattagattaataggggaaaaagtccctggctttaaagaaaacaaaagtagaattcttcaaaaataaatttcatactgggaacagaaaggaactaaatgcttcataaaacagggaaaaagaaattaagatcatcctagaaataaactaagataaaaataagtatactgacccttggttggtagataaaaagatgaccagtcttgtattgttttaaaattagataaacatggattaagcatgcaaagactctgttcctttttttttttcttggagacagggcctcacgctgtcacccaggctggagtgcagttgtgcaacatcatggctcaccgcagcctcaacctcctgggctcaaacagtcctcccaactcagactccagagtagctgggactacaggtgtgcgccaccacactcagctaattttttattttatttttttagagatggagtctgtgttgtccaggctggtctcaaactcttgggctcaagcaatcctcccacctcagcctcccaaagtgctgggattacaagcatgagctactgcacctgccctctgtttcctttggaaatctcttacctttcattagggtttctttcatagcaatttcctttggtttttaagacttctacattgctttttcttttattatctgtgctccgtgaaccttatgaatgctgcttaaaaataatgtcaaaatatgttttagctgcctactcaggtaacgttttcttttgctctcatcttggtttccatatactatttttggttttttgtgagatctaatcaatgatctagtcagaagctacttcactggctaacagtgatcatgttcatgtgctaaaaatgaacttgaaacacggaagtagtggttggtccagtttgaaagctcttattagtattcttcatcctggctgtaataatagccattatttgttatgcctttgttatgtagcagacactcttaaggattttatgtgtattattcaaattgctattactgttctttttatagttgagaatctcaggatacctacatttatcactttttcaatatatatgtatttcttattcttattttgtcttggagtgtttaatgtgttatttcctgttcattactttaatattatggtatctaggcttgtctttattaccatgagcaaggtctccaggagttccacagtactgaaggaaaattttgtcatatccctcagaagaactgaatatttattattggtatgggctcctttgtttattctcttctcccaattaatagattttaaatgaaatcttattagctagaaacaaaagccacttactccttgctgagagccaattacttaaatatatttcttccttataataaaataatttgcttctaggagcagaaatctatcttgccataccctttggtttttaaagatttctcttctatttgcatttctgcactttggtggttctcccatgaagataattatggtgtcataaaattcacattccactggttcctttgaatcttaccaaccactcttgttaacagagacaatgaacctgaactgttttaggactcttgttattactgagacaggtcacaaacatcaaaataggagtccgtggcttgtagtgatgctttttagtcttgtgatagcacaatccatcactttccccaaaattcttgtcatagaacataatgaaaaatatgtaaaatacccatttatgtggcatttcattcacttaagttgcagttaactctaagccaaattataccattttttctctctgtactttagctccttgaatttccttaatctgggaaacttttgttcccacaccaaggaacaaattcagggggtacaagtgcaggtttgttacatgagtatattgagtgatgctgaggtttggggtacagatcccatcaccaggtggtgagcatagtacctaacagatagttctttaatccatgccctcctctctccctccctgctctagtagtccacagtgtctattctggtctgggaaattttcatcactttccaccaatcttctatttattctccaaatgtcttccaaagtatcctgccccaccccctcctcatcctaagagattcctttaacttcaagatcatatccagtgattgctgaaaaatgtctgccatgcacttgctaagctagtgtttttaggcattaacatttattatcacatccatatttatatttttgaaataatttatacttctcactgatatcatctaaacagatgcttctcacagttttatgttttgttttttgtcagggatgaaagacaagtgagtggtatcacttaagggaaagaacagtaggcttaacgaatagcagacctggattctagttctggctttgtcatttactagctctggtaccccaggccagtcacttaccatctctggttcggttctcatctatcaaacaaagaggctagacaagattagaaactaaaggcagaagacaaggtagaaaaatcatatgattttgggaagagcattttgtcctttggtttagaagaccaggctgcccaaaagagcctcctattttatccataacccctgatgataaggttggtgggaacagagtttctaatagtaatcataataaatttcagaagagttttaaagcttctggtcaacccccttgatttatatgggtgataaaactgaggcctagagcagttgtaatatgtgcaaagtcatagtgactggcctcctagcccaactactttgtcagctacaatgaaatgctcattaacagaatctttctgcaagtataaacagaatctattttttataaaacagctggccacaactaaccatgccccatctttacaactgcttctgacattcatttatgactgctttgctcacatttaggaataaactttgaaaaaaatactttgtcagaaatagtgccaagttttcactacatctattcttgttcctgtatttcttttcgtacttttaaattttatacatctttttaaaacaattttatacaatttcctttactacaacatccaagcaattcattagatgactacagcctagatgaaggtataaatgcctattacatctacctcattaaagaacttcgttgtaattcttgggcagtttccagactctgttacagaaacagagggctgtttctttttgttgtctttaaacttttcaaattaattcaaaactagtatctaattgtcctttttgctgtggtatgtggtgtaatgttgattgggaataagaattatggtagaaatagcagatgtttcaaattctcccatattagtctcttagggacgctagctccagattccagcccctggggcaataacttgtgaggattttcctggtgttacaaaaaatattgctgttaaaaaactaagactcaaaaccaaaagttgtgattaataataacaggattattagtcaataatattttgattaatactatagaatagcaacagtgaatatacctcaaattgaaaacttttaggttgtgttcttggctcattctctcataacctggatctaagttggaaagctgtggcaccctgtttgggtgtcccatctaccctgttttctgtttctgcagatggcttgttcaagcttcattttaagcctgctctgtctacttatcttccttatatcctaatagacttctcttgtgttattacacatttctcttttgctctaatatttcattattttccagtttgtcagtaccgttatcagagggacgaggaaggaataacacaccagttgaccattttgtttctctgaaaatctgagcaatacggagatccttttattagtaaaactgaatcattactcatactacaagggctttcacttttaaaatgtaatccatcattgcttgccatttttatgaaaaccaaagttgaaaagtcttctgaatcacaggctatgtatagccacacatgcatgacttcaggctagcataaagacatgtctgctcctgagcctcttcttttaaagggcaaccacttgtataccctctggtggccactcctccttctccactccaaggcagccctggtactttcctaagtggcccctcctacagagcacttgccggcatttggcctgctgctggtgaagacgccccttactagcttcataaatgtttttctgcaagcagggatcccagacacatactttggtttctagtgtttcagttactatgttgtatttgaaattctcattccacaattaccctttagttgaagtcctgaagtacatgccatgtactccccctttatttctaccttgatcaatggcctctgcggagtgtagtgaaagacatctttttattatgatctacactttaaaaaaccaaaggctgcctgtattacattgctttggggagttgttaagactctgttttttctactgcttcacattaaacaataattttgttgaattttgaattcttaaaattctcactgacaaacattttaggtcagtgttgaggaaaatgtgtgatgcatgttagagaggtgatgcattctcccttatgcagggacatgggtatatgtgttacatatgctgatatataacccaccattcatcccaggaccacaagggtagctgtagataaactggttatcctaaaatcatgattatcagtgttgatctctgcaaccaacattgctttagggagttgctagtcattacccctgctacaatagatagtatttgtcagtctaagttacagacaaaaaattctaggttgactgattaagaaagccatgtgttttaatttccttcatgttttaaaaacaatggacgtaagtgcagagagacctttgaaaatattaagggaaatctatttaatcctataggtatgtgatgacttgtttttttggaaaaaggtatttggaacatcaatctgtaattatccattttccattcatgcattcactaattcaatatttgatatgtgtctgggagtgctgggaataacataaatacaaaaaaaaccctaagataatcattcaccagaagctcatagatataatacagttatatagctaaatgcaaccagttgtttttccaaatgtactcatcatctgtaataaaagaaaaatgaagtaaaacatctgaaaccttaacttactcatgagttgctacttccttggaggcaactgtagaagcattaatatatggttctttgggttgggtcatactgccctctgctgactcagttactaactaaggacaacctgggtttgaggatcaggagaggatggtgtgggaacctgcctcaggaactacagttccctttctttgaaggattctatccagaagagaccatatcctactaacatactaataggagcaacatagcagatcaaatgataaggtggggtggaaattagaagggaatgggaataagctagtcagaactttctaaggtaactaggctattaggacctaagccagtggtccctagacttgtctgcacattggaatcacctggggaactttaaaaatatgccttttacttcctccagggattgtgacttaattggtcttagatgaggcttgggctttgggatttttctaagattcaaataagagagaagttgggaatctcttctaggcaatagcataagcccagccagggtccagcatttatgaaaaattgacaaactgttttgctaagaatcacctgtgttagtcggcttgcattgctataaggaaatactgacaatttttagaaagaaaagaggtttatttggctcactgttctgcatagaactgtataggaagcatggcgctggcatctgcttctggtgagggcctcacgaagcttacaatcatggcagaaggtgaaggggagccagtgtgtcacatggtgagagagagcaagcgagagaggaggaagttccaggctcttttaaacaaccagctcttgcataaacaaccagagtgagaactcactcattactatggggatggcacaaagtcatacataagggatccgcccccatgacccaaatacctcctactaggcccacctctaacactgaatgtcacactttgaacatgagatttggaggggacaaaacatccaaaccatatcaccacctgagaatggtacactacaggtcacagaaacttacagagtactggagttgaaagagaactgagatcacctagttcagagactaacgggaaacgttaggtcatttatggctctcagacacgttaagcctgcataacattttttaaaatcttgaaattagttcccaacacttaattgagagctttcacagaaaaatctagatatgtggcttatttttaaaaaacagaagatttgctgacttaaacactgcaaaattaaacatttatatctgaatccagcatctctttttgctttgtaaatgaggtcaaggatgaaatccagatgttcttcctttgtatttgtattgtcactgtatggaatctaggtatatccaaggaaaaataaacttaagataagcttattttccttatttcaaaaagcaaaacaaaaacccagaagatctaacaaccctggacctgtagagtggcagcaacagaccagaactcagcagtatagtccgagctggggcacctgctcgccagtgttactgtctccatcagcctgaccccagtgagcatttgatttggtctaccctactcttgccttctacagaactaaaactaacttcctgcaactttcatccattgctgccagctctgcagcataatggaagctcattccctcttctgcatgagacggcttcaacttctcaaggacaggaatcttgctctctctccagatgttctctgctccagttaaatatccctagttccttcacctattccctgtgtgacaggggttctggactcatcattctgatctcttcttctggatacacacttagtggccatcaatatcttgcttaaatttggtacccagagtgaaatgcagtatgttaggggtattttgactatggctgtgacacttctactgataaaacctgaagtaccactaatttttctgttatcatataataacaacatgaatactacttggttcatattgaacctgaggacaactaaaatcccgtcttttttatatgaaatgatataaggccaggtttcttcagcccaaacttatacaacttatttaatttaaatgagtatgttacatttctaatctgtttaatttcatctcgatggggtcattctgggactgttttcagttgccactgtcatctattatattagcaatattgggttgctccatcctcaaatcagatgtttctgatgccttcatccaaatcactgattttaaaagtaaagttgaataagacagggccctatgaaatatcaatagagaccaaaatcacattaattcagcagtcaacaatttgtttatctgggtagatgtccatgcactacaccatcaaggccatatttttcttattacaaagctgttaggaaaccctctcaggaaccaatttatactgtcgattccattcctctctctgaccttgtaatgttaacagccttatcaaaagaggaactagctgggcgtggtggcccatgcctgtaatctcagcactttgggaagccgagatgggcggattacctgaggtcaggagttcaagaccagcccggccaatgtggtgaaaccccttctctactaaaaatacaaaattagccaggcatggtgacttgtgcctgtagtcccagctactcgggaggctgaggcatgagaatcgcttgaacctgggaagtggaggttgcagagtgagctgagatcacgccattgtactccagcctgggcaacaagagtgaaactctgtctcaaaaaaaaaaaaaaaaatggaactatttggcgattacctccttttccaagtacttaaaaaccattttgctacatatacacattaagcttgtcaaaatctgcaatttccccatttctgaaaatcaggatattagaagacattagcttttttttttttgctgaagaccagctggctactttgggtatgtcaatcctatcctttcaatcttcacctaatggaagtgaagttaagatcataaagaaattctatttaggcagaattaaggactcaggagaacatccacgtagaaatcatccacgtagaaccaagagcttgccaacactgaaaaacctgacacaaagcctgttaagcagcaaatggcagacatttctttctctacattaaaactgattttcaacatgaaaagcagatttaaaagggaacatttagggtaaccacacttaatgcattcttgatccagtgactatctcaaaacaggaaaagatttttaagtaagttgaccatttggaaaccacttggtatgtcaaggtcatctcgtagaaaagcccaagttcttatgatctctgaagagctctcaaaagcagtcacagtcccaggaggctggtcctctaagaatcattttgggactcttcggagttcattcatcagccaaagagcaccagtgagcaaagccaaggagcctgactggtgagtggcggccagaggagttgggacatacatcagcagcgtgctgatgcccaagcccacctgtcacaaaggaaagaaggcaataggaaaggcagtaacccaaagttcacattgaaaatggccaggcgtggataaccacacacaaacctccacatcctcctatcagagcacttaaaatacacacatttttaatttcacaagcaaatatgcttacaatgaaagaaattcgaacaaaattgataaacctaaaattccccttattcttcaatccatcccagttccccagagtagtcactgttaccagtttctgcatacttgtactttagtatgtttatagagaaataaatatatagttttgtgcttttaaaaaacatattgttctgtcacttgctttttttcacttagcaatatacactatgtattgagatcttattaaactgctgtgcagtatcgcacagtatggatataccatagttttttttgttttgttttgttttgagacagagtttcactctgtctgccaggctggagtgcaatggcatgatcttggctcactgcaacctccacttccagggctcaagcaattctcctgcctcagcctcccaagtagctgggattacaggcgtgtgccaccccgcctggctaatttttgtattttttagtagagacagagtttcatcatgttggccaggctggtcttgaactcctgacctcaggtaatccgcccacctcggcctcccaaagtgctgggattacaggcgtgagccactgtgcccggcccatagttttttaactatttaggttgtttccaatttttcactatcacaattctatgatgaattttctcatacaaaaggtctttgttgcattggactgtttctaggactgacactaataagttcatttgctgggccaaagaattacccatttaacttttaaaagatattgccagcctgggtgacagagtgagactccatctctaaaaaaaaaaaaaaaagatattgccaaattgccttctggaaaaaactgtactgactcatgctctcaccaggaatatttgaaagtatccattttcctatgcccatggcaatacctgattatcttttttttcacttttttccaatttgataggcacaaaatggtacttattttttaaatttgctcctctctgattataagtgaagctgaacagcttttcatgtttactggccattaatcattgtttttgtggtaattgtgtattgatgtcctttacttattttccggttattaatcttttaatttattataaatatggaaaatattttctcctagtctgtcacctttccttttttttttttttttttttaaacagacagggtctcactctgttgtctaggctggggtgcagcggtgcgatcttgactcactgcagcctcaacctccctggctcaggtgatcctcccatctcagcctcccaagtagtttggactacaggcacacaccaacatgcccatctaatttttgtattttttttgtagagatggggttttgccatgttgcccaggctagtcttgaattcctggctcaagtgatctgcccacctaggcctcccaaagtgctgggattacagccatgagccactgtgcccggccccttttttaactttgtattggggatactgtcagaacaaaaagaagtggtttatacctgtgtatacgccaaagccagcagagtcactgctgccatcttggtccttctaggaaggggaattctccgagagaggaagtagagcactgtaatggcagtgactgaagtgattccctgcagggaagaaagagtctatcacattagatagaagtgccaggtttctaactcaccttacatgtatctcctctagaaccactcagcaaccatgaagtactttcctgtaccagtcacagagaacctccctgcagtcccagcctgatcactcctccacaggctgtctcttccaccatcctcttctgcttgccacttaaacgtcggtatcacccaggctccacctaagattctgtatgtactttatacaccctcactcccagtgatctcatccaccttccaatgtgggtgtccccctcatttttaattctttgcatccttatccctaaccatatctctaatcctatattcttaaagcagggctgaccccagcacatgagggttattattttcctgggctgtgagtggagaaagtgctggtgctgccagctggtgctaaaaaagacctaaagtctcattttcattcctatctcttcagaacaagggtccaggactggcaataatggtctccttcctcttccacggtatcagggagaatgttttctatcatatttctacatttatttcacttcatttccttttcagtgctgtccacaatgacaatttcaaccaggctttacttatgctaaaatactgtgcgcaggtggggactcagcccacaccaggtaacatgcctcagcccagcccccgttggacagctgagccctctggccccctctctctggacgtgctgctctcatctcacactcaacatacctccatctgatgacatcctcccacctctagctccacactcattctgagggtcccatccctgtaggtcatgtttcaagcatgctgtagaagaaactttgggatttcacttgatctttcttcacctttattcctgacagccaatcttattaactcttttcctttatttatttatttatcgtagagatgaggtctccctgtgttgcccaggctggtcttgaactcttgggctcaagcgatcctcttgccttagcctcccaaagtgctgggattacaggcatgagccattgcgcccagtgctcttatttttaaattaaatttaattttttaagagacaggctctcactctgtctcccaggctagaatgcagtaacgtgatcacagcttactgcagcctcaaactcctgctcaaacaatcctctcgcctcagcctcccaaagtgctaggattataggtgtgagccaccatgcccagcctctctattcctttaaattctctctcaaatgcatcattcttctcaagtcccactcccaccatgtaggccccatctccatcactctccctggcattacgcagcagcactatgcttctcacagtctccttactgctcatctttccccgctccaattcatcacacacaggcctccaagccaatctttgaatggcccatagcagaccctcaaaacatattcgcttaaatagaatgaaaagtactggtgaagctcctggctccttgagcttctggtttagctccgagagctacgtgcttagcagctatggtctccgcattcgcttctctactcaaccacatttctgctgaaatgactttctaggtacgtgcagaattgagggaggttatcacttgccaagtggtaaaaggcacatttgaacttttaagaagctggcaacgtcctgaaagctagaatttggctggggttggggtagggggacaggggtgaataatgaggacaaagacattagattagagaaatggtcctaaaatttcttccaaagagagcaggaaatatagttcctgctctaccctctcagtgttgccatcagtgcttcactgacaccccaaagcctatgataggctcctgtgctctctggcaggtaaccaccaactacacttaccagaatccggtgatcaaactgcaccatggtgggattctcaaaaacattcctcaggatgggggagaaggtaaagaggtcctccgggatccaggattctcccattttgggaaaggagttataaacaagcccagcatctagccctgccacaaaagcccctgtattccaaggtaaatggtatttattaaaatgagaggaagaagagaccaaatactagttctgatatagaaaaagtctgttatcccagagttaaactaagggaacagtcagagaataatagacatatctgcaacaggagttctccaacagagaagatacatcacaatcaccaaggaaacttcaaatctctgcatccttacctgctcccaccccaagattctgcttcctctagagaagtggagtagaggctgtggtgtggggggagggggagaggcttattagcttagaaaaattcccttagtgattttgatgccctcctcaccccgccactgagtgctactgatttattttagaaatgctctcccacagatgtctgcatgactgactcccttatttcctcagcttccactcagatgtcaccttaccaaagagatttcgcttgatgatcctagcccactttctgtctcctgaccctaatttatttttcttcatggcactaaatatcatctagcacattatgtttctattgtgcgttatctgtcttccccaaatgctcaataaatgtttgttgactgaatacggaagtgagaaaaatcccaaaacttataaactaaatcctggataaacaaataaagagggtattcatgaattaatggatgtctgatccattatttattatcaaagaaaatccagaaatgtttgggtcacactcgcttttttctttctttttttttttgagacgcagtctggctctgtcccccaggctggagtgcagtggcatgatctcggctcactgcaacctctgcctccagggttcatgcaattcttctgcctcagcctcccgagtagctgggactataggtgcgccctttggtagagacgaggtttcaccacgttgaccaggctggtctcgaactcccaacctcaggtgatccgcctgcctcggcctcccaaagtgctgggattacaggcataagccaccatgcctggcctttttttctttttttgagtcagggtcttgctctgtcacccaggctggagtgcagcagcgcaatctccgctcactgcagcctcgacctcctgggctcaagcaatcctcccgcctcagccccctgagtagctgagactacaggtgaataccaccacacatggctaatttttgtattttttgtagagacgaggtttcaccatgttgcccaggctggtcttgaactccctggctcaagcaatctacctgcctcagcatcccaaagtgctggaattacaggtgtgagccaccatgcccaacccactccatattttttttaaatgtcccttatgaagtaaaaattcatgctcttatgccaaaaataaaagtgttgagtggctcattggtttgaatcaatattatttttagtccagagcagtactatcaatagaactttctgtgagagtggaagtattctatatttgtgccaaccaatatactagcccctagccacatgtgcctgtggagcatctgaaatgttgctagtgtgactgaagaactaaattttaaattttatttaaccttaattaatttaagtttaaatatccacatgaggctacaggctcctctactggatagtgcagttctagaatgagagcagcagtggtggaagtgtgggttaaagaatgaaaacggccaggcatggtagctcatgcctgtaatcccagcactttgggaggctaaggcgggtggatcacctgaggtcagaagttcgaggccagcctggccaacatggtgaaaccccatctctactaaaaatacaaaaatcagctgggcgtggtggtgtgcacctgtagtcttagctactcgggaggctgaggcacgagaatcgcttggatttagggaggcagaggttgcagtgagctgagatcatgccactgcactccagcctgggcaacagagtgagactcagtctcaaaaaaaagaatgaaaaaatcctgtgttggtctctctgtgccaatgaactctccacctgcaaccatctctgagggcaagccttttctctgacccatgttgatgtaatgtgatgataacaatgtttatatatagtaacagctaacacttatgtagcctttgctacatgccaacaacgatgctacacatttcacatttagcagtcatactgttgtcgtaatctccattttatagataaggtctctaaggcccagagaggttacagagcttgcaaaggtcatatagttcacaggtagtgaagccaggatttgaacctaggccatctggatctaggtagatgttcaatatttttgttcaattgacagtaaagtagaatttttggaagagagaaaggaacaggaaacagggtgaagatgggggaatgagagaaacagatgtgaaaaggaaatataaagatgcaggaggaaggggcaaagcattaggcaagaggtcccagcttagagtgcaatgcaaacaggtcatctttgatgagctgagtcctacctgagagggccgtaaggaacaccagacctgctgttccatgagcaaatcgtctcaactgtaggagttggtgggtttcaggcaactaaatatgaaaaaaaatcattcagttaaactgtgttgcaggaacaatgagaggcagcaaagatctctaaggccaaacccaagtgacaaattaagatcagatcttctctgacccctagactaggttaagtactcctggcagatattctgttccaacatgtactgtattttattataattatagattactatctgttttcccttctaccccataagttttgtgaaggcaggaactgccatcttttttactagagcaatcttagcctagtgattggcacataggtactcattacgcatctgttcaaaaactgaatgatttccattattcaggaaacaatgcttcatcacggttgaaaggatgtagcttaagatcaggactggattttcatgtgtgtgatattagtgtttagcaaatatagtcagaatcaaaattgcataaagtgcttagagattcctccatttagtgtttttgataaaatcaaaatttgtttttattcttattaccaacttctaatactaataagtgaatcatcaaatatgaataagaactttataaacaggtgactatgccaccctcaaatggcttacactctactatatgaaaagttaggtatcattactaacatattataggacagtatatcagcactgtccaatagaactttctgtgatggaaaagttctatcatctacctaaggagagcttgaaacatgtggctagtatgactgaaaattaaataaaaaattaattttatttaaatataaagtttaaataaacaaaaagcttatgtaaataaattttatttaattaaaaaaattttttttctcactttgtcgcccagactggagtgcagtggcacaatcttggctcactgcaacctccacctcccaggctcaagcgattctcctgcctcagcctcccaagtagctgggattacaggtgcgcgccactattgcccagctaattttttaacttttagtagagatgggggtttcactatgttggccaggctggtctcaaactcctgacctcaaatgatccacccgcctcagcctcccaaagtgctgggattacaggtgtgagccaccgtgcccagccttaattagttaaaatttaaatagccatatgtagctagtagctactgtgttggacagcatagcactatatggctcattgggtagcatctcaaatcctttttgtaattaggtgaatctaaactaacagagaaaaacaattgataaagtcatcagtaacctttaagagtacaatttcagtagcaagagtgtgtgggtttatgtgtaagtgtgggtaaatgtgtgagtgtgtatgtattgggttgggtgaggaagataattacagggactgaaaagaaggaatagattgtcaggaagcagcagctatagatgcaggcaaaatgaattcattaagatgaattcattttagaagtctgaattaaaatgaattcattttagaagtttggctttgatgggcacggtggctcacacctgtaatcccagaactttgggaggccgaggcgggtggatcacctgaggtcaggagtttaagagcagcctggccaacatggtgaaaccctgtctctactaaaaatacagaaaattagccgagcatggtggtgtgcgcctgtagtcccagctactcgggaggctgaggctgaagaattgcttgaacccgggaggtggaggttgcagtgagccaaggtcacaccactgcactccagcctgggcaacagagcaagactccatctcaaataaataaataaatacataagtaaataaatgaagtttggctttgaaagtcaggagactttcaaataattccttatttttcagatgtggaattattcagtggttgtctactgtatcaatatttcaacccaatttggcttctctgtgggaatgactgccaagacaacacgtccagtccttactgggatctagctactagctccaagtacctaatggatgattcgacttaagagtcctgctgtcatctcaaacttttctccaggaacagcttactcaggtcaacccatgatttcaatacctaatataagactctttttttttttttggagatggaatttcgctcttgttgcccaggctagactgcaatggtgccatctcagctcactgcaacctctgcctcccggattcaagcaattctcctgcctcagcctctcgagtagctgggattacaggcatgtgccaccatggctggctaattttatatttttagtagagatggggtttctccaggttggtcaggctggtctcaaactcccaacctcaggtgatctgcctgcctctgcctcccaaagtgctgggattacaggcgtgagccaccgcgcctggccaagactcatttaaaaaaaaattctagggaaaaaaatgtcctataagggtgtggtgtcttggaacctctattattaatgaaggcctcaaaaaaatgttataccttgcttttaaatcaaagcataaaatgaaaaactagtactttgctttaatcagcagacagaaaaatacttcagacaaaatcactaaggtttactattagacttaactggcaggtccccatttaacgaacaatatagctcttgtccacaccagaagttcagaaacacctctgttctgatctttctcactttgccatccaccatcccttctaggagtcagaggtaaagcgactgggatatttcttgttgttggtactccctcccactctatttttcaatttgtttcacctttgccaatagaaaatgttggcaaaatattcaactcctatatgatccagcaattctacttctagatatatatccaaaagaaccaaaagcggggtcttgaacacagatatttgcacacaactcttaccttgtgcggagggagtagcagtgacagtgaggtccacaagctggcacaataaagaaccagggctgatcccaggtgggcagcaaggcggtactgactgacccgagggatgtcatgggagtctgatttttcttctagtccacttttcaccatataccatcccaacagaccctagaacccccaagagatgaagcaaacaaaacaaggttaaaatgatctgttcaactttcttttttttgttgtttttttgagacagagtctcactctgtcaccaggctggagtgcagtggcgggatcttggctcactgcaatctccgcctcccaggttcaagtgattctcctgcctcagcctcccaagtggctgggactacagttgcgcatcaccacgcctggctaatttttgtatttttagtagagatggggtttcaccatgttggccagatggtgtcaatctcttgacctcgtgatccgcccacctcagcctaccaaagtgctggtattacaggcgtaagccaccacacccggcctgatctgttcaactttactgaggaaatgagctatcaggagtactctctaccccacccctcctctttccataccctccccaatacgcagtgtcccaagattcatgatttatccacagttcttcacatatcaccattaatacttaactactatttagatcagaagtgtctgatcttttggcttccctgggccacactggaagaattgtcttgggccatgcataaaatacactaacactaacagtagctgatgagctttaaaaaaaaaaaaaggtccatggatatatctcataaaactagattgaatgttttggagaaacttaataaaggtaaatgcttaaaaacatctactgtcaagttaggttggaataagacaattataaaagtttcaggggaaaatcataaaaatcaataaggttttgcatgcagatcgctttgcaaatatctaagttcccactccgctttaagcaaaaccacagtttatggggatataagaaacctgcagttgaatgccaatctggggacgcatagtcaaagaaaaggccttgattttgtaaaagttggtaatgaacgtacagatttaagtttaaaagtttatgttatgtatcatattctatgattctctgctttaactggctttttcaattaaccaaacaattgttagttccaatcatatgaaataagacagccctttcactcccacttgccagtagaatcaggtcaaagaggtggactctgccacttctaaatatatactcttcaggaaatctttttgggcatttctctcccctttcaagattaccctggatattctaattaccttgatttcatctgcaagagacattgaaagatgaagacgtacacagttgattcactagcccactttcttctcccataccttatctgacatctttaatttctgcctccctaatagtgttttcagtgttggcttgtttttctaattctaaaatgttaactttcattttgttctacatgcctttctctggttactattagactttgattattgtttctgctgcctctatttcttctctctcatctccctccttaatcccttctttctttatttattttttttgagccagagtcttgctctgttgcccaggctggagtgcagtggtgcaacctctcagctcgctgcaacctccgcctccccggttcaatcaattcttctgcctcagcctccgaaatagctgggactacaggcccacgccagcatgcccagctaattttggtattttaggtagagacagggttttaccatgttggccaggctggtctggaactcctgatcccccaccttggcttccgaaagtgttgggattacaggtgtgagccactgcacccggccttaatcccttctaactgactcattttcttaccacttctgagttaaattaaccaattagcttcctcctgattaaattttgatgtttctttgatgccctgataatctcctttaggatctctaaaccttgacccaaatactcctatgtgtcttctcttttaatttgttgctcagtttcacccaactttttttttttcatcattctagcagtactaacctgttaactgtgggagtctttccttaagaggcgctcaacttacgtgattttaattgccatttatatctgaatatctctcagctacatgggtattctacaatccttcatcccacaaagtgtttctctcttttggaattttcctgtatgcttctgtggcattctagcacagggatccctctttcctatagcagacaagttagaaaaagaggagagacaagaacctagggagacacccatgatgggaaacaaactacatcttgcagcacatgaaaatatactactgagtgctttactgattccaggcactaagctaagtactttaaatatggattatctcatttaatatttacacgactgtacatggtggcactgttattatccccatttacaggtaaagaaatcatagctttcagaggttaggtaatttaccctaagtgtcagagctggggcttgaagctaggcctgtgacactaaaatgcatgctcttacctattctattaaagtgcctcagagattatttccttaaaaagaatgccaactaggggccgggcgcagtggctcacacctgtaatcccagcactttgggaggccaaggcaggcagatcacgaggtcaggagatcgagaccatcctggctaacatggtgaaaccccgtctctactaaaaatacaaaaaattagccaggcatagtggcaggtgcctgcagtcccagctaccgagaggctgaggcaggagaatggtatgaacctgggaggcggagcttgcagtgagccgagatcacgcgccactgcactccagcctgggcgacacagcgagactccgtctcaaaaaaaaaaaaaaaaaaacaatgccaactaggaagctcctgggagcatttctggtttctcaaccttgaataaatcttacctggaagcagacgaggccacagagggcaagaacacgtcctttcatgccacggctgagccagccctttctccaaaagtaggcagcaggcaggatgtacacaaggcctacaaggcgaccccacattcggtgtgagtactccatgtaccagatgaacttgaattctgtcagtgtcatatcatgattcaagctgggtgaaatggaaagtcaaaaaaggaggaggaggaaacatccttctgatttttattttcttacggaatgcaaaacctttctttctcagtcctgcaacttggtaggtctgccctcttcctcatcaacgacctcaggatgactttggatttgggggcttagaagacaagctgactaaacataactgaaccgaagttcatgaaataatctaaccattctgaagggtttaagtccaaaagatcaaatgggcctactgggatgtttacctaattttctctaatacttacattttaaattctggaaattgctggtatctttggaattctgcttcccattcctcttggcttgtaggtggcttcatctcctttattaaatgccaatctaccatcgagaggccagactctgtcaaccttaggataggaaagaaattttggggtgtatgcgtgaggctggattactcacaaaaggtttatagcaacaagtggatctgaacttaaccttgttaaaggtaaacacattgtttccttgtttcctcttttgagacatttctctgttactgcttggaattttgtcagaaacagctgccatcaggtacaaatttatttacccttatattctctcaatccttttattcaactctccccaattcttttttttttcccaattcttcctttcactagcattcctcaacaggtaaaatcaacccctacagccaaagaaatgtgttctaaatgcataaccaacattccttacccagggaaaagagacctgttacatgtatacaggtttagattcttgggtgaatttaaagacaataaaattcaaatttgtttcacttgctcataacaacctatataacacataaggtattttgaaataagggacgtggaatgtgaagagaatttgaggaagacacatttgattaaaactagaaacttttttaccaaaaggaattaggattcctagagtaaaagcctgattttaggcctgaggcaagaaatgcacaagatgagctcggaacatcttgtcatactagaaagtaaggaaactatcaaaggtaattagggccctgccaaaaagtcactagagccaatttcaggagatgcccactgactaaagatgggacaatctgagcaaatcactaacaccatcatcacaacggaccgaaacattatcgagtgtgtttgaacctatgatctcataatgagccttaaaaattcaaatcctttatttgttgcctttggaggatttgggggaccaatttattattttgaaaattggtaaataaagggaaagaagaatcaagtatgtatcctgcctttcctatacaaactataccttgggatatccaaactgatgatgagggaaagctttttagagttgagctaataaaatattataattttgctacgctaatgaaataatggatctaggcaatggtaattaatggctgttaacatctataatagacaccagatattcacgaatgttctattcacctactgaagtattttgctccctcatccctaatttgaatctgatcaaccaactactcattcacaggaaatagacgggacaaaggaacatgttaaatatcacacagttatgcagtcagcaaaatctaaactgtgcataaccataggacaaatgactagagtttcctcagcaactagaagagggggaaagggaggagtgtctaaatctatagtctcttgatagatttaaacaaacctaagaaacatgaaccaattgtgatgtacagaacttctttgggtttaattcaaacaaactgtaaaaaaagttttgagacaaacttggactctgattgaaagagaaaagatacataaacaatgcacaggtaccagttaagacataaaccagtctttatagaaggctcctactaataaaacactcaactgttctatggcagggcaagccatcagacatgttccttctttaaggcctcggtttctccatctatacaatgagggagctagactagatgctctgtaaaattcctttctccagctgggcatggtggctcatgcctgtaatcctggcactttgggaggccgaggtgggcagatcacctgaggtgaggagtttggatcagcctggccaacatggtgaaaccctgtctctactaaaaatacaaaaaattagccagatatggtggcacgcgcctagtcccagctacttgggaggctgaggcaggagaatcgcttgaactcaggagacggaggttgcagtcagccgagatcacaccactgcactccagcctggccaacagagcaagactctgtctcaaaaaaaaaaaaaaaaaaaatcctttctcctcagtcaacctgtgcttctactgatgatccaaatacctgactcactacgagcaaattacttacctagttactccaccaagaataactgctccagccactgttccactgcagaccaggagccatcggcccaccacccgctcagcagcctttgagggaagggacactgtaccccttccagattgcaaagctacttcagagatggtgctgtattgccctggcctcaaagggcgcctgatgcaatcacactaaagatcaagatagacaaattacaactggagaaacagggaatggctgctacccacactcaaccccattctgattagcgcgaagtaccatagcatccccacagccatgtcttgttaagtcatcatctcttatctggattactgcatcagccttccaactggttttccaattggttttcaaatctagcctcactcaaacctatccccaactacatgaatcttctcatctctgaatacttccctcagacttcactctacttacagatatggaatattttctttcacctctaggtctttcaacatttctctctggcttgtacacttcctttcccctgattaataatacctactgcagatctccgcttacatgtcacctcctctgggatgtattcccaggctcttcaaggtctgcaataggtcactcccacagcacactggaaagcccttaatacactgtaatgtacagtcaagcatcacttaacaacaggggcacatgttctgtgaaatgcattcttaagcaatttcatcattgtgtgaacctcatagaatgtacttacacaaatctaaaggctgggtgtagtgattcacacctgtaatcccagcactttgggaggcagaggcagggagatcacttgggtcaggaattcaagaccagcctggccaaaatggtgaaaccccatctttaccaaaaatacaaaaattagctgggcatggtggtgtatgcttgtaatcccagctatttgagaggctgaggtggcaggatcacttgaacctgggaggcagaggttgcagtgagccaaggtctcaccactgcactccagcctaggcgatgaagtgagactccatctctcaaaaaaaaaagtacttacagaaatctagatggtatcgcctactacacccctgagctatatggtatgacttattgctcttaggctataaatctgtatggcatattatgtaccgaatactgtaacacaatggtatttgtttatctaaacatagaaaaattacagtaaaaatatggtataaaagatttaaaaatggggccaggtgcaacggctcaagcctataatcccaaggctttgggaggccaaggtgagaggatcacttgaggccagtagttcgagaccagcctgggcaatgtagcgagaccccctatctctattttttcaaaaattaggcacagtggcacacacttgtagtcttagctacttaagtgactgaggtaagaggatgcttgaggccaggatttccaagctggaggctgcagtgagttataatcatgccacagcactccagcctgggtgacaaagtaaaacgctgtctctaaaaaagaaatttagagaaaaagatttttttttaaaaaaaaggtacacttggaaaggcagctccattataatcttatgggaccatgactgtatctgtggcctgttgttgaccaaaatgttgttatgcagcacatcactctaccttcaggttcatctgtttgtatctcccactaaactatgagctttggggtggcagtgtccggtcagtcttgctctctcccttctgctagctttgtttctaacactgttcctttatataatgagaccatgataaggatttcgcaaatgaataaactgacttcctccagggcaggagtcttgtaatatttatctttctttttccagttcctaatatataataaccactcaataattactagttaagcaaatgcatgccctcttcttactatatccctgtgagtccaaagatccatgctcggtttcctatttctgattaactgagtcacctttagaaaagtaactttaagcctcaatttccttctctgtaggatgcagtaatacttcctcatctgactacttggaactttttaagcaaaaataaactatatgggtaaaaattactcagcttttaccatgtgctaaaggcctgatgtatattaaagaatgtaatcctcataacaaaccttaaagtaggtattgttatccccattttacagataaggaaactgaagaacagaaagtttaattaacttggccaataccacacagcaggtcaatgttccagatctgaacctaggggctctgatctgaacctatgcgttgtgagtgcactgtaaggagctccggaaacgtgatgtggggctctacattatctttatcccggccctttcactccatccccgctcccgcgactcggagtccgctgcagtgcggtacctgtgctctaggcgctgccctaggagccaggagcggcagatactgcctccccttcaaggccctcaacggcggaaagagcaatcgctgcatactgatgacagggaacagccacctcttccacaacccagggctctgtggtctccctcctccgccaaggaaaagagaagcacttccgggtcgggcagcgggagccccgccttctctggggaccggagcgaacagaagtgcgcctgcgttgcgactccgctttcgcgggggctgctggggcgtaggtgtcggggacgcgcgcacgggcgcgcgcagctgttgacgcgcttcttagctggtgcgcgccggagcccaaattccaagtggaaactgcaggcgcacgagggaggaacgcgtggagcatgaaaaggcagggggcctcctctgagcgaaaacgagcgcggataccgtccgggaaggccggtgcggaaggtggcgggggaggggacggtcggccgaaggctccccggggcgggccggcgggagtcgtagtcagtggtgatttcttctggagtcgtttcctcagctccttccagccccttgggcggcaccttctatctttgaggcgttaaaggtgtggaaacggagggcgtgacgaggggcaggtagcgagaatggctcagctgtggagccaaggttcgagtcccggggtcccctcataacggccctgcgaccttgtgcaagttggttaacttcagcttcacgttttttccgtcgccacacgaggatgccagtaccgcccgcaccagcagccagtactccgctgggatagttaattgtcgagcgcggagcccagttcctaacctgcagttacctgtagctgccacggcggggacggggcttggtccccaaagtcacgcagctaccaagtggccgagcttgtggctgctccaagacccgagttcttcctgagtgccagggtagcatggcatggcaggtgccagagaatttggcaagtccctcttcctccgtgaagaggaaccttcctaaaagttatcaagaatcctcaaagattttttctttatgtggattacatctatctattttgactgtattagaaattaaaacaaatttttttttgggaggccgagggggacagatcatctgagctcaggagttcgagaccagcctggccagcatggtgaaaccccgtctctactaaaaatacaaaaattagctgggcatggtggcaggcgcctgtaataccagttactcgggaggctgaggcaggagaatcacttgaacccgggaggcggaggttgcagtaagccgagatcgcgccactgcactccaccctgggcgacagagcgagactccgtctcaaaaaaataaaaataaaattaaaacaaaattttaaaatattgattagaaaataaccatagtaaacccattacatattgacataatatttttttgaaaaagaaatattcctaaacaacaacaacaaaaaaagcaaaagagtggaaatatatttttgcaagtttcttcagtatatcttaatggaagacagctggattctcatgcccgctgcttcattcagtctaacatgtcaagtagcctcttgaaaacgcctcttcacggaggttgcagtaagccgagatcgcgccaatgcactccatcttgggtgacagagtgagactctgcctcaaaaaagaaaacgcctctcacttgtgagagaattaaagtgaaaaagtcaaataaagtgttagaattattaagaaaacggttgtagccctgcagactctgaaaagtctcagaggctcccaaagctctctggactactacactttgagaactgctgctgcttctcctttgatcctataactttgttgcttgggacaactgccttgctctgccttctgtcatagccttttttatacatctctccatcttctcctgcctagggtcctttcttgtgtgaggcaaatagtcccccggcagcatcagcatcggccagtgccactgatctgacagctggtctggtagctaccaggaaactcatggagttaataatgcagagctgttggttaagagcatagattgacacttaaccctttcacagtttgggactgatagtattttttttttttttttttttttgagacggagtctggctcttgtcgcccaggctggagtgcagtggcctgatctcagctcactgcaacctccacctcccaggttcaagcaattctcctgcctcagcctcctgaatagctgggattacaggcgcccgccaccacgcccggctaatttatatacttttagtagagatggggtttcgccatgttggccaggctggtctcaaaatcctgacctcagatccgcccaccttggcctcccaaagtactgggattacaggcgtgagccaccgcgccggacagggactgatagtcttaaataagtaaggcaattgcagtttgatgttagcagatgataggtttttgttttatttgtttttcaaagtaaaaattgcttttttaaattataaaagcaatattgggtagaaaaaataaagcaataaagaaaagtaaaaagaagaaaataaaaataatttcaaatcacaccccaccagaagtgaccattaccagtatgtgaggaacattctagtaagtgtcattacatgaagtgtgcattgtttcgttcatttttttaaattatgtgctcccggaaaaaaactcaaaactctgtttacatcacactttgtaatataaatacattaattttgttgtaattattcagcttttagtaaatatttgattattgtgtaccatggtagatactgtgcttggtgtgggtgatgataaagatttctcacataaagaccttacttaggaggccagacgtggtggctcatgcctataatcccagcactttgggaggccgaggctggcagatcgcttgagtgcaggagtttgagaccagcatgggcaacatggcgaaaccccatctctacaaaaaatacaaaattaaccaggtgttgtggcacatacctgtagtcccagctactgaggaggctgaggcacaagaattgcttgagcctgggaggcggaggttgcagtgagccgagatcatgccactgcactctagcctgggcgacagagcaagactctgtatcaaaaaaaaaaaaaaaaaaaaaaaaacaaacttaggaactctaagtcaagtagaagtgatcagatatttatctgcataaataataaaaggtagaaagtaattcatattttaagaaggaacaattggggtttcataactcatgaagagttaaatgagttcaaaagagggacataaaattttctactttgggagacagaaaaaatcatggaaatgttccttgaaaaattttattcagagatgaagccagaaggaactctgggttgaggagaaggcattggggagccagcggtagggactggagagatctggaagcataagaaggaatgagacagagtatcactctgtcacccaggctggagtgcagtagcacaatcttggctcactgcaacctccacctcctgggttcaagcgattctcatgcctcagcctcccaagtagctgggattacaggcgcatgccacgatgcctggctaatttttgtatttttagtagagacagggttttaccatgttggccaggctgatctccaattcctgacctcatgtgatccacccacctcggcctcccaaagtgctgggattacaggcatgagccatcacacccggccagataactaatactttttgattcttgagactatatactttacatgaattatctaatttaatcctcactactctgaggtacatactaaaatctaccttgttttatagaaaacttaagtaactaatctaggatctcacactaaatagttggtgggacatggatttgaagtctgtcctgcttttaaacctatattccttataaagaagtttaaatatattctgcaggcattgagaagcattgtaagaatctcagctggaatgtgatgatgaggtctatgttttaggaagattaatttggcattcgatagacattttcctcagtataattttttatacatctgtctgtgtacctatttcagtctataggcatcaattcaataattaatgtgatattttattgcattcatgggccctagtgtacttatctattacctgttattggacatttgcattttggcagcagaatgtaaaccctttgtggtaaattggtctggatggatagaacctttatgaactcttaccattctccatgtattttaggagcagcaaatggatttctcatggaagtttgtgttgattcagtggaatcagctgtgaatgcagaaagaggaggtaagagaaatcagatagtgaatgaccgttggctacccttttaagagtctgaaaattaatcctgtgtgcttatctcagaagcccttgtgatctctaagcatccctcataatgctttcagaaacaaccaattagaaaccctactggaaaattatgatctagtctctccctctccccaagtgggtcacattttaagtcaagtgtcgacaatagtacttactcaatgacttgattttttattgaacttagcaaaattttaatttttttaaaccattaacttaaagatgacttcagagacttcatcatgaggaattttatcttttttacttttgaacattatctatttttccctcaaagtttctgttgtactctgaacctgttttaatgggaagcacagacatttccatcatctcaggttcagaaaaattaaaaaaaaattttattatggaaaaataaacatatacaaaagtagagcaaataggataatgaagccccatgtatgcatcactcatcttcacccattttcaacacatggccagtttttcatttatttcaggggtcaataaactttttctgtgaagagctgcatagtatatatattttcagccttgctggacacatttgatctttatcacttattttatttttaaatcttttgaaaatgtaaacatcagccgggtgcagtggcttacacctgtaatcccagtaattggagaggctgaggctgccagatcacttgagctcatgagttcgacaccagcccaggcaacatggcaaaaccctgtctcaacaaaaaatagaaaaattagccaagcgtggtggtgagcacctgtagtcccagctacttgggaggctaaggtgggaggatcacttgagtccaggaggcagaggctgaagtgagccagtcacaccactgcactctagcctgggtgacacagccagatcttgtctaaaaaaaaaaaaaaagttaaaaaaatccttcttactttggcaatagaaaagaatgaagtactgatacatgctataatatagatgaatcttgaaatattattctaagtgaaagaaaccagtggaagaaaatacaacatatgattccatttatatatatccaaaataggtaagtttatgtagacagaaagtagattaatagttgcttagggctgagaggcatgagaagggtaggtgactgctaaagggtgtagggttgttttggggatgatgaaaatgttctaaaattacttgtggagatggttgcaaaactctgtgtatatactaaagagtactgaattgtacacttttaaatgggtgaattgtattagtgaattatatgtccataaagctgttgtttttcaaaaagaatacaaaaacattcttagtttgcaggccatagccaaaacaagctatgtgcccatagcccacatgccatggtttgctgacccctgatttatagtcctaccttcctctcccaacctcagattactttgaagcaaatcccagacatcatgttaattttaaatatttcagtgtgtgtctctaaaaaataaagactcttgccgggcgcggtggctcacacctgtaatcccagcactttgggaggccgaggcgggcggatcacctgaggtcgggagttcgagaccagcctcaacatggagaaaccccgtctctactaaaaaatacaaaattagctgggcgtggtagtgcatgcctgtaatcccagctactcgggaagctgaggcaggagaattgcttgaacctgggaggcggaggttgcgtgagccgagatcacgccattgcactccagcctgggcaataagagcaaaactccgtctcaaaaaaaaaaaaaataaggactctttttttgttgtttaagttctttattgttttcaaaggcctagtatgcatacatatataagaaatccataaataatgtggaattattaatgtatattgtttaagataaggtcccttttaaagaacaaaacaccacaatgtcactaacacacctttaaaaaaatcatttcttaatatcgtcaaataacccagttttcagatttctccagttgactcatacagggtgtgtgtgtgtgtgtgtgtgtgtgtgtgtgtgtgtgtacagttctttgaatcaagagccaaacatttcatttgttttatatgcctcttaagtctctttaaatctgtaagtttctcctgcttttttctttaattctttgtttactttcttaagatttatttgttaagcaactgtgatattcatcttttagagtatcccatactctcaattttgctaattatatgtgtgatatcgtttaacatagtcctctgaccactgtatttcctataaaggtagttagcccagaggcctaatcagattcagatttcagttttgacaaaatttatttatagataacattatatacttcctgttgcatcacatcaggaggacataacatgttggtttttttctgtttttgtgatattaagattgaacagggagttcaggtattgccagcctaatctatccttaaggttttctgtcagcttttcacctaataaatttagcaacccatattttagtaggggttgcaaaatggtgacatttatttttcacttatgaactagaatagttctgtaaagaactttccctcatcctctgtttggttatgctgaagtatggtttgtataagaaaggcagaataaatgcttgcttattttcccttatttattataatactttttagaataatgaatttgttctctgtcttcccttgaattgttttgtcattatgaatgtagatttagatatattttgtgtgttttaatccattgtagttattctgcttattgatgaacaaaatgttctatctttggctagtgagagcttcttcaaactggttcctgagatcttttgatgtgaccttggtagcctaataattcttttggtttcagcattttcttattcttgaaattatcttggtttagctactcaaaagtagctttgtgttttttaaagcttagaataataaagacccttttgggaaatattatgttattttcttatcaacaaagactcagtattccactatagtcagttttaagaaacatctttattctatgttactttcctgtacatagagaggcaaccctataatacaaaaatttaagagaactagcttaactttaattaatttttaaatttgagtatgagtaacacaatgtgggctgcagagtatagctgagttaaaaacagagttttactctagctttataatttgatttctctgagatgatttctaagactgttctatatttggaaaaaatatatataaacaggttgctgtttaataacagcttattttttaaaaatgtgttgagcaatgcttttatattacaggtgctgatcggattgaattatgttctggtttatcagaggggggaactacacccagcatgggtaagtgtccatttttcccaggttttctgattggagttcatagagcctggaagcaactgataatcagtttcgttggggtcctttactaatgtcatgttaactatgttatggatgttgtatcagaaatgtttatgattgtaaaaaaatcaaagatttgatcaaacatatttctttctcacatcaaaaagttgaaaggtaggtaggtaattgttaataccggttcagctgctctgtagtaacatcaaggattaggcttttataaaatctttccatgctggcatccttagtatattgaaatcccctcctggtctttgtgctattgttgtcatatattttactcatacatatatcaaaaactccatgctgtattgttagttttgtttgaagagtcaattatcttttgttaaataagagatttaaataataagaaaaaaatcatatatttacccacatgcaactaccatttctggtgttctttattcctttgtgtagatcccgtatttctgtctggtttcattttcattctgcctgaagtactttctttaactttttttgttaaaaagtatgctagtgattcattccttcagcttttatatgtctaaaatagctttttccttcatttttgaaaggtatttttgctgggtatagaattctaggttgacaggttttttttttctttgaagatgtttttccattgtcgtcttgcttgtattgtttctgacaaaaagctatcatccatatctttgtttttctctatgtaatatgtctcttttttctacctacttttaagatttttttattattggttttgaacaattttcttatggtgtacctgagtatagttttttcatgtttcttggacctgtgcatttatacttctcatcacatttggaaaattttcagcttgcagcttgttctccactccctcctttagagacttaagctattcttacattagactacttgaaattgtcccaaaagtcactgatgaacttctctatttaaaagaaaatctcctttctgtgttttcattttgcatagttgctattgttttgtccttgagcttactgaccttttcttctgcactatctaatctgctattagtctctcctggtatgttttcatctcatacattgtagtcttcatctgtagaaatttgagtctttttatgtctctgatgtctcttaacttttttgaacatgtggaataaagttatgatagctgttataatgaccttgtctgcgaattctaacatctatatcagttctgggtttgtttcatttgatttatcatctaataatatatcttattttcctgccttgtaattttttattggatgcaagacattgtgaattttactttattggttactagacatttttgaattcctacaaatgttccaaaacagtttggtccttttgggtcttgcttttaagatttgctgggcaagtctggagcagtggttaatacagagctaattattccttactactgagtcaggattcttctgtgaactctaccctgtgaccatgaattttgaaattttcctgtctggctggtggaataggcattattcacagcttggtatgaatgacaggcacattatttctaatcctttttattggttctgtcccaggccttgcgtagtttctttgcatgcatgcaccggtcagtactcagctgaatattaaaggaggttctctgcagacctccagagttatctgtcttcctttcttctttcattccttcctttcctttcttttctttccttctccttttctctctctttgctttccttccttcctttttttcttttgacagggtctcacctgttgtccaggcttgactgaagtggtgtgaccatagctccctacagcctcaaactcctgggctcaagcaattgtcctgcctcagcctctcaagtagctaggattacaggcatatgccaccatgtccagctacatttgtttgtttgtttgtttggtagagatggagtctcaccattttacccagactggtcttgaactccttgcctcaggcaatccacccatctcagcctcccaaagcactgggattacaggcatgagccaccgtaccaagcctatcttttttaaaaaaaatcctttttttaaaccattgagatagtctttgctactccagtgttatctttctgtcctccctgtactgtctcctataaactctagctacttcagtcttcctgaactctaagctttgtctccttaactcagggaattgttttggctccatgtgggtcccccatccctgtgctttggcctagaaactctcaaggcagtaaattgggtcaatcagaattgacttactaacttcattgtttaccattttcaaggatcattgcccttcactgcttaatgtccagtgtcttgcaaaccactgtttcatatattttgtctgtttttttattattattattattataggtgggagggtaaatccagtcactgttaccctgtcttggccaaaagcagaagtctgtgtatgaattgtggtctcctaagttatgctactctgaggttgataatagcattatttaatgtaaaaagtttgtatacacaacagccctttggaatcttcacatgaaaagagggcattcctggccattctaaaatccctagagcatgtctgtaaatttgagtacagtctgtttttgtaacaccaattatgattcattgcttagtattggacaactgctatcctatgcaaaattggagttcttttagcaagaaaaaagaaagaaattcatactgggtaaacaactgatggggcctgtcacagccttatactattgatggtttatgagctagccacttattatggcatatttaggtacttttatgcatagatctctgcataaaatcacaaataagtagaactttgctccctttcacgtatcttgtttaaaaaaaaaaaaaaaaggttttgctaaatgtctttgcccattaaaggaatatgaactttgaagctatttaaccatctctccagtaggttttaaatagagctgtaatgaattagaaagaagaaattggatcttggggaataatgtactggcagaacatcgagcctggtagttattgcactttcaaatgtcacctaccaataaaagggttctgagtcataaggatttttgttgagtcaactgacaagtgcttttaaattgtagcatcttctgttttctaaatcgttctatttaaccctttgctattacttaccttctaccatatatacatttttcttctcagtgtctgtcctaccttttagagccatctttgtctggtaaatgaccaataatatatcattggcttttagctcacatttgaattttaatctgctttcttttcttgtaggtgtccttcaagtagtgaagcagagtgttcagatcccagtttttgtgatgattcggccacggggaggtgattttttgtattcagatcgtgaaattgaggtgatgaaggctgacattcgtcttgccaagctttatggtgctgatggtttggtttttggggcattgactgaagatggacacattgacaaagagctgtgtatgtcccttatgggtaagaatttgtatctaagacgtaaaagcctctaatgataattgtatttatgctcacaatatagaaaaacaacatcacaaaactgactttgcggtcatagctacagacacttatactaacctaagtatttcaaatagtagttatttagatgtttggggtggggtgtatgtgtggcaaagccttcttaactctcctcaattgctatagattaggctccgctactgttcccatagaatagaaatttaagggaaatttaccatggttcctttaaccactgcaccaagaacttcaaaagtattatagttggtgaggatggaccaccaagttggaagatgcaaagaggacagaagcaaactacctatgttactaaaccaaagtacttattgaatgacctcagagggacaagtattagatgtaatgctgcccttatagttgtcagattaaatggttttcatttggtgataagccacgaccatttttttgtataaaaatcagagatttgtggaaagataagacttttgaatttgtaaggctgccattttattattatgtcagtttactgtcttgttaggcgaagaaagtattaaaaagtttcagctaacatggagaattctatatatagtaatcagtgatgacatcttcattcatgttgttatatgactttctttttatagctatttgccgccctctgccagtcactttccaccgaggtgagtcattttcattttaaaagttctattgaacagtgttagttttctaatttcaacaactgccaccacctttttatggaacacaattctgtagtgttccaaggttaccaattggttttttagatcctaggactaaaagttataaaagtagagatgtgcaatttctagaaaatttgaagccttagttatgaaaagttgttaaaagtgggtgtaggtggtggtgggatataagagagcgagggagagagcaagtattgccttcaagtgtgtgtacctatcatagcattccaagcaagaatcctgagactcattttaactgagactgtattaggtcatgtgcaaccccaaaagaataaattgttgtggctggtgaaatgaaaggtactgtctatcttaagccaggcaaaaccatccctggggctagcagtgaggtggggtttcacagatagagacttcttaaggggagagaaagttgggtatctggagaagaattgggtcttattaggaagggagaaaggagaaacagatgcaatctagtgttgactatctagtcaatgaacagatgtccacaatagtatacaaaattatttttcattatagcttgtctgcaccacagtgattttttaatgtgatactttcttgtaaagaaatatttcctgtaaaaaatcaggtagatataattttttttgtttgtttgtttgagacggagtctcgctctgtcgcctaggctggagtgcagtcgcacgatccggctcactacaacctctgcctcccgggttcaagcagttctctgcctcagcctcccgagtagctgggattacaggcgcctgccaccatgcccagctaatttttggatttttagtagaaacagggtttcaccatcttggccaggctggtctttaactcctgacctcgtgatccacccgccttggtctcccaaagtgctgggattacaggcgtgagccaccacccctggccaaaaaatcaggtagttataatttctatactcttaggctacaccttggtaaaatggaagaacaagtatctattttgccttcagagagcactgccattgcacatgaaaagaagtctacagtcaaaaaaaatttttttacttcaaatttctgttctgttctttattccaataggtttaacaaaaatattttcatattttcaaaatttgtagaatttttgggttccacatttttctcactaatgtatttaatgagatatcataatatagttttagtggtgagaaggtgctgccaccaaaatagggaaatcctctgtggtagatttagttgcctacatacactaaagggtgaaatgaaggggcctgtcccagaggaccactaccacctaatccactgcaggctagagcttcaatgtcatgtagcagtatgagaaccaaagcagaagtagattttctgttttcagtttcctgataccactttactctttgagggctctgaggaggggagaaatctcttagaaagtaggatggggctgggcacagtggcttacccctataatcctaccactttgggagaccgaggtgggtggatcacaaggttaggagattgagaccatcctggccaacatggtgaaaccccgtctgtactaaaaatacaaaaattagctgggcgtggtggcgcatgcctgtaatcccagctactcgggaggctgaggcaggagaatcacttgaatcagggagtcagaggttgcagtgagccgagaccgtgccactgcactccagcctgggcgacagagcaagactgcatctcacaaacaaaaaaaagtaggttggaagtgaaacttcatatagtctgttgaaaacaactacccttatgctatgaaccttgagtatgtggggttaatagattaatccaaaatattagtcagtaatgagaatgtgagccaaggctttttctagaactggtgagtacagtgtttcattctacctagtccaatatttctgaagccttagaacagtttcccaaatttgactcacctgcctatcacatttaaaattttaccatatatgagtgctacctgtgcacatttttatttaatcattttctttaaataaaatcttaagtatgcacccataaaaaagaacaagatcatgtcctttgcagaggcatggatggagctggagaccattatccttagcaaactaacataagaacagaaaaccaaataccacatgttctcactcataagtgggagctaaatgatgagaacacatagacacatagaggggaacaacacacactggggcctttccgagggtggagggtgggaggacagagaggatcaggaaaaataactatgagtactaggcttaataccttggtgatgaaataatctgcacaacaaactcccaagacacgggtttatctgtataacaaacctgcacttgtacccctgaacttaaaaaaaagttaaaaaaaagtaaatttattttaaatagaaacttttataattactttatattgaaaacttttcatttcttatctgcatttaagtaaatatactatttaaatgtgtaccattattaaaatgattatgcacagtggtatgtagactgtggtgtgctgatgaactggctcctagaaaaaagagccctgatttgtagcatttttaaatttctgtggtttaaatactctaccttcactgaatttttttattattattaattaaatttttatttttcttttgagacaagtcttgctctgtcgtccaggctagggcacaatggtgcaattggctcactgcagtctcgaccccttaggctcaggtgatcctcccatctcagcctctcgagtagctgggactataggtgcacaccaccatgcccagataatttttgtattgtagatatggggtcttgccacattgcccaggctggtctcaaactcctgcgctcaagtgatctccccacctcggcctcccaaaatgccaagattataggcacgagccactgcacctggccctaccttcactaatttcaggctgccagtggattaacaatctgacttgcagaattcttgagtgtttaataattggcctttgtaagccagtacaagctaggtccagcatgccactgcatgtatactacattttgggaaactctgcgttagagatacctgttcaaaattcacatcagttttatttatttcagcctttgacatggttcatgatccaatggcagctctggagaccctcttaaccttgggatttgaacgcgtgttgaccagtggatgtgacagttcagcattagaagggctacccctaataaagcgactcattgagcaggtacgtggactttatctttttttcccctaagactctgttgtggttactcctgacattctgctgtttagccagtttgtgagactatatattactgactttgtggttactctgtaggaaaagcaagcaggcaataatgtatataattcttatttctttcacacaagcctttttaataaccaaggctttcaagatcaaattacatatagatagtgcctaaagatctgatctaacttggataagcacagcaaattttaccttttctctgccatgggcattgcagttttttttactttttatttttattttttagtttagatataaggtcttgctgtgttgcccaggctggtctcgaactcttgggctcaagccatctgccttccttgccctcccagagtgctgggattacaggcatgaggcactgcgcccagccagcattgcagttttaagccacatcttttcattgtcagcccatgtatattcaggggatcccatataaaattatcatctggaggtaaattccaaaactaaaattataatcttatttcttctcatctgtcaatataagaggaaatatatttttctattttatgagttttcctggtgagctagcatcatttgtagagcactcagaaggtgactttgtaattaatagtatgtgtatttttctgatgtcagtccagaggcattataagttagtgagtacagactttgagatgagagagttgagcgtttgagactcgggtttgatacttgctatgtgatgttgagcaggttaatagtctttaagcctctctttccccctgtgtgaaactgagatgagtttaatacttattttagagtttctcagaagattgctaaagatgggatgtgttagaggcttagcacagtggttggcatatactaggtcttaataatgttaggttctgttattactgctattattaataatactaatgttcctgtgtagacatctgcttattttcacttttctatagccatgaaaataattttcagaaatttctcctaaagatctgatgtgactttgctattctgggatgtaatggtttcacagacatttattaaatatatattagatgcaggacatttgtactgtgggggtaaccaagggctaagtgtctgtgtgtagtcactatccttacaatttagtgcagaacaggcacttctaatagagcaggcaattttaatagagctctatttttaaaaggtactataggagtacattggagaggaattaaccccaaatttggggaaatgaaggttggcaataattagaggaagcttcccagaagaaaagacatccagactgcagtgttttactcatttgaaggatgtttgggagttatctgtgtaaaagttgggggcagtgggagtgagggtgaaggggatgttggtggaattgttccatacaaaacaaatagtataagcaagggctataaacaaaagcaagcataacttaaaacactgaggaatggccagaatattgaatgtggacagaatgatatccagagccttgaaaaccttattaaagtatttattttcatggtgcagcggggaggcctaaagtgttttaaaatagaagagttgatgagtcaggtttccagttttaaaaggttactcagtaaggagtagcaaataagatataaccgccatagtaatgtattgcatttcaaaatgtgtatgtgtgtgtgtatgtctgttatttgtatgttaatctattggttagtaggaagagctactcaaatattctcatacattaacttcactgaagtaactacctagtagtgtaacatactagttaaagcataggctttgtgattggacaggtctgtgtttaaaccctggctttgacccttactaatagtgaccatggatacattacctagccatcctaaacctcagctttgctcttctgcaaagttaggataataatagcacctacctcctagaatagttgtgagggatttcttcaggttatagcacttagtaattgttctatattattaaatctgacatttagtgactgctctatattattaaatcactttgatagccttagataagcatatacttctaaataatcttgtatggaaggcgaaaagaaatggtagaattcatttctttaaaaatattatttctctatgttttggaaagccttgatttggaagaaacaggcaaatatgacttttttccattctgaagtgatttcagctttttagatagtcaatgttttgttttatggatgctttgttcaggccatttgagaatatgaagcatccttgttccatttatttccctaacaatttttaaattatttgaaatagccactcccctctttcactctcttgttaactttattttttgctttatttattcacttgctttattttttctttgttatacttattgctacctggaattttattgtataaatatccctgtgcattgtctcgtctttcttgaatgtgtaagctccatgagagcaggaactttctcttactcaccatgtcagggaggaaaaacttttcttctatcctcagggtttgttattgggggcctgcaaattaaactgactaaagacagattagcaggagtaaaaagagattttatcacataagtacatatatatgtaagtacatacagaagttcacaaagaaatatgacttagaattgggggcttatataccatcttaataggtgaaggggaaggagaaaatggcacttattgggggggaaaatgactttttggaaagataattttctagagacaaatttactatgctggacatcttacttgtccaagatcccaaagaaatagagaagatctagtaaaaattaaacattaatagtaatttttaaaatttaatatattctgacttatgtttctattctcactgccttattatcccattcaagagaaagatattaaaattcacttgtttttttttttcttttttcaggcaaaaggcaggattgtggtaatgccaggtatttatttatctatcaattcactagcataacactgaactatagtggaggaagagcaaaggaggcaggaaaatgtgagagagagtattagtacattacatattagtacatgatctttaaagagaagaatatatagtttgattaaaatgtttaaaactgggagatctgtgctagaatttaaaagtttagataagaaggaaaatattgtaataggcattagctcaaagaggagcaaataaggaagcagatagagattgaggtttctccatatttgctctcccattatatagaactttatgaattcagatgttcatctctggtgaggcacatcaaatttgatgctaatcatattttgtttaggacaaatgtcctaataaacagggtttaagcaaaggtttaggcaacatccttgggtaaaatataatactgtctcagttcctgaaaatctctgattgccaaattatttcttgtaaccagaatttaatcatatgatcctgatgataaccataagatcagttaagttcataatggctaactagaaatgaacagttggagcagtttttaaagaattagataatacaacatagaagagtgagacaaatgtaaagacaatcttaatttttttaattaagtttctcaaacatataaaaaagtagaaaatagcataatgaatactcatatgctcattccctagatttaacattttgccaaatttgtctcatcttttttctatcctgaggtattttattaaagttaaattgaaagcatcatggcattttatctttatttatctctaaaaagggtgggatgttaccataatgacaattccattatcacatctatcacaataaacatttaatactcaactttctccaattgtccccacaatggtttttatagctgatatgttcaaactaggatccagtcaaggaacaagcattacatttttggttatcttttgtttgtttgtttgtttttagagatgaggtcttgctatattggccaggctggacttgaactcttagcctcaagcgatcctcctgcctcagccacccaagtagctgggactacagttgcacgctgccatgcccagttctattatcttttaaaatatctttaatatagatgtttttccttttatttttcttgctttaaaaaaaagttacattattaagtttgggctgggcccagtggctcacgcctgtaatcccagcactttgggagtctgaggcagccagatcacctgaggtcaagagttcgagaccagcctggccaacatggtgaaatcctgtctctactaaaaatacaaaaattagccggccatggtggcatgtgcctgtaatcccagctacttgggaggctgaggcatgagcatcacttgaaccaaggaggcggaggttgcagtgtgctgagattgcaccactgcactccagcctgggtgacacagcaagactccgtctcaaaataaaataaaagtttggatcacttaccctgtaaaatgtcctactttctggatttatcagattatttcctcatgatattgtttagcttgttcctcgtgcctctgtatatcctataaactaatagttaaatcatgaggtttgaatagactctgcttaaatatttttggtcagaatacttcatgggtgattctgcatacttacatcatatgacatcacatcagaaggtattcagtctctggtcatctcactactagtgatgtcaagactgaccagcgttcaaaatagtgacacctagataaagagtaacttttaaaaagaggccgtgaacctgggcaatatagtaagacaccatctttaccaaaacgtaaaaaaattagttgggcatggtggcgtgctcctgacgtcccagctactctagaggctgaggtgggaggatttcttgagcccgaggtcaaggctgcagtgagctatgatcgcaccactgcactgcagcctgggcaacagagtgagaccctgtgtcaaaagaaaaaaaaaaaaaggccatataaggggtattgtcagatatttaggaaggctttgacctataacaagcccttgaaacataagcagagagaaagtatatattatctgtcaaattgtggtcctttttggttaatcaaggaatgttaaagagactctgagtgtgatgcttttccatttagcactaaatatatatagttttgacaagtaatacttagacaattgttgacattaagagtacctttgtttaatatgcaattgttatcagctgtgtgcaaggcattacttgggatgcaaagctacacaagaaactacgttctcaagaagctgactcaggtcaaaagatgttacatacaaaaatatttgtgattaatttctttaacaaaccttatcaggtaaatgttaattgtgtgacaattatgtatattttatgctaattgtgtgatagatatgaaaacagaaataaagtaatcctacttgaggagctcacagaatagacttataaacacaaatgtattacaatttcatatgaataagtaccagcaagtaaaaactcctaggtaagtcattctgaatgcctaataagtattcatcattgagaaatataaagaggtagttgccctctaggaactttcataatgaaacctacaacatatttaggctctggtttcttcatctataaagagaagaatattaaactagttctgtgggatcctttttaaccatagagctgtgttagtctgagtctggaaagatgtattacctatgtacttaagttgctgataacttagcaacatgtgtttcagtggccagatgttttgttatttgttagaaggaatagaaggaaataatatatttgtctcttaatccttacaataagcttgtgaggtagccagtattatccctcttttattggcaaaaaagttgaggtcagtggatttaaataatttatctaagatcacatagctgtgaagagctacagtgataaagccaggatttcagtctaaatctactcagcctgtattttttctatttctttctttttttctgagacagggtctcactgtgtcgcccaggctatggtgcagtggtgcagtctcagcttactgcagcctctgcctcctaggctcaagtgatcctcttacctcagcctcttgaataggtgggtctacaggcacccaccaccacatccagctaatttttgtatgtttttgtagagacggggtttcaccatgttgcccaggctggtctcaaactcttgagctcaagtgatactcctgccttggcctcccaaagtgttggaattacaggtgggagccaccacactcagccttttttctatttcttaaggctcagtgatattactgtactactaaggaaaaaaagacaagttaatgagtctgaaagagtgtgtaaaaataggttatttcagcatctttaatggcttgagatacaaagtacatagttttaaaatattgagtacatcctatagggagataaggatataaagatgaataaactaatttcatatttatgatacactagtatcagttcagaatatgattctttatatataaatatttaaaagattgttcatcaaaacaaatgtcataaaatatttggtggtacagttttaataaagtagaatcagattcttctgtgaaatgaagtataaagctgatatcgtaactaataacctgtataataccttgcattattcctgtttccaatgaagtcagtgtagtctttacatctggggctagagacagaacagaggttctctttcagacacatctctgaggttgtgcttttgtagatttttttcctcaaacctatccttacctttctttttaatttgattttgctttaattgagggacaagcagggatagcattgttatattagccaatggacagataagattctatcatacatgttctataaacttaatggtacttccccagagtctgtagcctatatatcttttatcacttctctaatctcattctagctgggtagggagagactaatttttgaatcaatgagaaattcagtttggggattccaagtaaagtaagcagtcgttactattccttaaattttatgcaaaattctattttacttaatgtgttacttattctttgcaacaggaggtggtataacagacagaaatctacaaaggatccttgagggttcaggtgctacagaattccactgttctgctcggtctactagagactcgggaatgaagtttcggtaaaaatgtattcttcgattcaaataagaaggatgagattaatttttactttctcccaaatagaaaaactttggatgggggcatgattaatcaatggaatattgtgactactacataagtattgtagttgtttttgtagttgaaaaacatttctaaaatggttcttgtcctgtcttaaataaacaggctctttgaacataggtgaaccttgccttgtaaaggcattgctgaacttagaccagttaatagtaaacaaattctgcagttgagcttcaaatgagtcagatatgcacatgtgcccattcgcctatgatttcctgtagcaaagttaataactatggtgtaaggatggaagagtcagtcatttttctccctcctacctttagtacttagtcttccctcacatttgttctctgttttcagttattttgaaattatattaccattaagaaattgtgagtattatatggggttttttaaatacttaagaagactcttacaatttaatagtagttgaatatttctgtttataaattgggaaaaacacaatgtaaaagaagcaagatggctggctgggtgaggtggctcacacctgtaatcccagcgctttgggaggccaaggcaggtggatcacttgaggtcaggagttcgagaccagtctggccaacatggtgacaccccatctctactaaaagtacaaaaaaattagctgggcgtggtgatacatgcctgtaatttaaaaaggaaaaaaaaaaaaaaaaggaagcaagagccttagaacttacaattccagatataaaatcaagtatactgtccagtggattcagctgctggatgtttcaagtaattaattgatgaaaattatggaatatactagtccagcatacttgacctacccttgtatcatgaaatagtctataaaatgaagcggcagtaggagggcccatttaataacataattatctgttcctttattatttctgttacagaaattcatctgttgccatgggagcctcactttcttgctcagaatattccctaaaggtaacagatgtgaccaaagtaaggactttgaatgctatcgcaaagaacatcctggtgtagccagacctctctgagagacatggatatcacaggatgaaggtagaactataatctgcaattctctatgacacagctttaaccttcttctctggccaggacagtcgcaatctttgttttaagtttcacatggccatggagaatgtgcccaagaagaaaaagaatttgaaacagagatacagtcacttcctttgcttagtcttaccagtgattgtcatcatggttaaagctggtctgtgcttcttccatagacagaagcttagtctgttttcagtggaattaattgatgaactgggaaaattttaactgcatggtatgaattcagagtgtgacttaagggtcaattcaaagcagtattttgacttttcatttgtaaaataaaaatttccactattacagtatagtctcttattcttgcactaaatacagcctgtagcctacaagtatgaaaggaaaagtgttgtcttatttggttccacactttctctttttattatgtgctgattggatatgctgctttgggcaagatgctaagggtacagagtaaaatggtgcagtgtgaaaattcccagacttggaaacagaatatcaaagttcctagacttacgaagacagatgtgaactctggcattcaacaggttacttatcctgcaagtggaaagaaatggcttaactctaagatccatctgacaattttcaaagacctatagtaaaaactagaggggggttaggaaagttatcaaagcagcagtttctttctactgaagtcacagatgggaaagatggattctagtaatgaaatatttttcctatgaccaggtcccaatggtaaagttcatcactacctgtgtctgtcactttcatatttataatctcattttacacaaacaacacactgataatagaactgttgttcctatcttaggagagtaactgaagcataaagagcttccccttggccaggaagcctctgaataacatgcacagattgtgtactaatgaatgtttatatgaagagtcttgcctttatttattatttatttatttttgagacagagtctcactctgtcatccaggttggagtgcagtggcacaatcttggctcactgcaacctccacctcccgggttcaagtgattctcctgcctcaacctcctgagtagctgggattacaggtgtgtgccaccatgccctactaattttttatatttttagtagagatggggtttcgccatgttggccaggctgatctggaactcctggcctcatgatctacctggctcagcctcccaaagcgctgggattacaggcttgaaccaccacacccagcctagattttagggactttgatctttcaggatttcaacattcaggattatagcattcaggattgtgtctttggggattatgatccaaacccctctttatgtataaagcaagatatacatacagtccataacaaatatacagtgtatttatggtattaaaatttcaggagagaggagtgtttagggaaaaggagtgaccaaaaaatctccttagacatgatagtcaagaaacactgaactaggataaggtactgacaagggagaaagtcatggttaaaggcatagtcatagttaaagcgaaagcagtaaaaatgtgatataaaatggatttaatgtgaacttattttgcttaaaatgtgtcctattaaggaatacatcatatgaacattatccagaagtacaaaaataatgcagatgttttaagaaatccaaatactgaaataggatggtattcacatcttttcctgtcttacaaagaattatttatattaaatatttattaatctttggacttttttggtataatgaggacagtggctggagagaggaaaattggaagaagcctagagaggctacacgatttatatgaaaagggcatagagttacctcaggaggaagagaagagatctaggagcaataggggctgggaagtaaccacaggtgagctcaaatagcctgagatcttttaggaaaaagaaaggagattcagtgatacgagaactttgaagagaatggcaaggaagttttaaagaaggtttcttttcggttgacattatcagatgttataattgcctatttgccatctcttcaaaataatagaattttgtagtatttgcaaaaattttggagtgtgacactgttgaaaaacaaacatgaatatgtatttattccattgtataaaagcaataatttagaaattaaaagaacgttgcagagatctctaaatagagctaaagatttttttctaaagtaatgtttttgttttgtttcttagataagctgtttttcccccaaatagtagaaaaagcccatgtaacgtgggcttattactttgcaaaccattttttctaaatacccctaccaacagtttaagcagagcattatgcttgatcttatattttactagccagctgttctccatcactatttgtctttctgttctctgccaggaaacctcatttatatcagccttaaatcctaatttacatgcattcactatcttttttgtttaatcttggtaaatcaaaaatcagttaatctgtccctggataattgtatctattacaacaactaagaggaaatatattcttctgtctttggagaaataccagttaagattacaacatagcactgggaagtacagctaatccccaaacaatgaaggcattaggagtgttgaccccctcatacagtctaaaacttacatagaacttttgactcccccaaaacttaagttaaatcctgtgaagtcatgcacaacatctggacagttttctctaacaggaatttgtttttatcttgatggctttcatgggtttttctgttaacaatagtgacatcttcagtaatgtaataccttcagattttcgtaatgttgaatcagggttctcttccatagtgttgacagtccttttcatagaggaccatgtgtaatgatccttaaaggtccttatgatcccttgatctcgaggctaaattagagacattgtgtttgggggcatgtagaccactttgatgctttcagggttgaactcttggggttctgcatggccaggggcattgttcaatatcaaaagaactttaaaagacagtcccttattggcaaggtccttctgacttaagggacaaagtgtctgtctgagtccatttgtgttgctataaaggaatatccgtggctggataatttataaagaaaagaggttttatttggcttacagttctgcaagctacatgttccatgaaagggccatatatattcaaagccagaaggagttgagaaaacaaacgaggcagacaaatccaatttgtcagtattgtatggtttattgagggaatttacagacagaagcatggtcttgggtggctgcaagacaggtagagaactctgccccataaccccccagacccagggattatatcttaggaaaaagtataggtggtctggtaagaatgtataggtggctacaggaattgcagcgtatgatttctgcaccaacagggattgttttggaggaaacttgtaacgaataggtgtttctacataaagagtaatacatcaactaaacattttggaggcattcctggactcagggttagccaggtggattagcatttaaaataaagtcacttctgtctccacactgttcaagaagcatggcaccagcatctgcttctgatgagggcctcaggaagcttccattcatggcagaaagcaaaggggagccagaatgtacagattacatggcatgaacaaaaacaagagaagggggaggaggtgccaggctctttttagcaatcagtctggggaaactaatagggtgagaactaataggacaataggacagcaccaagacatgcatgaagaacatgctgccttgacccaagcatctcccattaggctcccacctctaacattagggatcagatttcaacatgagacttggtgggggccaaacaaaccgtatccaaagcatagtattctgcccctgaccccccaatcccatgtccttctcacattacaaaatataatcttcccatccccaaagtcttaacttgttctagcatcaattcaaaagtccaaagcctcatctgagactcaaggtaagttccttacagctgtgagcctatgaaatgaaacatattatttgcttccaagatacagtggtggtacaggcactgagtaaacattcctgttccaaaaaggagaaatcaaagaaagggggcaataggccccgtgcaaatctgaaccccagcaggacagacattaaaccttaaagctctaaaatctactttaacttcacatcctacaacctgaacacactggtgtaaggagtgggctccaaagccttatgcagttctgtccccgcagcttttctgggcatggctcaagtgagctgctctcatgggttagagttgaatgcctgtgacttttccaggctgagggtgcgtgctgttgatggttctaccatccaaggtctggagggcagtggccatgttcccacaactccattaggaagttccccagtggggactctgcaggggttccaaccccacatttctgctttgcattgccttagtagagtctctgtggggactgcccctgtggcaggcttttacctgggcactcaggctttctaatactcctctgaaatctaagtggaagctggcaagccatgacttgcattctgtgtgcctgcagacttaacacggaagttaccaaggcttatagcctacatcctccagagaggctggagccagaagagctgggatgcagggagcagcatcctgaggcaggagccacacagcagcagcacctgggattgtccctcaaactattccatcctcctaggcctctaggcctttgataagaggggtagccttgaagatttctgaaatggcttcatagcctttttctcattgttctgacacctggctcccttttatcattgctaatctctctagcaagtgattggactcggctaatccaatattcttggattcctctcctgaaaatgccctttccttctctaccacacggccaggcttcaaattcgctaaatttttattctctgcttttaagttctgactttaggtcattcctttgttcacatatttgattgtaggttgttagaagcagccacactttgttttttttggagacagggtcttgctctgtcacccaggctggagcagtggcaggattatgactcactgcagccttgatctcctgggatgaaatgatcctcccacctcagcctcccagtagctggaactacaggcacataccaccacacccagctaattaaagaaaaaaaaatgtaaagttggaggactcactgtgttgcctaggctggtctcaaactcctgggctcaaatgatcctcctgcctcagcctcccaaagtgctgggattacaggcatgagccaccatgcctggcctcaccacttattgaacgctttgctgcttagaaaggcgtggcctttactgtctgtatttctgtcagcactttggccacaaccgctcacacagtctaataaatcccaaactttcccttatcttcctgttttcttctgagccttctaaactcttccaacttttgcccattacccagttccaaagccacttccacattttcaagtatctttatagcaaccaccctctccttggtaccagttgtcttccttagttcatttgtgttgctataaatgcctgaggctttgtaacttgaaaagaaattttatttggctcacagttctgcagcctgtacaagaagcctggtgccagtatatcctaaccacaacatcattgattggaccaatccagaaaaagggttctgattgtccaggccctcttgtacagtcaaaagactggcagctggtgtttatcttttcctttgaaggctcaggggttagctgctatatagacaagggctgtcctaataataaacctgactgcatttgcacaaaacagtagagttagcttttccctttctgccttaaatcttgatgctcgattctcttccttactaatgtgttttgtggcattttttccttactgataaatgtgttttgtggcatttttttgtggcaaactgatgcagacagaaaaccaaataccccatgttctcacttataagtgggagcgaaacattggctacatatggacaaagacgggagcaatagacactgaggactactagagtggggagagaaggaaagagggaagggctgaaaaactacctattgggtactatgccaactacctgggtgatgggtttagtgatactccaaacctcagcgtcttgcaatatatctttgtaacaaatctgcacatgtatcccctgaagagtacaagttgaaaagaaaaaaaaaagcccctgtaggctgggcatggtggctcatgcctgcaatcccagcactttgggaggccaaggcgggtggatcacttgagatcaggagttcaagaccagcctggctaacatggcaaaaccccgtctctagtaaaaatttaaaaagtaaaaaaaattagccaagtgtggtggcacgcacctataatcacagccactcaggaggctgagataggagaatagtttgaacctgggaggtggaggttgcagaaagctgagatcgcgccattgcactccagcctgggtgatggagtgactctgtatcaaaaaaaaaaaaaaaaaaaaaactataataaacatgtttattgtattaaacatgtttccctgagttccgttagctactccaacaaatcaatcaaacctgaggagggggttgtgggaattcagatttatagttggtcggtgacaagcacaggcaaaataatctggggcttgcaattgatgttggaagttggctggtgaggagtgggaagttgggggacagtcttggggactgagccctcaacctgtgggatctgatgctatcttcaggtagataatgttgagattgaattagagtacaccgagctggtgtctgctgcagaagtgattgcttgcttggtgtgtgtcagggagaccctcactccccacatttggtcataaaagtcctctgtgttgattgttgtgagaatagaaaaaacactttgagttttcctactctcggaaagatcagtatatgaaataaattgtattgctttacactagcaacaaacaatcctaaaatgcagttaataaaagttcagtttataatagcatcaaaaagataaaatgcttaggaataaatgtaatcaaagaagcgtaagacaggccagatgcagtggctcacacctgtaaccccagcactctgggaggccgcgacgggtggatgatgtgaggtcaggagttccagaccagtctggccaacatggtgaaactctgtctgtattaaaaatacaaaaattagccaggtgtggtggtgggcacctgtaatcccagctacttgggaggctaagaaaagagaatcacttgaacctgggaggcagaggttgcagtgagccaagatcgcaccactgcactccagcccaggcaacagagcaaggctcagtctcaaaaaaaaaaaaaaaaagtgtaagacagtatactgaaaactacaaaacattgttgaaagaaattttaaaagacttaacaatgaagaaataaatggaaagacatcccatgttcatagattggtaaacttactacttttaagattccaacactcttcaattgatctacggagtcaatgtaattgctagcagaattccaactgcctttttgtgtaaaagttgacaaattgatcctaaaatccatctggaaacgcaaatgccccaggatagccagaaaatcttgaaaaagaagaacaacatttgatgacatacttcctgatttcaaaacttactacaaagctatggtaatcaaggccatgtagtactggcataaagataattatatagctcaataggatacaattgaaagtccagaaataagcacttacattatagtccattgatttttgactaggattccaagacaattcagtgggggaaagaatggtctttttaacaaatgatgcttagacaactggatatccacatgcaaaagaataaagttggacccttaccttacaccaaatgcaaaaattaactcaaagggtcataacctaaatttaagaactaaaaaaccttttagaagaaaacgggtaaatctttgtgacctttgggttaggcaaagccttcttagacataacatcaaaagcatgaatgacaaaagaaaaaaattggataaattggattttatcaaagttggaaacttttatgcttcaaagtggcatcaataaagtgaaaagacaaccctcagaatggaagaaaatctgcgaatcatatatacaatggggtcttgtatctagaatatgcaaagaacacttacaactcaacaataaacaataaccatttcccatcctggctaacatggtgaaaccccgtctctactaaaaatacaaaaaattagccgggcgtggtggcgggcgcctgtggtcccagctactccggaggctgaggcaggagaatggcgtgaacgtgggaggcggagcttacagtgagccgagatcgtgccactgcattccagcccgggcgacagagcgagaccctgtctcaaaaaaaaaaaaaaaaaaagaaaataaccatttctccaaagaaggtatacaactgaccaacaagtacatgaaaaaatgcacatcattcgggaggcggagcttgcagtgagccgagattgcgccactgcactacagcctgggcaacagagcaagactccatctcaaaaaaaaaaaaaatgcacatcattagtcattagggaaatgcaaatcaaaaccacaatgagataccacttcatacccgctaggattactgtaagccaaaagtctgaccatatcaagtgttggatagaatgtgaaggaactgtaaccttcatatgccactgatgggaatgtaaaatggtgccactccttggtaaaacagtctgggaattactcaaaatgttcaacacagagttgccatatgacccagcaattccactcctaggtatgtactcccagagaattgaaaacatatgtcctcacgaaaacttggtacatgaatgttcatagcaacattatttatctcttagaattagaaaacagttttgtaactaactccaaatgaaataaatcagtcaaagattaccaatgctaaaaccgtttggtaaatgttgaatgggagctgaatatccacagtgccaaaatatcaccctataggttacttgctagtcataaaaatagaaaatgtcataattgactatctggttgttttcaccttaacccagtaatcaaacttaacattactagtgggaaattatactgctgaaggacagaatacaggttggaccacttggaaagcagctgaaatattgaaaactctttttttttttttccaagacagagtcttgctctgtcgcccaggctggagtgcagtggcgtgatctcggctcactgcaacctctgcctcccgggtttaaatgattctcctgcctcagtctccagagtagctgggattacaagcgcacgccaccacacccagctaatttttgtatttttagtagagacggggtttcaccatgttgggcaggctggtctcaaactcctgacctcgtgatccacccgcctcagcttcccaaagtgctgggattacaggcgtgagccaccgcacctggcccattgaaaacgtttatggttagcctttgatcaagcaagagtgatttacaaacagcaccagttcataaggtggccagccatccttgtttgcttggaacttttccggtttttgcattggaagtcccacatactgaaaaattcatcattggtccctgagccagcaaaattacttttgtaccccttctccaggttctcacctccctgctcgaatcctggaattagggaaggaggaattgaataacaaggaaaaatgataaaaagtaatgagactttgttccccagaagtaactggtccctgagccaataaaggagagaagcttttttttttttttttgaaggagggatatttttacttaatgaaagcacatgtcatgaaattttaaaaggcaaaagcatcgcaagtcataatgaaattctcatttcctccttccaagcttatttattttctagcaaaatatattgtttcaactcccaggcttaagggaaataatctttgatataagaagttattgtggaaagtcattaagctgtcatgcccaaaccaaatgttcataccccactccttatcaaagagcaccagaaaatgcacccacacaagatcccctgcaagcagagaccatatgctttgttgaaatggttgagctaagagatcaaagaagctttaatagaaaaccaaagccatactcaaaccatcctgcagctaaaacagaatctcagcatgtcaaagcagaaaggaaaatcagcatgaaaagatattttatttaacactcacaggacgctgcctaggaaccaggcactattccaggcaccgtccaagtgttcactcatcgaatccctgctgcaaactgtgaggcaggtggtattagctcagtcatccccatttcacagatggggaaactgagggacggagcacttaagtcctgtgcacccaggtagctagatccagagtccacgacatgcatgtgaccactctactacacagccatgtggttgtggtctagaggtgttaactaacttgccagcggttagcactgaacgattgtgtgggtttcatacaggactgcgacccatcttttaaaaaagttcttgctaagaattaccacaaaaacaaacgtgtatggcatctaaaaactaaaacagtgctaggcatggtggcacgagcctgcagtcccagtgacttgggaggctaaggtgggaggatctcctgaggccaggacttccagaccagcctgagaaacatagcaaggtcccatctctacaaataaatacataaacaaataaatataaataaagcatatgcagcctcagcgacattttaggcagtttaagaacatctctactctactatttttccttttttttttttttgagacaaagtcactctgtcacccaggctggagtgcaatggcacaatctcggcttactgccacctctgcctcccgggttcaagcgattcccctgccccagcctcctgagtagctgggactacaggcacgtgccaccacacccagcaaattttgtgattttagtagagatgggtcttcaccgtgctggccaggctgttctcgaacaggagagaagctttaaattggatgttggctttgttgttgttgttgttgttgtcgatgtttttggtgggtaataaaaatgttcccaaattggttgtggcagtggttgcacaactctgtgaatatgctaaaaaccattgacttgtacacttcaagcggttgaattgcatgtaatttcatcttaataaggctgtttaaaaatggatgtgagaaagaagtttcagattagattagcctggacctttttatacctgagagagaccaaaaagctgtaggatctgccttgagatgtggtcaagacaagggaaggggctgggcgctgtggctcacgcctgtaatcccagcactttgggaggccgaggctggcggatcacctgaggtcaggagttcaagaccagcctagccaacatggtgaaaccccgtctctactaaaaatacaaaaattagccgtgtggctcacgcctgtaatcccagcactttgggaggctgaggcaggcggatcacgaggtcaggagatcaagaccatcctggctaacatagtgaaaccccgtctctactaaaaagacaaaaaattagccaggcatagtggcacgcgcctgtagtctcagctactcgggaggttgaggcaggagaatcgcttgaacccaggaggcggaggttgcagtgagccgagatcgcgccactgcactccagcctggatgatagagcgagaccctgtctcaaaaaaaaagaaaaaaaaagttagctgggcgtggtgccgcgtgcctgtaatcccagctcctcgggagactgaggcaggagaatcgcttgaacccaggaggcagaggttgccacaagctgagattgtaccactgcactccagcttgggcagcagagcgagacttcatctcaaaaaaaaaaaaaaaaaaaaagacaagggaagagagtttcacatggcacagttgaagacacaggtgggagcaaaatactatttcttatttgttctctagtttacgtctttcggtaaactggctacactggtttgattggatattttttcccctacaaccaagagttgtgacgaaaatattcaatccacccattcctgtgcagatgaaaaattttatcctttaaaatcacaatgttgtgtatttggattgtattgctctggttcctcacagaatttttttaaaaaatatcagaccacattggcattatgccactagtctatactgaaaatgtattcgaggccaggcacagtggctcatgcctgtaatcccagctccttgggaggctgaagcaggtggatcgcttgagctcagcagtttgagatgagcctgggcaacatggcaaaaccccatctctacaaaaaaatacaaaaattagctggtcatggtggtgcgcacttgtagtcccagctactggggaggctgaggtgggagaatcgcgtaagccctagagatggaggttgcagtgagctggaggttgcagtgagctgagatcacaccactgcactccagcctggacaatagagcaacactatctcaaaaaaaaaaattagaaacagctgtataaaatatttatataggtgtgtcattggagccctagaagagaatgtttttcttaagtgttagcctgaggagtagctgggcttctgaacaattggtttgtatatggaattatatcattataaagacatttttttttttgtctgcctagctcttttcctttctgaagctgcccctgaataatgatgctttcctggtgcgactgttaatcacatagatttaattcccctgcccatgggaggggaattggctagccagtcagaatgcctcattcctttgttcatattcattggtccagagctgggaacacaacacaaacagggctgttcagaatcctacgaaagacttttcctggagctgtcaggaaagagacactctttttgctagggttactggtcatgaggaccatgtaagtctagagctttcgtagccatttttaccaccaagtgggaagagcctacttgagaacgaaaccaacacagttgcaaacgtcctaaggatgttgtttgagactctgaacccatctgcgcctaaagctagatcattcatggacttttctattaaattagccaatacattttctttttcatttttttgtttataccagtttgatttggatctctgtcccttgcaaccaaaagaagcctcactgatatagtctctgattaagtttccctcctttcattggtacataggaaggaagctcagagtcaaaattgcagcccacatgtagcaagtggacaggatcctattgaatgaattttgtataatgggcttgtccctcgttttatcttcttttttctattctttttttcttcactcacattgtatcttgttatattttacatgtttttctaagccactacaaattctttttacaatatgacaataaatagtagagattgtttcccacattgtcctgaatctggactacaataaaactaaaggtttatttctaacgtacatcattggtttcctgtccagacttcatctctcccttctcttccaaccctggttttgtcctagaaatcactcttcttccatgtagcccatgtgctttagggaaggctgaccttaccacagcttcaggatgggcctgattaatccaagagtaacctcatccttgtaaggaattgattcaggaatttacaccactgagataccaggagaagtttgctggtggattctacttctgggagacctactgaaaatgaccttttccgtcttttactatatgttatggtgtgtgggtgtgagtcctgaaactgttgcagccatctcacccacctatttgaggattacgctgatggcgaaagagaacaaaacaaagaatgagaggaagttggagcagagccactagagtaagtcaagcctgagaactggtctatttgtgggttctggttatttgaaccaataagtattttcattcaagtcacttcgagttggttatacccttttttttttttattttttatttttcgagacaaagccttgctctgtcgctcaggctggagcacagtggcatgacctcagctcactgctgtcttcacctcctgggttcaagtgattcttcttcctcagtctcctgagtagctgggattacaggcacatgccaccatgcccagctaatttttttttttttgttagagccggagtttcaccatgttggccaggctggtctcaaactcctgtcctctagtgatctgcccgcctcagccttccaaagtgctgggattacaggcgtgagccaccatgcccagccgaagttgggtataccctttagaagaattttaatataattggagaataagttcattttccctctagcagttgctagtgacctttgttagtagggttaagaaccttccaaagctctgttacagtatgacagtcatttgcaagagatatcctatctttaggaaaactatcttactagttaagtcatttgggttggctgagttcaatggcttttaaaccaccatacagcttacataagccactcagagttcagtcgacttcataaagtactttgtaccttgaaattgtttagaagtcaattatagtttctgtgaagataaggcacctgtaaataagtgatcctatttggagatctttcaactcattcacaagggtccacttacaagataccgaagtaatggcccttaccttctttataggtcaaaagaaacagaatctccttctcctggatacatgatacaacacagttgtctctcatgtcagaagtcatgattacgagaatagcacactttagcccatatccttgtacccagcactgtactcgatgctctgtggatgcaacctcaatggtaaaataatttaagctcaaagtaagatattctttcaataagatgtagacctcttactgcaaactccttttgcaaattaccacttggtaatctctctcaaatatgtcccaaaacaacaagttaaaaaaaaaaactagctgaaaagctaagtgctaataaaagcactctcaaaatttctacttatatgtctgaacatatataaacacacagagaaatacatattttacagtgctaatattttaagtgctaataaaagcactctgaaaatttctacttgtatgtctgaacatatataaacacacagagaaatacatattttacactcttggcagtaggcttaaagatatttgttcagcaaattttcttgggcccactaatttggccattctcatgttctcaattcacaaaactatctataataatagtccaaatataaattataagaatgaatttgttattatgcacttaaataagttcatagtaaaaagaccaacatatgtcaaggtagtgtttttccttaccatgataaaaataataagagctatctatgacaaacccacagccaatatcatactgaatgggcaaaaactggaagcattccctttgaaaactggcacaagacagggatgccctctctcaccgctcctattcaacatagtgttggaagttctggccagggcaatcaggcaggagaaggaaataaagggtattcaattaggaaaagaggaagtcaaattgtccctgtttgcagacgacatgattgtttatctagaaaaccccatcgtctcagcccaaaatctccttaagctgataagcaacttcagcaaagtctcaggatacaaaatcaatgtacaaaaatcacaagcattcttatacaccaacaacagacaaacagagagccaaatcatgagtgaactcccattcacaattgcttcaaagagaataaaatacctaggaatccaacttacaagggttgtgaaggacctcttcaaggagaactacaaaccactgctcaaggaaataaaagaggacacaaacaaatggaagaacattccatgctcatgggtaggaagaatcaatatcgtgaaaatggccatactgcccaaggtaatttacagattcaataccatccccatcaagctaccaatgactttcttcacagaattggaaaaaactactttaaagttcatatggaaccaaaaaagagcccgcatcgccaagtcaatcctaagccaaaagaacaaagctggaggcatcacactacctgacttcaaactatactacaaggctacagtaaccaaaacagcatggtactggtaccaaaacagagatatagatcaatggaacagaacagagccctcagaaataatgccacatatctacaactatctgatctttgacaaacctgagaaaaacaagcaatggggaaaggattccctatttaataaatggtgctgggaaaactggctagccatatgtagaaagctgaaactggatcccttccttacaccttatacaaaaatcaattcaagatggattaaagatttaaacgttagacctaaaaccataaaaaccctagaagaaaacctaggcattaccattcaggacataggcgtgggcaaggacttcatgtccaaaacaccaaaagcaatggcaacaaaagccaaaattgacaaatgggatctaattaaactcaagagcttctgcacagcaaaagaaactaccatcagagtgaacaggcaacctacaacatgggagaaaattttcgcaacctactcatctgacaaagggctaatatccagaatctacaatgaactcaaacaaatttacaagaaaaaaacaaacaaccccatcaaaaagtgggcgaaggacatgaacagacacttctcaaaagaagacatttatgcagccaaaaaacacatgaagaaatgctcatcatcactggccatcagagaaatgcaaatcaaaaccactatgagatatcatctcacaccagttagaatggcaatcattaaaaagtcaggaaacaacaggtgctggagaggatgtggagaaataggaacacttttacactgttggtgggactgtaaactagttcaaccattgtggaagtcagtgtggcgattcctcagggatctagaactagaaataccatttgacccagccatcccattactgggtatatacccaaaggactataaatcatgctgctataaagacacatgcacacgtatgtttattgcggcactattcacaatagcaaagacttggaaccaacccaaatgtccaacaatgatagactggattaagaaaatgtggcacatatacaccatggaatactatgcagccataaaaaatgatgagttcatgtcctttgtagggacatggatgaaattggaaaccatcattctcagtaaactatcgcaagaacaaaaaaccaaacaccgcatattctcactcataggtgggaattgaacaatgagatcgcttggacacaggaaggggaatatcacactctggggactgtggtggggtcgggggaggggggagggatagcattgggagatatacctaatgctagatgacacgttagtgggtgcagcacaccagcatggcacatgtatacatatgtaactaacctgcacaatgtgcacatgtaccctaaaacttagagtataataaaaaaaaaaaatttaaaaaaaaaaaaaaaagaaacactcaaaaaaaaaataaaataaaataaaataaaataaacacagctttgtgttatcaacagattgttttgatcaacaggttgtgttggtgatgctttcagggaactaatatgctaatatcctacaacattcaccatcttatatttctctttctttcttttgagagagagagagagagatcgagagacaaggtgtcttgtaaggtctgggctttctgaaaagaaaaaaaaaatagagacaggatctcgctttgtcacccaggctgcagtgcagtggcacaatcagctcactgccaccttaaactcctgggctcaagcaatcctccacctttagcctaccaagtagctgagactacagaaatgcaccaccacaactggctaatttttttttttttttttttttttttttttttgtagagttggggtcttgctatgttgccaaggctggtctcaagtgatcctcctgctttggccttccaaagtgttgagattacataagcgtgagacattgcatccagcccttatatgtgtggggttttttttagcttatttttttcagtcttctagctcttctgcaattaaccactattaacagtttctttccgaaatgtttgataatttacttgtatttaattgcttgtgaagctatctatatgtttttccatgtgataatttactgtttatattgccccccatgttatttatatcagatatattctcagtttggctgctttcaatattaatatttgttttataacattctctttaaaaattatgtatacatatttctcttttataatatcatcctttgtttccagtactcagaagagtatttttttgtctagtgcatctttttatgttagttcatttttttctggtattttatgacctatcaaggatgtactgtatgggatgatatgaagtaaagacctaaattaatctttctttctttctttctttcttttttttaatttgacagagtcttgttctgtcacccaggctggagtgcaatggcacaatttcggctcactgcaacctctgcctcctacgttcaagtgattctctgcctcagcctcctgagtagctgggattacaggagctcaccaccacgcctggctaatttttgtattttttagtagagatggggttttgccatgttctccaggctggtctggaactcctgaccgcaagtgatccacccgcctcagcctcccaaagtgctgcatttacaggcaagagccaccgtgctcggcctaatcatttattttctatgttgatatcctgttgcccaaaaaatacggaacaattcagcccatttgcggtagtttgtcacaagttaaaagtttatcctttaaatatacaaggaacatcattctgtaccactgataactttcattatttgtaaaagtatatactctttgtaaaaattatctaaaactttgaatagttaactcttttttatagaacctaagtctaattcaatgagttcattcattatttaacatattctttgaatttattcaaaagaatttcactgtatttcaatttttaataattacaggaagaatagttttacaatagaagaaagttttttttaaaattcatgttaattcaattatctgtatgtcttttttggtccctggatattccaaaactatatatatatatatatatatatatatatatatatatatatatatatatatatatatatattttttttttttttttttttgagacagagtttcgctcttgttgcccagactggagtgcaatggcatgatcttggctcaccacagcctccacctcccaggttcaagccattctcctgcctcagcctcccgagtagctgggattgcaggcatgcaccaccacgcctggctaattttgtatttttagtagaaatggggtttctccatgttggtcaagctggtctcgaactcccaacctcaggcaatccatctgccacggcctcccaaagggctgggattacaggcatgagccactgcgcccggcctctaaaaagatttttgtttgttttggaagtataaaaatgttaatattattcttggggggagaatttgggagtaattattttattatttcctagttacagtttttaattttttataggaacatgaattactagctcaatttaaaaaatgtgaagggaaaacaatgtttttactgttctcacttaaatttggatatgtgttccaagatactacacaagaatgaaaatccttattaaatctatctctaatgattaaccaaaagtggaccactctgcttatcttggacattgaacttttgtagatttttcaaagttatttaagtgcaaaacttaattagttaacatttgcttgctaaatagaaatgatacagcatattttctcctgaatcatgtagatgagtcattcttttctattgaattatctctgtgcaatccatgatttacactgcagcacacccacactgagtcattaagaagagatgttttgagaccattaagaggagatttgggatcaatctttttacataggaccagcagagctaagtttagaattcaggtttcctgactcctttatttatgttttgcagtgtttcattgtacagccttcctatccctattaaaaatatcaaggcattcgtcccatcttttgatgcttttatgattctcagtgattccagaagattacagatcatggttctgcaatgcttctgtcagtccttttagaacccattttgggctgcaggaactttcatattcattcatttcattttttacattcattaatgtaaaaaagaaaggctcagaagcccctgccttcccccaccccaagaataaccactgtgaatagtttatttgaatcaacgtttatattgtttgaatctgttaagtgtaaatacataattttttaaatcaaaatggaatcacactattctaccacttgcttttttaaaatagactttatttcttagagcagttttaggttcacagcaaaattgaacagaaagtatagagacttcacataatgccctgcccccattatgtatggcctccctcatcatcagtttatcaccagcccccaccagagtggtacatttgtgtcaactgatgaacctacattgacataacactatcacacaaagcccatagtttacactaaggttcactattggttttctctattctatgagtttggacaaatttataatgacatctattcacaactatagttatcatacagaataatttcactgccctaaaaatgctctgagctccacctattcattcctccctccctgctaacccctggcaacctctgatctttttactgtctccctagttttgacttttccagaatgccgtctagttggaatcatacagtatgtagccttttcaggttgacttctttcacttaataatatgcatgtaagtttcctacacatcttttcatggctcaatagttcatttctttttagcactgaataatattccattgcctggtatattatgactattgatgtttaatatgatgattgatacagttggattattatctaccatgtttgtggtgactatttctctttgttgtctttgttctcttttcctattttttcttccactctttttttcacttttgtggtttagttgactgttttatatgattacattttctcttctttcttagcatatcagttatacttcctctttttcttttttacatttttagcagttgccctagaggttttttgtttgtttgtttgtttttggttttctttttgagacggagtctagctctgtcgccaggctggagtgcagtggcaccgtctcggctcattgcaacctccaccttccgggttcaagtgattctccagcctcctgagtagctggattataggcatgtgccgccacgcccaggtaatttttgtatttttagtagagacggggtttcaccatgttagccaggatcgtctctaactcctgaccttgtgatttgcccacctcagcctcccaaagtgcccaggatcccagccatagagttttaaatacacatttacaatgaatccaagtccactttcaaagaacactatgcactttacaggtagtgcgagtaccttataataacaaaataatcctaattctccctcccatcccttatgtctttgctgtcattcatttttgttatacataagcatttaaaaatatacacagaaatatgcatgattgaatacattgttgctattattttgagtgaactgctattttttaggtcagttagaattaaataatttatttcaccttatttcttctccagtgctcttcctttctttatgtaaatccaaatttctgacctatatcattttccttctctcttaagcaggggtccccagcacctgggccacaaactggtgctggtccaaggcctgttagggctgcacagcaggtggtgagcagcaggcttcttagctccacctcctgtcagatcagcagaggcatgtgattctcataggagtgtgagccctattgtgaagtgtgcatgtgagggatctaggttgcacacccttatgagatctaatgcctgatgatctgaggtggaacagtttcatcctgaaaccattccccacaaaattggtctctggtgccaaaaaggttggggaccactcctctataggaattcttttaacatttcttgcaaggcaggtctactggcaacaaattccctcagtctttgtttgtgtgagaatgtatttatgtatttattattattttatatatatatatagagagagagagagacagagagagagagagagagagagagagagagtgtctcactatgctgcccaggctggactcaaactcttggatcaagcaatccctccacctcagcctcctgaatagctgggactataggcacgcaccactgtgcctggcttctctttacttttaaagaataattttgtgggtacagaatgctggctgttggtggcttttttctctcaccactgtaaatatttcattccattctcttcttgcttgcatgcttgctgaggaaaagttggacataattttcatcttttctcctctacaagtaaggtctttttccccgggcttcattcagaattttttatctttgatttcctgcaacttatatatgcatgcctggttgtagggcttttgtttgtttgtttggcatttgttctacttggtgttctctcaacttctgtgatctgtgatttggtgtctgaaattagtatgagggaaattctctttcattattgcttcaaatatttattctgttcctttctctggttattctcttcctgctatttccattacacatatgttataccctttgtagttgtcccatagttcttggagattctgtttatatagtcttacttatttttgcagttttggcagttattttcaagttcaaatattctgttttcagccttgttcagtctaccaaaaagcccatcaaaggcattctttatttctattacagtgtttttgatctctagtatttatttctttttagttctttcttagaatttaaactctctgcttacatcgacccatttgttcttgtatgctgtctactttatccattagagcccttggcattgtgatcatagttgttttaaatttctggtctgataattccaacatcccagtcatatctgagtttggttctgaggcttgctctctgtctctttaaagccttttttttttctttttttttttttgccttttagtatgcctggcaatgttttcttcatagctggacaggatatacggagtaaaaggaagtgctgtaactagacctttagtagtgtggtatacagtgggggagggggagaggaagagttctatagttctgtgaagaggtctcagtcttttagtaaacctgtgtctctagactgaatttcacaagtgcttctcagttcctatctgccccgatccctgttaggtgggacgtgatggctagagtgggctgcagctgggtattttcagttttcatgtggaaggctagaagagactggagttcttatttcccttctccggcatcatttaggctcctataaatcaagagcattaggctctatttaaacagtttttcccaagggcagactttgtttagaagagaagaatagagtgtccaggtatatttcaaatggttacttttcctatcccctctgccagggacatggaagcaggaggagatttttctctaataaaaagagaacaatatttgagaacctctttgaattcctatgggtaaactcatgaaagtgtggagatcatcccctccttatggctgagtcactctggaatttttctctctcaaacttatctacactgggcctccggcaattcaattacagttcaggttttcctgccctagccctggttcctgctgagatttcttttcttttttctttttttttttttttttttttttgagacagtgtctctgttgcccaggctggagtgcagtggcgtgatctcaagtcactgcaagctccgcttcccgggttcacgccattctcctgcctcagcatctccgagtagctgggactacaggcgcccggcaccacgcccggccaattttttgtatttttagtagagacagggtttcactgtggtctcgatctcctgacctcgtgatccgcccgcctcggcctcccaaagtgctgggattacaagcgtgagccaccgcgcccggcccctgctgagatttctgcgccagtaaattgtgatttttgatattctcttgtttatctcttcagtttgccctgtaaccttatctctctacagatctaagaagagttattgatttttctatttgttcagatttttagttattgttaggaaagattcatgacttcctggctccttacttgcttttctcattcaatattccctatgagtacatattttatactttaagcaacttgttttgatgaacatttagattctccaccctctctttttttgattacttagaacgtttaggccagacacgatggctcatgcctgtaatcccagcagtttgggaggccgaggcgaatggatcgcttgagcccaggagtttgaggctctacaaaaaaattaaaaaaagaaaattaggtgttaatccttgaccttatatttctcaaagttttaccaagagttcccccggactccgagtcctaccaccagtgccaagagaagtatgcagcctaaaggtgcaccctgccccaagtgagatctcttagttccacagctgacctttcctggctcttctggtgagtggtatggaaaatgatggagaaactgccatatgttttcataatggtcagaccaatttacatttccatcaacagtatactagggttcccttttctccacacccttgccagcacttatcttgttgttttttttttttttttgtaatagccatcctaataggtatgaggtggtatctaactgtggttttgatttgtgttttccagatgacttgtgaagttgattcagttgtcatatacctgttggccatttatatgtcttctttggaaaagtgtctgttcaagtcctttgcccactttttaatttgttagtgtatgtttgctattgagttgtatgagttccttatagtatattgtggatattaactcttcatcagttatatggtctgcaaatattttctcccacactgaatgctgccttttcattttttttatgtgtatacttgacttttaaaatcagtaacaaggtccatacaattcacatttggctgatatgcctcttgattctcttgtaatttgtaagttcctttgactcctttccttcttttaatttatttattaaaaaatggaatcatttgcactatagaatctcccacattctggattttgacaattgcattccaatggagtcctttagcatgttcctgtgtttcttataatccggtagttagatctagaatttgaccagatttaaggccaattttttttagctaggatactgcatgggtggttatgttttagctaggataccgcatgggtggttcatgatatcatgaaaaaagcatgttcttaaagcaatttaagtgacagtacaaaaggttgggtcaggtggggcacggtagctcatgcctgcaatcccagccctttgggaggccaaggcagaaggattgttgaagcctggagtttgagaccagcctgggcaacatagtgagaccccgtccctacagaaaacatttttttaattagctgggcttgttggcatgtgcctgtagtcccagctactcaggaagctgaggcaggaagatcgcttgaacccatgaggtcaaggctgcaatgaatcatgatggcaacactgcactctagctcaggcaacagaccaagaccctgtctcaaaaaacaaaaaacaataacaaaaaaagaaaaggttgggtcgatgacagtttctagcgactgatgccaccactctgtttacagaatcacccctctcctctggccctgatgttttatcatgatatcatatttacaatgcctggcaaaggcttcattcccatttggcatactacctctcaggcaaatagaacttttgaaagcctgtattatgtatataacatataggctcacactggataagctattttataacctgacttcttcaaagaaagtttacatcatgtttaaaccatgttttagattctatatttttaattaaaaatctaaggaagaaggatatttcacatttctataaactctaagatcttgcagcagaagcgaaactgcacatttaggggtgcctgcccctctactgatgctgccctttgtgggtcatatgtccttaggaaaatgaaagactgtgcactcttgatttgttggccagctctgttgacatctttcagtggttccttttatgtatggccactcctacagaggcctcttgtactttgggaactggtgagtctccctgtccctagggctttttagtcacatgtccatccactgtttcaatgtaacatgcatctaggcaaggttaacgattaaatggttgggatgaaaggtcatcctttacggagaacatcagaatggtagataattcctgttccactttctttgatgaaacaagtaaagaagaaacaacacaatcatattaatagaagagtcttcgttccagacgcagtccaggaatcatgctggagaagttctgcaactctactttttgggtgagaaattacatttatcttcatattgactcttctcagactcagaacaagtggtagttagttaacttagggtggtcaccaacaagaaccagaaatgttagatgtgcaattggtctaaagctcaggctttttagaaagcataattcataatatctccagaggatataagatctgggaaatgtaatgcaaattattctctgtcatatgtttttttatatcagactcttgtactagctagtcgcaaaattgccttctctaaagagaaacaggtaaaaaccttccaatttaatccgtgtgaggaaggagaattgttgttgcatactttgctagtagaaggaagagaagatccgtgactgagtcttgctgagacatgttgatgttgaaatgataatgataagttctagaactggcaactaatgatatggactagaagttgagtctagggatgcaactttgggcatcatgagcattgaaataatttttgaacaactagagttgggtaatattgtttttaaggaaaagaagagacaccacttagagggtgaacaagaacagtgtaacattacggagtcatagatagcaaaaaatttcaagataggggccaatcaacagtatcaaaggtctagtggaatagaaaacaaaaaaggaccttagatttagtgattttagtaagggtttggtgagaaagtatcatctgcaaactcctagcctcagcatcagaatcacctggggcaataaatgtagtttaagtatcttaagtgattcttctgaattctaacatttgataaccttatatagaggtgagaggggcagggatgagatagcagagcacctgggcagcacctcgtgtcttagaaaggacctgggtcccaagaccctcgaggccaggagtgtataccacggcaaggtggatcttcatgggctatagtatctagacaggccatctcttgagaattctttctgagaactacctgacaaactttcttggtcagggcatcgcaagcaattctttaaagagtctgtataaataatcatataaaacaatttttaactatttataggaaaagaaaaatccacactcatgtgactcagatacaagaattggtgcccaccccccaccccccaacttccacttcacaagacacttccatttatcgcagaatgcaaagactgcacaaaacttgctggttggaagccttctgtccaacaatgctgttgtcactgctgtgctgaaactggccaggtttttaatgtaagcgctttgggccatcagagagcaaatgttacagtatgactaagcattctccctgcatggcgcctgcatgtttgaatatctgccagtgagttcagttagtgctagaaacttgaataattttttatatcccagggaactattctgtcctttaaactggggaacagtccttcttcatcctataatttggcaaatgcagtggtgaggtttactcagaatagctggtacaaaattcacttagaatcacaagaagacacgtttttggagggtgggttggccagaaagtgactacatttgtcattaaatggtgaatttgtatccatgtgcacaaataggaaaatacggatagttaaagggtaaggctggatatggatatggagttgaatttaaattgtgtgaaagcagtgggatgtgctgcagggtggttttctgtcttcacaatgcatgtatgcaacaatccttcccctttggtctccagaattcctcattcctggacagtccggaggcagacctgccactttgttttgagcaaactgttctggtgtggattcccttgggctacctatggctcctggccccctggcagcttctccacgtgtataaatccaggaccaagagatcctctaccaccaaactctatcttgctaagcaggtaaagttaacaccactgtttctgaactctaattccttggtgcacagtagagacattttcttggtggttagtgttctcttccttgtctttaagcagctgtcccaggtgccattgtctcaggtagagccaggctcaaggtttccctcacgggtcccttgctgcatttcttaaatcaaagtggctttgatttttgcataagaatggtgactcttaattcttgtggatattgggttccctaaacacaaagggcatataatcaatcaaattatctttatagcatttgagaaatgaacactggatcacctgtctttaaacagctctaataaatcagtggactgtaattcagttggcatctacctcgtgaaaatgagctagataatggatctcctgccccactgaggcaatccaactatcactcatcttcaaaaacttgggtccgaaataaggtttccattttccccgcatatttgatgagtcaggatgatcactcacagtagaaggaggaggggtaagtgtgcacagtgacaagcacgagtagggaaataatggaaaggacaggtctgcgggagaggcccaggaggggccaggaggggaggagccctcagccagctgcaccaactcactcagggaagggtcttgtgggaacccaagaccctcattcgaggttgtaaaattatctcataaaatcttccatctgcttcttttcactatttttttttctatctctccttattatcattattactaccattttaaatggagtctcactctgttgcccaggctggagtgcagtggcactatctcggctcactgcaacctccacctcctgggttcaagcaattcttatgcctcaacccctcccgagtagctgggattacaggagcacgccaccatgtccagctaatttttgtatttttagtagggcgggatttcgccatgttggccagactggtctcgaactcctgacctcaagtgatccctcctgccttggcctcccaaagtgctgcgattacaagcctgagccacctgcacagcctctgtcagtccttatctttcaacaggtttttagaaaggcaaactagattccattgttctactagcatacctaacaatgactcaggttacctggaatcttaaaggaggaaagagcttggccaaaggaagtggatttcaccttgacactttgaggttggggttgatcgtgggttttattagattctgattcaaaaaagaacagtctcagagcttgggacagtgtcactgtctcccttgttgacctgagtgcccatcacaggacctagcatgtttcaaacactcccactggaatacaacatttgttgaatgttggtgttaaatgcattctgggaatagtggttgattcaagagtaggttagagctgacctcagtggtacatacctgtaatcccagttcctctggaagctagaagtggtaggatcactagaggccagcctggcaacatagtgagtccccatctcttaaaaaaataaaataaaataaaaataaaaaggaaagaaacatatgttagactttgaacattctgaacattaaacaactctgaacatttaataacattctcagtacccttggaattgagtcattgttcgaggttagaagcaatcaagttgggaggcttcttctactttctggagcttccaagaagaagctggttaatgagcaaaccaatatcccatcctaataaaagctattagttaactcttttacaaaatactttattgagatataatgtacataccatacagttctctcatttaatacaattcaggccggatgctgtggctcacgcctgtaatcccaacactttgggaggccgaggtgggtggatcacttgaggtcaagagtttgagaccagcttggccaacacagtgaaaccccatctctactaaaaatacaaaaacattcggctgggcatggtggctcacgcttgtaatcccagcactttgggaggccgaggtgggtggatcacgaggtcaggagttcgagacgagcctggccaacatggtgaaaccccgtctctactaaaaatacaaaaattagccaggcatggtggcggacgcctgtaatcccagctactcaggagactgaggcagagaattgcttgaacctgggaggtggaggttgcagtgagctgagatcatgccactgcactccagcctgggtgacagagcaagactccgtctcaaaaaaaaaaaaaaaaattagcctggtgcagtggcacacacctgtaaccccagctactcaggtggctgaggcataaggatcacttgaacccgggaggtggaggttacagtgagccaagatcgtgccactgcactccagcttcagactctgtctcaaaaaaaaaaaaaatgcaattcagtttttttcagtatattaacacatatgtgcaaccatcaccacagtcaattttagaacatttcattatctttaaccccgtctcctccttccccttatccttagcaaccgctaaatctcttttctgtctttatagatttccctgttctagacatttcatatgaatggaattatataatatggttcttttttgattggcttctttcacttagcacaatgtgttcaaggtttatctatgctgtaccattgctataccatgtattgatattttacccctttttttggggggacggagtctcgttctgtcgcccaggcaggctgccagcatagattcctgccaacagtgtgttaaagtgcatgtccttgcaccattgtcagcattgagttattttcaacttttatgtgtaaacatgacatctcactgagttgctttgcatttttatgaatactaacgcaattgtttttttaatttgttaagtgtatttcatttgcgaattgtctgttcatatcacttccttattttttaatgggggtgtgagtgtatttaacttatcttttgaacggataattctcagaggatcacaaagttcaaaaagtacaaaaggagctgggcatagtagctcatgcctgtaatcccaacactttgggaagctgaagtgggagaattgcttgagcccagcatttcgagaccagcctggccaacttggtgagaccgatctctacaaaaaattaaaaaaattcaccaggcatggtggcatgtgcctgtggtcccagctactcgggaggctgaggtgggaagatcacttgacaagttcaaggaggtcaaggctgcagtgagccatgttcacaccactgcacttcagcctgggcgacagaggtagaccctgtctcaaaaaaaaaaagaaaaaaaaggacaaaagggtacccagtactctagtcactcattcatgtcttagttggcaaccattgataccagttcctcatatctccttccagaaatagcctgtgcttttacaaacagctacgtacatatattttttcacacaaatgctagcgtcccatatgtgcttttctgtgtcttagagctccttccattttagcacataaaaatctgcatttttctctctttttgtggatattttattcatttgtacctaagcagccaaactcgtactgataccaccatgcagccaaggttactgaaacctctttgattagacttcagtcatatcccacccccaaatagacccaataggtacaatgaaaaccagtatatcaaggcagaatacagagctgtaaaacaagaaaaatcctatgagggagggagggaaaaaggaagaattccgccactacccagactaaaatcgagttaatatattcatctccacacgttttcaggctgcatgttcatggagtaatttaggaataaacctatgatttgtgaagcactgaaatacttagtggtttgctgtattacatcatagctttccccagcagtttccaagacagcttccaaaaactggcaggagaatttcgctggagctgcatgcaggactaccaagattcctccccacagttatgaaaccgatttttccgggactggttgttctagtcttctgggtgccaagtctgacttttctgggaatggttgatccacactggaaggtttccagatgtgttccccaggcattcctggtggtaggaagagtagaggcctgggtattctgtagatgctgagccctgagtcatattgttgcttattctttggtcagttggctttctaccacctcttagctttcattctctgtaactagcttgtatgctgtttgtagctaagattcagggtattggaaagttcttgcagctgctggaggctgcggtgtttctgtctctgaaatccatcattaattacacacagctgggccggagagaacatgattctggtcttctgtttcttctcctggatcttatcttcattcttcactgtgctcttctctgcagaaatgtgtagttttactctgggactagtggaagaattagagctttcctgaataaatagatccacggaggaaggaagatgagagagcctctgagtgggacacctcctcatatgtcatttgcaaggatggataactttcatcagggccacgagtcacaggcattggtgaaagagtccctagaattggatgctttagaataaggcaggctttggagacaagctggactcacactcatgttattgaaaaggagcggggaggggcgggtgcagtggctcacgtctgtaatcccagcactttgggaggctgaggtgggtggatcacctgaggtcagaagttcaagatcagtctgggcaacatggtgaaaccccatctctactaaaaatacaaaaattagccgggcataatggttcacacctgtaatcccatctccttgggaggctgaggcaggagaatcacttgaacctgggaggcggaggttgcagtgagatagcaccactacactccagcctgggtgacagagcgaaactccgtctcaaaaaaaaaaaaaaaaagaaaaaggaaaagaaaaagaaagaaaaggaaaggtggaggaaaattaaagagctggactgtaaaaatggctaaggctttaagatttaagtatctaggtagaatatcttagagaaatatgtaaaatttctccaaatgtaaaagtatcaaaaagccaggatgaagtcagtcccctccacattactgggagacaaccagctcaatcccacaaaaggtctgcttctttctttgtaatgattccttgagatgctgttatttgaatgtaccataatttatgtgtcctgtatgacatgaatttcattggtttctaatattttgcatcatgagcaatgctgccatacacagctttgtatatacttgtgtatacaagtgtgtctataggataaattcccaaaaatgaaatgactgagttaaggatatgtgaactcagaatttttatacacagtgcaaactgccctcaaagaggctttccttggtctcatcaactttgtatcacattttttgatgtttgctaattggttaggcaaaaatgttatgtttcaaattatatatactttcaaattgtattctcatattaatgaggttaagcacatgttcatatgtttaaaagccttttgtgtttttttaaatccatttaatttatatactcatttttttacattgagttattagggtatttttaaaaattactttgtagaagttctttataaagttaactggtcttttttgatatgaactgctcagtgtatttcaaatccattatatgagtttaatatatataatcttatggcaagaccccctccttttccctggcctggggaataggctgctggttagtaccctctagtcatctccaagggcaggtgccttacctctagcttgctctattttacctcctaatttacctaaaggcaaccatagcttaccgcctatgaagctacatttttttcccaaaacctcatagtctcttgtgaggaaaacaccctatagtgtattatatacttgaaaaaatgcatttcagttattaacatgtctttgactctactccttactaaataatagcactgatcctattagttaaagtaaaggtgcattcatctcctttcttggctggttttcattacaaagggcccattatctctgcctgtgccattctggataaattagacttaaaagaatgaataagggtagatggataggggcataaaagcatgaggggaggggagatggtgccacataaatatcttcattttgatggctaagatgatggtatactcagtggaggcagtaattttccccctgataggtggggatgtgggcctttaaaacagtgtaatgtgtatcatgtcttctgagctcataggacaaatactgattggcattgtctgggatcaagactggggctgagtgtggtggcttatgcttgtaatcgcagcagtttgggaggccgaggcaggcagatcacctgagatcaggagcttgagaccagcctggccaacatggtaaaatcctgtctctactaaaaatacaaaaattagccaggtgtggtggcgcacacttgtaatcccagctactcgggaggctgaggcaggagaatcacttgaacccagaaggtggaggttgccgtgagccgagactgcgcctctgcactccagcctgggcaacagagtgagactccgtctcaaaacaaaaacaaaaaacctatggcctaagaaagggaatagtgccttttaaacctagtactttctgttgctatataacaaaataccccaaaacttagcagctaaaagagaattctttaaatcttaacagtttctgtggatcaagaatttgggagcagcttacccaggttctgcttcaaggtctctcaggaggttgaagttcatatgagctgtctggggttactggcatgtgaagtcttgactggggctaaaagatctgcttctaagacgactgtcacatggctggtggcaggaagcctcagtttctcactggctgttggcggaaggtctcagttccttaccaagtggacttctccaaagagctattggagtgtcctcatgactggactggtagctttctccagagtgagcaatcggagacagagaacaaggagaaataatccacattgcttttttatgccctagccttggaagtcacacgctgtcacttctgccattttctattcaccagaagtacatccctaagtccccagcccacactcaagggagagggaattaagctctgctctttgaagagaggaatatcaaaaaatctgcagacatattttaaaacttcacactcagcattcctcaaaaacaatgatcatggcatactttgaacattattctatcacttgaactgtatgtatccattctttccagaaatatttattgtgttatctgaatcactgcataccgcttttcctatccatcaccggaaaccattctgttctaagagccttataaagaatgatatcctcttaacagtggtctttttcccttctcaggtattcgttggttttcttcttattctagcagccatagagctggcccttgtactcacagaagactctggacaagccacagtccctgctgttcgatataccaatccaagcctctacctaggcacatgggtaagacctataccacttctgccctgtttaccttttcattacccataggcatctaggtgaaatgtactctttggggatgaaattaattccaaggtcatctgtctttttcgcgggatccatagtgaggcaaagcttggttggaatggggtgaaacaaattttagcttttcatcttcatttgagcattaatgtatagaggcttcttcctaggttaagtattagctttcatgactaagatgtatatcttatgtccgcacatcttgccatctaagggtcacagaagagagctaagtttcttgatgtaaaacaatattttaaatctgtaaatattgtttttaaattgattgatgactttaaacaatggatcagtgagcttagagtttatataaacttgatatcaaaaaactaatgtctctcttgcaggcattttttcagggggtggggcctagacagtgtttaaatagcaattgaattaattgccatcaattcagtggcaactaatgacacataattatttgaactttcaaactttattgaaaaatcaaaatgtctggcaatcgcaaacctacgttcaggcagagcaatgtcagctgggcctcagtagcagtggctcctttagaccatgtgctcggcacaatccttcctgggcaaatgttataaatcatggctctttccccaccagaatgctgttttaggagcacagctaggtctaggaaatcaacatttaatttattatatctaatgtgagatggtataaggcaagattttttaaaaaaattaattgcttaatcttatattagaaaatcaagctacagacaccttgcacctaattaattagaacctgccttccgaccttactactgcaatgtctgaatttaattttcatgggtcctggaaaggtttttctagctctcaaagtaactccactaaaatgcagatagtgaccttctacattcttggctaacatcccactcaagtgtggtccatggagatgaggcactaaaagaaaaagctggatggcatgggggtgacatgttcaacctggcatctgtgtgctctctacctggccagattagtcacgacagtctcctccctcagccctcctttcttcccatgttctctgacatccttctcccctcagtcctcggttagtggcagtattcttcagaacatcatgtgaatttctctccagctcctggttttgctgatccaatacagcagacaatggtgtgtacagaaaaactcctggttcctgtccctattctggattctctcgatactctgtggcactttccaatttcagactctgatccggacactcttacaggtaaggaaaaaaagagtggatgacatgaggaggtaccatggggcaacctctaactcatagtaaatggcatcaagttgagctccaggatcgaattgtattagagggatttgatcataggctttaatcacaagcattgatatatacgggccatgtagacttcctttggacaaaaggctcatttttcctctttgtttttttcctcatagggtgacaattctaatctagcctactcctgcctgttcttcatctcctacggattccagatcctgatcctgatcttttcagcattttcagaaaataatgagtcatcaaatgtgagattctaaatatgcccatctcatatattacttaattggatgatatcttaatgaatataactttaagatgtctgggtctcacggaggcgccacaagcccagaataaggtagtacagaccattttatgacaaggaaacagatagtgatgagagtaaaatactgacttttactttcacctaccaattgtcagtgtaattaattcattcatatatctatgccagaaaatctgattatcattctactagtggctttagggtctccaaataaacacatgttgataagctgactttaacatcatatctagtttctagcacaacattatatcattaaaaaatcagtttctgattttagagtcccatgaagttcctgtctccaattggtttacatttcgatttttttgtgtctttcagaatccatcatccatagcttcattcctgagtagcattacctacagctggtatgacaggtaggaaagcctggagtatggattggctgtatccttactctctcactcctctgaaagtgtcagaaagattttttattttattattttttttttgagatggagttttgctcttgttgcccaggctggagtgcaatggtgtgatcttggctcactgcaacctccacctcctgggttcaagtgattatcctgcctcagcctcgcaagtagctgggattacaggtgtgagctaccatgcccagctaatttttgtatttttagtagagacggggtttcaccatgttggccaagctggtcttgaactcaagctcatgttccacctgccttggcctctctacgtgctgggattacaggcatgagctacagcgctcagccgaaagattaattttttaaaaatgcctcctgtgacctccatttctcttctacttagagtcagagagtgttaaaacttacagaccaacttaatccaagccctccattgggcagattgggatgctgaggagaagatggagggggatttgtttttggtagcctaggggtcccacaggagaaaagaaaggaggcagtaggacaggaaaggaaaaatttggaggcaggtttggagggtaaggggtgaaatagctggcttgggctaccagaggatctggagcaggcacccttggcctttatagttgcagggacccatttggcaggctggtgaagtctatgaatcccttctcaggaagtgttttaaatgcatgaaataaaatgaaagacattggattctaaagaaaaccaaatatattgaaatatagttaccaaaatattttaaaaacaaatgtgtgatttagtaatacaagtacttctttattaatgcattaaataacaagatctagtgatgagtctaataattaccataattttaaagtagttatgagcataagtgagctatgagaacatgtgggatttctcagcctggcatggtagctcatgcctgtaatcccagcactttgggaggctgaggcgggtggatcacctgaggtcaggagtttgagaccagcctggccaacatggtgaaaccctgtctccactaaaaatacaaaaattagcctggcatggtggcatgtgcctgtaatcccagctccttgggaggctgagacagaagaattgcttgaacctgggaggcagaggttgctgtgagccaagatcgcaccattgcactccagtctgggcgacaagagcaaaattccatcaaaagaaagagagagagagagagaagaaagaaagaaagaaggaaagaaagaaagaaagaaagaaagaaagaaagaaagaaagaaagaaagaaagaaagaaagaaagatttctaaatgctagatttcagttagatgctattacaaataacaatataatttaggccaggtatggtggtttacaactgtaatcctagcactttgggaagccaaggcaggaagatcacttgagcccagaagtttgaggctgcagtcagctatggctctgtcactgaactccagcctgggcagagaaagaccatgtctctaaacatatatataatttattttccatccatattctcaaactcctggctaagagccctgatcaagagagatggcacagtggctggacatagtggctcacacctgtaatcccagcaccttgggaggctgagatgtgcagatcacttgaggtcaggagttggagaacagcctggctaacacggtgaaaccccatctctactaaaaatacaaaaattagctgggggcctggtgcagtggttcacgcctgtaatctcagcactttgggaggcagaggcaggtggatcacctgaggtcaggaatttgagaccagcctggccaacatggtgaaaccctgtctctactaaaaatacaaaattagccaggcgtggtggtgtgtgcctgtaattccagctacttgggaggctgaggcaggagaatcgcttgaacctgggaggcagatcttgcagtaagccgaggtcgcgccactgcactccagcctatcgacaagatcgcaactccgtctcaacagaaacaaaaaaagaagaagaagaacaagaagccgtgtgcagtggtgcaaacctgtaatcccagctacttgggaagcttaagcaggagaatcactttgaagccgggagatggaggttgcggtgagccaagattgcgctactgcactccagcctgggcaacagagtaagactctgtctcaaaaaaaacacaaaaaacaaacaacaacaacaacaaaaaaccacacacaccaaaaacaaagatgccacaggggctgctttatttcttgagggcatcaaggaggcccccaaggagatgccagagtggcagagaggcagccagtgtttgaggaggaaggagcaagagcagggtaaggtgatgctcttttagctgtcttccccttctcttgtcttctaacacattcttttgcccccacccattccttttgctgctctccccactcctctgtcaagttcaaagggccaggagatggggatagtcccattcttctgtccctctatcccagaacctggaggtaggttctgatagaagtggtggagatagcctctgacccagcctgggggtctcagcctgtggttcgctcttgttccagcatcattctgaaaggctacaagcgtcctctgacactcgaggatgtctgggaagttgatgaagagatgaaaaccaagacattagtgagcaagtttgaaacgcacatgaagagagagctgcagaaagccaggcgggcactccagagacggcaggagaagagctcccagcagaactctggagccaggctgcctggcttgaacaagaatcagagtcaaagccaagatgcccttgtcctggtaactttcccttgagtgtctgtgtgagcgcgctgcatgtttcaggcaagggtacatcagcatcatggcgattctgtccttacatttttatagcacttcatacttctcagtgcacttcatattattaatggtattcacaatactgatactaccttagtgatggatacatggcgtgtaatgtactgttctctttcctttggggtacttttgaaattttccagaatgaaacgtggttttgaaaaaaataataccttagcatttctagattttgcaccttggtacaaattagcataagcaggcaatttgttgattcattcacttgaaaatatttattgagcacaactgtgtgtcagtgaccattctgggcactaaaagattgctcatcttttgtgagctagaaaatatgtagtaagcccatacataggttactctttgaaagtaataatagctattaagaaaataaaacaatagtgtatttggagtgaagtgcgacttgagacagggtaacaggggaagcttctcagaggagatgacatctgaacagacactcaaatgatgagatcaggccctctgagggacagtcagagggaagtgtgttccagtcagaaggagcaggcatgcgaggctgagaggggaacacatttggcttgctcagggaatggcaagaagatccaggacagggtgcgcatggggtgagatgggctcaaggaagtggacagggattaagctatgtggacccctgtgggccacaataaggaatctggactttgtctgaagtctgattgccagcggaagattttgagcagaggagtaatgagactggattcatgctgtgaaaagcttacttgggcggctccccagaggatggatcgttgtgggcaagaatggaagctagaagggaggccagggcagttgtcctggcaagggagacccatcagatgggacctcagtgaaagacattgtgagagagtatcactggtaggctgagaagctggaatttggggcaagatgagactcaggaggacataatgaggaggccaaagcatagacagaggctggtgactgagtcgtaatgccccatgtattagtttcctagggctgccatgatagagtaccacaactggatagcttaaaacagaaatgtactgtccccagctcaggaggccagaaggctgaagtcaagatatcagactcgctcccgctgaaacctggaggggaaaatcctctcttccaccttctagtgttccccagcaatgcttggcattccttaacttctggatgcatcactctgacctctgcctccaccatcacaggaccatcttctctctgtgtctgtctcttctcttcttgtaaagatatcaatcatactgcattagggccccagtgacctcatcttaatttggttacatctgcaaagaccttctttcgaaataaggcacattttaaggtattgggggttagggcttcaacatagcttttgggggtggggatacaattcaacccataacatctcacagcaaccatgaaaagaacaagcatgaaaagaacagaaaggacctctcagcatcatgcccaggcccttcactctcaggactgcccctcaggcccccacgcagatgggtctctctttttacatgggactcttaccagcttagttgcctggttttctaatctaaaatagattacaagtatcagttaggagcgggagagtggaacagtgaaggcagctagaagggcagaagcaactaggccagggagagatgatcaaaacctgtacagagaaggccacggggctcacaggctgaccaccctggagctgctcaggccagtaacagacataactctgtggacactgttgtttggttttgtacctaggaagatgttgaaaagaaaaaaaagaagtctgggaccaaaaaagatgttccaaaatcctggttgatgaaggctctgttcaaaactttctacatggtgctcctgaaatcattcctactgaagctagtgaatgacatcttcacgtttgtgagtcctcagctgctgaagtgagtctccaggcctcagatggtcctttcagggcctcctctgccaccctcctttttgccactgtgtatgcaagcaggagcttttcttaaattcccattttttaaaaatgctcgtaattttcttccaccttaaccttacagcattgtgttcatgaagaccgcaggcagttttcaagatgtatgatgatatgtactttagcctctctcttttccatgtctgtctcctcatagggggccgggtaattgttaggggctgtttcttgttaaactgctaagggctgagccagatccaagtggcgggtagcatacccctggagagtaactgacttcatctctccatcgcagccttccacgggaggttcaggttaatcttgacaagacttcacaatctgtcatgacctgtggagtgaaccacctgcagggaaagacagggccaaagcattgcagtgacagctaggtggagcatttctgtcattatccattctcacagccatgggttatcaaccctaagctcttgctgctcatctccaagtaaaagccagaacgccaggctggacatggtggctcatgactgtaatctcagcagtttgggagattgaggcaggaagattgtttcaggccaggagttagaaaccaggctggtcaacataacgagaccccatctctacaaaagaaaatagttagctagatgcgatggcgtatgcctgtagacccagctatttaggaggctgaggtgggaggatcacctaagcccaggagttcgaggcttaatgaactatgatcctgccactgcactccagcctgggcaacagagtgagaccctgtatcaaaaacaaaacaaaacagaaaggacactggtaaaactgtagacttaggtctttcaaaggctttggacaattctggtcacttttgttacctacagtgtaaagatagtgtagtctagctggctgtgcatgaggagagaggcatccttggaggccttatgggtataactaacttggcttttctctggcagattgctgatctcctttgcaagtgaccgtgacacatatttgtggattggatatctctgtgcaatcctcttattcactgcggctctcattcagtctttctgccttcagtgttatttccaactgtgcttcaagctgggtgtaaaagtacggacagctatcatggcttctgtatataagaaggtaagcagaatacggcaggtatcaccaaagaaaatcccctcagtaaatatgagcattgattccaaggttgaggaaaatgtgatggaaatggtaacttatctcaacacttaatgttgactggccatacagcctcctttagatgtttctttggaaattagattttgagaagtgtgttcacagacaatgggtggagaggccaggagggaaaacgtactccccagggagaagcctgcaagctgttctggtgctcaggatccaccttgcagccctgaaggcttggctacccatccatctcttcctgcctctcttgacaaggtgaaatgccttggaaaagaatataaggtcagaaaagaagctggtgaagggtcaaactcttaaaaccaccaacatttaactcaaatacttaatgaaatccagctcagagacctggtgtatccatctcaaattgcagtcttgccggagctccacctccccagaccaaatttcacctagcaacttctttttctaacctttagtgctaacctaaacctcctctgtctgacttcttttttcagtttgtaaatacattcatgctgattactgagttctgcagacctggaagctttttcatttccttaagatgattttgctcatcttccctctgatacattgtttgttgttgttgttgttttgttttgttttggttgtttttgagatggagtctcgctctatcaccgaggctggagtgcagtggtgcaatcttggctcactgcaacctccatctcctgggttcaagcggttctcctgcctcagcctcccaagcagctgggactacaggcacgtgccaccacgcccggctaattttttgtatttttagtagagatggggtttcaccatgttagccaggatggtctcgatctcctgacgtcatgatctgcccacctcagcctcccaaagtgctgggattataggcatgagccaacgcgcctggccgatacattgtttttaatggttaactttctcaaggaaactgtatgttcctcatgtcctccataccaagatgaagtcccattttgttccttaagaaatgaaaatacagtagttatgatcagtgactacaggcttgaggagaaaattcatccaggaggagataggttccaatctttttataagttggaacactagttgactttcttcctttttttcttccatcactggaaagttccatcatagtaacttctctattacagttcctacttttctcctttgctttcctctctagaaacaccactgtgtctttgtcttccctgagtagatgttggttcgttgagagacagtggcagataatccaagtgtctttaaatcagaagtctagtcaagtcctttgaactcccagataccccccaactggaatttgccttcctccagttgatttttaaaatctccttatttcttctggagatactgagtttctgctggtttacaagttatgaggtcactaaccagcctgtctcagccattgctagtaaagtacacttctacaattttttcataattgtgattattcattcgcactattttggttcttaatattccaggttttgcaactattacaattaataaagagatttataaaatagaaccctcaatgacacttttattcaaataaatatcgctattagaagagtggaagaaaattactaatttatatgtttagacaatgcttcactacttatgaaacattttttacattcattatcaattcacagggctattgccctgtgaaataagtacattatacctattttacagagaaaaatcaggcttagataatttcaatgcctgcaaacacatagccaggagttgtccccagacaagggctactgggactgtatttattgaaaatagaaatatatagtgattaccttgaagggcaattagatgttgttagttgttgtttttttttttttcccctcttccataccaaagggaaggcatagcagtgggttgattcctctagaaccttggtggtctaacattttagaaaactttcttctttttactgtacagccaagaatcctaatatgttccaaagaatgtattggtggattaagatgacagtaatgcttctaggaggagatggaagtagtatgggccacttgtagcctgtacactgtctttgtgggaattacaaggtggctctccttcttctggaaagatgcagtctactccagatggtgccttggtggcatagtgcaagttggtttcagtgctgtggtacatttgtgcaaggcattgttgtaagtgacagacctgtggctatcagcctcctgacctctctaacatgagaacaggaagcccatactacaagatcaggcatctagatagtgcctgaaaaatcctgacacgaaagtcttttattttattttatttatttatttttcaagacggagtctcactctgtagcccaggctggagtgtagtggcatgatctcggctcactgcaacctccgccttccaggttctagcagttctcctgccttagcctcccgagcagctgggattacaggttcctgccaccatgcccgtctaatttgtgtacttttagtagagatggggtttcgccatattggccaggctggtcttgaactcctgacctcaggtgatctgcctgcctcgtccttccaaagtgctaggattacaggcgtgagccactgcacacagcctacaaaagtgattttacttcaaagtttgaagtctgaagttttcctcttcattctaaattctctgtccttcttgggaatgattgcaacctcttcataagagtatgactccaaataacattgccacatcaaaagcctctgaggtcaaaatcaatacatgctggttccctccttcccttctccctttcctccttcccttcctccctctctccttccatccatccatccctccttttcttccatccctcagtatttgattctctactatgtgccacataatatagtagtgaaatagacagatgttgccctcatcctcacagagtttacatctagtggagaaacagaaaaaaacaaagtaattatggttcattgtgatgaatgtaatgacaaaggtaagctcaggatattatgagagtacacaggacgaatatctaaccccaacttggtagtcacggtggttttcttataagaagttacatctcagctgacaccaaaggataaataggagttttctgggcaaagaagtgtgtggatgggtagagttggaggaaggtgggaataagaggaaagagtggtcaagaatgagagaataccatgtgtaagatttggaggcaagaagtcacagtgccttggagaagctgtgtccatatggagcacatccttccattgtaatctcacttcctgagcttcctcttctactccctagtatccttggctttgtccatgggtcctaatttcaatccttatctttaggcattgaccctatccaacttggccaggaaggagtacaccgttggagaaacagtgaacctgatgtctgtggatgcccagaagctcatggatgtgaccaacttcatgcacatgctgtggtcaagtgttctacagattgtcttatctatcttcttcctatggagagagttgggaccctcagtcttagcaggtgttggggtgatggtgcttgtaatcccaattaatgcgatactgtccaccaagagtaagaccattcaggtaaagaaaaagtcacccagaagaatataagctttctttaaagtgtaaaccctttttcttactctactctaattcttaatgggagtttgggcaaggcaaagctggtggaagactttctaccatctcaattgtacttagctgtctctgagttcccttttcatcttctgatgactcttagggtttatatatactcctctgcattcatgttagagggaagagcctgactggggaaggaagggctaccccagagatgctgcacataattcttccatcttgctctgctgggctgccctaagaacagggatttggggccctgcttctccattatggcaatctaaaccaaccacagagagcagtcgcatgagtgatccaaatttcagcctgagccttggcaatcaccccgctaccaccaggtgggagggctccgtgtggacagtgtcctcagtcctgccagaagtcacaggttgggtgggtggacttgacagtgtatatgatttattcactcatttgttttgcattcaagttacaaataattgttttgaaaatatttcttacatatcttacttctctgagaacacagcagtgagttagggctcctgttctcatggatcttacattctacctggtagggtggtggagagacaggcaatacacaaagaagaaaaatatcagatcatgataagtattatacagagaattcaacagggtgatgagatagtgagtgagtgggtggttattttcaatgagttcagggaaggcctcttggggagtggacatttaagctgaactctgaatgatacaagcctgactgtaaaggagaaagccttgggaagggcagggaaagaacagcctgggaggtgggtacagtcaggcaagggctatgggacagaaacaagcttggaacaagcaaggatcagaaagaagatgggtgcggcaggagcagagtgggcaaagaggagagtggagggaggtgaatcccatcactgggcacctcaagttcttactaagtgacagccacaaagtagcagtgaggcctgatgtctgcagcaaacctgagccctctctcatggaagcgtatattgtttttcttttgcttttttcctggcaggtcaaaaatatgaagaataaagacaaacgtttaaagatcatgaatgagattcttagtggaatcaaggtgagaatctgagcgtaggtggctctctgtgggtaaggacagaagcagtggctctcttggcctttgcaaaccctggtagaggtgatggattcctgcttctgggccggttgtgtcacatgacttttgtttcatgtcctcctgtccctctcaggtcctccgttgaaccccaatttctatttattcaccctaaatagcttgttttgttttgacactttactgtagaagtgtttaaacatgtagaaaagtagagactatcatgaacccctacaaacttttcacccagctccaggaattatcagcatgacctaactagtttcatctataaacccacacccctcacacttgctagattattttaaagcaaatctcagagatcttgtcatttcattcataaatgctgtgtatgtagctctaaaagaaggatttattttaaaaatatagccacaataccagtatcatacctacaaaaaaaattaacattctttgataccatcaaagttctccagttgcctcatatgtgccttttgtttgttttgctgttggttagattgaataaggacccaaaaaatgtccatgcatgatatttaattgatagtgattttaatctactacagtctctctctctctgtctgtgtgtgtgtgtgtgtgtgtgtgtgtgtgtgtgtcttggtcattccaaaaaaactaggttatttgtcctatttcctgtatttcctgtaaattgatagttagatctaaaggtttgattgatttatatttgatttgggggcgggagtacaaggttgctttcaagtggtgctgtgtgcttcccaaactgcagcgatggtaacttgagcgggcccaggtgctgtcagcctgatccatcccttacaaggtttcctgctagtctttcactagagcagtggtttgtgatgctggcagcacattagaatcacctgagaaatttgaagtttgtaaaacccactgaggctgggagcctacttcaaaccattgaaattggactctgggagtgaggcccagacatgtgtatttttttaagttccctagatgattctaatatgccaccaaggtgaaaaacactattgtaagaattttatgatcattgcctaggtctgttatttcattaggaattgcaaaagagtgaaatttttaaattctgttattcccttgacattgattagctggaattttatgaagaagaattatctttcatcaacttgttggttaccctaaaatgaagtttgtatgggatagacagaaaaaatgcttgcttctttccctctatttgccagctttcatgataatgcatttcatcctccagaggtgaccaataagttcttttaactaaatattgttttgaattaatacatcttaacattatcctaaacttcttaaaaatgaaacagagcccccttttaactccttgttaattctccacacagagctctgacatgtccttctgtgaatgtggcaaaactaaaagagagagctggttttgaatctcagctctaccactgggtagcttaacttgccaaaagtttggcaaggttcccttgcctctctcaacttgtttccttatagtttaaatgaagataataactctacaaatgtaaggtgactaactcaactcaatttgcccagaactttttaagtcttaagactggaaggcctgtgtcctaggcagccctttagtcccaggcaaactggaacagttagtcatactaaggttgttataaagtgagataatgtatttaaaatgctttgtacatagtaggttgtcaacaaatacaagctacctttctgtaatcatactttataatctggatttctattccccacattttggggactatatcttaaaacatgggtggatcagatacacctggtgccctttcaggggcaatcatgtgagctgtattttttttcaacttattagatcctgaaatattttgcctgggaaccttcattcagagaccaagtacaaaacctccggaagaaagagctcaagaacctgctggcctttagtcaactacagtgtgtagtaatattcgtcttccagttaactccagtcctggtgagtagcagaggggtccatgggctgcgtattcacctggacctgcatcagcttcctgaagaggaagttcacttttgatagactagctggcatctctaggcctgaccgcaagatccaggggacttgtccctctcaccgccccatgccacttttcctcctttgtaccatacccccagctctagtttcaccttcgtgtactgtacgatggtctggctcccagagcaacttttcaggatgcacagcaagaatgtggtatcaggaaggattggcttaggaggctttcttgtcttctttgggaggtggtgtaggtctatagtggaaggaacactgatataggatccaggagacctgagctctggtcctagtaatccattaattgactttgtgaccttggagaagatatttcctcctctcctgggctcagttttctcatctgtaacatggggaggctggatgatccttaaggcgccttcaactctgatatatggtgttcctgaaacttagcacaatgctgcttggtcccttttaggaataaattgctcatgaccttgccctttccaggtatctgtggtcacattttctgtttatgtcctggtggatagcaacaatattttggatgcacaaaaggccttcacctccattaccctcttcaatatcctgcgctttcccctgagcatgcttcccatgatgatctcctccatgctccaggtaggtcggcattctcactgctaactccctgtctctggttaaaagccttggagtccagaatgactggctatcacatcccatgtctaacttttgctggtaaactttcaagagagagatctgtttggtctctggagaccaatggtttgaccttaataaaatcatgagttttctgagccccagtttatctaactataaaatgaggataatcataccaatctcatctacctcacagggagacaatcttgtgaaagcatttagtgagattattatgtttagtcctagtactgggaacatttcccagcccagtttctctcatatttctccaaggctcttgaggtgttgagatagcattaggcaaatatggcccaaagggagaagagagaccctccctttgcataaacccatgtgttggtcaaaccaaatgcaaattgagagcctcaagctatcagaaaatgagtctggagttcaggaaaccttggatggaccagagggaatacctgggttctgaaaaactgagcatagtcactgatatgcgacaagtaccagatctgcagaggaaggtcaccggacaggcagcagactgatgagaaggcctgaatgacaggagtgtggtgacttgcatttatcccctaagtgtctggcttcagagagctcagaccatgggaaagagaaggcctccctgtcctggagggtgtaaagaaaagctggcagatttggcaggtaaagaagcaacaggatctttttagatacaatttattgcataaatagcaaaagcaagatcagcaaaggtatcagctccctgcattcctggtcctcaggatgacactgaatcaaaaagggtcagatggtggctgggctcacacctgtaatcccaacactttggaaggctgaggcaggcatatcacctgaggttaggagtttgagaccagcctggccaacatggtgaaaccccatctctactaaagaaacaaaaattagccaggcatggtggcacacacctgtagtcccagctactcgagaggctgaggcacgagaatcacttgaacctgggaggtggaggttgcagtgagccaagattgcacccttacactccagcctgggcgacagagtgagactccatctcaaaacaaaacaaaacgaatcaaaacaaaagggtcagatggcgatgcaatgtgagcagtggggtactctgtttttgaggagctgatccatgcagcagttaagtggttctatagcctgcttctgtaccctaaggagggaacaggcagaaagcctaagacttcatcagagcctgggtggcaatgaaaaaccatctcatgacagcctctttggaagagagggaagtaggtgagaaacatccttgtagaagtgcctcgaaatcttctcaagttctcaagttccagggactgcagggtattctgccaacacttacctcacctgccatttaagcttcggctatctggcctatgtggaagtgtgcagggtccccctgatgctatagccagttcctctttagaggctcccaggagtggcttagttaggatgctgggtgggcatcagggcatagacttagttaaataagagaaagccaggggcctagttaccagaaccagatagaagttaattttttgtcttagaaggcaggaggtagtttctggaattagggccgaagactggagagagacagcagaagagttgaactccatgagtttgctcaaggactgaaatagagcatccacttccatctgtctatggtgggatagcttccggggctgagttcggtggagattaggagatgccagctgtggcaaatagaaaatcatggactaacgacaaagtcaaaatctctctgcttgtgctcgttactgactttaattcttgagatcctttgtgtccttctctaggccagtgtttccacagagcggctagagaagtacttgggaggggatgacttggacacatctgccattcgacatgactgcaattttggtaaataaatttggaagttgcttcccaaacttattcgcagtactggtgccagaattttgataatacaagagcttagtagcagcaaactgagagagagtgtggagatttgtcttgagcctatgcttgcataagatacaaactgttcttacttgaattatgtttacacttagagcagattgctcaactagattgctaagtaaagctgggccagctcttctgaggataagcagggaatcctgcaaaagatccagaaagcagaagtcaggatagagccaagtgtgtgggattgggaaggtagcctggagtgaaagaatactcagattctgaaggtttaaagattgggggccagccatggccagagtgggcataggactggaatccatagtggggaggatttatatatggaggtggaattccgcggatc

SEQ ID NO: 3805 - DNA, 679 bp, Homo Sapiens
ttttttttttttttttgtcattaaaatcaattcttttaattgctgaaattaacatacataattgatgtaggtgagagagatcacaagtagttggatgaaatttatagtaaatcatcctattgctggagacagtcatgaagagctccatcctgttgatctgctgaactgaaagggactgttcattcagccttcaaggacatgcacatcataaaggaggccaagcaaaaatcaaagcaaacaatagctacatgtttggaaaaatatacatcgaattacacagacaggaattatgaccagttgtgtacctgctcaagtgggaacattttaaaatgtgacagtcatctatgaatactgaaatgtgatggtcaagtggtccatcatcaacacaaatacaaatggaaatcattaaactttctggaggggccatttgaataacaatgtcaaggcctgggtttttcccagcgggattttggtcttcttatctggataagcacaagcagagaatggctgggtagtgggcgttttctggatgcagctgcacgcttgctggacttaacactgcaactcctccttcttggtccgccgggaggcctctgccaagcttttgggacttgcatgggccgtggagctggggaccttctcaaaactggcctccatttgggtttggaccgcctaactt

SEQ ID NO: 3806 - DNA, 339 bp, Homo Sapiens
  misc_feature (336)..(336): n is a, c, g, or t
gcacgagtagcaacggggctggttcagggtctgaaacagagtttgggggttgtttgggattagtgaagctactgcctttgccgccagcgcagctcagagtttgattatttgcaatgtcaggctttgaaaacttaaacacggatttctaccagacaagttacagcatcgatgatcagtcacagcagtcctatgattatggaggaagtggaggaccctatagcaaacagtatgctggctatgactattcgcagcaaggcagatttgtccctccagacatgatgcagccacaacagccatacaccgggcagatttaccagccaactcaggcatatactncag

SEQ ID NO: 3807 - DNA, 536 bp, Homo Sapiens
cacgaggggcggctgcacgaaggatgaacggtttgtggcagaggtgacctgcctggaccccctgaggcgcagccgcctggaggtggccaagctcccgctaacagagcatgagctggagagtgagaataagaagtgggtggagtttgcatgcgtgacattgaaaaatgaggtctacatctcaggtggcaaagaaacacagcatgatgtttggaaatataattcttcgatcaacaagtggattcagattgagtatttaaacataggccgctggaggcataagatggtggtgttgggtggcaaggtctatgtgatcggaggctttgacggcttacagagaatcaacaacgtggagacctacgacccctttcacaactgctggtcagaggtataggacacgatttctaccagtaactgcctgtattattacttcagtgcttttttaaaaagctttggaacgtgcctgccgtggtggtcagctttctgatcactttacttccaaggagaacagttttggtggctctgagcttccctcctcc

SEQ ID NO: 3808 - DNA, 1529 bp, Homo Sapiens
atagtctacacagagctccccttgctgcccagacaagctgaaggaccacaggaaaagccatggagacttcagcatcctcctcccagcctcaggacaacagtcaagtccacagagaaacagaagatgtagactatggagagacagatttccacaagcaagacgggaaggctggactcttttcccaagaacaatatgagagaaacaagtcttcttcctcctccttctcttcctcctcatcctcctcatcttcttcatcctcctcctcctcaggtcctgggcatggggagcctgacgttttgaaggatgagcttcaactctatggagatgctcctggagaggtggtaccctctggggaatcaggactccgaaggagaggctctgacccagcaagtggagaagtggaggcctctcagttaagaagactgaatataaagaaagatgatgagtttttccatttcgtcctcctgtgctttgccatcggggccttgctggtgtgttatcactattacgcagactggttcatgtctcttggggtcggcctgctcaccttcgcctccctggaaaccgttggcatctacttcggactagtgtaccgtatccacagcgtcctccaaggcttcatccccctcttccagaagtttaggctgacagggttcaggaagactgactgaggccacttccaggtgggcagcagaggcaggccccagtgtgaccaccactgcgacccctgagcccacaagggcagagcagcattctgagagacgcacaggagaccaagccagaccaataaacagaacacttttccttccatgtggtctgaatgttggcaccagcccgggcaggggcatctcatttgggcagtactgctgtgcaacccagctgcaaggatggaaggcagagggtgggtgtggggcctgaggcttcacagtacctggaccagcaggaagattctgggaggtcactgctctcagaggacagcaagggaccctgagctctgcaagctgtgatctgtctgggttcatggtttttctcaaatcccaggctatctgcatgcgctctcaggtgctaccgagccatcctgggagagatggatggtccactgctttgaggcagggagccatcgggctggggccccttggtgaacctgatgcaggtaagatgctgaggactaaaaccattttttttgcacccaaaaaaaaaggcaggaaaatgatcatcagaaactaaatggcagccaggcatgggggctcacgactgtaatcctcgcactttgggaggctcaggctaagggtcgcttgaagctgagagttcaagaccaacctgggcaacatagtgagacccccatctctacaatttttttttaatgaccaaatgtggcggtacatacctgtacatacctgcggttccagctactcaagaggctgaggcaggaggactgcttgagcccaggagttcagggctgcagtgaggtacgatcaagccactgcactccagcctgggcgacagagcaagatcgtttctctaaaatt

SEQ ID NO: 3809 - DNA, 638 bp, Homo Sapiens
  misc_feature (420)..(420): n is a, c, g, or t
  misc_feature (579)..(580): n is a, c, g, or t
atattatggctgctgccacggagcataatcgcccgagcagcggtgacaggaacctggagcgaagatgcagccccaacctctcccgagaggtgctctacgaaatctttcgctccctacacaccctggttggacagcttgacctcagagatgatgtggtgaaaattacaatcgattggaacaagctccagagcctctcggcattccagcctgcattgctctttagtgcacttgaacaacacattttatatttacagccttttttagcaaaacttcagtctccgattaaagaggagaatacaactgctgttgaagagataggaagaacagaaatggggaacaaaaatgaagtaaatgacaaattttccattggcgacctacaagaggaagaaaagcacaaagaaagtgatttaagagatgtgnaaaagacacagatccattttgatccagaagtagttcagataaaggcttgaaaagcagaaattgacagacgaatatctgcatttattgaaagaaagcaagctgaaatcaatgaaaacaacgtcaaggaattttgcaatggtattgattggtatcaagaannatagtgtgcaagaactgatgcgatttttaccccttaccccggatttaaaagtcacgta

SEQ ID NO: 3810 - DNA, 420 bp, Homo Sapiens
  misc_feature (2)..(2): n is a, c, g, or t
  misc_feature (350)..(350): n is a, c, g, or t
  misc_feature (393)..(393): n is a, c, g, or t
  misc_feature (409)..(409): n is a, c, g, or t
anttcggcacaggcagacagactccccctcttcctcctagtcaataaacccattgatgatctatttcccagcttatccccaagaaaacttttgaaaggaaagagtagacccaaagatgttattttctgctgtttgaattttgtctccccacccccaacttggctagtaataaacacttactgaagaagaagcaataagagaaagatatttgtaatctctccagcccatgatctcggttttcttacactgtgatcttaaaagttaccaaaccaaagtcattttcagtttgaggcaaccaaacctttctactgctgttgacatcttcttattacagcaacacccattctagnagtttcctgagctctccagtggagtccctcttgtctgtccgcngggtcagaaattggtncccagatgaat

SEQ ID NO: 3811 - DNA, 563 bp, Homo Sapiens
  misc_feature (337)..(337): n is a, c, g, or t
  misc_feature (440)..(440): n is a, c, g, or t
  misc_feature (455)..(455): n is a, c, g, or t
  misc_feature (525)..(525): n is a, c, g, or t
ggaaggttcaattcacagagcacttcatatctaccaggatatgttcctaaaacatccctgagttcaccaccttggccagaagttgttctgccagacccagttgaggagaccagacaccatgcagaggtcgtgaagaaggtgaatgagatgatcgtcacggggcagtatggcaggctctttgccgtgggtgcactttgccagccgccagtggaaggtgacctctgaagacctgatcttaattggaaatgaactagaccttgcgtgtggagagagaattcgactggagaaggtcctgctggttggggcagacaactttcacgctgcttggcaagccacntcctcggaaaggatcttgttcgagtagaagccacagtcattgaaaagacagaatcatggccaagaatcattatgagattcaggaaaaggaaaaacttcaggangaaaagaatcgtcangaccccgcagactgtcctccggataaacagcattgagattgctccgtggtttggttggtgattaccgggntaatacttaccaaaggataaaataaactcctgcttccc

SEQ ID NO: 3812 - DNA, 400 bp, Homo Sapiens
  misc_feature (52)..(52): n is a, c, g, or t
tttttttttttttttttggcatttgaatattttatttctagacttcctttantgttgaaccatcaatattttagtgaaaggagactacatagactagtttgatgatacctttgttctttttctacatgtgtttcaaaaaagtaaacttaatttcacatacactttaaatagaattttttttgcatatacaaggaaatgtgattacaaataccttttgaagaggattagtgataatctgtaccttttgtaagcaaaatgaatgagagtactattagaaacctgtggattgaagctttcattcatcaaagaaaatctgcagctctgtgcgcttccgctcaacccaattccttaggtcctctgaataaagcagtggactgggagttcttgcacccgctcctca

SEQ ID NO: 3813 - DNA, 618 bp, Homo Sapiens
  misc_feature (606)..(606): n is a, c, g, or t
tttttttttttttttttttaaagatccccaggttattttattgctgtactcagaggtcagttaatgcccccggccgcctcaccctcccctcggcggtggctgagtcctctgctagggttcgcgaacggcagcgggtccgagggtcacctttgcatctcgccgccggaggcgcccccgcctcccctccccgccgccgggccagccggggtccgaggcccgcagcccccggctgggaaggcaggtctggagaggccgctccggttctggagggaggggaggctctccggaaaggggtggcgagagacccccgccacgactcccaagcttcttcgcgcgcgctggaggggacacggtgggcgcctaattctcggcgtagcagtaggtcccataggctgcctgttggggcctggggaagccgaaactgcgcactccgggatccgggagccccccgcagcgcggcctcggcgtggtgattgggaagcgcacactgccgtcagccagccagccgccgtcgcactggtctagccccgaaaacttccaggcggcgtagaggtgcccaaccttggccaccacggcgccgcgtcgcctgcacgccgcgtgggcttnagacagcgtcag

SEQ ID NO: 3814 - DNA, 397 bp, Homo Sapiens
tttttttttttttttttttttttttatagcataaatgggtttattttaaaaatgacaaaatcaaaatcgggttcattaaagagacaaatagacaacctaaggcaatatgaaatagcaaaactgaaatggaggccttaatacagatactgacaagatttttcaaattataaaaaaatactatgaatatatcagggtaaaagtttgagaaatatgtattttccattataaggttagtatagctctgataccaaaaattcaaaacaaattgcaaaagaaaacaaatctcattgttggacacagattaaaagaatctgaaataagatgttggcaaatgaaaaattcagcagggtttatagaatgatgcataatgaccaaatagagtttatccaaaaaaatc

SEQ ID NO: 3815 - DNA, 424 bp, Homo Sapiens
tttttttttttttttttttttttttttttttttgggggccacgggctgtttattgatacacactaaacacaattttctcctaatcctagacccagcattttttgcattacactagcccaggggtcctttctgaaactacactgttcaagttacagacatatttaaatgtttaaatttaaaatgttaaatttaacattttaacatgtttaaatgttcataaacacatacaacctgcacttttactctttgagaaatgaatgcagtaaatttacttagctttctgagggaaatgatagcctgaaggcatgacgttttcaaataccccaaactccaactaagataacctggaacctattaaatggatatccaacattttgtactgaactctaaggatatgaacaccaggacaatggttattctgagg

SEQ ID NO: 3816 - DNA, 6170 bp, Homo Sapiens
gaagcggcggcggcgatggtgctcggggcgccgcagagccggattaactgtgctgataaggaggtaatttcataggagctgctaagatgggcatgaggatcaaactgcaaagcaccaaccaccccaacaacctgctgaaggaactcaacaagtgccggctctcagagaccatgtgcgacgtcaccattgtggtggggagccgctccttcccggcccacaaggctgtgctggcctgtgcagctggctacttccagaacctcttcctgaatactgggcttgatgctgccaggacctatgtggtggacttcatcacccctgccaactttgagaaggttctgagctttgtctacacttcagaactcttcacagacctgatcaatgttggggtcatctacgaggtagctgagcgtttgggtatggaggacctcctccaggcctgtcactctacctttcctgatctggagagcactgccagggccaagcccctgaccagcaccagtgagagccactctggtaccctgagttgtccttcggcagaacctgcccatccccttggagaactccgaggtggtggggactaccttggtgctgatagaaactatgtgttgcccagtgatgctggagggagctataaagaggaagagaagaatgttgccagtgacgctaaccatagcctgcatctgccgcaaccgcccccaccaccgccaaagacagaagaccatgacacccctgctcccttcacgtccattcctagcatgatgacccagccactcctaggcactgtcagcacgggcatccagaccagcacgagctcctgccagccatacaaagttcaaagcaatggagacttcagtaaaaacagcttcctcacccctgacaatgcagtagacattaccactgggaccaactcctgtctgagcaatagtgagcactccaaagatcctggctttgggcagatggatgagctccagctcgaggacctgggggatgatgacttgcagtttgaagaccctgctgaggatataggcacaactgaggaggtgattgagctgagtgatgacagtgaggatgagttggcttttggagagaatgacaatcgggagaataaggccatgccctgccaggtgtgcaagaaagttctagagcccaacattcaactgatccggcagcatgctcgggaccatgtggacctgctgacgggcaactgcaaggtctgcgagacccacttccaggaccgaaactcccgggtaactcatgtcctgtcccacattggtattttccttttctcctgcgacatgtgtgaaactaagttctttacccagtggcagctgacccttcaccgacgggatggaatatttgagaacaacatcattgtccaccccaacgatcccctgccagggaagctgggtctcttttcaggggcagcctccccagagctgaaatgcgctgcctgtgggaaagtattggccaaagatttccatgtggtccggggccacatccttgaccatctaaacttgaagggccaggcctgcagtgtctgcgaccagcgtcaccttaacctctgcagcctcatgtggcacacgctgtcccatctcggcatctcagtcttctcctgttctgtctgtgcgaacagctttgtggactggcatcttctagagaagcacatggctgtgcaccaaagtctggaagacgccctcttccactgccgcttgtgcagccagagcttcaagtcagaggctgcctatcgctaccacgtcagccagcacaaatgcaacagtggccttgatgcacggcctggttttgggctgcagcacccagctctccagaagcggaagctgccagcagaggagtttctgggtgaagagctggcgctgcagggccaacctgggaacagcaagtatagctgcaaggtctgtggcaaaagatttgcccacacaagcgaattcaactaccaccggcggatccacacgggggagaagccataccaatgtaaggtgtgccacaagttctttcgaggccgctcgaccatcaagtgccacctaaagacacactcgggggccctcatgtaccgctgcacagtctgtgggcactacagttccacccttaacctcatgagcaaacatgttggtgtgcacaaaggcagcctcccccctgacttcaccatcgagcagaccttcatgtacatcatccattccaaagaggcggataagaacccggacagttgactgggtcccggcagagccacggggagctcccaagcagcagccaggatgctgatatctaagaggtgttggtccctccccagctgaagttataattttgccttggtaggaattctgttctgtgttgtgtttaaagaagaaaagaagaagaaatagcacataagctgttactgttgttgagaagcaacagccctatcacatttacctccatacctgttcttgcccatgcagggctatgtttttcattcttttgaggctggttttgggatctagtcaagcagttggtgtccactagacccccttccccagcctctctagttttagtttactgataggttttatgctgctaagaatccaaccaacagcctcacttaacagaggaggtaaagggaggttttcactgtgggtgttactgcaggcctccaactgggatgaccagcaatgagaaagattttgggaatgtgatcattcagaaaagacaggtcagcagggcagtcccctcaggttccagccctcagcagggacaagacatcagggatgttggtgtctgcttatctacagccctaatctgctgattgaacagtgaaaatcttttggcagctagatccatactaggcacagagctttctatttaggtcagaaagctttgggatgaacccctgccagccagaaggggtgtcctgcagtgccaccagaagtggcagcctggatggacaggagaggtttctcttttctcctcatttccaaagaaacaggattttatggagtgatggcccgggacgtccggccttctgtggggcagagaggatagggaaccactttgatatagtcatctgttttggccacttctgttggccatgagtgtcttggtggagaggtggggatgtatctgacagcagcagccttgccttaatttatatctggtctcccgtccagaagtgtttggcccgtggtgtagatgagctgactccatgaagtggtggagtggcagaccgcgagcccttcaggattaaagggacctgagtaactggtggtgtgtagcagggtgtgcgttctgactgtctgtcctagtcgggtaacctgtttactttgtgctaacagtgccggagctttgtcagctcacctttgacctgctggaatttatcctgatctgtcgttgccatcacctccagggggcgctattggatggcagctggttcaggccctccgtgggtggctgcagagtgtgccggcacagcccacgcagctggttagctccactcttacttggttttctaaggggctttgcccaaagaagtcttgagggatagggccctcgatcttgcatacttgtgaggtgccacctcagtagctcatactacctcaccctgctcaggtgagctctgggagtccctggcctcagccctggcactgcccctggtgggattcagcaacaccccgggctgtttcacaagcaagtggttttcattaactcacaaagcctttttggacattaatatttatttatttttgtttttgtatacacattacccagcatctcttttgtataagagactttaggaaaatgagtttctccccagcaagtagccatattccagagaacagccttgaccagagatgtggagaaccaggggtataactaagggaagacatgtcaagcccttaagcaaattcttcttctccagattgtctctagcataataaacccagggaacactttaggccatgggtgtatgttctataaagttcgggacagttaaattccaggcctttcatcccccttccttcctgtgatggagtagattggggacagggttgaggggaacaagtgacatgaatgacctatttgcacagtttggaagcctcctgtctttatttatattgagatgtcagacaaaccaaagctccatccttgttggacctgctgcttgtccccagccctgaactgataaagcctcagagttggagtgcctggctctctggtggggtgaccattagatgaagggacttgtacagtggccagtttaaaggtccacctttgaccatctaaacccaccttgttcagtgtcctctgaggacatcctcatcaggaaagcagtgttgagactcttcattgctgactggcttctccctttcttactcacactgaccattagaatttaagaaggaaatgtgtaacagactacagtcaagtgtctgctacattttcaagcatgagcaatccctcccagactgttggtgaggactgatttttgaaatgctggtgtgagagaggtggtaattacaggaaccagccgagtggctgagagcagataaatgtgctggagaaacctttttccttaacagagggcatcatggatgctgggtggtctgtgtacttaacctgaaactgtgaagttttccctttttgccagtaaaccaaaaagcagatccttgaaacttggcccttgaaacacgaaacagaaaactgcatcccctgatcccccgggggctgatcagattgatcagggtggctcagttggtcccagtcagatacgtcataggatcagtagctcatgagatttgttgaccaaaccctctccctgttggtgacccctgtattcacacctgaacttcccgtttccccccaccccaccaaagtcatgtctgcttcctctgcctccagctcaccctcttctgaatggttttgcttgaaacactatattgtggcagagggcaccctgggatacctggtagaaggtattcattttattttgcatttttaattgttttgactttctgttcatttgattttgttgctccctctctcctggaacctagtttactactctcttctgtgttactctgaagttctgtttaagccttgaacatcctcttctcccattttcttggtatgtactcaggaccagctacatcatttgtggagccctcttattcataaattattaaaaatttcaaggtggtggtcatagagcattaaaccaaatatgaggccattcccaacttgttttccgaggggaaaatggtaatacttgtgtggcacccggggttaaacagcagaggctccatgtggccagaggcagagattagtatcctggcactccagtgacccactgggtgactcactgatgccacagcacccgctaggaagctctgctgaaccttagtatttggtcctaaattttatgactccatggagttcccgtagtccatggctagttaggaagaaaggaggtgggataagggtcaggcccaggtgacccctaagaaccaggagatgggtaaaagtttttttttatattctgcttttctgatctgtgagtacctgtttgtctccaggccaaacctttgggcttaaatatctttttcctagacaggtttttgctagtgttgaattttcttcttcctctggcctccttctgtgcccctttccccaagcccaagactgcttaacttccaaagcaaattctagatagacactgtatttattggtatgggagtgggctctatggggtggtctgcacccatctgggactcttttccctaaatcctgcaccaaatgagtcaggaggcagggtgcacagcattagtttcaatgtggttatgcatcataagcttaacatcagaatgaaaatgaaactcgattttgatgtttctttaaaacccttcccctgtccaatccactcgccgcccccaccttgaatagctaaagtctcttatgaaacagagaagagttgttgacgtctaactccttccattaaattaataagtactgacctcctaatatttaagtgtttactatctattgctgtaaagttttgtatattttgtaaacttttttccccaaatagtagatgtctaaaatcattgtacatctgattcttttatattccattgttcagcacaaagtgtggtttttatttagaataaaaaaagaaatttgaaatg

SEQ ID NO: 3817 - DNA, 309 bp, Homo Sapiens
ggcggttgtcgctgagttggcgaccgcgggagacgctgctgaggcggcttcggttgcgggtcggaacggcgctgctctgcggggccggtccaggctggcagctgccggcgcttggcggtgagggcgggctcccgagtggccccccaccgaagcggtgggaccagcggctgaggccaggatgccgtccaggcggcgcggcggctcctcactcatcccagatgttggttatctttctgaagtagactgtccatggcctgacattttccgaaaatcattttgagcaaaatatctgtttaataccaggtaccc

SEQ ID NO: 3818 - DNA, 371 bp, Homo Sapiens
ttttttttttttttttgcttatgacattttatttgctccttattttttaatgcgcttctggccccatgtcctgtaaacagaccaacttttccattctctggcaatgccaggagagccaaacaccaaacaggcggggctggtgccatgatcctgggccactcacgtcctacaattacaagagccgaggcccaggccagggggtctggaagggggccttgctggcctctgcagtatgcagggaagggtgtgatttgaaatctatgtgtgggaacggggagaaggttctctgcctcctgagctcccccgaggcttggaaacagctctctctctgccccagtagagggagaaacaggaagggcttcatgcaccca

SEQ ID NO: 3819 - DNA, 203 bp, Homo Sapiens
actttttggctgttctgaagagtgttactgtgaacattcatgcacaaatttttatgtggggataacttttaactggtgaagagtataaatcgtggttttccaagtgtagtctaaggtctaacagcatcggggatatctgggaaattatcagaactacagaccctctggctgcaccccaaacctgctgaatcggaaattctgag

SEQ ID NO: 3820 - DNA, 480 bp, Homo Sapiens
  misc_feature (433)..(433): n is a, c, g, or t
taaagctgtatagtgtgagagtatttaaacacaaattcacaggtccctcttatattcattatataaaatcaatttttgaactggaaataaatttatagtttatctaatcccacataacattttaacagtttttttcctccccttatcttttagcagatgaatgtgtgcaatctcaagggaaaagaataagaaccttcagctttttagagaagccaccactactgttacgtgattaacccagagcagataacaaaacaccaggaggttaggacattgccttaagggctgtgactgagaaggaaaagggaggtcacagaaataaacagctggctacaaagcatgcttaaaaatgaagaattttatttttgaccaagatttaagatattatccaaaatatcttaaatacagtaggatgacacatctgaataagctntccgcttccaggaatgaaagaactgaggaatgaggaattggtagcac

SEQ ID NO: 3821 - DNA, 584 bp, Homo Sapiens
gcggccgcttcgtaccgcgtcctgagccgcctccttggctatggagaggcggcccccgagccaggcccttcgccaccgcccccgggccatggccccccgccgccacccttcctcgcgcggcccggcccgcggggctcccggccgccgcagctgatggtgttccgcaacgtgggtcggccgccgtaggaggaggacgtggaggcggccccggagccgggaccctcggaactgctgtgtccccggcaccgctgtgccctggaccccaaggccctgccgccgggcttggcgctcgagcggacctggggcccggcggctggactagaggcgcagttggcggctctggggctcgggcagccggcggggccgggggtcaagacggtcggtgggggttgctgcccgtgtccgtgtactcctcagacggcccctccgaagcccagccgcctgttgcgccccgaaggccggggaggaacccacggaaacgagcgacgcgctgctggtactggagggctttggaatcggaggccgagagcctggagactaacagctgctcggaagaggagctcagcagccccggtcgcggaggg

SEQ ID NO: 3822 - DNA, 10302 bp, Homo Sapiens
atggccaagtatggagaacatgaagccagtcctgacaatgggcagaacgaattcagtgatatcattaagtccagatctgatgaacacaatgacgtacagaagaaaacctttaccaaatggataaatgctcgattttcaaagagtgggaaaccacccatcaatgatatgttcacagacctcaaagatggaaggaagctattggatcttctagaaggcctcacaggaacatcactgccaaaggaacgtggttccacaagggtacatgccttaaataacgtcaacagagtgctgcaggttttacatcagaacaatgtggaattagtgaatatagggggaactgacattgtggatggaaatcacaaactgactttggggttactttggagcatcattttgcactggcaggtgaaagatgtcatgaaggatgtcatgtcggacctgcagcagacgaacagtgagaagatcctgctcagctgggtgcgtcagaccaccaggccctacagccaagtcaacgtcctcaacttcaccaccagctggacagatggactcgcctttaatgctgtcctccaccgacataaacctgatctcttcagctgggataaagttgtcaaaatgtcaccaattgagagacttgaacatgccttcagcaaggctcaaacttatttgggaattgaaaagctgttagatcctgaagatgttgccgttcggcttcctgacaagaaatccataattatgtatttaacatctttgtttgaggtgctacctcagcaagtcaccatagacgccatccgtgaggtagagacactcccaaggaaatataaaaaagaatgtgaagaagaggcaattaatatacagagtacagcgcctgaggaggagcatgagagtccccgagctgaaactcccagcactgtcactgaggtcgacatggatctggacagctatcagattgcgttggaggaagtgctgacctggttgctttctgctgaggacactttccaggagcaggatgatatttctgatgatgttgaagaagtcaaagaccagtttgcaacccatgaagcttttatgatggaactgactgcacaccagagcagtgtgggcagcgtcctgcaggcaggcaaccaactgataacacaaggaactctgtcagacgaagaagaatttgagattcaggaacagatgaccctgctgaatgctagatgggaggctcttagggtggagagtatggacagacagtcccggctgcacgatgtgctgatggaactgcagaagaagcaactgcagcagctctccgcctggttaacactcacagaggagcgcattcagaagatggaaacttgccccctggatgatgatgtaaaatctctacaaaagctgctagaagaacataaaagtttgcaaagtgatcttgaggctgaacaggtgaaagtaaattcactaactcacatggtggtcattgttgatgaaaacagtggtgagagcgctacagctatcctagaagaccagttacagaaacttggtgagcgctggacagcagtatgccgttggactgaagaacgctggaataggttacaagaaatcaatatattgtggcaggaattattggaagaacagtgcttgttgaaagcttggttaaccgaaaaagaagaggctttaaataaagtccagacaagcaacttcaaagaccaaaaggaactaagtgtcagtgttcgacgtctggctattttgaaggaagacatggaaatgaagcgtcaaacattggatcagctgagtgagattggccaggatgtgggacaattacttgataattccaaggcatctaagaagatcaacagtgactcagaggaactgactcaaagatgggattctttggttcagagactagaagattcctccaaccaggtgactcaggctgtagcaaagctggggatgtctcagattcctcagaaggaccttttggagactgttcgtgtaagagaacaagcaattacaaaaaaatctaagcaggaactgcctcctcctcctcccccaaagaagagacagatccatgtggatattgaagctaagaaaaagtttgatgctataagtgcagagctgttgaactggattttgaaatggaaaactgccattcagaccacagagataaaagagtatatgaagatgcaagacacttccgaaatgaaaaagaagttgaaggcattagaaaaagaacagagagaaagaatccccagagcagatgaattaaaccaaactggacaaatccttgtggagcaaatgggaaaagaaggccttcctactgaagaaataaaaaatgttctggagaaggtttcatcagaatggaagaatgtatctcaacatttggaagatctagaaagaaagattcagctacaggaagatataaatgcttatttcaagcagcttgatgagcttgaaaaggtcatcaagacaaaggaggagtgggtaaaacacacttccatttctgaatcttcccggcagtccttgccaagcttgaaggattcctgtcagcgggaattgacaaatcttcttggccttcaccccaaaattgaaatggctcgtgcaagctgctcggccctgatgtctcagccttctgccccagattttgtccagcggggcttcgatagctttctgggccgctaccaagctgtacaagaggctgtagaggatcgtcaacaacatctagagaatgaactgaagggccaacctggacatgcatatctggaaacattgaaaacactgaaagatgtgctaaatgattcagaaaataaggcccaggtgtctctgaatgtccttaatgatcttgccaaggtggagaaggccctgcaagaaaaaaagacccttgatgaaatccttgagaatcagaaacctgcattacataaacttgcagaagaaacaaaggctctggagaaaaatgttcatcctgatgtagaaaaattatataagcaagaatttgatgatgtgcaaggaaagtggaacaagctaaaggtcttggtttccaaagatctacatttgcttgaggaaattgctctcacactcagagcttttgaggccgattcaacagtcattgagaagtggatggatggcgtgaaagacttcttaatgaaacagcaggctgcccaaggagacgacgcaggtctacagaggcagttagaccagtgctctgcatttgttaatgaaatagaaacaattgaatcatctctgaaaaacatgaaggaaatagagactaatcttcgaagtggtccagttgctggaataaaaacttgggtgcagacaagactaggtgactaccaaactcaactggagaaacttagcaaggagatcgctactcaaaaaagtaggttgtctgaaagtcaagaaaaagctgcgaacctgaagaaagacttggcagagatgcaggaatggatgacccaggccgaggaagaatatttggagcgggattttgagtacaagtcaccagaagagcttgagagtgctgtggaagagatgaagagggcaaaagaggatgtgttgcagaaggaggtgagagtgaagattctcaaggacaacatcaagttattagctgccaaggtgccctctggtggccaggagttgacgtctgagctgaatgttgtgctggagaattaccaacttctttgtaatagaattcgaggaaagtgccacacgctagaggaggtctggtcttgttggattgaactgcttcactatttggatcttgaaactacctggttaaacactttggaagagcggatgaagagcacagaggtcctgcctgagaagacggatgctgtcaacgaagccctggagtctctggaatctgttctgcgccacccggcagataatcgcacccagattcgagagcttggccagactctgattgatggggggatcctggatgatataatcagtgagaaactggaggctttcaacagccgatatgaagatctaagtcacctggcagagagcaagcagatttctttggaaaagcaactccaggtgctgcgggaaactgaccagatgcttcaagtcttgcaagagagcttgggggagctggacaaacagctcaccacatacctgactgacaggatagatgctttccaagttccacaggaagctcagaaaatccaagcagagatctcagcccatgagctaaccctagaggagttgagaagaaatatgcgttctcagcccctgacctccccagagagtaggactgccagaggaggaagtcagatggatgtgctacagaggaaactccgagaggtgtccacaaagttccagcttttccagaagccagctaacttcgagcagcgcatgctggactgcaagcgtgtgctggatggcgtgaaagcagaacttcacgttctggatgtgaaggacgtagaccctgacgtcatacagacgcacctggacaagtgtatgaaactgtataaaactttgagtgaagtcaaacttgaagtggaaactgtgattaaaacaggaagacatattgtccagaaacagcaaacggacaacccaaaagggatggatgagcagctgacttccctgaaggttctttacaatgacctgggcgcacaggtgacagaaggaaaacaggatctggaaagagcatcacagttggcccggaaaatgaagaaagaggctgcttctctctctgaatggctttctgctactgaaactgaattggtacagaagtccacttcagaaggtctgcttggtgacttggatacagaaatttcctgggctaaaaatgttctgaaggatctggaaaagagaaaagctgatttaaataccatcacagagagtagtgctgccctgcaaaacttgattgagggcagtgagcctattttagaagagaggctctgcgtccttaacgctgggtggagccgagttcgtacctggactgaagattggtgcaataccttgatgaaccatcagaaccagctagaaatatttgatgggaacgtggctcacataagtacctggctttatcaagctgaagctctattggatgaaattgaaaagaaaccaacaagtaaacaggaagaaattgtgaagcgtttagtatctgagctggatgatgccaacctccaggttgaaaatgtccgcgatcaagcccttattttgatgaatgcccgtggaagctcaagcagggagcttgtagaaccaaagttagctgagctgaataggaactttgaaaaggtgtctcaacatatcaaaagtgccaaattgctaattgctcaggaaccattataccaatgtttggtcaccactgaaacatttgaaactggtgtgcctttctctgacttggaaaaattagaaaatgacatagaaaatatgttaaaatttgtggaaaaacacttggaatccagtgatgaagatgaaaagatggatgaggagagtgcccagattgaggaagttctacaaagaggagaagaaatgttacatcaacctatggaagataataaaaaagaaaagatccgtttgcaattattacttttgcatactagatacaacaaaattaaggcaatccctattcaacagaggaaaatgggtcaacttgcttctggaattagatcatcacttcttcctacagattatctggttgaaattaacaaaattttactttgcatggatgatgttgaattatcgcttaatgttccagagctcaacactgctatttacgaagacttctcttttcaggaagactctctgaagaatatcaaagaccaactggacaaacttggagagcagattgcagtcattcatgaaaaacagccagatgtcatccttgaagcctctggacctgaagccattcagatcagagatacacttactcagctgaatgcaaaatgggacagaattaatagaatgtacagtgatcggaaaggttgttttgacagggcaatggaagaatggagacagttccattgtgaccttaatgacctcacacagtggataacagaggctgaagaattactggttgatacctgtgctccaggtggcagcctggacttagagaaagccaggatacatcagcaggaacttgaggtgggcatcagcagccaccagcccagttttgcagcactaaaccgaactggggatgggattgtgcagaaactctcccaggcagatggaagcttcttgaaagaaaaactggcaggtttaaaccaacgctgggatgcaattgttgcagaagtgaaggataggcagccaaggctaaaaggagaaagtaagcaggtgatgaagtacaggcatcagctagatgagattatctgttggttaacaaaggctgagcatgctatgcaaaagagatcaaccaccgaattgggagaaaacctgcaagaattaagagacttaactcaagaaatggaagtacatgctgaaaaactcaaatggctgaatagaactgaattggagatgctttcagataaaagtctgagtttacctgaaagggataaaatttcagaaagcttaaggactgtaaatatgacatggaataagatttgcagagaggtgcctaccaccctgaaggaatgcatccaggagcccagttctgtttcacagacaaggattgctgctcatcctaatgtccaaaaggtggtgctagtatcatctgcgtcagatattcctgttcagtctcatcgtacttcggaaatttcaattcctgctgatcttgataaaactataacagaactagccgactggctggtattaatcgaccagatgctgaagtccaacattgtcactgttggggatgtagaagagatcaataagaccgtttcccgaatgaaaattacaaaggctgacttagaacagcgccatcctcagctggattatgtttttacattggcacagaatttgaaaaataaagcttccagttcagatatgagaacagcaattacagaaaaattggaaagggtcaagaaccagtgggatggcacccagcatggcgttgagctaagacagcagcagcttgaggacatgattattgacagtcttcagtgggatgaccatagggaggagactgaagaactgatgagaaaatatgaggctcgactctatattcttcagcaagcccgacgggatccactcaccaaacaaatttctgataaccaaatactgcttcaagaactgggtcctggagatggtatcgtcatggcgttcgataacgtcctgcagaaactcctggaggaatatgggagtgatgacacaaggaatgtgaaagaaaccacagagtacttaaaaacatcatggatcaatctcaaacaaagtattgctgacagacagaacgccttggaggctgagtggaggacggtgcaggcctctcgcagagatctggaaaacttcctgaagtggatccaagaagcagagaccacagtgaatgtgcttgtggatgcctctcatcgggagaatgctcttcaggatagtatcttggccagggaactcaaacagcagatgcaggacatccaggcagaaattgatgcccacaatgacatatttaaaagcattgacggaaacaggcagaagatggtaaaagctttgggaaattctgaagaggctactatgcttcaacatcgactggatgatatgaaccaaagatggaatgacttaaaagcaaaatctgctagcatcagggcccatttggaggccagcgctgagaagtggaacaggttgctgatgtccttagaagaactgatcaaatggctgaatatgaaagatgaagagcttaagaaacaaatgcctattggaggagatgttccagccttacagctccagtatgaccattgtaaggccctgagacgggagttaaaggagaaagaatattctgtcctgaatgctgtcgaccaggcccgagttttcttggctgatcagccaattgaggcccctgaagagccaagaagaaacctacaatcaaaaacagaattaactcctgaggagagagcccaaaagattgccaaagccatgcgcaaacagtcttctgaagtcaaagaaaaatgggaaagtctaaatgctgtaactagcaattggcaaaagcaagtggacaaggcattggagaaactcagagacctgcagggagctatggatgacctggacgctgacatgaaggaggcagagtccgtgcggaatggctggaagcccgtgggagacttactcattgactcgctgcaggatcacattgaaaaaatcatggcatttagagaagaaattgcaccaatcaactttaaagttaaaacggtgaatgatttatccagtcagctgtctccacttgacctgcatccctctctaaagatgtctcgccagctagatgaccttaatatgcgatggaaacttttacaggtttctgtggatgatcgccttaaacagcttcaggaagcccacagagattttggaccatcctctcagcattttctctctacgtcagtccagctgccgtggcaaagatccatttcacataataaagtgccctattacatcaaccatcaaacacagaccacctgttgggaccatcctaaaatgaccgaactctttcaatcccttgctgacctgaataatgtacgtttttctgcctaccgtacagcaatcaaaatccgaagactacaaaaagcactatgtttggatctcttagagttgagtacaacaaatgaaattttcaaacagcacaagttgaaccaaaatgaccagctcctcagtgttccagatgtcatcaactgtctgacaacaacttatgatggacttgagcaaatgcataaggacctggtcaacgttccactctgtgttgatatgtgtctcaattggttgctcaatgtctatgacacgggtcgaactggaaaaattagagtgcagagtctgaagattggattaatgtctctctccaaaggtctcttggaagaaaaatacagatatctctttaaggaagttgcggggccgacagaaatgtgtgaccagaggcagctgggcctgttacttcatgatgccatccagatcccccggcagctaggtgaagtagcagcttttggaggcagtaatattgagcctagtgttcgcagctgcttccaacagaataacaataaaccagaaataagtgtgaaagagtttatagattggatgcatttggaaccacagtccatggtttggctcccagttttacatcgagtggcagcagcggagactgcaaaacatcaggccaaatgcaacatctgtaaagaatgtccaattgtcgggttcaggtatagaagccttaagcattttaactatgatgtctgccagagttgtttcttttcgggtcgaacagcaaaaggtcacaaattacattacccaatggtggaatattgtatacctacaacatctggggaagatgtacgagacttcacaaaggtacttaagaacaagttcaggtcgaagaagtactttgccaaacaccctcgacttggttacctgcctgtccagacagttcttgaaggtgacaacttagagactcctatcacactcatcagtatgtggccagagcactatgacccctcacaatctcctcaactgtttcatgatgacacccattcaagaatagaacaatatgccacacgactggcccagatggaaaggactaatgggtcttttctcactgatagcagctccaccacaggaagtgtggaagacgagcacgccctcatccagcagtattgccaaacactcggaggagagtccccagtgagccagccgcagagcccagctcagatcctgaagtcagtagagagggaagaacgtggagaactggagaggatcattgctgacctggaggaagaacaaagaaatctacaggtggagtatgagcagctgaaggaccagcacctccgaagggggctccctgtcggttcaccgccagagtcgattatatctccccatcacacgtctgaggattcagaacttatagcagaagcaaaactcctcaggcagcacaaaggtcggctggaggctaggatgcagattttagaagatcacaataaacagctggagtctcagctccaccgcctccgacagctgctggagcagcctgaatctgattcccgaatcaatggtgtttccccatgggcttctcctcagcattctgcactgagctactcgcttgatccagatgcctccggcccacagttccaccaggcagcgggagaggacctgctggccccaccgcacgacaccagcacggatctcacggaggtcatggagcagattcacagcacgtttccatcttgctgcccaaatgttcccagcaggccacaggcaatgtga

SEQ ID NO: 3823 - DNA, 6329 bp, Homo Sapiens
ggagtacgcgcggctggtgatggaggcgcagccggagtggctgcgcgccgaggtgaagcggctgtcccacgagctggccgagaccacgcgtgagaagatccaggcggccgagtacgggctggcggtgctcgaggagaagcaccagctcaagctgcagttcgaggagctcgaggtggactatgaggctatccgcagcgagatggagcagctcaaggaggcctttggacaagcacacacaaaccacaagaaggtggctgctgacggagagagccgggaggagagcctgatccaggagtcggcctccaaggagcagtactacgtgcggaaggtgctagagctgcagacggagctgaagcagttgcgcaatgtcctcaccaacacgcagtcggagaatgagcgcctggcctctgtggcccaggagctgaaggagatcaaccagaatgtggagatccagcgtggccgcctgcgggatgacatcaaggagtacaaattccgggaagctcgtctgctgcaggactactcggaactggaggaggagaacatcagcctgcagaagcaagtgtctgtgctcagacagaaccaggtggagtttgagggcctcaagcatgagatcaagcgtctggaggaggagaccgagtacctcaacagccagctggaggatgccatccgcctcaaggagatctcagagcggcagctggaggaggcgctggagaccctgaagacggagcgcgaacagaagaacagcctgcgcaaggagctgtcacactacatgagcatcaatgactccttctacaccagccacctgcatgtctcgctggatggcctcaagttcagtgacgatgctgccgagcccaacaacgatgccgaggccctggtcaatggctttgagcacggcggcctggccaagctgccactggacaacaagacctccacgcccaagaaggagggcctcgcaccgccctcccccagcctcgtctccgacctactcagtgagctcaacatctctgagatccagaagctgaagcagcagctgatgcagatggagcgggaaaaggcgggcctgctggcaacgctgcaggacacacagaagcagctggagcacacgcggggctccctgtcagaacagcaggagaaggtgacccgcctcacagagaatctgagtgccctgcggcgcctgcaggccagcaaggagcggcagacagccctggacaacgagaaggaccgtgacagccatgaggatggggactactacgaggtggacatcaacgggcctgagatcttggcctgcaagtaccatgtggctgtggctgaggctggcgagctccgcgagcagctcaaggcactgcgcagcacgcacgaggctcgtgaggcccagcacgccgaggagaagggccgctatgaggctgagggccaggcactcacggagaaggtctccctgctagagaaggccagccgccaggaccgcgagctgctggcccggctggagaaggagctaaagaaggtgagcgacgtcgccggcgagacacagggcagcctgagtgtggcccaggatgagctggtgaccttcagtgaggagctggccaatctctaccaccacgtgtgcatgtgcaacaatgagacacccaaccgtgtcatgctggactactaccgcgagggccagggcggggccggccgcaccagtcccgggggccgcaccagccccgaggcgcgtggccggcgctcacccatcctcctacccaaggggctgctggctcctgaggcgggccgagcagatggtgggacgggggacagcagcccctcgcctggctcctcactgccatcacccctgagtgacccacgccgggagcccatgaacatctacaacctgatcgctatcatccgtgaccagatcaagcacctgcaggcagccgtggaccgcaccacggagctgtcacgccagcgcattgcctctcaggagctgggccccgccgtggacaaggacaaggaagcgcttatggaggagatcctcaagctgaagtcgctgctcagcaccaagcgggagcagatcaccacgctgcgcactgtgctcaaggccaacaagcagacggccgaggtggcccttgccaacctgaagagcaagtatgagaatgagaaggccatggttaccgagaccatgatgaagctgcgcaatgagctcaaggccctcaaggaggacgcagccaccttctcctcgctgcgtgctatgtttgccaccaggtgtgacgagtacattacacagctggatgagatgcagcggcagctggcggctgctgaggacgagaagaagacgctgaactcgctgctgcgcatggccatccagcagaagctggcgctgacccagcggctggagctgctcgagctggaccatgagcagacccggcgtggccgtgccaaagccgccccgaagaccaagccagccacaccgagcgtaagtcacacctgtgcctgtgccagcgacagggccgagggcaccgggctggccaaccaggtgttctgcagcgagaagcacagcatttactgtgattaggggctgtggggcgccgcacgctgcagctaacatctgcttcacctcaactaacccagcagcagcgggacggcggtgctaggtcaatcttaacgtgactaatgcacagagggtaggagtctagccgaggcgccatggggcgttgcatcagcaggacacttgtgagagctttgtgtcgcttctcactcctcaaagccccctcaggagcacccagtcctcagctgctctcttaggtgggggtcagaggtggggatagagctgcacattcttgcagcagatgtgtgatgaaagcatcttctaagccctgcgcacccgtggggaaacccaagggaggagtcctggtcctgctccctcagcacccaaaaggggcagaacctgagttgagacttgcatgttcctcgcatgtgtctaatgtcagcactagaaagcagttttaggaggttccagcctgcagcataggtacgacctcagaggatggctctgcacttggcatagtttcatggaaaggagtacgttgtagtttatgcagtatctgactgcaaatcatattcaggaaagaagtgcagaatttcttccccaagcccagagaagagcagccctgagcccctgtattctgctggccagacacacatggcacagacacagctgaccataacccaggaatccagagctcggtttctcatttctgagatcaggatgcttgtatagtggcctgtgaggtgacagattggcagggcccaaggccccaggttttcatttttcatgagaaaagctttccaagtgcctggccagaccttggtccttagtgcagagcccgtccttttgtacttggggtgaccccagcagccaattatccggccttccatagggggttcagtcccaaagacatggggctttgaaaaccctagcctgaagtctgagccaccaagggcttggctgggttggacacccacaggtgtatccagagcccagcccggtgctgggaaagctttgcatacggccagggccacttgtcaggattcacaggtaggagatgtttaggtctctttatttagtgcaatctgggggatggcaacagagaaagaggaaaggtagctgtagggttctcccatttccagaggctccatccacacctgccttcccacattctgagcagaacttttctcagtacttttttcccgatcaccctgtgggaccagctggacctgaggctgcagtcttctctcctgcaggctgcttgccttgtctctcatgcggaagaggcattcgagttacctggtgagagaccgtgttgccccctcccacagctctctgccctgcgcgttcttccctttggtgccgagtatgtttcggtcccctccagactccaggacacgcccatgtatgtcccctgcgtgttcatcctgggcccagatccccctgccccagcaagactcgcagtgggatggctgctggcatgcccaccctgcatgcgctttgccctctccttgcaagcctggcacatagcttctctccatactcctaagggactttgcagacacccaagccactgggacccctgctaacacatgcaggtcttctcttctgccaactaacgtgctcgcgccctcccagcacgtggagagcttcaattgtcagataaacaggaagcgacagatgaccgctttctaacgctctcttttctcccgttttcagctgtagagtagctgccaggaggacttggccacccggccctgtcacactgcagccccttccccttccctctcgtggcccacaaggaggaaggaagggcaacctaaaagcccacttagaaactttttggatatgccactgcaattcttttcaaaatagcattccccaggtttttaatgggaggaaaaaaagctttaatgttgagcatgctgcgagctgctgcgtggaaaggcctctgtatgggccgaagacccttcttccctggctgccaggctcgccaggagcccactggaaacgcccaccacgggggctccttgttacacatgttctttttttatccgatcaacctgtgcacttttgatattttgatattatatttgcttccttaattcctcgcgtagagacggtctcaggtgccgtggtctatgctcgtggtcctgtagctgtccgcctcagctcccaccgtgtttgtctggtgtcagcacgaggcagagctgtgtgctccatagcgtgtagctttagactcggagatgagtgctttgacccagcgaggagctcagctaagtgtatccacgctgtggttcagcagcctttagatcatacggcattgtggttcatgtttgaaattacagattttaaatgccatgttcattaagaaatccagggtattcagattctggggtttttcatattgtattattattattcttaggaatagttcaatgtaacaagaagaaaacttgacctttgctctggttaaaacagtaataggcacttgaaaaaaaaaagataaattattgaatgagtagtattacctacaaattccagaattttctgggttttaggacgttgtgaagcatgactgattaacagaattttatacaactgtaccaataaaattccaaattggaattgttttgttactctggttgttgtgccaaattgtggtacacttagaaaattctacagtcgtcgatttttagggtgttctctttcaacacctttttgttagtaatcattgccagtagtgccttcatcagttaagggaggtgtcccagcacagatcattctcaaaagcgagcagggaagagctagtgggcatgctgaaggccagcgtggacagcaggtgaggcaggtgctcctcacacccagacctgggcatcttcattgagggaaagaaaacagtcattgtgcaaaattctgttagtcagtgattctttacttgcaaattcaggggcttagaaaatgaaagcaaacacaaaaccttgagtgtgctttgggaaccaaatggaccttctgggacaagctgagcaagctgtatgaacgccacgtttgtgaagagctgagggtatcaggagggccgacgctgtgttggcatgcgcagtaggggatgagggttagccatagtattctttgcaaatgtgaaagcgagacattatatcttctcttgcttggtgtaactaatcactgttaatttcaggaaacagaactcattaaaactccttagcaaaccaggtctacatcctgttttgtttgctgagtgaggttagtgggagtggtcaaattggtactcttggaggaagaaaaactgtccttccttctccaaaaaaggaaaaattataataatataaatgacaaaaataaaagaattctgtttcctggaataagcatttcttattcctagttgtagggactcctatttttaccttccgttacagtgttgattcataagaaatattgttacatttgagataacttcatctgtatggggtatttatttgcaatgatgtctgagtactgtattttttctgtgcattaccttagtgtcagaatgttggtctttattttaaagtcatatgcatgttctcctgccaaggaacctttacacagacccaaacaaaaaaataataatcaaatgccttcaatttctgagaaaatgaggcagagcatggaaaaggaataggaaggagaaattaattgagattttcaggacacagacatatgatgtgaatgcctacaaagccagtgtgcataggaacagtgggcctgggtaaagagtcacattggtaggaccaataaagaataataaaaagac

SEQ ID NO: 3824 - DNA, 478 bp, Homo Sapiens
  misc_feature (469)..(469): n is a, c, g, or t
ccctcgggggcggcggtgcggacgcggggggtggccgggtccagaaacacgatcctttccgcctgccgcgcacggaccgcccgcatccctcgcccggcggtgggggcaccagccgagcgccccaggtttctcccttgggcctttcttcccggggctggcgagggtgcgtttggttcggaaactgcaacagatggaaaaaaggacacctccctccttccctcctccacccccgggaagaaaagcctccccgtctcgtttttgacagctgccccgaactctactggccctgctctagccgcacgagacagccgcctctgattcaaggggcggggcacgggaggaaaagtattcgagacaagaaccaacttcttccagaatgcgcggctgccattgacacgcgggcgcggcgcggcgcacccttctcctcccggggctcttcctccagcagcgacagtgggaggtcggcggnggtggggcg

SEQ ID NO: 3825 - DNA, 410 bp, Homo Sapiens
gcggccgcgccccccaacgctccgggaggccccccgggcccgcagccggcgccaagcgccgcagccccgccgccgcccgcgcacgccctgggcggcatggacgccgaactcatcgacgaggaggcgctgacgtcgctggagctggagctcgggctgcaccgcgtgcgcgagctgcccgagctcttcctgggccagagcgagttcgactgcttctcggacttggggtccgcgccgcccgccggctccgtgagctgctgagggcggccggcgcccgcccggcgtgccggagaggagaaagggcccgactgcccgccggaccctgcacccagcgactgggccccgcgcgcgccctccgcgagggtggaggcggcggctgtgtgcgcagggcccggcaccggactgggaccctg

SEQ ID NO: 3826 - DNA, 768 bp, Homo Sapiens
ccttcagcataaaagctgatccacaaacaagaggagcaccagacctcctcttggcttcgagatggcttcgccacaccaagagcccaaacctggagacctgattgagattttccgccttggctatgagcactgggccctgtatataggagatggctacgtgatccatctggctcctccaagtgagtaccccggggctggctcctccagtgtcttctcagtcctgagcaacagtgcagaggtgaaacgggggcgcctggaagatgtggtgggaggctgttgctatcgggtcaacaacagcttggaccatgagtaccaaccacggcccgtggaggtgatcatcagttctgcgaaggagatggttggtcagaagatgaagtacagtattgtgagcaggaactgtgagcactttgtcgcccagctgagatatggcaagtcccgctgtaaacaggtggaaaaggccaaggttgaagtcggtgtggccacggcgcttggaatcctggttgttgctggatgctcttttgcgattaggagataccaaaaaaaagcaacagcctgaagcagccacaaaatcctgtgttagaagcagctgtgggggtcccagtggagatgagcctcccccatgcctccagcagcctgaccctcgtgccctgtctcaggcgttctctagatcctttcctctgtttccctctctcgctggcaaaagtatgatctaattgaaacaagactgaaggatcaataaacagccatctgccccttcaaaaaaaaaaa

SEQ ID NO: 3827 - DNA, 280 bp, Homo Sapiens
  misc_feature (237)..(237): n is a, c, g, or t
  misc_feature (271)..(271): n is a, c, g, or t
acagattatgctaaatacatcgacttcatcttctaacatgatatattcaggatttacacattaaaatgattatttaaattgtggcagtgatggggtttactttcatgaatttaaattgtttttatttcctgtaacaattgcttcccaaatattgacctacctaaagggcagttctgcaagatgtactaaatatgtatattagaaattatagaaaatcatggttgtccggttttcaanttcatcaacagcctagaggtgcctgaggatatanggatgaaac

SEQ ID NO: 3828 - DNA, 457 bp, Homo Sapiens
  misc_feature (11)..(12): n is a, c, g, or t
  misc_feature (14)..(14): n is a, c, g, or t
  misc_feature (425)..(425): n is a, c, g, or t
  misc_feature (437)..(437): n is a, c, g, or t
atacaacgtanngngtaggtgttgaggggggcaggtggtgaaatctacagctccttttcttgtccataaatgctcagagtattcaaacaggcctcagacatacaccagagccatggcaatgcatagtttaagatattaaatttctcttaagtgatttcgactcattttgcaagcccttgacaaacccttcagatgcgaagatttaaggaattgtctagcccttttgtgttacacggaaatgacaaaactttagttcactcttactgtaactgtcatctctctgaaggccaaagggaccgtactttgagggtacaacatttattatttttaattaaggaaagccctttgctggggtggattctaggctcactgcccttccaacaggtcattgaggtccccacatttggactggaggttgttggggnctttagggtttngaaaggaggctggcccccaa

SEQ ID NO: 3829 - DNA, 652 bp, Homo Sapiens
aggaaccccagacccagggcgagagaagggtggagtgggccccaggtgtcaccgtgtgcaccagggccgtgaggtgccggggtcattcagctcagactctgtaaccggggtaagctggcacgtgaaggtagctgcctcaggtgacgggctcgtgagaggggacgggtcaggtagcctttcccaagccttctcctcagaccgacacccatggccatcggaggctaggatgccagagacagtcattgtgcagaaatcaggcacagtgactgcagctcacgtccagtcaaccaagcatggggccgcaagctcaggaagtcccttcccgccacaccacagcctaattcttactgggcacggaggcaactcggtctacgctgggcacggacgacaaacagcgagacgccacgtgtggaatgatgcaacttcggagcacggggtgactttgcttgggaccgtgcccacgtgacagccccttatgcagaggaggaagagagaagtcgccgagtgggacggggaacctgtccagatagtcacacggtgtgtgggtgacacagctggggtgagtcgaggctggcccctgaggcccatgctccctgaactgctggggaccactgtcggtagcagggtctcaggaaaggctggtctcacctcc

SEQ ID NO: 3830 - DNA, 4247 bp, Homo Sapiens
tgaaattgtctacgccgtggaaaaactctccaaggaaaacaacagctattccgtggatgccgccgaggtcactgaactgcatgtcatcagttatgaagtggagcgggacctgactccactgattctctccaactgccagtaccaggtggaggagggcagagagaccgtgcaggagttcgatctggagaagattcagcggcagatcgtcagccgcttcctccagggcaagccccggctgagcctcaagggaatacccactctggtgtacagacacgactggaactatgaacatctctttatggacatcaagaacaaaatggcacaggtgatcccgataaacctgatcctgtgcacggggctttctgccttctcagtgtgtttccctccgtgttaggcctactccagccttgccccgggtgtttgctgtgagcccacagtttctgcggcctcccttacagagagcaagcaagacagcaaatcagcaagttttcttgtagagtaaaagcagattgacatcttgtgggtttgattcttaggaatgatgttgatgcatggccatgcctgctgaagcgggaagtccatggaaccgatttgttcctgctctccgcatgcgggtactgataggtagacctgtgtgtctccatggcctccaggaactgcctgcacaccgtgcgcccaagtgtcagctgttagagagttggccccccgcatgtggcttgggcagtgaaggggctcggctctcttaccaggtggtgagatgccagaaacccagcccacagacatccctctcctgcttttcatttcccaggactccctccccagctcggtcattagtgccatcagtggacagctgcagtcctacagcgatgcctgtgaagtgctgtctgtcgtagaagtcactctggggtttctgagcacagctggtggggatccaaacatgcagctgaatgtgtatactcaagacatcctgcaaatgggtgatcagacgattcacgtgttaaaggccttaaacagatgccagttaaaacacaccattgccctctggcagttcctgtctgctcataagtctgaacagctgctgcggctgcacaaagagccatttggggaaatcagttcaaggtacaaagcggatctgagcccggaaaatgctaagctcctcagcacattcctaaatcagactggcctagacgccttcctgctagagctgcacgaaatgataatcttgaaactaaagaacccccaaacccaaaccgaggagcgcttccgccctcagtggagcctgagagacactctcgtaagttacatgcaaactaaagaaagtgaaattcttcctgaaatggcatctcagttcccagaagagatactgctcgccagctgtgtctcagtgtggaaaacagctgctgtgctgaaatggaatcgagaaatgagatagaattatttcctcagctatctttggatgactttggagagaagactcctctctcctcgtctgcggcgtggacttgatcatggactggtgcctttgcattcagaaggagagctgtcagcgtagcaccgaattcaagaccaaggcgtgttacctgagctgacagctttttgaaagccgagctgtttctgaaccatgtacatacatgttctgaaactttctcatcattttatgagtactgttcattgagagatgacaatgaagattagatgaaattggaaataaaccaacattgtttacattccaggagacttgtagctcagccacacacgcagtaatgacctgtgcccgttcgcctctggcactgcccacccctcttttttttttttcttctaattctgtactcacaaaagagaatctcattttcttctttcttccattcccttaaattctgagtactgtacatatatttctgggttcccacgatgatgtgaaaaactaccagactgttttttgtcttctcacaaagacaagaaaaatcagggcattttgtgagtgccttaagatcaaactaacaagatctgaccctctcccctcacagtgagccactgccccacttcagagggtaagagccaaaagcctcattgtgaaaggcactggacttggaccagggacaccatcagggccttggttttctcacgcataaaatggagagtggattaatcgccaaagattcttctgatctgacattttgaaattgtgagagaaactagatgactgtaaacttggtcacaggcctggttctggcagttctttgcggacctttttctagcattatgccaaataaacatgcagtctcagtgtgctctcgcatgtatgaatatctagtcctttctgtggttctcagccaagacataaaaactaggactcagagcacatacaaaaccagttatgtttcggaaagagggaaaagagtccccgagcccggatcttgtgctgcttttctcactgacgtgttgccttttttctttacaaaatctgctttgatacttaggacctctctggactaatttctcttcctagacagctcagcacagctattgatatgttagaggcagtatccttaatattcattctaaatgagttaacgacttaacttgaaattgggcctaaggagtgagaactacaaaaatacaaaatgcttgtccaggactcagccatgcacaccttgagcagcgccggcaggaggcacggaaggaactgtgctccgttctcctcactgtcatggtgccaccagtgtctgatgaagggcagagtgacccagactgcaggcagtaactgacttcacacagtccctggcatttagtcatctgtgattgttttatcactctggactgtgcagagccacctgccaccgagatctgcattccgactgcctatgaacgggtgtgggggccgggggctggcttgctgaagtcttcaacttgcactcggagctcctttgatacctcagagctggctgtcaggtggcagctcacacccagactcactggccacacctcagcagggggggagtcgagtgtcagtctctttctgtgaaggctttttttttcctttggcctgggaatttttcccatttttatgaaggggttttaaattgtttcattttgtgtgctgtgcttcaaagccttaactgtcaaatcttgcattatcttgtttgtacagaaatatactggcctagcagaggcaaaaaaaaaaaaaaaaatgaattttattttacttgtcacacctgtcttaataaactggagttttgctgctaaagaactcttctctctgggggcagagcttctatttatggcacatagacatcagctaggcttttgggaatcgtttgtgttctttgtggaaatgtcctttagaagcacccatgaagtagtgtgttcagactgtgcacacagaaaacaggctctgccttcacatgtgagacggtggacttttcctctggacaaaatgacagcatcctggcgactccacagtggagctgagcgccactccctgtagccgatctgggactgaaacgcttacacctctgcctcagaaggagtcccccatgccctgcctgaaatgacttcactggacacagcggggctgcagctaacggggtacaggtaggagctaactaacttcacccctgagtccacttgcggggtaagagataaacagtaacccttccaggagcccactgacgttggagtgctaaaaatgccccttcagggggaaaactgcattttctcttccaaaaaggaaaggttcttccaggcgagaaacctgtggtctagaaccacagcaagaagaggaggcatgctggcctgcaccggaagactcactttgtctgccctgcgccagcctcacctcaccctgcagttcccgtttccgccatggatgcctcatcaccaaccctgaccttccccctcccaaccctttattcatcctcactcccactcatacccgcctccctggacagttccctgctgcagagttctttctgctttcagccctaccttggtggtgatttacctgaaaatcttcacaactgatcattatctccttctctttgagacctgactgaaaaaattaggtgtgcacacctgtaatcccagctacctgggaggctgaggtatgaggattgcttgagcctgggagtttgaggctgcagtgagctatgattgcaccactgcactccaacctgggtgacagagtgagaccctgtctcaaaaaaaaataaaataacataaggaccttaaaaaaaaaaaaaaaaaaa

SEQ ID NO: 3831 - DNA, 463 bp, Homo Sapiens
  misc_feature (366)..(366): n is a, c, g, or t
  misc_feature (388)..(388): n is a, c, g, or t
  misc_feature (439)..(439): n is a, c, g, or t
  misc_feature (457)..(457): n is a, c, g, or t
ctaccaatcaccttcactacttcataatcttcagctttcattcgtaaatctctgattttatttattgtgtctttatatctgcttaaaaagttgtcaatatttttgttttttcttaaggcaggaaaatccaaatcatataccaaagcatccaatccatccagcaaacaatccgaattcacttccgatttgggatcccgcagcaggttgtccattttttcaaatcgagtctcaaaactgtccccagtcgacatgttgctgctgctgtgacaatgccctcttaccagcaccagcagcgggaaagcaatttcaaccaacttcctccgcggtggggtttcgcagccgcggggcgaagggagccggaacctnaggggtcaacagggtgcggccnggtttccccgttttttcccttaatttaggggggaactttcgttttttcagnaacccgggggccgggggnaaattt

SEQ ID NO: 3832 - DNA, 896 bp, Homo Sapiens
ggccgtgccctgttttgcggtgtaaggcagcgacggcggctgcgacggcgagactgagatcctggtgtcgtgggcacctgagttctagcttcccccagcgagcgcgcgtcccttcgtgcctaggcgagagccggctcttccccgggagatgcgttgtcccaggctcgggggctcagtgggagttcatgctgcgctggaggctcttggccaccgctctaatcgccttgtgccgccgcagcgccagctccgtcgccagcggtgagcctcccgattcccccccttgcccctggcgggggatgaccggggagaagatccgctcactgcggagggaccacaagcccagcaaagaagaaggggacctgctggagcccgggatgaggaagcggcggctgccctcggggtacctttaccagaagcaggattggcaagggcggcaaagcttgtcataagatcttcagtaaccatcaccaccggctacagctgaaggcagctccggctcctccaatccccccgggcccggctctgccgtgcacaattcctccgtgatgccaactcccagtcccggcccttctggcggcacaaccccgttgctgtcgtcgcggatggaggcagttggcccggcaaaataaccggtgcacgagtgcgtcttcaagggggatgggaggagactctcctctctcatccgacgcccaaatcgggcagaaagatatccacgggggaggctagccctttccactttccttccgagctagggggctccagggtccggatctaggcctcaggaacttttggcaaaccggcgggaaaaggcgacaaaaagggcgggccggggcggggcacgaggcccgcccacggggagcgtgaaaccggtggccaaggcccacgccgggagtacc

SEQ ID NO: 3833 - DNA, 795 bp, Homo Sapiens
cccccgtttccagcggtgccgccctgggtcccatcttcagggaaaggcactgcccacgccaggcgtgcacttccaacaacgggcagcagagggcgcggggcggctccgacgcgggtccaagggcagcttcccgctcaaccagggcaccaggacgaggtggctgtagctcggacggacggaagtagatggagggggtggggacggcctgtaagcggggggtgcctgcctggctggggagccccagggatagcggtcggacttcaggttctggccaaggctgagggaccctggctgcagcggatcggcacgccgggtgggcgagagcttggcctgcatgtgcctcccacagaccctggggtgatggccttccccctcttggcgggacgttgccccacgttgagtcccacacaacatcctgtgagcctggctccccaggagggcccccagacagctcccaggcacgtcataggcaaagcctgttcccccgactcaggatttccaaggcctggggtcctgctcaccccccttatgctctcacgcccagcctgtccccaggtttcagctgggagaggccacctccctcaggcaaggaaaacgagaaccccaggtacaggaggggctggggcaggtccccttgggtgtcactcctcagccctgccaggccactcccctggtgctgaagtcgcactgggggggggctgccagcccaactggaggtccgtgtacagacaggccggacaccgatgtccggccggccgtacgggcgtggtggggggccaaaggaggaggggggcc

SEQ ID NO: 3834 - DNA, 3682 bp, Homo Sapiens
acggcgcgcgcgcaccccttccgcgcagccccctgacctgcagcctccggacctcgctgcagcgcggacccggcccgcccgcccgaatgagtcagctgaggctgctgccgtcccgtcttggggtacaggctgcgaggctcctggctgcacatgacgtcccggtgtttggctggcgcagcaggtcctccgggccaccggccaccttcccaagcagcaaaggtggaggcggctccagttacatggaggagatgtacttcgcctggttggaaaacccccagagtgtccacaagtcctgggacagcttcttcagggaagccagcgaggaagccttttctggctctgctcagccacggcccccttctgttgtccatgagggcaggtctgcagtctcaagtcggaccaagaccagcaaattggtggaggaccacctggctgtacagtccctgatccgggcctaccagatccggggtcaccatgtggcccagctggaccccctgggcattctggatgcagacctggactcctttgtgccctcagacttgatcacaaccattgataaactggccttctatgaccttcaggaggctgaccttgataaggagttccagctgccgacaaccaccttcattgggggctctgaaaacaccctttctctgcgggagatcattcggcgcctggagaacacctactgccagcacattggcctggagttcatgttcatcaacgatgtggagcagtgccagtggatccggcagaagtttgagacccctggtgtgatgcagttctccagcgaggagaagcggaccctgctggcccggctagtgcgctccatgaggtttgaagacttcctggcccggaaatggtcctcagagaagcggtttggcctggagggctgtgaagtgatgattcctgccctcaagaccatcatcgacaaatccagcgagatggggattgagaatgtcatcttggggatgccacacaggggaaggctgaacgtgctggccaacgtgatccgcaaggacctggagcagatcttctgccggtttgaccccaagctggaggcggcggacgagggctccggggatgtcaagtaccacctgggcatgtaccatgagaggatcaaccgcgtcaccaaccggaacatcactctgtcgctggttgccaacccctcccacctggaggcagtggaccctgtggtgcaggggaagacaaaggcagagcagttctaccgtggagatgcccagggcaagaaggtcatgtccatcctggttcatggggacgccgcctttgctggccagggcgtggtatatgagaccttccacctgagcgacttgccctcctacacgaccaatggtaccgtgcacgtcgtcgtcaacaaccagattggattcaccacagacccccgaatggcccgctcctcaccatacccgaccgacgtggcccgggtggtcaatgcgcctatcttccatgtgaatgccgatgacccagaggctgtgatatatgtgtgcagtgtggcagccgaatggagaaacactttcaacaaagatgttgtcgtggacctggtctgttaccgccggcgtggccacaatgagatggacgagcccatgttcacccagccgctcatgtacaagcagatccacagacaggtgcctgtgctgaagaagtacgcagacaagctgattgccgagggcacagtcaccctgcaggagtttgaggaagaaattgccaaatacgaccggatctgtgaggaggcttatggcaggtccaaggataaaaagattctgcatataaagcactggttggactccccctggcctggcttcttcaacgtagatggggagcccaagagcatgacatgcccagccacggggatccctgaggacatgctcacccacatcggcagtgtggccagctctgtgcccctggaggactttaagatccacactggcctctctcgcattctgcggggccgtgcggacatgaccaagaaccggacggtggactgggcgttggcagagtacatggcctttggctccctgctgaaggaaggcatccacgtgcggctcagcgggcaggatgtggagaggggcacattcagtcaccggcaccatgttctccatgaccaggaggttgaccgcaggacgtgtgtgcctatgaatcatctctggcctgaccaggccccgtacaccgtgtgcaacagctccctctcggagtacggagtcctgggctttgagctgggctatgccatggccagccccaatgccctggtcctctgggaggcccagtttggggacttccacaacacggcccagtgcatcatcgaccagttcatcagcaccggccaggccaagtgggtgcggcataatggcattgtgctgctgctgccccatggcatggaaggcatgggcccagagcactcgtcagcgaggcccgaaaggttcctgcagatgagcaatgatgactcggatgcctaccctgcattcaccaaggacttcgaggtgagccagctctatgactgcaactggatcgtggtcaactgctccacaccggccaactacttccacgtgctgcgccggcagatcctgctgcccttccgcaagccgctgattatcttcacacctaaatctctgctgaggcacccagaggccaagtccagctttgaccaaatggtatccgggaccagcttccagcgggtgattcctgaagatggggccgcagcacgggcccctgagcaggtgcagcggctcatcttctgcacgggaaaggtgtactatgacctggtgaaggagcggagcagccaggacctggaggagaaagtggccatcacgcgcctggagcagatctctccattccccttcgacctgatcaagcaggaggcagagaagtacccaggtgcggagctggcctggtgtcaggaggagcacaagaacatgggctactatgactacatcagcccacgcttcatgaccatcctgaggcgcgcacggcccatatggtatgttggccgggacccagcggctgcaccagccacaggaaacaggaacactcacctggtgtcactgaagaagtttctggatactgccttcaatctccaggcctttgagggcaagacattttagagctgggcaaaacctgtgtaggtctcgctgtgggtttgctggggaccaagggggtgatgaaaaggggaggggcggagctcctgcccaagagaggggctgtggggccccaggataaaacagacacagtgacagggccaagagccagcactgctggccttggtgtcatgccagaatctaccaggactgagggagccagaggagtcctgtaggcaggctactgtgctggagcatcccccagctgctcccatcttgctggaatttcttgggcggcttctccacctgtatctcaagacagacacccgggggcctgtgtctgtggccgctcccatcccggcagccctggctgctgctcgccccaccctcgcttatctgtagattcaaagcgatgttctcttctgtgctcttagaagtagggagttcagcagtaacagccaggtgaagcgaacctgctgggtgatttgtttgcgctctgttttatggggcattcctgcgagatgtgtcagcttctgtatgagatgcagccacagctcatgtgtaccaaagtagaaaaccaaatcacagag

SEQ ID NO: 3835 - DNA, 721 bp, Homo Sapiens
  misc_feature (497)..(497): n is a, c, g, or t
  misc_feature (572)..(572): n is a, c, g, or t
  misc_feature (598)..(598): n is a, c, g, or t
  misc_feature (605)..(605): n is a, c, g, or t
aggatccttaattaaattattcttccccccccgcgcttccgctccctcacagctcccgtcccgttaccgcctcctggccggcctcgcgcctttcaccggcaccttgcgtcggtcgcgccgcggggcctgctcctgccgcgcgcacccccggggcttcggctccggcacgggtcgcgcccagctttcctgcacctgaggccgccggccagccgccgccatgggtgcctacctctcccagcccaacacggtgaagtgctccggggacggggtcggcgccccgcgcctgccgctgccctacggcttctccgccatgcaaggctggcgcgtctccatggaggatgctcacaactgtattcctgagctggacagtgagacagccatgttttctgtctacgatggacatggaggggaggaagttgccttgtactgtgccaaatatcttcctgatatcatcaaagatcagaaggcctacaaggaaggcaagctacagaaggctntagaagatgccttcttggctattgacgccaaattgaccactgaagaagtcattaaagagctggcacagattgcanggcgacccactgaggatgaagatganatagaanaagtagctgatgaagatgatgtggacaatgaggaggctgcactgctgcatgaagaagctaccatgactattgaagagctgctgacacgctactggcagaactgtcacaaaggccct

SEQ ID NO: 3836 - DNA, 2436 bp, Homo Sapiens
attcatttcccccagtgaccttgacaagtcagaagcttgaaagcagggaaatccggatgtctcggttatgaagtggagcagtgagtgtgagcctcaacatagttccagaactctccatccggactagttattgagcatctgcctctcatatcaccagtggccatctgaggtgtttccctggctctgaaggggtaggcacgatggccaggtgcttcagcctggtgttgcttctcacttccatctggaccacgaggctcctggtccaaggctctttgcgtgcagaagagctttccatccaggtgtcatgcagaattatggggatcacccttgtgagcaaaaaggcgaaccagcagctgaatttcacagaagctaaggaggcctgtaggctgctgggactaagtttggccggcaaggaccaagttgaaacagccttgaaagctagctttgaaacttgcagctatggctgggttggagatggattcgtggtcatctctaggattagcccaaaccccaagtgtgggaaaaatggggtgggtgtcctgatttggaaggttccagtgagccgacagtttgcagcctattgttacaactcatctgatacttggactaactcgtgcattccagaaattatcaccaccaaagatcccatattcaacactcaaactgcaacacaaacaacagaatttattgtcagtgacagtacctactcggtggcatccccttactctacaatacctgcccctactactactcctcctgctccagcttccacttctattccacggagaaaaaaattgatttgtgtcacagaagtttttatggaaactagcaccatgtctacagaaactgaaccatttgttgaaaataaagcagcattcaagaatgaagctgctgggtttggaggtgtccccacggctctgctagtgcttgctctcctcttctttggtgctgcagctggtcttggattttgctatgtcaaaaggtatgtgaaggccttcccttttacaaacaagaatcagcagaaggaaatgatcgaaaccaaagtagtaaaggaggagaaggccaatgatagcaaccctaatgaggaatcaaagaaaactgataaaaacccagaagagtccaagagtccaagcaaaactaccgtgcgatgcctggaagctgaagtttagatgagacagaaatgaggagacacacctgaggctggtttctttcatgctccttaccctgccccagctggggaaatcaaaagggccaaagaaccaaagaagaaagtccacccttggttcctaactggaatcagctcaggactgccattggactatggagtgcaccaaagagaatgcccttctccttattgtaaccctgtctggatcctatcctcctacctccaaagcttcccacggcctttctagcctggctatgtcctaataatatcccactgggagaaaggagttttgcaaagtgcaaggacctaaaacatctcatcagtatccagtggtaaaaaggcctcctggctgtctgaggctaggtgggttgaaagccaaggagtcactgagaccaaggctttctctactgattccgcagctcagaccctttcttcagctctgaaagagaaacacgtatcccacctgacatgtccttctgagcccggtaagagcaaaagaatggcagaaaagtttagcccctgaaagccatggagattctcataacttgagacctaatctctgtaaagctaaaataaagaaatagaacaaggctgaggatacgacagtacactgtcagcagggactgtaaacacagacagggtcaaagtgttttctctgaacacattgagttggaatcactgtttagaacacacacacttactttttctggtctctaccactgctgatattttctctaggaaatatacttttacaagtaacaaaaataaaaactcttataaatttctatttttatctgagttacagaaatgattactaaggaagattactcagtaatttgtttaaaaagtaataaaattcaacaaacatttgctgaatagctactatatgtcaagtgctgtgcaaggtattacactctgtaattgaatattattcctcaaaaaattgcacatagtagaacgctatctgggaagctatttttttcagttttgatatttctagcttatctacttccaaactaatttttatttttgctgagactaatcttattcattttctctaatatggcaaccattataaccttaatttattattaacatacctaagaagtacattgttacctctatataccaaagcacattttaaaagtgccattaacaaatgtatcactagccctcctttttccaacaagaagggactgagagatgcagaaatatttgtgacaaaaaattaaagcatttagaaaacttaaaaaaaaaaaaaaaaaaaaaaa

SEQ ID NO: 3837 - DNA, 321 bp, Homo Sapiens
  misc_feature (33)..(34): n is a, c, g, or t
  misc_feature (132)..(132): n is a, c, g, or t
  misc_feature (136)..(136): n is a, c, g, or t
  misc_feature (284)..(284): n is a, c, g, or t
  misc_feature (300)..(300): n is a, c, g, or t
  misc_feature (311)..(311): n is a, c, g, or t
  misc_feature (319)..(319): n is a, c, g, or t
cccttcctcccaccctgccccactttgatttanntcctttggctgtgggctgaggctcccagggaagttgggtggggtgggtgttgagaccccctcagaccagcacagagacctgtccttgtgcagtctgcncccngcactccctcccttgcctgtagatgttctggatgacagtagaggaaatggacaaggtcagtttgaatatcccagaacacagtgctctgtctcctcccaccagtccagttagcttcccttctggaccaatagacgaggggagaccccantggatcctctggcctnggaaacacctnaccaggtngg

SEQ ID NO: 3838 - DNA, 115756 bp, Homo Sapiens
gatcacctgaggtcaggaggacgacaccaacctgaccaataaggtgaaaccctgtctctactaaaaatacaaaaattagctgggtatggtggcgtgctcctgtaatcccagctacttgggaggctgagaagggagaattgcttgaacccgggaggcggaggttgcagtgagccgagatcatgccagcctgggcaacaagctagactccctctcaaaaacaaacaaataaacaaacaaaaaacagataacagtgtttggagcctaaagggctccatgaatatcagaacagattcttttccactttcaataatgttcctttcccttaagcactctggtttccaggtttccctattgagtaataagactgataggcctttcttagtagctggagcttcatctttcagtgaaaaaaatttagggggttttatgttataaactttgttataaattttatattggtcttcagtttcagaaacactgttgcctcaaagggaaggaactaatgtttaataagctcagtgaaataagtagagatttactcagttttatagattgggaaactgtctcggagaagataacacagccagtaagccacaaagccaggagtaagattcttacccattttgcagcacataaatctataagacttaagaagttaagaaataaagttagtcctattctggtacagttcaacatgaaagttcttcagtggagcaacaaaccctgaccaaggtcttgaagggggtttttagcctagagtcaggtaacttcctctttccagctccatctcaggtacctctccctcatcgtagcttgtctttatgaatgtcagctttttgtttgttgtagaccaaactaatgcattcatttaattctaacatctaatctaaggtatcttgggttatctccatttacacttataaactgaggctttgagaagattaggtgactagtccaaggctggtattctggatcctttgggcactggagacactaacacagcctgccttcacatgcccacaagtacggaacctgccgtatttcactgcctcttaagtgtactctcagtctgtatcctactagctcagtcgtatatcctacactatttctactatgccaaacttcattacccttaacagacctttgcagtgatttccctgccactaggtgccctgtaggggtgatatttgtagctctggagattgctttattctgaccctctagcagagactacaacctcatgagtcttggcagacactacttgtcttttcaccattactactactgtgctaactgggaatctggccacccttccttaccccaaggggtgggtcttgatataaactctaaaccaatcattgtaactctagctccctagacagtgattgatttaggcatgggcatatgatgcagttcttgctaattagatgggaagggaagcctggggaacttgtggagaagccttccttatttaaaagagacttgccagcttttattttattattttttgccagtttgtattttaacccaggttgcaccaaaatgtgtgaaccacaaacaaagacagagatgggaaagctataataataataatacccaacacttgtatagaacttgctatgtgctaggtactcttctaagtagaggcatacctcagagctaaggcaagtttggttccagaccactgcaataaagcaaatataataaagcaagtcacatgaatttttctgttttccaatgcatataaaagttatctttatactatactgtagtctcttaagtgtgcaataatatgtagagtaaaagtacctcttttatttatttatttatttatttgagacaggctggccctgtctgtcacccaggctggagtgcaatggcgtgatctcggctcactgcaacctccgcttcctgggttcaaaccattctcctgcctcagcctcctgagtagctgggattacaggtgcccaccaccacacccagctaatttttgtatttttagtagagacggagttttaccatgttggacaggctggtcttgaactcctgacctcatgatctgcctgcctcagcctcccaaagtgctgggattataggcatgcatgagccaccatgcccagccaaaagtacatatcttaattaagaaatccttattgtgaaaaattgccatttggtgagctgtaatctttgctggtggagggtcttaccttgatgttgatggctgctgagactgatcagggtggtgattgtctggggtggcagtaacaacctatgaaatttgccacatcaattgattcttcctttcaccacagatttctctgtaatgtgatactgtttgataacatttctctctgccatagacctttcaaaattagagtcagtactctcaaaccctgccactgctttatcaactaagtttatgtaatgttctaaatctgccggtcttggtggctcacgcctatgatgccagcactttgagaggatgaggtgggaggactgcttgagctcaagagtttcagaccagcctgggcaacatagtgagaccccatctctaaaaaaacatttaaaaaattagctgggtgtggtggcgcgtgactgtagtcccagctactcaggaaactgaagtgggagaatcacttgaacctgggaggttgaggttgcagtgagatgattgtgccattgcacaccagcctgggcgacagagcaagatcttgtctcaaaaaaaccccaaaaatcctttgttgtcatttcatgtatgtgtgtatgtatgtatgtatatatgttttttttatttattaagacagggtctcactctgtcacacaggctggaatgcagtggtgctatcaacagctcactacagccttgaattcccaggctcaagcaatcctcctacttcagcctcccgagtagctgggactacaggcatgcaccaccatgcccggctaattttttaaattgtttttaaagagtgttgcctaagcctgtcttgaactgggctcaagtgatcttcctgccttagcctcccaaagtgttgggattacaggtgtgagccaccttgcccagcctattgtcttatcaacaggattaacggcattttcacaaggagtagattccatctcaagaaaccatttgtttgcccacccgtaagaatagctgctcatccattcaagtttgatcgtgagattgcagcaattcaatcatattttcagttgtctagttatcacattttcacttctagttatcttgctgtttccaccccatctgcagtaacttgctccattgaagtcttgaacctcttaaagtcatccgtgagggttggtatcaacttcttccaaactcttatttatgatattttgacttcttatgaatcgtgaatgtttttataagacctgaaagttgaaatcactccttaattcatacagaatggatggattctgtatagctacagaatggatgttgtattaacaggtgggaaaacaacattaggccggcgcaatggctcacacctgtaaccccagcaatttgggaggccgaggcgggcagaccacttgaggtcaggagttcgagaccagcctggccaatgtggtgaaaccttgtctctactagaaatacaaaaaattagcctggtgtggtggtgcacacctataatcccagctactgtggaggctgaggcaagagaattgtttgaacctgggaggtggaggttgcagtgagctgagatcacgccacagcactccagcctgggcgacaagaacgaaactctgtctcaaaaaaaaaaatatatatatatatatatatattcagtaaatcaagctgtaaacagatgtgctgtcatccaggctttattccatttataaagcataaacacagtggattcagcatacgttttaagcttctgagattttcagaatagtaattgagcattgacttcaacttaaaggccccagctgcattagcccataacaagagagtcagcctgtcatttgaagctttgaagccaggcattgacttctctctagctatgaaagtcctagatgacatcttcctccaatggaaagctgtttcttctacattgaaaatctgttggctagtgtagccactttcattaatgatcttagcttgatcttctggataacttgctgtagcttctgcatcagcacatgctgcttcaccttgcacttttttgagacagtgtctcactctgtcacccagactggagtgcagtggcacgatctcgcctcactgcagcctctgtctcccgggttcaagtaattatggtgcctcagtctcctaagtagctgggattataggtgtgtgccaccacgcccagaacatttatgtatttttatagagacagtgtttcgccgtgttggccaggctggtctcgaactcctgacctcaagtgatccgcccacctcagcctcccaaagtgctgggattataggcatgagccaccacacccggcttcacttttttttttgagacggagtttctctctgttgcccaggctggaatgcagtggcgcgacctcagctcactacaagctcggcctcccgggttcacgccattctcctgcctcagcctcccgagtagctgggaccacaggcgcccgctaccacgcccggctaatttttttttgtatttttagtagagatgggatttcaccatgttagccaggatggtctcgatctcctgacctcgtgatccgcccatctcaaccttccaaagtgctgggattacaaggcgtgagccactgtgcccaacttttttttttaagatagggtttttgtctgtcacccaggctggggtgcagtggcaagatagcacactgcaacctctaattcctgggctcaagggatccccccacgtcagccttctaagtagctggggactacaggtgtgtgccaccacactcagccaattttaaatttttgtgagacagtgtgtcaccatgttgcccaggctggtcttcaagtcctgtcctcaagtgatccttattcctcagcctccaaagccactgggattacaagcatgagtcactgagtttggcctccacattgatggcttctttccttaaaccctttctttttgagacggagtctcactgtcgcccaggctggagtgcagtgccatgatctcagctcactgcaacctcttcctcccagattcaagcgattctcctgcctcagcctcccaggtagccaggataacaggtgcccgccaccacatctggctaatttttgtatttttagtagagatggggtttcaccatgttggccaagttggtctcgaactcctgacctcaggtgatccacctgcctcagcctcccaaagtcttgggattacaggcataagccactgcgctcggctccttaaaccttatgaaccagtctcgttagagcctggctctggattaggctttggtttaaggcagtattgtggctgatttgatcttctgtcaaaaccactaaaagtttatccatattggcaataaggctgttttttcttttcttttcttttttttttttttgagacagaggctggagtgcagtggccctatcttggctcactgcaagctccgcctcccgggttcatgccattctcctgcctcagcctcctgagtagcgcccggccggttgttttttttaaacatttgtgtgttcactggactagtacttttcatttccttcaagatcttttcctggccaggtgcagtggctcatgcctgtaatcctagcactttgggaggcccaggcaggcggatcacctgaggtcaggagttcaagatcagcctgactaacatggagaaaccctgtctctactaaaaatacaaaattagccgggtgtggtggcacatgcctgcaattctagctatttgggaggctgaggcagaagaatcgcttgaacccaggaggtggaggtttcggtgagctgagatcgcaccattacactccagacttggaaactccttcacaacaaaaaaaaagaacttttcctttgcattcacagctttgctaactggcgcaagaggcttagctttcaccatatcttggctttttgacatgccttcctcactaagcttaatcatttctagcttttgacttaatgtggagacatgcaactgcccctttcacttgaacaaatagaggccattgtagggttattaattagcctcatttcaatattgttgtatctcagggaatagggtgggagagagactgtggaatggcttgttggtggagcagtcagatcatacacagtatttatcagttaagttctccatcttatatgaccatggctcatggcaccccaaaacagttgcaatactagcatcaaatatcactgatcacagatcaccataacagataaaacaaaaaacaaaagtttgaaatattacgagaattaccaaaatgtggcacaaagtgaacacatgctgctggaaaaatggcaccagtagacttgcttaacataggattgccacaaaccttcaatttgtttttttttgttttttttttttgagacggagtttcactctgtcacccaggctggagtgcagtggcacgatcttggctcactgcaacctccaccctccgggttcaaatgattctccttcgtcagcctcctgagtagctgggactacaggcgcctgccaccacgcccggctaactttttgtatttttagtagagatggggttttaccatcttggccaggctggtcttgaactcctgaccttgtgatccacccgcctcggcctcccaaagtgctgggattacaggcgtgagccactgcgcccggcccaatttgtttttttttttttaaaaaaaacacacattggctgggtatgctggctgacgcctataatcccagcactttgggaggctaaggcaggtgaaactcttgagctcagcagtttgagaccagcctgggcaacatagtgagaccctgtctcaagacaaaaacaataacaacaataaaaaaacacacagtatcggtgaatcacagtaaaatgagatatgcctgtactttatatattcatttaattctcagattctcatgttttagttgagaaaaccaaaggatggagaggtttcagtaacttgggcaaattcatagctaatacatggaagagacgcttactcagtatgattctaatcaaaatatgggctgtttgtacataagcattcctgaagtagctaaagcaatctcttccccacccatcttttcctatagaaatctcacctgtttttcttttcttttttttaatttgatatggagtttcgctcttgttgcccaggctggagtgcagtggcacaatctccgctcaccgcaacctctgcctcccagttcaaactattctcctgcctcagcctcctgagtaactgggattacaggcatgcaccaccatgcccagctaattgtttgtatttttagtagagacggggtttcaccatgttggtcaggctggtctcgaactcccaacctcaggtgatcctcccgcctcagcctcccaaagtgctgagattatagacgtgagccaccgtgcccagccatctcacctgtttttcaagatatactttaaatactgccttcttcatgaacctttctgaagtactttatgccttccagtttggaaatgaactctcctaaattctatagcactttgttcttactttttttttttttaaatggagtctcgctttttctcccaggctggggtgcagtggtgtgcgcttttcacatccttttttctattacagttgttttattccatgttattagttttttgaccagttacttactctacatagcctcattttcttatctttaaaataggtataggttaggtgcggtagctcacacttgtattcctagcactttgggaggctcaggaaggaggattggttgaggcaaggagttccagaccagtctgggcaacatggcaaaacccctgtctctacaaaaaaaaaattagttgggcgtggtgggatgtgcctgtactcccagctacatgggaagctgagacagaaggatcgtttgaacctaggagtttgaggttgcagtgagttatatgatctcaccattgtactctagcctaggtgacagagcaagaccttgtctttaaaaaataaaaatgaaataaaatagagataataggattgttacaggaattaaatgaggtaatgcctgtaaagcattttagctcggtgcttagcacatagtaagtactcaataagtgataattaatagctgttaatcacttagtaaacaaagtactttctatgtgtcaagccatatatatgtgtgtgtgtgtgtgtgtgtatacatatatatatatatatatatatatatatatatatatttttttttttttttttgagagagagtctcactttgtcaccctggctggagtgcagtggcctatctcagctcactgcaacctccacctcctgggttcaagcgattctcctgcttcagcctactgagtagctgggattacaggcatccacaaccacgcctggctaatttttgtatttttagtagaggtggggtttcaccatgttgaccaggctggtctcaaactcctgacctcaggttatccgcctgcctcggcctcccaaagtgctgggattacaggcttgagccaccacacccagccaggccctacattaaatataaagttaaatttactagtctttgtctttgagtggaggacaggaacatattgtgaatacttgtcagaaactcatacttttaggaccaggcagacagcagttaatttcagcaaatgattattaagtgcccactatgtgcaagggacttttctaggccctggaaatacagtggttaacaaaacagacaaaacctctttctggtgaagtcccagattttatattctagtgaataattttatgaaataaaccaaagggagactgttagatgaacgggacaaccctatttcctggctgctacgctccagccaattgttgccatggggaaatgtggttctagtgttgttgatttcgcatcctttccacaattcctctccctcttgaagctggaaatctggaatttttttttttttttttttgagatggggtcttgcactgtcgcccaggctagagtgcagtggcacgatctcagctcactataacctccgcctcccgggttcaagcaattctcctgcctcagcctcccaagtagctggcattacaggcgctcaccactgcacctggctaatttttgtaattttagtagacttcaccatattggccaggctggtctcaaacttctgacctcgtgattcacctgcctcagcctcccaaagtgctgggattacaggtgtgagccaccacgcccggcctggatttttaaataatacttactgctttgtaaaggttacaagctaactttcaaaatctgaaaacattaacaaaagatatttgaggccaaatatagcctgagaattgtctgtcttatttgtaaatgttacttcaattaatattctgtgtatcttatgaaatattacgtagtctctgtattttacaaaattatatgtatttttttaaatgttaatttttttttttttttgagatggagtctcgctctgccgcacaggctggagtgcagtggtgtgattttggctcactgcaagccctgcctccttggttcaagcgattctcctgcctcagcctcccaagtagctgggattacaggcatggaccaccatgcctccctaactttttttgtatttttagtagaggcggggtttcaccatgttggccaggctggtctcgaactcctgacctcaggccatctgcccgcctcagcctcccaaagtgctgagattatgggcttaagccactgcacccagccaattaatttttttaattaattaattaattatttttttgagatggagtatagctctgtcacccaggctggagtgcagtggcgtgatctcagctcactgcaacctccgccgcctgggttcaagagattctcctgcctcagcctcccaagtagctgggattacaggcgcctgccatcacactcggttaattttttgtatctttagtagagacggggtttcgccatgttggccaggctggtcttgaacacctgacctcaggtgatcctccctctttggcctcccacagtagtgctgggattaccaccacacccagacggagttccttctttttttttttttttttgacagagtcttgctctgtcacccaggctggagagcagtggcgcgatcacagctcactgcaacctttatctcctgagttcaagcgttcaagcgactctcctgcctcagcctcctgagtaactgagattacaggcatgtgccaccatgcccagctaatttttgtatttttagtagagatggggtttcagcatattgtccaggctggtctggaattcctgacctcaagtgatctgcctccctcggcctcccagagtgattacaagcgtaagctactgctcctggccgtacctaggagctctttgagtaatgtggtagtcctggcaggagatgatggcagcagctgagatggtaatggtagggaataagagagttaggaatttgaatcatcaggacttggttattgatttcatctggtggctgaagccaaggggaaaaaaaattaagcatgactcctatgcctgttgctttgagagcagagtggatagtgatgctgaatttaaatttgtgcattttgaggattctctgacctccagggaagttgttcaaaaatcagttgaatgtagaagtctggagctcaagagtgaggcctgggaatggagatagaggtttgatcatctatttatctctatacatggcaactaaaactatggagtgattcatcaacactcaggaaaaatgtgatgagagctgggctaaaaagctggccaaggtagatcagctgtgatgtgcagaaaggaaggaaacatcagtcagaattaaaagaaaacaaggagtgcttggtgtcttaaaagccaagagaaagaggccaggtgtggtggctcacacctgtaatcccagcacttagggaggctgagatgggtggatcacctgaggtcaggagttcgagatcagcctggccaacatggtgaaaccccagatctactaaaaatacaaaagttaaccgggcgtggtggtgtgtacctgtaatcccagcaactcaggaggctgaggcaggagaatcacttgaacccgggaggcagaggttgctgtgaactgagatcgtgccactgccctccagcctgggtgacagagcgacactccgactcaaacaaaaaagccaagagaggctgggcgcggtggctcacgcctgtaatcccagcagtttgggaggccgaggcaggcggatcacctgaggtcaggagttcgagagcagcctggccaacatggtgaaaccccgtctgtactaaaaatacaaaaattagctgggcgtggtggcaggcgcctgtaatcccagctactcgggaggctaaggcaacagaatcgcttgaacccaagaggcagaggttgcagtgagccgagatcatatcattgcactccagcctgggggacaagagctagattttgtctcaaaaaacaaaatgtgaaacaaaacgaaaaaaaagccaagagaaagagagtatttcaaaaataaggaagtggttgtcagaattgagtgctgccaagagaacaagcaaaaaaaaaaaaaaagactgaaaatgtctagtgaatttagcatcatgtacttggtaagtggcctgtgcaaagacggttttgatggcatggaagtgctaagtaagctaagaaatgagagaggagaggcctggcacagtggctgatgcctgtaattctagcactttgggaggctcaggtgggaggatcacttgaggtcagcagtttgagaccagcatgtgcaacttagcgagaccctttctcatttttaaagaaaaaaggagagagaagaggcaagctgttttaagaagtttgggtgggccgggtgcagtggctcatgcctgtaatcctagtactttgggaggccgaggcaggcaaatcacctgaggccaggagttggagaccagcctaaccaacacagagaaaccccctctctactaaaaatacaaaaaattagctgggtgtggtggtgcatgcctgtagtcccagctactcaggaggctgaggtaggacagtcgcttgaacctggtaggcagaggttgcagtgagccgagatcgtgccattgcactccagcctgggcaacaagagcgaaactccatctcaaaaaaaaaaaaaaaaaaagtttgggtgtaaggagcaaaaaggcagtttgatgaggctcttataatgtctaggcaagagattatgaagacctaaattcgtgcaatggcagtaggaatggagaaaaagacacagagtccagaaataattaggaaataaagctggccattctttctgattggatgtgattggatgtggggtgggagttaagggaaacagaactgtcaaagattattcccatgtttctgggttgaaaaactttgaaggtattggtacagatcagtaatccagtgtttccgggcgtggtgtttctcaacttttttttaatcaccttcctaaggaaactttttagacctttttttccccctaatgtacctgccctatgacatattaacactgagataaactctgtatctttttatgtaccatgtctgtgctttatacataagagtaagtgtacaatttagtttttattcaatgcatggttaagaaagactaaacagggcggggcatggtggctcatgtctgtaatcccagcactatgggagactgaggtgggtggattgcttgaggtcaggagttcaagaccagccaggacaacatggtgaaaccctgtctctaccaaagataaaaaattaactgggtgtggtagcatgcatctgtagtcccagctactcagaaggctgaggtgggaggattgcttgagccccggagattgaggttgcagtgagccaagatcatgccactgcactccatattgggtgacagagtgagaccctgtcttaaaaaaaaaaaaaaaaaaaggccaagtggctcacgcctgtaatcccagcactctgggaggccaaggcaggtggatcatgcggtcaagagattgagaccatcctggccaacatggtgaaaccccatctctactaaaaatacaaaaattagctgggcgtggtggtgtgcaccagtagtcccagctactcaggaggctgaggcaggagaattgcttgaacctgggaggtggaggttgcagtgagctgaggtcatgccactgcactcctgcctggcgacagagcaagactctgtctcaaaaaaaaaaaaaaaaaaaaaaaggaatgactaaacaaaatttttaggttaaaaatttttaacccaaaatttttaggttaagctcaaactcctgagcactttgggaggttgaggaggatcgcttgagcctaggagtttgagaccggcctgagcaacatgatcaaaccccgtgtctacagaaaatacagtaattagcggtgtgtagtggcatgcacctgcagtcccaactacttttgagggtgaagtgggaggatagattgagcctaggaggtagaggctgtagtgagccaatatcacaccactgcactccagcctgggcaacagagtgagacctgtctttaaaaagaaaaaaatctatttgggctggacaagatggctcacgcctataatcccagcactttgggaggccaaggcgggaggattgcttgaggccaggagttcaagaccagcctgggcaacatagtgaggcctcatctttttttttttttttttccaacagtctctcgctctgttgcccaggctggagtgcagtggcacgatctcggctcactgcaacctctgcctcctgggttcatacagttctcctgcctcaacctcctgagtagctgggattacaggcccccgccaccatgcctggctaattatttgtattttagtagagacggggtttcactgtgttgcccaggctggtctcagactcctgagctcaggcaatccttccgccttggcctcccaaagtgctaggattacaagtgtgagccaacgtgttcggccggcctcgtctttttttaagagctgtttgcgtttaacttatttatttatttatttttgagacggagtttcactctgtcgcccaggctgcagtatagtggcgcaatctcagctcactgcaacctccacctcccaggttcaaacaattctcctgcctcagcctcctgagtagccgggactaccggcgcatgccaccacgcccagctaattttttgtattttagtggagatggtgttccaccgtgttgcccaggctggtctcgaactcctgagctcaggcaatccacccgcctcggcctcccaaagtgctaggattacaggcctgagtcacctcacctggtcttaacttaatttttatggctgtatttgctttgtaacttttaatgcagtttacttgcttacataaattctatcaaattacaatccagtttggcagtttgtataaaaacaatgtaatcaaaactttaaaaatcattcaaaactagaatttatccaacaaaagtaaaacaatttgaaacaattaaaaattatttagtgagtttttagacttttgcttgataatgaccaaagcccaagtcacacaatccactgaggataaaacataaataacattcatgaggcagccaacaggcctgcacaggccatctcttgccatatcgagatccagcgatcaatcaagagaaagttccccagtcacggccatctggtcaccataattttgtagcatagatcctgcatatattttggctgccttccatgaagtcactgtcagtcctgctcatgtaatagtaagattttgttgggtaaggttgagctttggagggctacgcaccattctaacgtcttaactttttttctccctcgccgacaaacctattttgccctttgggtatgatattgcccccgttgagagtgtatgccttttaagaaattattcatgccagatgttccagaatcctaattttttgaattttagaaaggcattatggtgcatataacttgtataacacctccagtgaggtttgggatagaaccctgtatagtcaaatattatgaatgtttctgtagcaaaaatatccagttgaaaattaattgagattatatatataaagactataaataatctcatgtgaggttcagattttgccgccaaatgtgttttgagactatatttactaaaaaaaaaaaaaaaaaaaaaacctgtcctattttcagagcttgtttttcttttttctttttattttgtttgtttgtttgtttgtttgtagagattgggtcttgcttagttgcctaggctggttgcaaactcctggcctcaagcaatcctcctgcctcggcctcctaaagtgctagaattataggtatgagccatcgtgcctggccctgagagcccctttgatttcagaattccaggtaaggaattgtggaccatgaattaagagaaatatataaggaaccggtttatggagaagaagatgcttccccacccccccaccccccatttgaggtacttacagacatgattggaaggaacccatgttccctctaggtgttaggtatagattgcagaagtcatcagcatttgtttgtttattttttgagatggagtttttgcccttttgcccaggctggagtgcaatggtgcgatcttggctcactgcaacctctgcctcctgggttcaagtgattcttctgccgcagcctcccaagtagctgggattacaggcgcctgccactacacctggctaatttttgtatttttagtagagacgaggtttcaccatgttggccaggctgctctcgaacccttgacctcaggtgatccacccgcctcagcctcccaaagtgctaggattacaggtgtgagtcactgcatctgaacagtcatcaatatttaaatcacccaagaggctataattttctaatgagtaatgattggaattgtccactttgaggtgaagtaaagggggaaataggcccttttttaaacccctggtcattggttccttaagtgtagctttcaagggaatgaagacagaatggaaggataaagattaagagaaagaactgagtgttggaaggaaaaggaaaaaccacctgttcaatagaaagcaagaaaataatggtttttttctttgaccgtaacttcctgaaaatttcccttataaggaatttaggcctttcactacaggaggtgagaagaaaaagggaacaccattgattcagcatttaggccctagatactttcacattacctccttaatcctacagggccctataaagtttattgtgcccattttattttatttattgctttccgaagacttgcgccatgagaaatacccctgttttagagaggcagaagcaagactaagatagtgggtactttgcccacaattatacagttgggcttggaactcagttcacctgacctccaaatcagtgctcttttcactacatcatgttggatcaagttgatggagtttgagggtgaacattggatgtttgttcatggcatgtcttctgggagtggagaggattctttgtgtggcctttcagcctggcttttctctcccatttcaccctgggcctttctcacatggggccttagaatattgcctcctaaatctaactccctcattttgatgaattacatacaggttagagaaatccctgtttccaatttgtcagaagggctgttggaaaggccctttcttgtattgttgctaagagctaaaaggaagagctaatcagagggatttttataattcagctgacagacaatgcagaaccctctttgtctgaagacgagttgtgggtggagggtactgcagaatagaggccaggtaaccagccgttttgctattctatctcagaggcattttgctgtgtggacctttgtttttatgcctctttaactgaactggtcttgtgccccaaacccttcagaaatattaaccatctagccttcaaagaccacttcagaccttacccactcagtaaagagagttctcactctcactctctgaactcattgtacagttacattcattatcttttgtattcttagagctgtgagtctaaactaagttgtaaagcttcctgaaggtagaaacaattacacagtgcctgtttgagattggagataaccatttggttatctgcaacacacacacatacacacacacaatgcaagtgcttaggagctattcagtgaatatttttgtgctggcttaaatggaaattgagctctttcattttcctactttaattcgttttagtcccttgtggtacctagtggtagtggcagtgaagtgttcctagaaaggtaagagccacctgattctatttcaaatgagatcgctggaaaatttcttttggagaaactgtttggactatagttatcccagtcttctcctgtgtctcccctccacctcttacctcccttccgtagatctgagcattgtgtttacatatttatatatacactcaagggccaaagaactagtaaatcctaagagagaattaggattagcaaactagaagaactaggaatatatatattttttatattatatatgtatttatatatatatatatatatatatatatatatatatatatacacacacacacacatatatatatacacattttttttttccttagaccttgagctttggatatatagtcatgtgtacaggagatagttttcccccagtggcctttagctaaaccacctagtttataaatttagctttgtttcctagagtgattactgttcagcccagttcagtgaagatgctaccagaatatgagcagccttattatggtcccattgtggactgacccaattgtccagtagaagaagagcctctgccattgttgtggtgactggcacttctgacaggcttgcacataacaccctgagagcctcatgctgccagatctgtttcaaactgttttctcgtttgcaacatttcctggtcatgaatctctgagagaaattcaggaattttgaaaagccatcttcaaatctaacccactttaccagcatagcattttactgtttacaaagtacttgggtatatattctcattcagtcttcactgtgactctgagatagtctgggtaagggtatgaaaattaagatacagataaataatacccaagttgcacaattattaagtagcaagactaagaattagatctgtctttgtagctcttttcaccagtaccacaccacttccaatgtgcctgttggtggtccatccagcacagctaccttctgtcaatactagatatttccctccctctctctctctccctccctcccttccttccttccttcctcttttttttctttcttttttttttttgagacaggctctagctctgttgcccaggctggagtgcagtgtgagatgtcagcttactgcaacctctacctaccttccaggctcaagccatcttcccacctcagtctccctagtagctgggaggcatgtaccaccatgcctggctaatttttgtatttttttttagtaggggtggggtttcgccatgttgcccaggctggtcttgaattcctgggctcaagcaatctgtttgattcaaatgcggttgtttttgtttttcctttgaggtgacagccttcaaatgactacctaactacttgccagtccctataattttgtttctctgcatattagtatttgtatcatttgatatttgtgttttttttgttgttgtgttgttttgtttttatttggagacagggtctcgctctgtcacccaggctggagtgcagtagcgccatcatagctcactgcagccttgatctcccgggctcaagtgatcgtcctgccttagcttcccaagtagctgggactacaagtgtgcaccaccatgcacagccaatattttttatttttatttttagtagagacgaggtctcactatgtttcccaggcttatattccttgttcacagcaagaactggatcatacctcaattgagagattgaatcaaacgtggtggaattgagaagcagcattgacactcctgggagcacactccttccaggaaacaacaaaggagtcctcttgtggttggtatgctgtcaaataaggaatatgtagtgctggaaacattggctgtcatggaaatacctggtttaatctctcccacttattagctggttcttctgcaagttatgcctcagtttgcctacctctaaaatgagaattctatgtgagtctaagctaataatcaaatccttactaaatcaattatcagtcaaatatgaattttgcctgagaatgcctccctctacagatattagagattgactttggggtatttgaaagatatttcaaatataatatcttggtttttagtctggatttagtagataaatattttttttttttttttttttttttaccatggccagtgattttgaaaagcattctagactgaacttgagaagactgcttcacagctagtagagaggacacaaatgtgactttcttggcaaagcattgtgatcattgcctgccttggtgccttacagaggtcctctcccagcaggtcatggaaaataagtaacttgacacaggaaaggaacttgtatactgcaagtcagttggtttgataagttgatttaatcacaaaagtcattaacattgaaggcatctcaggccagacgcagggtctcatgcctgtaatcccagcactttgggaggccgagacgggcaaatcacttgaggtcaggagtttgagactgccctggccaacatggtgaaaccctgtctctactaaaaatacaaaaattagctgggcatggtggtgcatgcctgtagtcccagctgcttaggaggctgaggtgggtgaatcacttgaaccccaagatggcaccactgcactccagcctgggcgacagagtgagactctatctcaaagaaaaaaaaaaagtcacaggcatctcaaagaagttcattaagaaagggctcatgtggatcattgatttatttttattatcttaatgtgctaattgctatatataatgcctaaaaagaatagataaacatatgcagaagaattaatttggacccctgcctcacatcatacacaaaaaattaactcactggatcaaagacctaaatgtaagaactaaaaccataaaattactataagaaaaaatagtgggccgggcacagtggttcacacccataatcccagcactttgggaggccaaggcggatggatcacctgaggtcagcaattcgagaccagcctggccaacatggtgaaaccccgtctctactaaaaatacagaaattggccaggcctggtggcgggcgtctgtaatcccagctactcgggaggccgaggcaggagaatcactggaacctggaaggtggaggttgcagtgagccgagattgcgccattgcactcccgctgggcgacaagagcgaaacttcatctcaaaaagaagaaatcttaggggtatatcttcatggctttggagtaggcaatgatttgttagataagatgccaaaggctgggcatggtggctcatgcctgtaatcccaacactttgggaggccaaggcaggaagatcacttgagcccaggagttcaagaccaacctgggcaacaaagtgagaccctgtctctacttttattttttaaagtaaaaaaagatttaaaaatttaaaaagacactgaaaacacatacaaccacatacatacatacacacatatatgtatgtgtatatatatttaaatcttaagtctatacacacacatatatatacatatatacatatatgtatgtgtatatatatatacacacacaacaaaggagttgtgtgtgcgtgtgtatatatatatatatgtatgtgtatatatacttaaaatttaaaacttttggccaggtacagtggcccacacctataattccagcactttgggaggacaagtcaggcagattgcttgaccactgcaccccacctttttttcttctaattttctgtctccctatcagggaatccagcctggtctcctgtgtgacaggcagggatactatacaaatgaggatacattttcactttcttgatggtgtcttttatttactttttattttttatatttatttatttatttattttttattttttttgagacggagtcttgctctgttgcccaggctgtagtgcagtggcgtaatctcggctcactgcaacctccgctttccaggtagaagcaattctcctgcctcagcctcccaagtagctgggattacaggtatgcaccaccatacccggctaatatttgtatttttagtagagacagagtttcaccatgttgtccaggctggtcttgaactcctgacctcaggtgatctgcccgccttggctccccaaagtgcggggattacaggtatgagtcaccatgcccggcccagtggtgtcttttaaagcattaaagtgttttgttttgttttgtttgagacagtatctcactctgttgcccaggctagagtgctgtggtgtgatcacagctcactacagcctcaaccgcaagggctcaggcaatcctcccacctcccaggtagctgggactataggcacatgcccccatgtctggctttttgtattttttatagaaatggggttttgccatgttgcccagactggtctcaaactcctgggctcaagtgatctgcctgcctcaacctcccaaagtgggaacacaggcgtgagccaccatttccagtcagtgcagccattttattttaaaaatatggggtcccagcccagcgtggtggctcaagcctgtaatcccagcactttgggaggccgaggcgggcagatcacaaggtcaggagatcgagaccatcctggctaacacggtgaaaccccgtctctactaaaaatacaaaaaattagccgggcgtggtggcaggcacctgtagtcccagctactccggaggctgggacaggagaatggcgtgaacctgggaggcggagcttgcagtgagccaagatggcgccactgcactccagcctgggcgacagagcgagactccgtctcaaagaaaaaatatatacatatggggtcccactctgttgcccaggctggtctcaaactcctgggctccggtgatccacctgccccagcctccaaaagtgttgggattacagatgtgagccacggtgcctggccccagagtatttttttaagtggttgcagggctgggtgcggggtctcacacctgtaatcccagcactctgggaggctaaggcaggcagatcacttgagcccaggaatttgagactagcctggaaaacatgttgaaacctcatctctacaaaaaatacgaaaattagccgggtgtggtggtacacacctgtagtcccagctactcaggaggctgaggtaagaggattgcttgagtctgggaggttgaggcggcagtgagccatgattgcaccactgcactgcagcctcggtgacagagcaagaccttgtcttaaaaaaaaaaaattgtggaggttagaaagcagtaggataacaaagtgctgaaagaggccaggtgcagtggttcatacctgtaatccagcaccttgagaggccaaggccagaggatcacttgagccaaggaattcaaaaccagcctaggcaacatcacaagacctagtctctacaaaaaaaaaaaaaaaaaaaaaaaaattacttggacatgatggcatgggcctgtggtcccagctgtgtgggaggctgaggtaggaagattgcctcacaaggtctaggctgcagggagttgattgcactactgcattccagcctgtatgacagagcaaaaacctgtctcaaaaacaaaacaaaacaaaaaagcaaagtgctgaaagaaaaaccgtcaagcaagaattctatatctggccaggcagcatgggcgtggtggctcacccctgtaatcccagcactttggaggccgaggcaggcggatcacttgaggtcaggagttcgagaccagcctggcaaacgtggtgaaaccccgtctctactaaaaatacaaaaattagccaggtgcagcagccggcatctgtaatcccagctactgcggaggctgaaggaagagaattgcttgaggccaggcgtggtggctcatgcctgtaatcccggcactttgggaggctgaagtgggtggatcacctgaggtcagtagttcgagaccagcctggccaacatggtgaaacctcgtctctactaaaaatacaaaatttttttttttttgtatttaaaaaatgggtggtgggcccctgtagtcccagctactggggaggccgaggcaggagaattgcttgaacccaggaggcggaggttgcagtgagccgagattgcaccattgcgctccagccttggtgacagtacaacacttcgtctcaaaaaaaaaaaaaaaattctatatctaacaaaactgcccttctaaaatgagggagaaattaagatatttccagataaacaaaagcttaggggggttgttaccactaaacctgcagtgacttagcctatgatcttagcactttaggaggctgaggcaggaagatcacttgagcccaggagttcaagaccagcctgggcaacataacaaaaccccgtctctactcaaaatacaaaaattagccagatgtggtgcacgcctataatctcagctacctgggaggctgaggcaggagaatcgctagaacccgggaggcaaaggctgcagtgagctgagaccatgccactgcactcaaacctgggcaacagagcaagagtctgtctcaaaaaaaaaaaaaaaagtgctataaaaagaatgtactgatatatgttaaaacatggatgaacctcaaaatcattatgctaagtgaaagaagccagtcaaagaccacatattgtatggttctatttaaatgaaatgtccagagcaggcaaatctgtaagaaatagaaagtaccttagtgattgtttacagcttaggtgggtgagcattgggggtgacagctaaagagtaatagggtttcttttttttaattttatttattttttttttacttttttttttttccttcgagatggagtcttgctctattgcccaggctggagtgcagtggcacaatctcagctcaccacaacctctgctttccaggttcgagcaattttcctgcctcagcctcctgagtagctgggactacaggcacgtgctaccactcctggcttatttatttatttacagacagagtttcactcttgtcacccaggctggagtgcagtggcgcaatctcagctcaccgcaacctccacctcgcgggttcaagtgattctcctgcttcagcctcccaagtagctgggattacaggcatgcaccaccaggcctggctaattttgtatttttagtagaggtggggtttctccgtgttggtcagcctggtcttgaactcccgacctcaggtgatctgtccccctcagcctcccaaagttctgggattacatgtgtgagccaccgcgcctggccaatttatttttagtagagacagggttttggcatgttggccaggctggtctcaaactcctgacctcaagtgatctgcctacttcggcctcccaaattgctagaattacaggcgtgagccaccatgcttggccatttttttttttttttttagaggcagggtctaattatgttgcccagattggtcttgaactcctgacctcaagtgatccacccacttcagcctcccaaattgctagaatcacaggtgtgagccaccatgcttggccatttttttttttttttttagaggcagggtctaattattttgcccagactagtcttgacctcttgggctcaagtgatctgactgcctcagcctcccgaagtgctggaattacaggcattagctgccatgcctggccatagagttatggggtttttttttttttaggatgatgaagatgttctaaaattgtgctagtggttgcccagctctataaatacaccaaaaatcatactaaatatactaaaaatgtatgaattgtatggtttaggaattacatctcaataaacctattaccaaaggaaataaaaataataggacttctttgccaacaggacacttaaaagtctgcacaaagagataggatcacttaaaaattctaacatgctctttaatttgtattaacaatttaaccagaggctccaaactagtagtctgtaggccacacttggcttgtagtagatgtgtcttacagggactaatatgtttttcaaaaattaaacaaacattaaacagttggctgtatataaaatccacatttctagcttctctcttttttttttttgagatggagtttcactcttgttgcccaggctggagtgcaagggcgtgatcttggctcactgaaacctcctgggttcaagtgattctcctgcctcagcctcccaagtagctgggattataagtgcctgccaccacacatggctaattttttttgtatttttagtagagacagggttttaccatgttgaccaggctggtctcaaactcctgaactgaggtgatctgtccgccttggactcccaaagtgctgggattacagatgtgagccctgcctttagcttctcttgaaaatctgatctagcaaatctaacaaatgggactcatgtaagttagtcatatgtaggtctcattcacaatgatggaaaccttagtaattagagctgtgtgaaatgaaatgggttgcttttgtaataatatattatcactggtagtactcagacataggttataggtcagggaaatagaacaatgattcagagtatcagaggagagatcagactaataatctaaatctattctgattcagcctatggattctgtttgataaagtgggaagttatatggaataagcagaatgagattctctacgcatttattcctccccaattcattacatttggagtgaagatatggttagaagagacatcatacactattactgccagcgtttctggttttcaaatcaaagcctaaagggcagaccctaaagccttaggtattattcgttcttgaagccaagtttcagaaatacgttgctttccttcttgaatgagtagtagaggagaaaacaaaaataaaacaattaaaaaagaattactttgctttccaaatatacttgagtgttctcttcaaggacaatgaaaattatgtaagtgctcattttactttattttggatgacgggtagctgacatgccaaaatgccactctgttttaataattaagtggttctttgggttctgtttactgcattcatcttcccccacttttttttgtttgttttgagaaagggtcttgctctgtcacccaagctggagcactgtgataccagcacggctcactgtagtctcaagctccgttcaagcaatcctccgagctcagcctcccgagttgctgggaccacaggtgtgtgtcaccacacctggctaatttttgaaatttttttcagagacggttttgctaggttacccaggctggtctctaactcctgggctcaggtgatcctcccaccttggcctctcaaagtgctaggattacaagtgtgaaccactgcacctggctacttcccccaatttctatataaatttgtatattcctagtccagattcttgttttatttatatttcattgaatttattgtaaacgacttcagattctctagaaaactgaagtttaaaatgttagatggaacatttgagggcatgctgtgtactttgctatagacgcaaagataagtaaaagagttcttgttctcaaagatttaataatctagaagtgagaggtgatgagggtgtaaactaaaatttattggaggtggtcagtaggagccaatttggagtaacagataaaaatcagtttcctgaattggggaggagaatgttcatgggtgactccaagaccaggtgaatggtgatggcattaactgcgaaatagggaagataggccaggcacagtggctcacgcctgtagtcccagcacatttggaggctgaggcaggcagatcacttgaggtcaggagttcgagaccagcctggccaacatggtgaaaccccatctctactaaaaatacaaaaattagctgggcatggtggtgggcaactgtaatcccagctacttgggaggctgaggtaagagaatcgcatcaacccgggaggcagaggttgcgatgagccaagatcgtgccactgcactctagcctggatgacaagagtgaaactctgtccaaaaaaaaaaaaaaatagggaagatagcagaaactggtttaaagagaaagttgggtgaagatagctggtaggcaagatgttttgacaatagggatttcaaacttggtttaaaagtagaggtggaagctggccaggcgcggtggctcatgactgtcaacccagcactttgggaggccaaggcgggtggatcatctgagatcaggagtcgagaccagcctgaccaacatggagaaaccccatctctactaaaaatacaaaattagccgggcgtggtggcacatgcctgtaatcccagctacttgggaggctgaggcaggagaatcacttgaacctgggagacggaggttgcggtgagccgagatcgcgccattgcactccagcctgggcaacaagagcgaaactccatctcaaaaaaaaaaaaaaaaaaaaaaatggaggtggaagctaagggagatcgtgagcttggagtgggggctcctcctgctgagaagaggaccaaaggtaggattttggtacacactgacattgagaggttggctctggaagatgaccacagtaagaaacttgaagagtggttggaaggctaagagaaaaattgggagaggatggtgttactagaatcatgaatagagtttcaggaaggcaaaggtgatcatcagtgacaaattagaaagctgaatgcaatgactactgagtgggtcactggatttaacagtctaaactggctttttctgaggtatttgtgtcttgtgtcctgtagtttttataatggatggttttagtttaattttcacatgaattctggaggaaatcgtggtttctgggtttttagtaagaaattcttctgtagtctgcttttggagggtctgcttcactccagtcacaaggaaggtttctttgctatatactcctttacttacctatctggcaaacacttattaaatagctgttgtggctaggccttgtgtctggaacaacgtatatgctcgatgagtatataataaatatttgaatggtgattcactcgacaaatatttgttgtagatgccggggatacaacaactctgcctttgtggaacttaacatcctatggagagcagatggattggaattagtataatgaaagaaagaaaacaggtgttctgacaaaaatagggtaacttactttgggttagggtaatggggaaggacccagcaattccaagagctaaggaaaagcgttgaaggcaaaaagaacaggaagtgcaaaggctatgtagtaggaaacagtatgaagcacacagcatcacctatatatattcttggccaacaattactatatatatatgtttttttctccatctataacccagcaacaccaaaagttattttcaacctgaatctattctagcccctagacttaacttccattttacaggaaatacaaggggtaagggtatgagtttaataacacaaaactagaatgtgaggcgttctataagaaaactgacctagtctcttcagaaagtatcacaagcaaataaaagggttgggggagaggaggatggacattatagattaaaagtgatcagatgttggataatgatattgtagtttttaaaatggctttgttgtttgcagatacatactgaaatgtggatgaagtgataggtcaggaatttgcttcaaggatctgggagaggcagaagcatagatatgaatggctgctagttgatcattgaatctggatggttagtgtatgagattcattttatttactgttttgtctacttttgtgtatatttgaaattttccatgataaaatgttaaaataacaaatacaatgtgtgaaccttggctggatttggggagaaaaacccagatataaaggatatgttgaaataattaagaaatttgaatatgaactagatattgggtattttgttaatttctttggtttgaaaatgctgttgtggttatataagaagaaggtcctgggcctggctcacgcctgtaatcccagcactttgggaggccgaggcaggcggatcacaaggtcaggagttcgagacaagcctggccaacatggtgaaaccccatctctactaaaaaatacaaaaattagctgggcatggtggtgtgaacctgtaatcccagctatttgggaggctgaggcagaagaattgcttgaacccaggaggcagaggttgcagtgagctgagatggtgccactgcactccagcctgggcaacagagcgagactctgtctcaggagaaaaaaaaaagaagaaggtccttattatgggatacatactaaagtaattgggcgaagtgccaagtgatgacatttacaattttcaaatgtacagttaaaaatatagctatattatatatacatctgatagaataaaactaatatgatgttaaaaatcattgaatcttagtggataatttatagatattgtactatatcaaacttttagtgtttaagcagtttataatggaaacagaaaaaatagttcggctattcttgagaactgagaaatggggcagtagctaagggaaaatgaatgaaaaaatgcactcacaagtgtctggttctcagtacaaggaatcacaggtgagattcctagaactgttcctacagtgtgtttttagctggcagagttacaacaatacccaaattttgtcatcaactttatattaatttacagtaaataactaataggtagaccagtaagaagacagcaaaatttaagccatctttgatgttttcttatggcatctttggtaagaaactgggccaggtaagatttggaagaacatctgtgaaatctttggatttattattgtgtctatcacttgtgtattgtgggttatcttctcacccatcacatcccagcatcatggctggctttacttgctttgggggaattaatcctgatgttgtaggtgttagtccatacatgtacttcaggtttgtggttggttggatctgtggtctagggtgagaattcattgtattaataaaaggaaaacttgtactgtgaaggtgagttcctatgaaaatctggtatggtggtggaggggaggctcaacagtcaattggcctgagtttaaaatgtttatgaatctcaaaatgttaaacataccagtgattaaatggagcactatggcaatcttgctactcactaatgtgtgacctgagtgagcctcagttttttcatttatccattagggctttttttttttaagttaatccttttttttttttttttttttttttttttttttttttttttgagacggagtctcacactgtcacccaggctggagtgcagtggcgcgatcttggcttactgcaacctccgcctcccatgttcaagcaattcttctgtctcagcctcccaagtggctgggattacaggcacccaccatcatgcctggctaatttttatatttttgtagagacaggatttcaccatgttagccaggctggtcttgaactcctgaactcagatgatccacccgcctcagcctcccaaagtgttggggttacagacatgagccaccgtgcctggcctattaagtgaatcttaacctttcttattacaggcgtgtccttgtgtctcatgaaagcagtttacttcgattgtcgcctttgccgaggtctaaagacaaggcttaattaacttgaatttgatatcagacactggcaggagtcggtgccttatttagattaggtaattagggcctatattagtttgcgagggccaccataacaaagaaccacagactgggtggtttaaacaacagaaatgtattttctcacagttctggaggctagaagtctgagatcaagttgtcagaagaggtcaggtgcagtggctcatgcctgtaatcccagcactttgggaagccaaggcgggcggatcacggagtttgagaccagcctcaacatggtgagaccgtctctactaaaaatgcaaaaaattagccaggcgtgctggcccgcacctgtaatcccagctactcaggaggctgaggcaggaggatcgcttgaaccccggagacagaggttgcagggagctgagattgtgtccctgcattcctgcctgggtgacagagcgagaccctgtctcaaaaaaaaaaaaaaaaaaaaaaaaaagttgtcagaagggttgttttattctcagccgtttgttgttggcttctatatagctgtcttcatgttcacatgctgttctccctctcttgttttaaggacaccagttactggattagggcctaccccaataaccttatttaccttaattacctctttaaggactctatcttcaaatatagacgcgttttgaggtattggggtttaggacttcataatatgaattaggaacagacatgattcagccattttaaggcccctacctattttgtattatcattgctagctctttggttttaaaagcttagaaagtgcatggcaacattagacattccctagaaatgaaaggtgtgacttcagagacctattcactttgagagagttccttgactaagaaaacccaaagacagtctaggacagccagatgctagaaaagtttatttgtattgtgaattttaaaaaattcatccacagcaagtaagggagtacataatggaaaaagccgctggcgtgctggatccctgagattccagatgtgcttgtgcagatgttcctccttccaatctaacctcccttgtctgcttccccagtgaagtcataagcaaatatttgtgatagtttcttgtcaccatggtgactaaagaagctcagcatggctctcctcccagcttcactgtcagctgtgcttgaaggagaggctagcgtccaggacagcccaggctcagtcatgaaaagctatgtgtcaggtaataggggacagcagttcatagtgctgccttcagaaatctgttgtctactctgttagtctcacagggataatcgggcctcaaaaggagtgcagaggtgcagacacagctcacttgcagcctcaacctcctgggctcaagcaatcctcctgcctcagcctcccaagtagctgggaccacaggtgcatgccaccatgcccagctaattttggtatttttttgtagagattgtggtttcaccatattgctcaggctgctcttgaactcctgggctcaagcagtctgcccactttggcctcccaaagtgctggcagtacaggcctgagcccaggctacaatgccgattaaaaaaaaaaattattccagcctgggcaacatggagaaactccatctctactaaaaatacaaaaattagccgggcatggtggtgggtgcctgtaatccccactacttgaggagaatcacttgaatctgggaggtggaggttgcagtgagccaagatcgcactgctgcactccagcccgggtgacagagcaagattctgtcttaaaaaaaaaaaaaagaaaagaaaaaaaaattattagtgataaaatatatgtaacaaaattttcaatttaagtgtacaatacagtggcattaattacagttacaatgttatgtgaccatcatcatcactatttccaaatattttactacccctaacagaaattctgtacccactaagcgataactccctattttcctctcctcttagcacctggtaacctctaatctactttctgagtttgactctaggtacctcatgtaagtggaatattttgtgtcttgcttatttcacttagcacattaatttcaaggttcaatcatgttgtagcatgtgttagaccttcattccttttttggctgaatgatattccatggtatccatatgcagtagtccttgccttatccacaggcaatatattccaacacccccagtggacacctgcaacgacagatggtaccaaaccctatatactatattatttcctatacatacgtacctatgatgaagtttaatttgtaaattaggcacaataagagattgagaacaataataataaaatagaacacataacaatatgccagcatcatcacttttgcactttggggccattattaggtaaaataaggatgacttgaccacaaacactgcaatatctgctactaactggcagtgtatacagtgtggatatactggacaaagggatgattcatgtcccaggtggaatagatggttagcgcgatatttcatcatgttacttggaatagtatgaaatttaaaacttatgaattgtttttatctggaaatttccatttaatattttcagaccactgttgtccatgggtaactgacactctgcaaagcaaaactgaataagggagaaatcgtataaaagtagaattgctggattatatagtaattctttttaatttttttaggaactactattctgttttccacagtggctgcaccattttccattcttatcagcaatccaccaggttccagatcttagccagcgtgtgcttttattattcttactccatcctagtaggtgtggagtagtatgtcactgtggtttttaaaacttttttttttttgagatggagtctcgctctgtcgcccagggtggaatgcagtggcacaatctcgcctcactgtaacctccaccttccaggtacaagcagttctcctgcgtcagcctcccgagtagctgggattgcaaggatgtgccaccatgcccagctaattttgtatttttagtagagatgggatttctccatgttggccaggctggagggtcccacccttagataatctccccacctcagcctcccaaagtgttggaattacaggcgtaagccaccgcgcctggcctaaaacttttttttttttttttcttgagatggaatctcacactgtcgcccaggctgaagtgcagtggcgcgatctcggctcactgcaaactccgcctcccaggttcatgccattcttctgcctcagcctcccatgtagctgggactacaggggcccgccaccacacccagctaatttttttgttgttgtatttttagtagaggcggggtttcactgggttagccaggatagtctcaatctcctgacctcgtgatccacccacctcggcctcccaaagtgctgggattacagatgtgagccaccacgcctggccaaaacttttttatatacgtttttcagtcagctttctcaggttgaatcattgtggttttgatttgtatttcttttttttttttttggagatggagcaagctctgttccccaagctggagtgcagcagcacgatctcagctcactgcaacctctgcctcttaggttcaagtgattctcccacctcagcctcctgagtagctgtgattacaggcacccgccaccatgcctggctaatttttgtatttttagtagagacggggtttcatcatgttggccaggctggcctcagactcctgacctcaagtgatctgcccacctcggcctcccaaagtgttgagattacagatgtgagccaccccgcctggtctggctaatatttcattttatataatgtataaaatattctctatacaatgaaatatttatttctccactgaatggacataatatccttcttcaaaatcagttggctggccgtagatgtaagggtttatttctggactctcaattctattctgtatgtccatatgcttatccttatgccagtaccacactgttttaattactgtacctttgtagtaagttatgaaatcaggacatatgagtcttccgacattttaaagaatgtcttccttaatttctgtatatttgtgaattttctagttatcattctgttactgatttctagcttcattccatgtagtcagagataatgttttatatgacttcagtcttccaaaatttattgagacacttttagtgggctaacatatggcctatcctggagaatctatacttgagaagaatgtatattctgctgttattgggtggaatgccttgtatatctctcttaggtctactttataattttgttcaagtcctctgttacttatcgatcttctgtctaggtgttctgttcattattgaacgtggttcattaaaagtctccaaatatctgtaggccacagttggtggggacaaaaaagtctccaaatattttttctgcacttctgtcagaacttgcttcatgtttgggggctcttgtttattgcatatgttttttaatagcttgatgaattggccatatgatgtcctttctttttggtaacagtttctgacttaaagtttgttttgtcagatattcatgtagctattccagctctctttattcccttctcatttccttttgtgtatatttttaatttttattttctgtgcatgtagttttttggatatttcctagtgaacaccatgggaattacacttaatattctaactttataacactctagttggaatcaataccagcttaattcagaagcatacaaaactgctcatgtacagcattgtttcctcctttatgctgttgtcatcacacattttatgtttaaacattgtgtgaccaataatgtagatttataattattttatgcatttgtcttttaaatcatgtaggaaatgaaaagttacaaaccgatgtatagtaatactggcttttatatctgcccatatagttacctttatcagagatctttatttcttcatatggcatcaagttactgtgtcctttcatttcaacctgaagggctcccattagttttttgttttttgtgtttttttttgacagagtcttgctttgttgcccaggctggagtccagtggtacagtcacggctcactgcagcctgaacctcccaggttctagcaatccacctcagcctcccaagtagctgggactgcaggtgcataccaccacgtccggctaatttttatatatttttttgcagagatggggtttcaccacattgcctagactggtctcgaactcggctcatgtgatcctcctgcctcagcctcccaagtgctgagattacaggcccagccagcatttcttgcagagcaggtctagtggtaacaaagcccctcagcttttgcttatagggaaatgtcataattctccctcatttttgaaggacagttttgtcagatatagaattcttgcttgacggtttttctttcagcactttgctttttgttttgttttgttttgtttttgagacagggtttcactgtgtcacacaggctggagtgacggtgcaatcacaagtcactgcagcatcaacctcctgtgctcaggcaatcctcctgacttagaggtgtcccaggtagctgggaccataggtgcacgccaccatgcccaactaaattaaacaaaattatttgtagagacagggtcttgctctgtttcccaggctggtcttgaactcctgggctcaagtaatcgtctggccttgtcctcccaaagtgctgggattacaggcatgaaccactgaacccagcctcttttcggcactttcttattctactgccttctgactttcgtgatttcttttctttttttttttttttttttttttttttgagacagggtcttgccctgttgcccaggctggagtctagtggtacaaccacggctcactgcagcttcaacctcctgggctctggtgatccttccacctcgtcctcccaagtagctgggattacagacatacaccaccatgcccagctaatttttgtactttttgtagagacggggttttgccatgttgcccaggctgttcttgaactcttggtctccaacgcaagccattcgcctgccttggcctcccagagtgctaggattacaggcctgagccactgctcccagcctgactttcataatttcgaatgagaaatcacctgttgatcttattgggcatctttgtatgtgataagtcacttctttcttgctgctttcaggattctgtctttggctttcatcagtttgattatgtgtctcaatgtggatattttctttttcttttttgagacagaatctcactctatcacccaggctggagtacagtggcatgatctcggctcaatgcagtctctgcctcccaggttcaagtgattctcctgtcttagcccccccacttgctgggattacaagtgcgttccaccatgcctggctaattggttttttagtaggtgccaccatgcctggctaatttttgtttttttttagtatagacacagggtttcaccctgttggccaggctgatctcgaactcctgacctcagttgatccacctgcctcagtatcccaaatgtgtatatcttcattagagttcattgagctccttcatgtgtagattcatgtgttttatttaatttgggaagtttttgaccatattttttcaaatattctacctctttatcttctgctcttaggactcccataatgtggtgtatattggtcttttttttttttctttttttttttttgagaaggagtctcgctttgtcacccaggctggagtgcgatctcggctcactgcaacctccacctcccgggttcaagcaattctcctgcctcacctcctgagtagctgggattacaggcgcacgccaccacgcctgggtatgttttttgtatttttagtagagatggggtttcaccatattggccaggctggtctcaaacatctgaccttgtgatccacccgcctcagcctcccaaagtgctgggattataggcatgagccactgcgcccggcccccctacttttttttcaatagagatgagatcttgcctatgttgcctaggctggtctcaaactgtgggctcaagctgtcctcctgcctcagcctccaaaattgctgggattacaatcatgagccaccgtgccggccatattggtccttttaatggtattccatgggtccactcgattctgttcatttttcttcattctttattctttctgctcctcagattggataattttaattgatctgtctccaagtttgctacttttttttctatctgcttgtatctgctgttgaacccctctagtgaattttttatttcaataagtgtacttttgagctctagaacatttgtttggttcctttttataatttctttctttttattgatattctcattttattcatgtattgtgtttcagatttcctttagttcattgtccaggtttttctttatctctttgagcatatttaggacagttgttttagaatctgtctagtaagtccagtctctgggcttcctgagggatggtttcctatttttataaaattatttaaaatagaaacagggtctccctatgttgcccaggatggtctctaactcctggcctcaggcagtcctatcatcttggcctcccgaagtattgggattataggcttgagctaccacacgcagctaggaatggtttctactttattccgcgaatgggccatgcttccctgtttttgtgtgtgtgtccatgtgccttattttttaaagacaatttttaaatggcaaaaaagttattttatgtttatctgccatatctagtgtttttcattttgtggatatccgagtttccatctggtatcattttccttctacttgaagacttttagcatttctttagtgcaggtcagctagagaaaaagtctctcagcttttatctgaaaaagtctttattaatattatttttaatttagcccatgacctgctgaattgctttcatttcaaaaagtatctttgttggatataaaattctagtttaccagctttttgttttttccagaacattaaaaatgttttgttgttttctgacttacggtttctgacaagaagctaggccattcttatctttggtcttaataggtctttatctggctgcttttaagattttatctatcgctgcttttcaagattttggttgtgatgtgtcttgtgattttctttgtttttatcttgcttaaggattagcatagcttttagggttaatgggattagatctggaaaatttttagtctttttttttttttttttttttttgagacagggtcttactctattgcccaggctgtagtgcagtagcatgatcttggctcactgcaacctccgcctcccgggttcaagtgattctccttcctcagcctcccgagtagctgggattacaggcaccagctaccacgcctggctaatttttatatttttagtagagacaggctttcaccatattggccaggctggtctggaactcctggcctcaagtgatccatctgcctcggcctcccaacgtgttgggattacaggcttgagccaccatgccctgccaatttttagtctttgcttgtaaatgtttttctgtctgcctctcaatttttttcccctgtgaatccagttactaatatatgagagcacttgaaaccatcctactatctactgaagtgtcatttctggatctaacttttgactgatttttctcctatgggtcacaatttttctgctgcttagcatgtatagtactttttgttgtttgttcatttggagacagagtctccctctgtcaccaggctggagtgcagtagcatgatctctgctcactgcaacttccacctccctggttcaagtgattctcctgcctcagcctcccgagtagctgggactacaggtgcgtgccaccaagctcagctaatttttgtatttttagtagaaacgaggtttcaccatgttggccaggatggtctcaatctcttgacctcgtggtccgcccacctcggcctcccaaagtgctgggattacagccgtgagccaccacgccccggctgtttttgttttttagagacagggtctcactctgttgcccaggctggagtacagcggtgcagtcatagctcactgcagccttgaagaactcctaggttcttcaagctatcctcccacctcagccttccaaagtgctgagatttataggcatgagccaccatgcctggctctggcccataatttttaattggattccaagcattgtgaattttgtttttagtgtctggattttgttgtcttttttttaaaggatgtagggcgttttataggtgttctgttttagcagtgtaaggctcgtttttaagcttcatgagtagccttttctgggaatagtttaatcccactactaagccatagcccttcttagggtctctactatgccctaagtgatcagggagaaatccccattcagatttgtctaaagtctctcagccctgtgcgagctctgggaactgctgagcttacatacagcttctcagttgccctttgtgtgactcatggagcttcacccagcatgtatgcatccttagtcttcagcaaagatttagggaaccccaaacagatttcccaattttttttttctgcctatttctctcctcgctggaatgctgtctcagtgttttcagccacctcagtctcactgaagtctctagtctctcctccactggtgagatttccgtggtgctgtttgggacccctcttctgctatagaatgtgcctctgggcagaaagccaaggagacaagtagagctcacttaattcgtttccctcttggagaatcacaattctgcattgctgttgcccgatgtctgaaacagtttatagcaacaggggaaatcctatccctcttattccatcatggctggaagtggaagtgataactatattaatatccaacaaaagaaaaagggcaacaaagggcattgttaaggaataatttggctcactttataacaaacttctattcacagtcaagatacaacagttctaaatttgtatgcttctaatgaaatagtattaaaatacataaagcaaaattaaactacggggtaaaatggctacattcactatcaataaggaaaacattagtgaagtgaaacattaatagaagatttgaacaacatgatgggcatggtggctcatgcctataatcccagcactttgggaggctgaggcagggggattgttgaggacaggagttcaagaccagcctagacgatatagtgagacccccatctctacaaaaaaaacgtaaagattagccactcatggtagtacgagcctgtagtcccagctactcaggctaaggcaagagaattgttttagccctggaagttgaggctgtggtgagctgtgatcgtgcactgcactccagcctaggcaatagagggaggccctatctcaaaaaataatgaataaataaagaacaacatgatgacaacttaatttaatggacatgatattcagaaagccatgcacaataatttaagaatacagattcttctcaagcacacatgggacacttatgtaaattgaataaatcaaaagtaattagatatttaggactgaattacaatacaaatattaatttgaaggaaatttataagccttagaaaggtaatatagaagtatagtgtggggccaggcacggtggctcacacctgtaatcccagcactttgggaggccgaggcaggtggatcacgaggtcaagagatcaagaccatcctggctaacatggtgaaaccccatctctactaaaaatagaaaaaattagccagacgtggtggcgggcgcctgtagtcccagctactcgggaggctgaggcaggaaaatggcgtgaacccaggaggcggagcttgcagtgagccgagatggcgccattgcactccagcctgggcaacagagggagactctgtctaaaaaaaataaaaataaaaataaaaaaaattagccctgcgtgcacacctgcaatcccagctgcttgggaggctgaggcaggagaatcacatgaacccaggaggcggagggttgcagtgagccaagatcgcgccactgcactccagcctgggtgacagagtgagactccatctcaaaaaaaaaaaaaaaaaaaaaagtatagtgtgaacatttaattacttagatatacaacttaaattagaaaaaatgtagaaaggggatagaaatcatatagtagagaagactcaatgaagctaaaacttggatcttgcaaaagactaaaataaaaatagtcaagtctctggtaaaggttctcaggaacaaaagagggcacaaataagacaatattaaggatgaagaaagtacacagtcacagataactgatttaaaagaacgtgaacaggccaggcgcagtggctcatgcctgtaatcccagcactttgggaggccgaggcaggcagttcacctgaggtcaggagttcgagatcagcctggccaacatggtgaaaccccgtctctactaaaaatacaaaaattagccgtattaggcgtggtggcaggcacctgtagtcccagctactcaggagggtgaggcaggagaatcatttgaatctgggtggcataggttgcagtgagtcaagatggtgccattgcactccagcctgggcaacaaaagtgaaactctgtctcaaaaaaaaaaaaaaaaaaagaagaaaaatatttaaaaatacagaaacaaacatttttcacagaaggggaaacatatagctaataacaacatgaaatctaacctcattagtaatctgggatatgcaaataatcatctctgtgaaatactttatgacacccagtagattgtcaaaagtattggtcaagatatttgtcagtggcagtactatggaagacaactttggcactagctggtcaagttaacatttatttacctacaactgagtaattcactgcttagaacagcagttcttggctggacgtggttgctcatgcctatagtcccagcactttgggaggccaaggcaggtggatcacctgaggtcaggagtttgagaccagcctggccaacatggtgagaccccgtctctactaaaaatataaaaattaaccagttgtggtggtgtgcgcctgtaatcccagctactcggaaggctgaggcaggagaatcacgtgagcccaggaggcagaggttgcagtgagtcgataccgtgccactgcactccagcctgggtgacagagtgagaccctgtctcaaaaaaaaaaaacagcatttctcaaagtatggtctgcagacccctgggattacgggtgggagccactgtgcctgatgtgttcctgttttattaaagattaaattctgaagcaataaaagttacaggagcttgtccaaggttgcacagctaacaagtagaagggtcaggatgtgaacccagacaatctgtctctagggcccacacttttaactactaagcttataccaattgctttaataccacctgtttagcaagcttattgtaattaaaagatactggggctggggggtgggtagagatgtcaggtgctattgagagctcccagagagctgtattccccccagagtaggggagggtgaagggtgggtagggatagaagtctagtgaaaaggaaatgctgtcctctcaagagtttttggcagtgtgtatcttttcttctagagaccatggcgagcccagggaaagacaattatcgaatgaagagctataagaacaatgctctaaaccctgaagaaatgagacgaagaagagaggaagagggcattcagctccggaagcagaagcgagagcaacaagtgagttaatgggagtattctcaaacatactattctgggaaacaagcccctatggttggcctccaccatgcaccctgacttgccctgtagaaaagtagcttactaggtgggcatggtggctcatgtctgtaatcccagcactttgggaggccaaggcaggcagatcacctgaggtcaggagttcaagaccagcctggccaacatggtgaaacttcattttctctactaaaaatacagaaattagccggacgtggtggcatgcgcctgcaatctcagctacttgggaggctgaagcaggagaattgcttgaacctgggaggcggaggttgcaggagctgagttcgtgccattgcactccagcctgggcaacaagagtgaaactccatctcaaaaaaaaaaaaaaaaaaaaaaagaaaagtagcttacttactgagtgagctactcatccagtttcctttgttgtaaataaatgttgggagctttgagaaagagaaaactgaccttatccccttttcacaagttagaccaacttagacatcatttatgtctttactgtaacattctagttctagttccttgttaccttttcttttcttttttttttctttttttttttttgagacggagtctgattctgtcacccaggctggagtgcaatggcacgatctctgctcactgcaacctctgcctcctgggttcaagcaattctcctgccttagcctcccgagtagctaggattacgggcatgtaccaccacgtccaattaactttgtatatttttggtagagactgggtttcaccatgttggccagactggtctcgaactcctgaccttgtgatctgcccagatctgcccgcctcagcctcccatagtgctgggattacaggcgtaagccaccacgcccagcctgagactataataatgcctcaccatctgcactcctacgccaccccgccaacagattcagtcacctgattattattatttatttatttatttatttatttatttatttatttattgagacaaggtctcactctgtcacccaggctggagtgcagtgagtgcagtgagtgacatgatctcagctcactgcagcctcaagctcccgggctcaagtgatccttcttcctcagcctcctgcatagctggactataggcatgtaccaccacgcccggctaatttttgtggattttttttttttttttttttttgtacagacagggttttgccatgttgcccaggctggtcttgaactcctgagctgaagtgatccacctgccctggcctcccagagtgctgggattgcaggcatgcgccactgtgcctggccaacctaacctgattttgcccacccttttgctatactatcattcctttttttcttttttttttttaagacaggatcttgccctgttgcccaggttggagtacagtggcgtgatcttggcccactgctgcctctgcctccaagtccttgaatatcttttccatgttagtaatcaatagtctcctcttctctttgtggaatacattccaggacccacagtggatgcctgaaactgcagatattactgaaccttacatatactatgttttttttcatgttttcatctttttacttaaaggaagcactttacagcttctctttggcacatttgaattgccagcatcactactcttgcactttgtggctattactaagtaaaataagggttacttgaacacaagcaattgccacctgataaccaagttggttattaagtgactaactggcagcagcgtatacagcatggaatggatgcactggacaaaggatgttcacatcctgggccagacagaacaagatagcgtgaaacttcaacactactcagaatggcatgcaatttaaaacttatgaattgttcatttctggaattttctgtgtaatattttcagaccacggttgactggataactaaaataatagaaagcaaaactgaataaggggagactaatgtataaagcttggcctcacttctcagctactctagtatatccttgtcagttatgccataatttaacattggattgttctttgttttctttggttcagagagtactcttaaccactgtctctttactttcagctttttaaacggagaaatgtggagctgattaatgaagaagctgccatgttcgatagtcttctcatggactcttatgtgagctctaccactggggtaaggcccctgcatgtgcctcaggctgacctggaaaacacctgcttctaaggacagaaattgggccgttcacatcatctaccagctttgccagtaaccatgacaagttctttcctctgtggaccctttcgtcagctttaggagtcaacaaagattcaactttgttagatatatctgaggaaacatttaagagaagccatcagttgcctcagaattaggaatcacttttcaaatgtcccaacttgaagcacctatagattaaacagaccccttctcctgagcctattatgccatcctcttgccctcagttttttagaaaacaggatgccaagcagtattatgtgctcacatctggctctaatgttggtttgcaaagtcctaaacttgttttatgttctaggagagtgtgatcacaagagagatggtggagatgctcttttctgatgattctgacctgcagttagcaaccacacagaaattccggaaactgctctccaaaggtacaaagcctggcccttgtcagagaggccttatatgatttagcctcttttctcttcactgatgtcatcaacttacacgtgccctcactcattctgctctagccctactgaccttggtgttgcttgtacaagatagacacattgctaccttcacactggatacttcctctgcctgatgtcctctattcccagatatctttgtagcaactcccttactcctatgattaaatcccaccttcaacagttttatctttttaccttgccctacatattctcctcctctccccccattatatttatcttctaacataataaaatgactcttcccactaggatataaactctctgagggcagagacttttgtttttgttccctcctgtgtcctctgtacctagaactgtgtggcacaccataggtacttaataaaaaaatttaatgtatgattggaaaaatacctcttgtttcagtatatcaaatagtcttcccaagaagagagtactggtctttcttgaaagggaaatgtgcagaccatggttgttcatcccttaggtggttctctctcccacacctttctttgcttacatttagtaagccaaagatgaacattcttaaattaggattggctttactctttaacattccagctgtattatacagttcaaagacgagtagatattgttaaaaccaccttaccagaagggagtttgggaatgtttgtaagggtggtcagaagtgtctaagaaggattgcaagctgacccccatgaagggatcagcaaaagcttctcctgtgtttttattttcccttctcccttatccagagcctagtcctccaatagatgaagttatcaacactccaagagtggtggatcggttcgtggagtttctgaagaggaatgagaattgtacattacaggtgaggcctgaagggaaggggtttgttttgtcttttaatttttgggggatacatagtaggtatatatatttatgggatacatgagatgttttgacacaggcatgcaatttgaaataagcaaatcatggagaatggggtatccatttcctcaagcatttatcctttaagttacaaacaatccaattatacactttaagttattttaaattgtgtagttattattgactatagtcaccctattgtgttaccaaatagtaggtcttattaattctttctgggtttttttgtacccattacttatccccatcccacccccagtcccccactactgggaaggggttattagatgaaagccctacttccaagaaattgcagtgggatacttctattgacatatctctcaggaagttcaaaagtaatgttaggaaacattcaggagaaaccatcagttccctcacagccagaatctcttccttaaaacaatttcaaaggaaaggcaccagactatgatagactgatcattcagttataaatcagaggctatagtccactacctgtgtgacctgaggcaaattgtttagcctctctgggtctcttgtttcagagatgggtgatgggtcaatccattggaacttgccagaactcagctgaaagggactttgagagacccatttcattctaatcctcatttcagaaatgaagaaagtgaagctcaggaaataaaagagtgacctggcaaaggatgcatgggtgttgtggtagtgcaggactaaacctgggaccctggaagcccaatgtcttattctcatctatatcacatcactgcatcttcccactctctaaagacgggaggggaaaggcttgtattttatgtgtgtgtgttttaaattcgtgggcaagaggcttgcttgtgttttgtgaggttttgttttggttttttaaattcatgggcaggaggcttactgttctgagccagctgataggcatggctgctcagtctgaaatgacctttcaatcattgcttaatctcactttcagtttgaagctgcctgggctctaacgaatattgcctctggaacctctcagcagaccaaaattgtcattgaagcaggggctgtccccatttttatagagctgcttaattcagactttgaggatgttcaggaacaggtaatgcttagatttggtgtgattctttatagtacctgtggtataataaaaaatatatttggtctttgtcctggttcttggcacagtgttaaaactcttggaatttcctgagtgataggggtgtcaagtacagatggcccctgggacttgcaactggtatctcaagttggggcagtcttgtgggactaacctgcggactctgcattaactctaggtgttagagtcagaattgaattaaatcgttggacacatggttggtatcagagaatgggtggttgatgtggaaaaaactctatacatttgttgttggaagtgccattggaaaaaagacaccacagtacccatatctgagtacccacaaatcatggagataaagatacaacttccatttctcccattgaattcttactagttggatagaattggagagtggtagtgggctcttttatagacttggtccaaggcagctacaagagtgcaactttcgccaggcgcggtggctcacgcctataatcccagcactttgggaggccgaggtgggcagatcacgaggtcaggagttcaagaccagcctgaccaacatggtgaaactccatctctactaaaaatactaaaaagttagctgggcatggtggagcttacctgtaatcccagctattcaggaggcttgagacaggagaatcacttgaacccgggaggtggaggttacagtgagcagagattgtgccactgcactccagcctgggtgacagagcgagactccgtctcaaaaaaaaaaaaaaaaaaaaatgcaactttctgattactttctccttttctgggcgatattgttttggcttctgtggctatagtacagatggcagcctgtctttccctgctgaaccaggaactcccagggataggtcattgtagaacaagtgctcagtaagaatttcaatagggaggttacctgagcttgtgtagtatatttggggccttgacatcattctcatcctggtgggtactcactttgcagttgtggctataaagtactcacaggagtaccaagctttgtgggtgacagtttcattatccccttttcaggcagtctgggcactgggaaacatagctggagatagctctgtttgccgagattacgtcttgaactgttccatccttaatcctttgttaacgtgagtaattataatcatctgtacctgggcgtctactgggtggccacgtggcaggtcatttgggggcagcatacttgattccttaagatgataggtaagtgcaaaaactataaaaatgcattctgattgccaaagtaaaagataggtatctttggagattgagaaggttgtggccgggcatggtggcttatgcctgtaatcccagcactttggtaggccagagcaggtggatcccttgagcctagagttcaaaaccagcctgggcaacatggtgaaaccccaactctacaaaaaatacaaaagttagccaggtgtggtggcaggcacctgtagactcagctacttgggaggctgaggcagggaggatcacctgagcccagggagatcaaggctacagtgagctgtgattgatcacaccactgcacttcagcctgggcaaaagagtgaaaaaaaaaaaagattgtgccacccatctgccaaaaaggatcttgttcctcacttcatggcactgcagaacctcatgttagtcatatcctcatatcctcctcattgttgagccaggggagagaggcaggactagcccacctggaaaaatccaaccttctctacaaaatgcattgatttgttatggggttttgcatacatacatcggacagctctgtcgtaaattatagatcaaagaccccgtgaagcgtcattgtatccttctcccatccttccctccgtacccttagagtaaactatgcctaaaccaaaacagatgaatgaactgttcttcagagaccacagtctcatagcctaccactgtcactttcttggacccttcacagaaaattattccatactgtgtggctaaagctctcacagtagacctatagcttttatttcttagacttttagcttttatttccagagaacaccattccttgtcctggacttgtggccagggttatgggcatgatatatcccactttagaagctttacaggcttactccagatctagccctctgtttcgtccctattatctatggtattaactagccacagctggtcctgaaatgaatactctgtatagagcctggcctcctaacctataccagctctattaacttaggtctgtgagtaggaagaaacaggctgctagagtctgagaggtctcattggatttgtctctgggttcattggcaacagtcctatgccaaggcctcagtgctcaggatctggctttgctgtttccttcagactccttaccaagtccacacgactgacgatgacacggaatgcagtctgggccctgtcaaatctctgccgagggaaaaacccacccccagagtttgcaaaggtgagagagctacttactagaccctgagtgacatcaggttccttcatatggagtttttaagtctttgggatactccttggagtctcaaatcatgggaaactgaaagaagcaattgttagtgaagtagatgatcttgtgtacctggatagtaaagtgaaaaggtagacccaaatgtttaatgtagtagcgatccctagggtctggaattacttgtgtgtgtgtattgtgggggcggtggttgcaatgttagggttcgtgatagagctgatatagtcttgttcccctgtgagtctttctcactctgcttcccacaggtctctccttgtttgcctgtactgtctcgcctactcttcagcagcgactcggacttgctggcagatgcttgctgggccctttcttatctgtctgatggccccaatgagaagatccaggcagtcatagactccggagtctgccggagattggtagagctgctgatgtgagtggtcttagaaggggtacaggttctggctgggcacggtggcttatgcttataatcccagcactttgggatgccaaggtgggcggatcacaaggtcaggagttcgagaccagcctgaccaacatggtgaaaccccgtctctactaaaaatacaaaaattagctgggcgcagtggcaggcgcctgtaatcccagctacttgggaggctgaggcaggagaatcatttgaacctgggaggcagaggttgcagtgagccgagatcgtgccattgcactccagcctgggtgacagagcaagactccgtctcaaaggaaaaaaaagaatcccagcactttgggaggctgaggcgggtggatcacaaggtcaggagatcaagaccatcctggctaacacggtgaaaccccgtctctactaaaaatacaaaaaattagccgggcgtggtggcgggcacctgtagtcccagctactcgggaggctgaggcaggagaatggcgtgaacccgggaggcagagcttgcagtgagccgagatcgcgccactgcactctagcctgggcgacagagcgagactctgtctcaaaaaaaaaagaaaaaagaaaaaaaaagggtacaggttccttaagcttctccaggctcagactaaagagagagaatcagcagggccgaaaatggtgtgctggccttctgatcagatctccctcctctgtaggcacaatgattacaaagtggcttctcctgccctgagagccgtgggtaacatcgtcactggggatgacatccagacccaggtaagaaagaggagggtgcaggatcttagaccagctatggaagagcttgtggagagctgccagtggacaaaagcctttcctgcaaagggctgtggtcctgatgggaggcactatggtctaaggaagtaagtgtgggcttgagtgaaaagttccagctctgttattctctaaacagtcatgggaaacttggttccttcttttcttacataaattgggaacaaatcatcgtctaatgggtgaaggaaaactaagtggaataactggacttaccacctgggacattgtgagttagttaagtttgagtcatggtccctttgagatactgaaagctatggaactccacccctgcttcctagatctttaaggtctcatggatatcatggaccttggaataatcttttgtaaataacccttctggtgaaggcatagtaaacaaagttcccctgctcaaaggctagagatttgggtattctttgggttttgagtagcgagcataattctgtgggattctggacaggtttcttaacaggtgagtagtgtcactcaaacactcaaacccacatgctcattttctgggttactttgtatatgtatatgcatgtactttaaaatacaacataaaatttaccattttaaccattggcataaagtacattcacattgtttttccgttattgccactagccagctacagaaattttttatcatctcaaactgaaaccgtacacattaaacagtaactccccattctcccttcccctagtgcctagtaaccaccattctattttctgtatctgtgagtttgagtgctctaagtacctcatgtaagtggaatcatacagtgtttattctttctcgtctggtttatttcacttagcctagtatctttaaaattcgttcatgttgtagcatgcatcagaactcctttgaaaggctgaatgatattccactgtatgtatataccatattttatttatccatcaatagacatttgggttgtttccaccttttggctattgtgaataatgctgctatgaacattggtgtacaaatatttgttcaagtccccggtatatacccagagtggaattgctggatcatgttctaattttatgcctaatttttttgaggggacaccatactgttctgcacagctgctatgccatcttacattcccaccaacaatgcagcatgttccagtttccccacagccttgccaacagttgttattttccgttttttgttttttgttttttttttgataatacccaccctaatgggtgtgaagtgatatttcattgtggttttgatttgcatttttctaatgattggtaatgttgagcatcttttcatatgcttattggccatctgtgtattttttttttttttttggacacatgtctattcaagtcttttgctcatgttttaattgggttgttgagttttctggttgttcaattttaggagttcttcatatgttctggatattaatctcttatcagacacatgttttgcaaatattttctcttgttctgtggttttatcttttaactttggtgtctttaaaaaaaaaacttttaacttatttaattttttaaaattgagacagagtctgtctttgtcacccaggctagagtgcaatgatgccatctcggctcactgcaacctctgcctcctgagctcaaagcagtccttccacctcagcctcccaagtagctgggactacaggcatgcaccatcatgcctagctaattttttgaatttgtttttttttggagagacagggttttaccatgttgcccaggctactcttgaactactgggcttaagcaatcctcccaccttggcttctcaaagtgctgggattacaggcatgaagccacctcacccagaccaactttcttttcttttttaattttttttagagggtctcactatgttgccccagctggccttgaactcctgtgctgaggtgatcctactgcctcagcctcctgagtagctgggactgcaggtgcataccactgtgcccagcttactccaatgtcttgatgcacaacagtttttcattttgattaagtccagtttacctgggccaggtgcagtggctcatgcctgtaattccagcactttgggaggctgaggcaggaggatcacttgagcccagaagtttgagaccagccctgcaacatgggaagaccctgtctctacaaaaaaaaaaaatgttttttaattagcagagtgcggtggcaccctgctactcaggagtccccagctactcaggaggctgaagtagaaggattgcttgagactgggaggtcaaggctgcagtaagccatgatcatgccactgcactccagcctaggcaacaaagtgagaccctatttaaagaaaaaaaatgaagccgggcacagtggctcacacctgtaatcccaacactttgggaggccgaggcaggcagatcacctgaggtcaggagcatgagaccagcctggccaacatgatgaaaccccatctctactaaaaatagaaaaattttccgggcgtggtggtaggcgtctgtaatccaagcgtcttgggaggctgaggctggagaatcacttgaacctgggaggcggaggttgcagtgagccgagattgtgccattgcactccagcctgggcgtcagagcgagactctgtctcaaaaaaaaaaacaaaaacaacaacaacaacaacaacaacaaaaaaacataaaaaaaattaaaaacagtttaatttttcttttgtttcctgtgcttttggtgttctaggtcattcttaactgttcagccctaccttgccttctccacttgttgagcagtcccaaggagtcaatccggaaggaagcttgctggactatttcaaatattactgctggcaacagggctcaaatacaggtaaaacaggcagggaagtcaaggggcatgggaagtcataggaacttgggaggttgttggaatatttgctttcagaagaaagaatttgtttccctttaaaaataggagtcaattggccaggcacggtggctcacgcctgtagtcccagcactttgggaggccgaggtgggcagatcatgaggtcaggagtttgagaccatcctggccaacatggtgaaaccccatctgtactaaaaatacaaaaattagatgggtgtggtggcggacgcctgtaatctcagctattcgggaggctgaggcaggagaattgcttgaacccgagaggcaaaggttgcagtgagctgagatcacgccactgcactccagcctgggcaacagagcgagactccgtctcaaaaaaaaaaaaaaaaaaagaggggctgggcatggtggctcatgcttgtaatcccagcactttgggaggctgaggtgggcggatcacaaggtcaggagatcaagaccatcctggctaacgtggtgaaaccatgtctcttctaaaaatacaaaaaaaaagaaaaattagccgggcgtggtggcaggcgcctgtagtcacagctagtcgggaggctgaggcaggagaatggcgtgaacctggtaggtggagcttgcagtgagccgagatcgcgccactgcactccagcctgggtgacagagcaagactgtctcagaaaataaataaataaataaataaattggagtcagtgtgtactattggtcaaagaagctgtgtaaccaaaactgggttcttctgtagtagcctgtcacctatataggaagaacaaaagaaaactcccagaatggggaagatgtctaagtctcagctgatttggggactagatttatttatcatgctgaaatgactttctccttccatctgcctcctctcaattctctctcaggctgttatagatgcaaatatcttccctgtgttgatcgaaatccttcagaaagcagagtttcgtacaaggaaagaggcagcctgggccatcaccaatgccacatcaggaggaacccctgagcagatcaggtattacattcctttcccgttgtcttgaatgataatggatgctctccctgtttgctcatggtttacaggtgacctataaactgctcttgctcagacaggtctgccccctagtctcactgtaatagaattttactggtaaactgctacagtgtcactagaatctggaatagattccatgtaagccatgtgggaatctattccagattccagtgacactataacagtttaccagttttcccttctggagaagagaaacatgacatggacatccatcctttctctaccttttcttatccaacagagaactgaaatctatgtagttctcaattcaaatgaaggggaaccgtactatgggttactcaaaacagtttcttcagcctgaccaacataagaagactctgtctctacgaaagacaaaaattagccgggcgtggtggcatgtgcctatagtcccagctgagatgggaggatggcttgagcctggaaggtcaaggctgcagtgagctgtgattgtaccactgcactccagcctgagtgacagagccagagtctgtcacaaaaaaaaaaaaaaacaaaaaaaaacaagcaagctggtgtagtggctcatgtctgttatcccagcaccttgggaagctgaagcaggaggatcctttaaacccaggagttcaagactagcctgggcaacatagggactttgtctcatgtgtacaaaaatgtaaaaattagcaggttgtagtggcgtgtgcccgtggccacagctactcagtaggctgaagcaggaggatcacctgagcccaggaggtcacagttgtaataagctgtgattgtgccactacactccagcatttgctacagagcaaggtcctgtctcaaacaaaaaagcagcttctttgagaaattaatttgggatatgagacttgaaagaagcgaatagaaagctattttgtgtatgtgtgctctttttgagaccgcaacctctgcctcccaggttcaagcgattcttctgctttagcctcctgagtagctggggttacaggcacgtgccaccacgcccggctaattttttgtacttttagtagaaacggggtttcaccatgttagcaggctggtcttgaactcctgatgtcagatgatcctcccaccttggcctcccagagtgctgggattataggcatgagccacctggcctgtgtactcttttattttagtttacattatctgaacattagtggaaagtggtgggaatagttaagtgttttgcccttcacttgttgcctattaaggggagcacagttagtatatataaagtcttaggagaaaagagatagctgttgagttaagctttgaaggataaatatgggattgtaaaaggcctcttagacagggaaaagcataaataaaggtacaggaatcagaaacctggagacctttacaagtgtgactagaatgtattgtccttggaagggaataatgggaggcagagctagaaaggaactaggagccagattgcagagcatccaggctgggctgggcttgtggtattatggtattgttgtgccatagaatttggagttcagcgaattagggagcctgtgaaaaattttatgcagggaagtaatgtgttcagaggggtaatattgcagccaaggagacattagaggcaaggaggaggagtgtttggtagcatccacatgtgaaatgaactagaccaaccacatgtgaaatgaactagaacaatatcaacaggaaggtagagagatagagaaaggataagcggttatcaaggctcagtaagagcagtggctcacacctgtaatcccagcactttggggaggtcaaggtgggaggatcgcttgagaccaggaatttgagaccagcctggacaacataatgagactttgtctctacaaaaaataaaaaataaattagctgagaatggtggcacacacctgtagtcccagctgtttgggaggctgaggcaggaggatcacttgagcccaggaggctgcagtgagctgggatcgcaccagtgcaccccagcctgggtgacagagcaagaccctgtctcaaaaaaaaaaaaaggacttggttggggaacactctcattctctggcatggaatggggtgttgcacaattcttttttcttttcttttctttttttttttttgagacggagtctcactctgtcgcccaggctggagtgcagtggcgtaatctcggctcactgcaagctctgcctcctaggttcacaccattctcctgcctcagcctcccgagtagctgggactacaggtgcccgccaccacacctggccaattttttttttttttttgtatttttttttagtagagacggggtttcaccatgttagccaggatggtcgcgatctcttgacattgtgatccgcccacctcagcctcccaaagtgctgggatcacaggtgtgaaccaccgcgctcggcctcacaattcttaaaaataaaaaaataaattagtaagagtgggttgctgagagttcagagcacctgcccagcacttcatgtgtcctgtactagtttagcacttgcctggtctctggcccctaggtacctggtctcactgggctgcatcaaacccctatgtgacttgctgactgtaatggattcgaagattgtgcaagtggccctcaatggactggagaacatcctgcggcttggagagcaagagggcaagcgcagtggctcaggggtcaatccttattgtggcctcatagaggaagcctatggtatgtgccctctcctcaatctaggtcagaacctgagactgtaggcctccaacgtggtatacatatgttggtggtggcggagtgtgggttgggaagcatccatagcttccatgagactgatgtctgtgtcttcagaacagttaagagctcctgccctagccaagtttcaccatccacagggtttcacacgttaccatgagtataatcaggatgtgctgagtagctggggtacagctaggatttggatttggctcatcttttgagttgagagttgtctctcaccagtttcttctccttctaaggagtgataggtcagttctctttctgataggctgtacctataagagtgctggattaactcatcactcatccctgagaggctgatgatgtgcccaggtcatgcttctagtttaaagcagaatcaggactagaacctctgtaactgacattttggtctctttcctttgggattctgtagttttgagaagaaatcttaactctcccctttcaggtccaagagtgatctgatcatatgacttgtgtttgtaagcactaacatacctcagggaaggaaaaataggtaaatgtttcacctgcccatagaaaagcactcacacttccctctccttccttcttactactgtaggcttggataaaattgagtttctccagagccacgagaaccaggagatctaccagaaggccttcgacctcattgagcactactttggtgtagaagacgatgatagcagcctggctccccaagtcgatgaaacgcaacagcagttcatcttccagcagcctgaggcccccatggagggcttccagctataatatctgcctccagggaggggaggggatgggaagcaccaccagccagcggaagagcagccctctggtgggcgggaaaccagtgtccccaccatcagccaccacacacctctgctgccctggagactgtgctcttgacctgctccgcccccttccctggagggagcaccctctggacagacagaaccatctgaggctcacctttgggttttgtgacaagaaggggacgtgttgggtttttcttccttacactatattttggctgcacacatgtctttaacccaggagcccaggggtagacaaaggaggactaaggtaatcaatttgcacctttttttatttttattttttttctttttttcttcagtggtgacttccttccctttatcttttttcattcttcccggtcctctgccctgatctgtgtaactcttatcttgggtacttgagcagacggtatattccagaggtgggaggtgggaggggaagggagaaatccaaaacaaagtgttcttgctctgacagaatattaatcttgtacgcttggattgagttatttaatttttttttcttttgcacatttttcttgtattaagattgctcttcccaagagccacaagttcctggttttagtaaacccagctgcctgcattgcctgggactagaggctggggaggctaccatgaaacaaaggtccctccctccctctgactctttgcccagacctctttagtttgggggatcctcctcactctcctgaagtgtctcaagtataccagtgggagtgcaggggaggagcacaggccttcagatggggcttcccacgtgtagctactgatcccatatttcctactcaccttccaaatggtgcgacccaacttcatttgtttacttgaaaattccccctcgaggttgagagaacctctgaggtggctgtattttctcctaagcttgagatagggggctgtggtccttcctttctcctgaggagaaagtccttgctctggtgacctgtaagttgcagaggagggtggagtgagagtgtcatgtattgggatagtcagggatccctgcctttggcctttcttcttcttcttcttcctcttccatagttggatcatgtatattttacttctaaaggagagaatgtcaaaaagttctgtatttttttatattctatatattaggtaggtcaatcttaattggtctcaagaggaagaactgtctgtcatttcggtaagtaggatactgtgaggaagaccaaaaagagatatggatgcttcctcgctcaggaggcctgagcttggtccttttcctctctgcttggattctggaccaccacctgggaccaaccttcagctctggaaccttcataaagcaggtcagcgtggcctgattgtcccaggacctgaagggagcaaggatggcctcagggcctggtgaagtctgctactctgtccttactgctgaacatcctgcttgtatcaggaaactcagaagcagtttgccttgtcaaattcaatctcaatggccattgtccacataactgatcacccatggctgcctctcctattatctattatcactgaaacttagtagcctgctttttttttttttttttttagagctattgcgtatcttccctgtttgggatccttgtacctggtttgggttttcccttccttgtgacaattataatccagatgcctcttctttctgtttgaattacggtagtgcattgccttagtggcttgcctgtgcctctgggtggattacatatgatagtaaagcccacctgtttggatgggagtagaggaagttggtgtagaccagctgtggagctgaaggcacagtctgccccacccccacctccccactgtggttagtcagaggcatcctgctccaagctctgcttttccttcctctgaaacaatgccattcttgcttctattgctacacatctccttctggctcaggtgaaatccatgcccttctgcttatagacctaaagttcaggtacttattattggccattgatcttgaatttgccctctcctagtgctgcagtcccacttcaaagccattttctgaggaggatggtttaggtctggcaattgtccttgaaaaatcccacccatgttgtaccaccttggtgagtcatatgccactcatcagcttgggaatgatggctgccaactcccaatctcccaggaaggcagggggcagaatctttttttcacttggcctgctacctccattaaaaaaccattctcttacagtttaaaaaaaaaaaaaaaaaaaaagccttcccctacccaacctccgcccattgttctcttccaaagggcaatttagtaggatctactttgtacatctcaagtaagagttaagtccctgatacagggaccagtttcttagtgtaagacatacacatcctgcttgtccagctgttcctccaaaatctactttggcttcagctccgggtcctgtaccagatggaaaatgtttttggtgatctggctgctgcttaaagccagttttccctaagaactccaaaggctaaagtctactaggggcagagtgtgaggatagatttctaatcagagaaaagtggcctccaggagctttcatttatgtcttctccagaccaggttttcctgttatcttcctttaatcccctttcaaccaacaggtgaagttcttccagcccacagaggtagtaatatcatcttttctatctcctcctctcctttggccatgtaatgaagcaaaatattatttatttagcccaggcttgagagccactgtttgtggacagtcttcatctagattccataccctggcctaggcgaggtaaggctctctggttattgccaggatggagcccctctaccccagtctgctgtagggaataccctaattagttgaggcatgcttttggaatcctggcatgttggcatatggctggtctatcctttttaagatctctggttgggggtatctggatatggattaggagggacaaggagcctttttcttggctaatgttttccaatacttttttgaatggtgccagcccctccaggcatcccacccccaaatcatcatctttagtactaacagggtgtctggtcttagaagcctcccttcagatcccagctgaccctggtgactgcctggccttgatgttggctgcagccttctgatagaaccacatggattccacccacagctggccaggcttgttacatgggtcagggaatacaaatggcccccccccagggagcaggtgttggcctcagttttcagggacccttggtgttgctccttacctagagcccattaatctaccccatcaactctctgccatgaaagccatcttccaggagccctgttttttggagctgaactgcacagattatagctgctattgtacttaaataagggagaggaaaagaaggttctcaggcacagactttctatttttctcaagccaaaccagtttaaaatgtctagcagaatgaactgtatttccatttcttcatgtctacctgccttccccccacaccctaaagttgtacttgtttctagcaaactagaaggaaaagataggaaagcctggcactactaacctcacctctcatacacctctttgaaggccccagctcttttgttcaggcctctcttctcccctagactcactcagcttggtatccatcatcttgagcattcttcagtagattcatctagggttcagattccagactctcagctgaagacagggagccaatttcccccaggtccctgcaggtaatccagggaccccatagggagaacaggctgactggggcattaggaatgtttgtacctctctgcttccctggcagcctggggaagggtgcagggctcagtgcgctaaaccatggtaaacatcttcaatagaactaccctagaatttagtgagtgtgagactgagatattgctcagaataaatttattccatagccatttaggattgcatgttctggaccaaccttgtccagtatgttttctgtttgagctttttcattcttttgttaagccaacaagttgagaatttggccctgctgggatccatgtagtgggcactagctgctctttggccaaggccttcataaatgattcagtctctcattatctgtcctctagccccacaccctgatttagaccgtggcaaaggaagaacttgaggtcaagaccaaccaaatctgtgaattaaagctgttatttttttctctgcaagggcgctttgcttcaggtctgggctatgtgcagaacctaagcaggctgtgagagttagaagaggcagtattacatgttaggcccagaacaccatgggaaaaggtttatgtagtgtatcttagtggcctgcctagctgcctctgggccaggctgacttctgatgtccacattagctcgtacctgaaccctgttgctgaatgccagccctgttctcctgtaactattatatacgccatggcctggggggcattgaaggaagtaagctctcagagatcctaacactggctgggaacctctgactcagagcatgtctttaaagagtccacatctggccaggcgcggtggcacatgcctgtaatcccagcactttgggaggccgaggcgggtggatcacgaggtcaggagtttgagaccagcctggcaacatagtgaaaccccatctctaataaaaatacaaaaaattagctgggcgtggtggcaggcgcctgtaatcccagctacttgggaggctgagacaggagaatcacttgaacccaggaggcggaggttgcagtgagccaagatcatgccactgcactccagcttgggtgacagtgcgagactccatctcaaaaaaaaaaaaaaaaaaaaaatccacatcttcagctgggcgcggtggctcatgcctgtaatcctagcactttgggaggctgaggcgggcagatcacttgaggttaggggttcaaaaccagcctgaccaacatagtaaaaccccgtccctacaaaaataaaaaaataaaaaaaataagccaggtgtggtggtgggcacctgtgatctcagctacgtgggaggctgaggcaggagaatctcttgaacctaggaggcagaggttgcagtgagccaagattgtgccagcctgggcgacagggtgaggctcttgtctcaaaaaaaaaagtccacatcttcatgaaccctcagactctggagttgggtgtcggcttttttagccagcttttgtgggaattgcctttgacctattaaagaaggaaagtgggtaatggagtcccagccactcaagagactggatatcccccgagaatggcttgggttaccagctatggacccttggaagatgaatctaatccttctcactggtttttctttgcaaattcatttgcttttatttttctaataacaataaactctattttccatgttctcagggcccctgggtagacagacacagcttgatttcagagcagacataggcgaagaaaacatggcattgagtgtgctgagtccagacaaatgttatttatatacacatccaaatttgaagagaaaatgtatttctttaggtttcaaacactgtaatagatataaagcaaaaataaaaacctgttgcaaagttctaaattgtcttctttggcttggagtgaccctagactggatttgggggaagagaatgaggaggtgtttaaatttgtagcttaacagtggaaataagagttgtaccaacctgcacctgctctaaagtttttttcatcgactttattgaaatataattgacatacaataaactgtacatatttaaagtatatacacgttgataaattgaaacacatatgcacccataaaacaaccacaagatagtgaatatatctatgaccttcataagccgtaagcttcccgcttgagaatccctcctttctgccccacctccagcaaccactgatctgtggctgtcactgtagtttagtttgcattttctagagtttctctaaatgattttgacttagtttcatcagcaccactctacagccctttgaaccttttttttttttttgaaacggagttttttattcttggcatccaggctggagtacaatggcgtgatctcggttcactgcaacctctgcctcctgggttcaagcgattctcctgcctcagcctcccaaatagctgggattacaggtgcccgccaccacgcccagctaatttttgtatttttagtagagacggggtttcacgttggccaggctggtcttgaactcttgacctcaggtgatccgcctgcctccgcctcccaaagtgctgggattacaggcatgagccatcgtgcccagcctgaacctcttaagatcaaatagttcacagactcctcccttcagtttagataattcctaaagcagagattacagacaagcagccagaaagttgattgaacccacaggaaggttttgcttggcagagcgtgtttaagtttgaattagttgccaacattttttttttaaatcaaatgtctgtcttgaaaaagactgtcctgaagtctccatttttaaaaagaggccaagcactgtggctcatgcctgtaatcccaaccctttgggaggccaaggtaggaggatcacttgaggccaggagttcaagaccagcctgggcagcaaagtgagatctgtctctacaaaaaaatttaaaagttagctggctgtggtggcacatacctgtaatcctagctacttgggaggctggggcaaggggatcacttgagtccaggtggtcgagtctgcagtgagctattatgatcactgcactccagccccagcagctgagtaaaacctgtctaaaaaacaaaaatacaatctggccctacccggcctgagtttctgcttgctaacaatgtgcaagagctgctgtattttactgcaatcaccacctctccctcactctggcaggtgctaatattgttgctatatattgtttatagcaaaggagaaagtaacttgttaacctatgtttctgtcaattattcttgcctgttctcattacccaactggcccctctaggctattgttgacccttctactacatcctctatccctcaccccatgcatacatttttatgttctttatctcacctagaacacccttgttatatggaaatctatcaaggcctgatttatatggtgccttctcaagagatttccagaatgcttttctagaaataatcagggccttggtttcaggacatctagattccaacctttctgagcctcagttccatcattatactaaaaattgaatatctcttatccaacatgcttgggaccagaagtgtttccaatttgggattttctcaaattttaccggttgagcttccccaatctgaaaatctgaaatccaacatgcacggctctgaagtctttcactgagcctttgggggaaatatttaacatcctaacagccctaaaccaacgctcaattagcacaacagtttacaatcttctctacccacagcctgatgcgaggctctgggactagactatttagccaacagttcttgcaaaattaactgacttataagtaaatagtaatttcaacacctcactgctaatgctgtaacaactctgcagacctagggagcaagtacggtttgcagagcactgggaaggctctgaagtgacctttgaactgggcctcaaaaaattttgggtttggcaaaagtcaaatctcttaggcttcaaattccaggcacaaggattgttgggtttgatttcattatccagaagcaatggggatacagaattgtgatctcatgtgtagggaactgtgggggttttttctactttaaccccagtgagactttgtagagtgtggggtagagaaaaggctcatgaatatgcctgaagcctaactcagcacctttctgaggaactgactgccaaaatggtaatggagaggggaaaatatgacctactttcacaagttaccttgactgcctcagggaaacctgctgtggtagtgtttcttctgggtgaaagaccaggtaattacctgggtgctggtctcagacttaccagttttgaatccctgttttaaccactcactatcgatatgaccttggataagttacctaacctttctcttactgtccttttccgtaaaatggggataacagatagtagttatttctatgagtggttatgagaaccaagctattagatagcgggaaagcacacagtaagcgttcaaggaactgctattgttattaaaagcctcctttggaagaaggacattgaggcccagagagagaacagaacgtccagccacacagcaaatccgtgatgaagttgggactggagtatgggtctcctgagtctcagcccaggactctatccctcttcccgagtcctcggagttcccggatggagtcacatttgttcacggccagggaggaaggtttgatggaggcctgcaggaaacaacagccaggcgcaaggctttgggagttgaagcatagcttctgcgagatagaaacaaggttgacatgggcactcgtgcagaatgacgggctccttttggactcccaggactacagtcccttatgcaccttgggatctgcggctagcccctgcgtaaagagggacgcgtagtcttttccctgccccgccctgccggggcgcccgcctccgaggccgccctcgcttcgtccttcccagcaagctccgcgccggcgccggctattgattggctgaggcgggagcaggcggctggccggcagcagttactcggggtttccggtgcgaggccagaggtggggaagccatcggacgtcggcggtgaggtacgtgcagcggcggccggtgggcgagactatttgagagtgtgcgggccgggatgttctcggcctgtggggaaatcacgccaactccccgcgtgggccgggggctgtctggggatatgcgcatgcgcgggcgtgcctcgcggcttgagggcgcgcggggcgtgggtggctgcgcgcgcggggggcgcacgtggggcctgaggggcgggggcggtgccgggagtcccgccacgtcagtctccggccctgagccaatcccgcgcccggcctgccgcgagggggccggttgtgccgggaagtggctccagggagaagaggcctcttccctcacccgctgtgggagctgcgccccgaaagcctgccccggcacgtcgggctctcctgacccgccaagaccagagagccgttggcgccctccgcccgggcctgccggtccgtttattttaagaagctttgtgcgcctgctgtggggatttctgatccaggctgcgaagaatttcgaagtctggaaaatagcaactgtgtttgtttctaaaggatcttctcctgacccagcatcgctcatcacaatgaagaaccaagacaaaaagaacggggctgccaaacaatccaatccaaaaagcagcccaggacaaccggaagcaggacccgagggagcccaggagcggcccagccaggcggctcctgcagtagaagcagaaggtcccggcagcagccaggctcctcggaagccggagggtgtgtgccagctctgcgttgccagcgggcagggggaggagctgtggggtcggcctcgcttctggacttacaggccgaggccaggttgtccgggaggaggagatgtagaatgagaggacagtgctgggggccgcggtcccccctgcgctctggcgagttggcggagctgccccctctaagcacaggaacagagttctggagagaagctccgacgggattaagtcaggtggcagccaaacgaggcacccagtcaggaaatccaggtcccgttagaaacacctcagccaccagcagctaactgcccttcctgtttgaggcatttctagaatgatctgaatggcaagaaatggttttgtgggggggaaggagatggactagaagttgctccgtgccatccctgtgtgctgatgctttacatacttttatgatctaacaaatatgttcgggtggtagtgagaaatagttgtgtcattttacaagtaaacagacttaaagaagttaggcaacgattactataatttcttgatttaaaagatgtttcgaatctaaattctgacaggaactagatttgctgaatgatactccattcttgcttctcagtttccataaaaaaaaaagttaggcaacatttaactcaaactgatgagtttggctgggcctgaaaaatcccaaccagtggtataatcgtcttctttctcactctacccctcatcctctcctgctgtaggggctcaagccagaacggctcagtctggggcccttcgtgatgtctctgaggagctgagccgccaactggaagacatactgagcacatactgtgtggacaataaccaggggggccccggcgaggatggggcacagggtgagccggctgaacccgaagatgcagagaagtcccggacctatgtggcaaggaatggggagcctgaaccaactccagtagtcaatggagagaaggaaccctccaagggggatccaaacacagaagagatccggcagagtgacgaggtcggagaccgagaccatcgaaggccacaggagaagaaaaaagccaagggtttgggtgagcagagggcggctctttgtgaagctggtgaggagagggagtttggacttgacgttctctgggccagtctgttctgccaggattcaaaggaaaacggtacttctcagagcagcaagtcactctagtctaatcaaagccagggatgtgggggccacggcatagagagatgcaggagttaccagcacaaagccttctgggttttggagcaactggagcttggcatgggacctgttctctctttgagaaaatggagacgggaggctagggtaggctcctgtgccagccagtactacctgctgtgtgaccttgggtgtgtcccttctcctctctgggtcttagtttatatttctctttacagtaagaaaattagactaggccagagttgaaaacccaaatatctgcataagctgggctggccatggggccacctgaagatggaggctttactgcttcctgattagttgctctcagctagccaactgagagcaggcaaaactacaggctgggtgcagtcaggctttttttttttttttttttttttaaataaagaaaagccagaaatctagagttatgtgagaactctagattttttcatagttagcagctaaaatggtaagagccaaacaaaacccatccgtgggttggatttggcacacatgcctgcgaattgcagtctccatgctgatctcttgggcccttctggggaggcagagggaaggctccctgactcagtcacaggcaatggggaataggcagtgacagtcattttacagcagggtatgtatgtttaagagtctaggccgggtgtggtggctcacgcctgtaattgcagcactttgggaggccgaggcgggtggatcacctgagggtcaggagttcgagaacagcctggccaacatgatgaaatcccgtctctactaaaaatacaaaaattagctggacatgctggcacacgcctgtaatcccagctacttgggaggctgaggcaggagaatggcttgaacccgggaggcagaggttgcagtgaactgagattgtgccactacatccagcctgggtgacaagagtgaaactctgtctcaaaaaaaaaaaaaaagaatctagaatctaagtcgagtgtcattatatccatgttttattcctattcccttttccccttatgtatcctcttactttaaagaggaactttaaaaaatcttagggacgactaggcagagtggctcacacctgtaactccagcactttgggaggccaaggcaggcagattatgaggtcaggagttcgagaccagcctggccaacatggtgaaaccccagttctactaaagatacaaaaaatcagccgggcgtggtggcacgtgcctataatcccagatactcgggaggctgaggcaggagaatcacttgaacccgtgaggcagagttttcagtgagctgagatcatgccattgcactccagcctgggtgacagggtgagactccatctcaaaaaaagaaaaaggaaaaaatcttaacgtcacatacatggaaagtatcatcttcttcaccccccacccccaactgagatggagtcttgctctgtcacccaagctggagtgcactggcgcgatctcagctccctgcaagctccgcctcccgggttcacaccattctcctgcctcagcctcccgagtagctgggactacaggcgcctgccaccatgcccggctaatttttgtatttttttagtagtgacagggtttcactgtgttagccaggatagtctcgatctcctgacctcatgatccgcccacctgggcctcccaaagtgctgggattacaggcgtgggccaccgtaccctgccttttttttttttttttttttttgagatggagcctcgctctgtccctaggttggagtgcagtggcgcgatctcggctcactgcaagctccacctcctgggttcacgccattctcctgcctcagcctcccgagtagctgggactacaggctcctgctaccatgcccggctaatttttttgtattttttttagtagagacggggtttcactgtgttagccaggatggttttgatctcctgacctcgtgatccgcccgcctcagcctcccaaagtgctgggattacaggcgtaagccactgtaccctgccttttttttttaattaattaatttttttagacagagtctcgctctgtcaccaagctggagtgcagtggcgcgatctgggctcactgcaacctccgcctcctgggttcaagcgattctcctacctcagcctccggagtaactgggactacaggcgcgtgccaccacaccaagctaatttttttgtgtatgtctttagtagagatggggtttcaccatgttaggatggtctcgatctcttgacctcgtgatccgcctgcctcggcctcccaaagtgctgggattacaggcatgagccaccttgcctggccgaaagtatcttcattttaaagttcactgtttggctactctgttgacaagagtttagtatttctcaaggaggctaagatacctattcctttttggatcctacctctatcaggagggtgggccttccttgcattgaaacagtatgaaacagtagccctgaattcataagtgggacacctttcttctattggtagagcaggcagtttttttctcctgccaatggtgcctactaaggagatttcactagggtacagtcgttcatttgataagcatttgttgagcatatcctctgtgatggtactatggacagtactggggctatagtgagggcaggattgagttggtccttatggcaaggaaggcagctaatcaacaagcaaaatataaagtatgatggggagggctgtcttcagcactcatgagtgtgagcccaggcctggaggggacacctggagaagagggtgcatgtctttgctcctgtgcttttcagggaaggagatcacgttgctgatgcagacattgaatactctgagtaccccagaggagaagctggctgctctgtgcaagaagtatgctgaactggtcagttcccccctccgcgggcaccttccctgcgttgggaaaatcagcatgccacctggtgtaaggttgggggtgcagagtcaagtaggtggcttaattcctgttcagcttttctctgaactatctgttaaatggggaatcacttccagccagcctcttcagggctgtgcagcaagaggagaaactgcatattccttgaaagaaatttctcaaagaatgattccaaggtggtagagcccttgttcctggcctgagtccaagacaccttgtgatcttgatgcttcttcctcaaatacagatgcatagagccattatcacagttaataaaactaacactagtcacttgatactttttccttttactccagagcagtcttcttgtcactgcctcctcatattccccatgacattgacttttaacagaaactagactagctgtcttgtaggatgcccccttctagctttgtcatctctgtggtatcattttacttctttacctcctggtacatgtaagtgaagtagaagttagctctaaagcttgatccaattcagcttcaactttttgacaagaattcttcataagtacttcatgttccatcacaataaatgcaaagcatgctcttcccactttgttgtaacattgttcagtgggttgggggtggggcagccagattcttccatcatcaggtcccttgtcagaatttgaactaacagatttatccattgatggtcacagcctgtgtatgtatgtatgtatgtatgtatgtatgtatttatttatttatttattttttgagacggggtcttgctctgtcgcccaggctggggtgcagtggcacgatctcggctcgctgcaagctccgccttctgggttcatgccattctcctgcctcagcctcccgagtagctgggtctacaggcgcccgccaccatgctaggctatttttttttttttttttttttttagtagagacggggtttcaccgtgttagccaggatggtctcgatctcttgacctcgtgatccgcccgcctcggcctcccaaagtgctgggattacaggcttgagccaccacgcctggcctatttatttatttattcagagtcagagtctcgctctgtcaccaggctggagtgcagtggcgcgatctcggctcattgcaacctccacctcccaggttcaagcgagtctcctgcctcagcctcccgagtagctgggattacaggtgcatgtcaccatgcctggctaaattttgtatgttttagtagagacagagtttcagtatgttggccaggatggtcttgatctcttggcctcgtgatccgcccgtctcagcctcccaaagtgctgggattacaggtgtgagccactgtgcctggcctctaagtatttattttaaaattaattcattccacacacatttattaatattttcctgtaaggaactttactcatctttaaaatggggaatgtcatacctgcctaatgacattcttgtaaggattaaataaaaggtataaggaagataagcacccttttggagtgatccagccaggggaaaattgctgatgcaagagaggaaatgagttgctagagtggtgttgtgagtagaggaggggagctgaggcctgcccaagaagggggcttggctgtggtaaccacatggctaggtctgtgtgactggaggagaggacggggcaggtggactggtagatgtgcagcttgtgcccctgattctctagtttcttctgtgttttgagatttgatgagaacgatgaaatagttgtctggaaggagaggagtgtgaatagcatatgcattgtattgggattgctggtcttcctgaaattggtggccatgaatttaaagtgagactcttcaagtagggttgttatagtactggtgtaaagcaggaaggtgctttactagggttgcagtactactggggaagggccaagagagttgagggtgtaagaaatccaagccaggtaatgtagttattttaaaggagagtggaaggatggttgagtcaatggattggaggtcctatagggtaagagactttctgaggatcacagatactgattggaatgagctaaaaagataggtgatggtagtcctggactgggatgctggaaattgagatagtgggtgtgctctctggtagtgacaaagtctagatctgcgctgtccaagataaattcgtctctagctaattgacatgtggccagtttgaatttgaacatgctataaatgtaagatacacatcagcttttgaagacttaagcaaaaacaaagaatataaaacatctttttgtgagagagtgtctcagtcacccaggctggagtgcagtggcgtgatgtcctgcttccaggttcaaacgattctcctgcctcacagcctcctgagtaactgagattacaggcgcatgccaccaaactggctacttttttgtattttttttttagtagaaacggtttcaccatgttggccaggctggtcttgaactcctgacctcaagtgatctgcctgcctcagcctcccaaagtgctgggattacaggcatgagccaccactcccggcctcacttttttacattgattccgtgttgaaattgtaatgttttggatattaggttaaatacatatattactaaaattaatttcacctgttttttacttttttagtgcggccagtagaatatttttaattacttatgtggtttgcattatatttctgttgtacaggcctggatagggtcatgggaggggaactgagctggggaaaggagtgggtttgtggaagaggtgatggactgtgaggccagggagttagaaggattatctgttgatactgaagtggccacaaatgagaaaagtaattgtgttggggagagcgctgatgaacgcagcgctaacgttttgaaggaatgcgagggagcgatgggggtctgtctgttaataggcacaaggtacggtagcaggtggtctcatcctcgggcatgagtgtccagcaagttggggaaatgcaacagcttgaagtggctctagtggcccagagtcagagctggaataggaattggcatctgctggctgtgtggcccctgcttgccctagtgagttaccatttctctgtccctacggtggagcctttggggttattgtgagttcatgggaggagcgtgtaagcaccggcacagcatcagcccatgagagtgctcctggcctgagagggtaagggtcagggcagctcaggagaccctagacctgcatagtgatccccccaccaggaaggccccacaagatgctcacctgccctccctatccctgtccccagctggaggagcaccggaattcacagaagcagatgaagctcctacagaaaaagcagagccagctggtgcaagagaaggaccacctgcgcggtgagcacagcaaggccgtcctggcccgcagcaagcttgagagcctatgccgtgagctgcagcggcacaaccgctccctcaaggtaggcctgggccccctggaacaggtgactctggtttccttgacttccacttaatgtttctttcatgggctttcctcttaaaaagtagtgcaggctagggccaggcgcagtggcacacataagtgattaaaaatcttctggccactaaaaaacagaaattaattttagtaatatacttaacccaatatccaaaacattacaatttcaacatgaaatcagtgtaaaaaagcaaggctgggtgtggtggctcacacctgtaatcccaacactttgggaggctgaggtggatggatcacttgaggccaggagtttgagaccaacctggtcaacgcagtgaaaccccattctactaaaaatacaaaaattagccgagtgtgctggcaaatgcctataatcccagctactcaggtggctcaggcatgagaattgcttgcacctgggaggctgaggttgcagtgagccgagattgcatcactgcattacagcctgggcaacagagtgagactcagtgtccaaaaaaaaaaaaaagtagtgcaggcttgtggcatagaaatacactttctcaataatgccttacgttaagagagtactgcttgtaatcatttgacatgtattagataaggtgaaggataaagtactaagagaatccataatgcactggcgttagtatttctcaatgaaatgacagtcccctggtaagcggaggcctggctctgacaagcagctcttgtcccagacgttggtcagtcaggaacctgggtccttcccatgttctgctgcttctatggtgaggtcagtctgtggttacaccaagtttaaatacagccttttaactttcttttttatatgtaaaatcttacatgtagtttttagaatgaaattattatacatgtaccatttcatatcctgtgcctttttttcactttacataacatttttccctatcagtatgtgtagggctatcttctcattatatggatatattatatcagtgccctagttaaagcattttgggggttgtttacaatttttcattattacatatagaactatagtgaaaattcttgttatatttatcactggtcagttatatagaacttatctgtaggataagtcatggaattgaaatggctaggtcacagtatatgcagatttttcattttaatagattttgctggattgccttccagtgagggggcagtgtgccttccccatcaaaagtgttgagtgcctaattctgcacaactttgcaaaccctgggtgttactaaattttaacagcttggtctctgggggtacagaggggacaaatgcacattaatctgaaatctggaagaataggccttaggagatccgacttgcttcagaatggcacttagcacttacatgtgtgcatgtgtgcctgcattttttcttcctttttttttttttggggacggagtcttgctctgtggcccatcgcccaggctggagtgcagtggcgcgatcatagctcaccacaacctccgcctcccaggttcaaatgactcctctgcctcagcctcccaagcagctgggaccacaggtgcacaccatcacgccggctaatttttgtattttagtagaaacggggtttcaccatattggccaggctggtctcaaactcctgacctcgtgatccgcccacctcagcctcccaaagtgctgggattacaggcgtgagccaccgcgcctgccatgtgcctgcatttttctagggggagaatctcacttgatgtcacctgatatacagaggggcccattggaacccgcattgcacaacatcctggagtctggctactccacgctttgggagcagggagggctgttggcagagaccatctgtggactagctgggggacccttgtgaggtagcagtggatgatggctctcgggctgacttctttgcccaggaagaaggtgtgcagcgggcccgggaggaggaggagaagcgcaaggaggtgacctcgcacttccaggtgacactgaatgacattcagctgcagatggaacagcacaatgagcgcaactccaagctgcgccaagagaacatggagctggctgagaggctcaagaagctgattgagcagtatgagctgcgcgaggaggtaagggtatcacggacagcagtcatggcccagaaattgtgaggttttgagtgtgtgctaggcactgggacagtaccttttcaggcttcatcccattctccctttcttcctcctcctcctccttgggaggagagtaatgttattcctcatagataaaaaacaggtgtggagaagagactcacttacagccacacagccccaggtccacagtgccttgtcccaaatgactgggccaggcatcttttggaattagaactatccacattttagaatggaggtacatgtatggactgtgtgttatatagcaccctcagcagggccttggggaagccagacacattaatgtatttatgcagtagaacttccaaatactcacctacattatgggcttacaatgatgcaggtcaagtctggctgccagcttatgacaatttccattttcagaactttgtagaatttggaattgcaggggaggggtgtacctgtgatcagtgatggactccagagactgtgtccactgattccttgctgctcctgccactcaaaaggcagaatttatcaggctgggcgtggtggctcatgcctgtaatcccaacactttgggaggccaaagcgggcggatcacctgaggtcaggagttcaagaccagcctggccaacatggtgaaaccctgtctctactaaaaatacaaaaaattagccaggtgtggtggtgcacggctgtagtcccagctactcaggaggctgaggcaggagaattgcttgaacccaggaggcagaggttgcaatgagccaagattgtgctactgcactctagcctgggtgatataccgagactccatctcaaaaaaaaaaaaaaaaaaaagcaggatgtcactccctttgtcactgcgttggctgccaccccaggcacttgaatctttggatcttccctgccagtcacctggctgttctgggcgcgttctcatcatgagaagggagacctgcagcccccttacagggctggcagaggacctgctctggattaggccctttcctagcccctggggtgtggcagtgggtgagaccgggaagatctgccctcttaggttcataggccaaagtgatgatcgtgtgtgcaggacctagagggcgctcccctgacccacccctttccttgccatacttcatcctctgggaacaaagctgcttgtttggtttgaggggagttggtttggttcttatccctcagcgctgagacatagaggcttcctgggccactacagtgagacacgaacttcaagaatctgaatacccccgttttctctccccgccaaggcaaaaaaggacttagtactacctgtggagaaggaggtgcaggactaccaggccctgctgctttgcatttacagccctccccagacagacacaggcaccctcatcatacccaaactggacttacctgctaggcaccttcccttccccatccaaaaaaatggagttattttcccttatttcagcaagtccagttgattttacctttgaagtagcacctgagtccttcaccttctctccatcccttctctctcacctgacacaggtctgcagcgctcctctagtaggcaggacagccattccttggggatgcacatgtctagtctttgcctagatatggcaagtctttgccaactgagctaggctgttatgttcttagaggcattgtttttgcccattcttcccatttacaagagaatcagggacacagaagtgagggcttccagccccataggtgatcaatcctggggtcagagatttgagtgtgtttattgcttgccttcttgggagcagattccatccataaaccatgtgcttaccaaggtctgactcactgggagagaaacgacgtgaggttggaaagctgaccttccagagacttggggcccatgttgtgtggtacacatgggagtccatcatatcagattgagatggggggctgggcaaagtgccctggtctgtggctgtggggctaccctgagaaagggagcgcctgacaagccgactgctcccaccatctttgttgcagcatatcgacaaagtcttcaaacacaaggacctacaacagcagctggtggatgccaagctccagcaggcccaggagatgctaaaggaggcagaagagcggcaccagcgggagaaggattttgtgaggctcaggccccagggttggggtgggggtgggaggagacaggctgggctctggctcagctcatagccgggttatatgggagaagtctggccagaccaggcacagattccttgagtaccagtctgagagcaggaagcctcagtgggtctggtgcttgtggctaaaaaccaaacatagcccctgggggcttctgacaggatctggggttctgtcttggaaatagctcctgaaagaggcagtagagtcccagaggatgtgtgagctgatgaagcagcaagagacccacctgaagcaacaggtgagagcatataacctgaccctgtgccttcaagtttccctcactgggccccatcctgggggtagtgaaatgggaccctcattctaggactggctgtgtcctggctgctatgacgccttggttgagcctttgttctctccggacctgcacagtacctatgtggtggtgaccaggtagttaggtgggctcagaggacttcatttgtagctcagaaatgtattgcttttgaggaggtaggaacagaagagtttgaaaatcaacataaaggcaaaataaaagtcaccctaagtctcctactttccaggcttagcattttggattatatccttccaaatatatagctttgctttgttttaaggaaaaatagtatctcaatagaattactggtcagagagtcaaggacgggtctgagtgtgttgaccagagtgcctcccagagaaacccagtcttatctgtgggctgctttctccccacagcttgccctatacacagagaagtttgaggagttccagaacacactttccaaaagcagcgaggtattcaccacattcaagcaggagatggaaaaggtaactgtggtccaggccaggcatggctgctggggcataagctgcttcattcaaaattgttgggcctgccttcaggaagctcccatctggggtgtctcaagggcagggctgttaggaaggttcacagcctttcccctcttgaggcagtatcagtggtatgtatacactccaggttgtcccagggaatggggcagtcttttctgtttgtttggtttttttggggggtttgttgttgttgttgttgttgttgttgttgtttgagatggagactcacctattgcccaggctggagtgcagtggcatgatctcagctcattgcagcctttgccccccgggttcaagtgattctcctgcctcagcctcctgactagctggaattacaggcgcgtgccaccatgcctggctaattttttctttcttttttttttgtatttttagtagagacggggtttcaccatgttggccaggctggtctcgaactcttggcctcaagtgatctgcccgccttggcctcccaaagtgctgggattataggcgtgagccaccatgcctggccccttaccattccttgttattggtggtggacacctctgacttcctggtggtgaggtggcacagagggcattgactgcatcctgtaatgccttgcgccttgggatcaatcattccccaccttggagacacaggtgcagtccccaccttggagacacagaccttggagaggccagctctgaccatttccttctgtctgtcacataacctagatgactaagaagatcaagaagctggagaaagaaaccaccatgtaccggtcccggtgggagagcagcaacaaggccctgcttgagatggctgaggaggtgggctgtctgtgatctgcagccagggtgggggtgtgcacttagcgcatatcaggccctttcctgtatgttctacccatcagtgacacagctagcatgaggtagaggtgagatttgcacacaatgtccaagtccaaagttaatgctgttctctccccatgggaggtggtgagcccagtggtaggtctccagtgggagtgaagggagcaaatggaagaaaggaataaaagagcagaaaaaaacgggtgccagtgatgtgcctggtttacatgtaaagcagcccaggtagtttgtgatttcacagcttgtaatgtagaagaaaggaactaacgatggagcagcaactgcaagccagaccttgctgaaagtttttgggttttttttgtcttttttgctgctgaatgtttttaggtacgttgttcattgaaccttctcttgagctctgaggatggtattagtagtcctgttttatagatgagacaggctcaaaagtcaagtcctttgccaaggtcacgtggtagataaatggaggaatacgttatctccaagccgtgccccttttctgcaccatgctgccccacctgacagcctagtcatggcttcaactaggactgtttcctagagggggccagctttggactcggtctgctctcagccttgttaaagtgtttgccgccaagtggtgatggtaagtgggaggttgatggggcacggcactgaaggtctcatttctttccctagaaaacagtccgggataaagaactggagggcctgcaggtaaaaatccaacggctggagaagctgtgccgggcactgcagacagagcgcaatgacctgaacaagagggtacaggacctgagtgctggtggccagggctccctcactgacagtggccctgagaggaggccagaggggcctggggctcaagcacccagctcccccagggtcacagaagcgccttgctacccaggagcaccgagcacagaagcatcaggccagactgggcctcaagagcccacctccgccagggcctagagagcctggtgttgggtcatgctgggaagggagcggcagcccagccaggcctggcccataaaaggctcccatgctgagcagcccattgctgaagccaggatgttctgacctggctggcatctggcacttgcaattttggattttgtgggtcagttttacgtacatagggcattttgcaaggccttgcaaatgcatttatacctgtaagtgtacagtgggcttgcattggggatgggggtgtgtacagatgaagtcagtggcttgtctgtgagctgaagagtcttgagaggggctgtcatctgtagctgccatcacagtgagttggcagaagtgacttgagcatttctctgtctgatttgaggctcagacccctccctgcccttcagagctcaagacaagtaatacacccaggtcttgactgcatttgtcttgtgagcagggcttgcttggtcagctcaggccctcctagctgctctggaggctcctttgattctctagacctggaaaaggtgtccctaggcagagccctggcagggcgctcagagctggggatttcctgcctggaacaagggacctggagaatgtttttgcgtgggatgatgtgctggtcaggagccccttgggcatcgcttcccctgccctttggtagtgccaggaccaggccaatgatgcttctcagtagccttatcattcacaggtgcctctctagcctgcacaaatgattgacaagagatcacccaaaggattatttctgaaggtgtttttttctttatttctttttctttttttttttttttctttttcttttttttttgcacatgacagtgtttgtattgaggaccttccaaggaagagggatgctgtagcagtggtgcctgggtgcctggcctccagtgtcccacctccttcaccaccccacttggctcctttgccatcttgatgctgaggtttcctgtttggtgagatcaggttgtttgtggtaaaagaaaggaaagggcttctgatggctttgccacaagcttacctgtgggtttcagtcctgagaggccaccaccagttcccatcagcactgtctccatgcagcagttgctgggtcccatgtccagctgcctctttggcttcatgggtttttctgcttcctgcccccacccccacatgtgcaatcctcaagatttgtcctgattctatttcctggcacctccctgcctgtccttggggattctacttcttcctgtgtgggagcccatagctgttgtctaacaggtaagaaatgaaattgaactattgactgggccccagaaatccataaaatggctgcagacagttgtttctgtgtcctgttctacccccactccagtacataactactatgtactgtgtagagccattctatatgctgaatgttctgctgttgcaaacttgccagggtattagccagtgtttgtgccaagcagttttctgggacaacagaatgactcagaccaagatggataggatggttagggctttgcttcttgctgtttttctttgaagctagttcattgtcctgcaggtcccttcatcttccatacctagcccactcttttagcccttaccttaaatctctcagataagttggttcacaaagaatgttaagtactgaatcatgtgtgactgagaccagagatggcaaatgaatggcacaccatttctccttctcctgccccagggcaggtaccactgatctgcatcagagttgcctgctattctctggtgtatccttcacatctaggtgccctcaagcagctgtgtgagtgttgagatctctgccatctctggctgagatactgctgtcctgtgaagtgtttcccatgacctttttcttcccctttgaatccctctgtctggagtagtccttgcctcttcctgctccagtagggccttttccctaccccagcccctgtgccaggctaagctggtacaagagctgccaacctcacagagtgtttgctaggcgagagaggtgcagggaagaggcagaggtatgcaccttcccccttgaagagaggggaaaggcctacagtggcccacataattgcctgactcacacttcagctacctcttaatgcctgtggagggactggagctgctggatcccagtgtggtggtgtaggaggccacagtgagcaggtggccccagctgggtttcccaggtcaggaatgtgggccccaggcaaggtgcagcctttgctcacagctccatccatgtctagaccttcaggccagtctgcagatgaggttccctacctttttcttctcttcattgaccaaatcaaccaatcactacagctgctctgcttctgctttccaaagtagcccaggtcctgggccagatgcaggggaggtgcctatccatgagtgaaggccagtgtcttcctcacctgggtgggtcccacacttgtgacctcagttttaggaccaagatctgtgttggtttcttagattgctagcttttcctccaggggaccacagcaggtgaagctcaagagcgcatggctctgctaatagtaaattgttttcagggccttgtccagctgagagcttcatgtccaccagattctgagaggtgtcagcagcactttttttttttatttgttgtttgttttccatgaggttatcggaccatgggctgagctcaggcactttctgtaggagactgttatttctgtaaagatggttatttaaccctcctccaccccatcacggtggccctgagggctgacccggaggccagtggagctgcctggtgtccacgggggagggccaaggcctgctgagctgattctccagctgctgccccagcctttccgccttgcacagcacagaggtggtcaccccagggacagccaggcacctgctcctcttgcccttcctgggggaagggagctgccttctgtccctgtaactgctttccttatggcccagcccggccactcagacttgtttgaagctgcactggcagcttttttgtctcctttgggtattcacaacagccagggacttgattttgatgtattttaaaccacattaaataaagagtctgttgccttacttgtttctctcctgacctgtgtattcctttgtttctggatctgatccattcagccccttccatcatcactgacttgttcaggtctgctgcagagcgcccatggtggttccctggtatcttacatattccacagtgtctttgagcagtcgccacagcctcaggatgctggcatattcacttgagctgcctgagtggagcccttggcaaagttggcaagacccttgcctcagagaggatcacacacacacaaaaaagttttccctgacctgggggctcacaggctagtgaagggaaaaggtacttttagctatagacaggtcaatggtgctgagagcagagaggaggcccctgcccccttcagcaaggtgagggggtgatacctggaatggccttctgaaccacagggcaggtagaagatgaacgtcatttagtgattaaatggtacagctgggaagcaggtccatgggactgggagagggggtgaggctgggcccagagtctgggtaccaggttaaggaatgtgggctagatccagagggcagggggggcaactgaaggtgtttcaataggaaattgataggctccagcagtaaggcaaaaggcatggagccaggcataggccatttgaggcccaggttaagaggggtggacactcatcactgctatttgggtctgagctgtgggtaggctcctatagccctggcctgcccaagggaattcacaggggcctctaattgtatgcattccttaaggagagcacattctctgttcagtttttacaccccccatttacccacctcaagcatgggactcctatatgggagacatgctgctggtggcctcacccagcaccctgttctctctgggtcctgggttggtcaggcacaaaggatgatatgtgctgaatgcccaggaaatggcagagacaacccacctgcccttccctccaggcctccacaaatagatgtgcccacaatgactgtgacagtcccagcagagcctctgacccttctagctgggtcctgatacatgttttccatgctggccatgttatttctagtcgcagatcctctggagggtgtggggggggtgccgccccaactcttggagattccaagcaaagcagctctgagaataatgaggtttctgaccccccagtgaagcagctgaggatgggaaccacaggggtgctccctctgtcagcagcattaccactgtctactctagcagctccggtggggaaggagagggatttctgttgtccccagtctgggcccctggttattgaaaaagttcggaattactctttacccttgtggagtgttctgagtgttggaagtacccaggaagaagccctgagcaggtgccctcaggagcagtgcccatggctccccacatcagccaagaggcccaaccccaggaagccactcctgcccggggatggggaaggtgggctgggtggctgtgtgcactgccctgggccagctcacttgagcctgctgagccgcctggccaaacatgagcctctctcctgttgtatcagatgctgttctggggacctgcgccaggagcctctgccagggctttaaatagctgcccccattgatctggctgcaggcagcagcagtcacactgggtcagcctccatcaggtgctcaggtttccctgaggactggagtcaggtgccagggaatcgcgtggtctaccttatgacctggtgctccccacacctgtctcctaggcctggggggtggggaggactcctgtcacttcatctgcggcaaaatacagcccccaccacttaccagagaaaactgtctggcattgtagagagaggggttttgccctcaaaagactgttgcttactttcagtagaatggggaatgacactggtatcttccttaagggttgttatggggatgaaatgtatgtaaagtgctcaatagggcactggactcactccattgatggctgtctttgctcgaagtgtcttcctgatgctgctgctgttgctgcttgtgcttcttctgtgcttacattctctctctctcactcactcactctgtctctcctctcccccgccccaccccctttctgacaaagccaccaccattttgtaaggaactgtagcttctctctgaaactgccgggaaagggaaaatctttttaaaatagacatcacacaaccaacagggtcccctaggttcaggcggggaggtgaggtcgagtgagaggaactgcttagcatacgcggggatgctcctcccatctcaccccaccgcgctaaggagaaggtcactttctctttaaatgcaaatgaactccctccagcttagctttcacccggtggtgttcccgggaggagagggcggagggcggagggaacttgcaccgaagcatcactcgagaccccaaacctccaggtcagtagccccctgagggagtgagggcgggggcggaatgacgcgggtctgacgctctgtcttcgagcgcggctgcggagctgagcgatgagtttggcacatggctttggagcccgggcttgggaaatagatccccggtcgccccagccgctcctggggagcacaggctccggctccagttcttctatcaggtccctaattgggtcaagctgctgcacggagaggcagaggatgcgctcctatctcccctccccacacccgcagaccccgtcagtggcagccagctatgtgtcagtgtaaatgcttaagcgccacccacccccccaacccccccagtcccagaattcgaagttaggctcggtagcagcagcctggaatgagacccccagaggagggaaccccagccgaccggaggcttggggggcgctgctggaccggggacctcggagcagcccagccacaggcgcagcctttgtcggaggcccaggcagccagcggccaaccacccagtccaccctggctgcagctgaagcccagcagggactttccgactgggaaaaatgaagcagctgaaagcacacccgcgggacctatagggagtccctaatattttcggttgggggtgggtggaagtggagggatgccggtgtctatgtgggggaaacccacaatgaaccctgccctgtatgctgcggcttctcctacaattacccacacgctggggctttcccaggcgcccctacctgcaccttgtccccctcccatgctgacagggtttgttagcatctgcttaggcccctgataaatagaatagggtttagttaagacatccctaatcttcggctgggcttctgcagctcacctccgtcttgtctcccactacatttcctctgccagccccgccccccagccaccgtgacaggaagccccagtagcgccaagatagttgtgactggtcccaccctttcaggaggggcctaggttttcaggcagaaggggaattaggttgggccttagaaggtccttcaagtgtacatccacgatcccagcagcagacactggcatctggctctgcccctaccgtatagatgaggtgacaagctggaaggtcccagggcccttccttggtgcagctctcagggatttctgggtgaagggctaactttgcccctggctatctttgtggggttgcttccctcctaggcctgaggcccagccagcgcccaatggatgacaaaaagaagaaacggagtcccaagccctgcctggcccagccagcccaggccccaggcacactacggagggtccctgtgcctaccagccacagcggctccttggccctaggacttcctcatctgccatcccccaagcagcgggccaagttcaagaggtgggtacagaagggaaggaaaggaggagggaccccaactctgggttgcactgtagagaggaaggcaaggggggcctccgcctttagttcctaagcaataattgatgcctttctggagcagacccctgagaactcagagctcactcagacccagtccctaccctcaactgtgtggcaaaaaggccaggtgggtcactgggatcacatagcgtgaggattcgcctcagaggagggagtgagcaactctgcaagaaagtgaatgttccacgctgagaggcttacctggtataaatatggaagaaagctattacctgaaaggtttcaggaaccacaggtggtttgggggccctggagtatcagggaacaggaaatggtgaggaaatacctgggggcacaatttgaattctctgttgaattttttttatgattgggagtttgcatgctgccttataatgtgtccatgtttgttccccactaaatacaatgtattctttctccagttgctccagataagaccactgtgtttccccctggttttgcacaccacttgcctaaggggcatgaagctcaaggctgtggggagagtagcaggaaaggcaactgggaaggcaggagggccaggctggcaggggcattcaattttatcctgagagcagtggaaattttaagacagtttttttggtttattggtttggctttgttttctatgtatttttgtttttgtttaaaagagtttttaaatagaagagggttggctgggcatggtggctcagcctataatcccagcacttggggacgctgaggcaggcagatcacctgaggtcagaagtttgagaccagcttggtcaacatggtgaaacctcatctctgttaaaaatacaaaagttagccaggcgtgatggtgggtgcctataatcccagcaacttgggaggctgaggcacaagaatcacttgaacctggaaggcagaggttgcagtgaaccgagattgtgccactgcactccagcctgtgtgacagtgagactctgtctcaaacaaaaaaaaaattttttttttaattaaaaaaaaagaagagggctaggggcagtggctcaggcctgtaatcctagcactgtggaaggccaagacaggcagatgacctgaggtcaggagttcaagaccagcctggccaacacggtgaaaccccaactctactaaaagtaaaaaaaattagcagggcatagtggcaggcgcccataatgccagcaacttgggaggctgaggcaagagaatcacttgaacccaggaggcgaggttgcagtgagccgagatcacaccactgcactccagcctgggcaacagagcgagactctgtctcaaaaaacaaaaaaaaagaagaggggcagaaagatattttgggaggaggtaagacagccctggtggcaataagggagtagctgtctctatatacgctgaagactagggaggataagtgactcattcagggtcataaaacaaatgagtgaggcactcagacaggaacccagggaccccctttcaggcactgctctggctgtgttattagcagaaaagacttctttttgacctcttcacgcctcctcaccccttcccagtgcccaaggggaaccataaagttacccatttatgctagtaagtagatgggcagatgagttagtgcagatagacagataaactggtgcataggcagatggcacaaaagatcgggaggtgcctgactgccccctaccctgtgatcatggtcatgtccaccccacccagagtaggcaaagagaagtgccgcccagtcctggctggaggtggaagcggctctgcaggcacgcccctgcagcactccttcctgaccgaggtgactgatgtctatgagatggaggggggactcctgaacctgctcaatgatttccactctggccggctgcaggccttcggtgagtcctgggggctggtttcagcgggtgtgtggatagggctgtagggcccagtccatggggcatggctgggaccatggttccagggttccagggttccaggactctttcccagggttcagacaggggcttcgttccagggaaggaatgctcctttgagcagctggagcacgttcgggagatgcaggagaagctagcccggctgcacttcagcctggatgtgtgtggggaggaggaggacgatgaagaggaagaggatggggtcactgaggggctgccagaggagcagaagaagacaatggctgaccgtaacctggaccagctgcttagcaatgtgggttcatgtctgggtgctttggttcctgggggcatgaggggtggagaaggtacatactcccaaagccattcctgggccctgggtgaaaaggtgggagtgcatggatccaagagctctgggcccctcaacctccccagaagatagcccccagagcattggggatttggcctggttcccctcctaacagaagcctccctttttctctttgttggcagctggaagacctcagtaattctatgtatcctttccaaggaacccgtctatgtgtgtgtgttcctgagaggtcagtttcctcctctccagccctccaggagtattcacacacaaccaacttccccacctcttgcagtcctgtcagatttagccacagactgcccaaacccaggtacaggaatttagaatttccccaaaattagaagaaaagtggttgtaggggatgttttactactgatcaaaatctttgtgagtactttagctgacatcaatcatagcaaagcttgtccgatgtcctcctatcctttcagcattgaacaattatttttactaatttacactaccacctcacctggtcctcagtcagaaacagcgcgagtgcgcgcgcacacaccccagtgtgtctgacctgcacgatctggatgaagagagagggggtgagagagggcaggcggggactgcaacctcagtccacagacggcccgagaccctcgtccccggccctttgcacaggtgagggaactaaacctgtgcaagatgggagaccggggtgggaggaaggactggtccaaagcgccacgatccttgacgggcacagccagaagctgcacctggccgagaacgccgagcctgaggagcagtccgctgcgtaggcgtcccacgcaggcccacactgcccctctcattctcttcaaactgtgactttttacagactcgggcgggtgttctgcggccccccaggtgctatgggggaggggggcgttgaatggaattaaaccagaaagaaagcaagcggctccgtgtcctgcttcccctccttgcgcctttcctcccggtctccgcggagacagccctcggttatggaggtaccgcctgcgggattggagtgccccttgcggctgtgggaggggcagtcgggggctggggggacgcaggtacgcctgtcgccaggacgcctctaccctggacggtaggaggttgccgtgggaacggctggggcaaagcccacgcccgcgcatgctcaggagcgacgccgaccaatgacgtacttcgcaggcgcgcgggcgggcctggcagttggcgcccatggagccagagctgctggttcggaaggtgtctgcattgcaggtgcgggggcgggcgcggggttcacaggatttttcctttagggaaatcatggggtctcgtacctggacctcccagcgagatgctaccacgttcagtcccctaactgcgcgccaacctctggagataccggctgtccccaaccgcgctgaggaaagctgggacccacggactccctgccctgcgcgtccccactcccaccacacgctcgcgccggatcagggaaacgggaagagccttaaggcgaggaggggcatccagtctggcatcgtccctcgagccccccggagccctagcgcacagcccacctatcctttccccgccgtcaggtcccctcttgcattcgccgggacgacctcttcaggacagtcctccgagatgccccctctcttaccgtgataagggacttctttcctctcgttctccataccaggcctgcgtccggggcttcttggtccgacgccagttccagagcctgcgagctgagtatgaggcgattgtacgagaggtcgagggcgacctgggcacgcttcagtggaccgagggccgcattcccaggccgcgattcctcccagaggtagaacacacctaggagagaagggaaggagggacttgggcagggtggaacccacccttcccagtgataagcttttctcactggaagaggcagtagactcacctcctcacaccccactccttaaccctcaccaacttgtctgctagatcatggtgcccagatacttggaagggtttagccctggggctctcacatctctcttgtttctcagaaggcaaaatcccatcagacctggaaagcaggagacagggtagcaaatccagagcaggggctgtggaaccacttcccatgtgaagagtctgagggagaggccacctgggaggagatggtgctgaagaagtcaggagagagctcagcaaatcaaggaagcctctgcagagatcacagctcctggcttcagatgaagcagaacaggaaacccagccaagagaagaccagagacacgacaaggatggagaatccaggtacctctctgcaaagatcagggcaagcccctgaccctcactgtgcctcagcctcccatctgaagagtgaaaggcttgcgctagataagctgcatccctttcccgtcttccctctgccgggatagggccaccacatggttgggcagtgcaggggagggagtttccaaagtctaaggctaggccatttcccagggtctggtccctcaaggttttctccttcctttcttccctccttcacagaagccacagatcaaagactgccccacagccaacctcagcttcaagagcttcagtaccaccgcagccacttggccatggaattgctgtggctgcaacaggccatcaatagccgtaaggaggtaacactaacctggaactctttctgaacatttagggtcaagggtgggggttagggagagacgacctgccatgcccaagcaggcctgcttggtacaatgtatgttctctcccccaacagtacctacttcttaaacaaacactgagatccccagaggcgggcccgatcagagaggaaccccgcgtgttcctagaacatggggaacaggcctgtgagagggaccagtcacaaccaagcgcaccactggaggaccagtcctacagagacaggaccactggagagctagaacaggaggatgactcctgtcacagggtcaaatcaccccacagatccccaggaagtttggccactacacaaaaaaacattgctggggctaagtgcagagaaccatgctacagcaagtctggaccaccgtcgtctataccatcaaacagccaggccttgggggacaggctcaccaaagggccagacgatggaagacagacctttggagggacctgcctgctgcagatgaaaatcctggaggaccagacccccagaggtttaaaacctaggaaccattgtcccaggaagtccaggacacagctgtctgcactctatgaggactcaaatattaaggagatgtctcccagaaaactagaccacaaagagcctgactgccgaacagtcaggacacaagagttgggcctctcagaggaccacatcatctgggatggtaccttgggggggccagagcatagtgtcctcgatctctggaggactaaaccacccaaaggccaggcccccactgatagaagctccagagatggaacctccaatgagcctagtcatgaaggacagaaaaagcagaggactataccatggagatcaaagtcacctgagattctgtcttctacaaaggcaggctgtacaggagaggaacagtggaggggcaggccatggaaaacagaaccacctggctagaccctaggaagccaggagaggatcaggttccaaaggggaatgctatgaaagggcagtgagacaagacctcatcctacctccctgaccagctctggcttctgctcctgcccctggccattggtgactagtggggccaagagaagctggagcagagagctggcatgagtatagggaaggaggaaggacacattttcaatcctctgcctgtagctcaatccaaatttgtggataaggggccgggtgcagtggctcacacctgtaatcccagcactttgggaggccaaggtgagtggatcacctgaggtcagaagtttgagaccagcctgaccaacatggtgaaatgaaaccccatctcaactaaaaatataaaaattagccaggcgtggtggtgcatgcctgtagtcccagttactcgggaggctgagacaggagaatcgcttgaacccaggagatggagattgcagtaggccaagatgatgccactgcactccagcctgggctacagagcgagacacggtctcaaaaaacaaatgtgtggctaaggagttacctgggggaagtagaatgagaggtctgttgggaataaaggtttttcttagattctgagtctggctgctttcatttctgcttctggccaggacagattctgggccctgccgttcacttcctactggcatggggcattgaccccggagccagctgggagccatggcccaggaaaagatctagccatcctccttagggaacagctcccaaagctgatccccaattgagctcagccttgtgctttagagtggcaaggaggctctggagagtagggtaacacctatgtttaagtgtgatctccccagggcagatgggataaaaccctgaatgcagataaatgctcctgccacagtctccctctgccttcctgggtgagagggcaggactccacctctgattggcaatgttcccagcccttccttggttgcctggcaacaggtctgtttctctgactgaggatacactatggcaggtggcagtccagcagccaagagggtagtggtgtaccggaatggggacccattcttcccaggctcccagctggtggtgactcaacgccgcttccccaccatggaggccttcctctgcgaggtgacatcagctgtgcaggccccactggctgtgcgtgccctctacacaccttgtcatggccaccctgtcaccaacctggcagacttgaagaacagagggcagtatgtggccgctggatttgaacgattccacaagctccagtgagtgggctggggctggtcaaacagcctagcaagggaggtaacggcaagagcgtgtattcagtacctaccatgtatgtaccagcatgttactggtacttactgaactctatgtagggggggtggttttgcctccattagaaagggaaaacagacagaaaacctgcctaaaagtacataacaaatagttgaactgaaattcaaatagaattctgtgtgttactaatgtttatgcccatcacagccaagatcagcctgtgggaagaccactctcccacagggtgagcccctttttccaaaagctcttcttgcttggaccccctatcactgaacactctaaatccacccatccattcctccccactgtgcataggcatcccagactctcccgttaggctagggccatcctctgttgcaggaggagactgtctcccagggtgggagaagaatttgagtacctgagtctctgactcatgtctggcttccaggtcctactcttagctctcagctgaggttgcttactataatgtaaggatcaagagggagtaagtggctgggcacggtggttcacgcctgtaatcctaacactttgggaggccaaggcgggtggatcacctgaggtcaggtgttcgagaccagcctggccaacatggcgaaactctgtctctactaaaaatacaaaaattggccaggcacgatggctcacacctgtaatcccggcactttggaaggccaaggcgggcagatcacctgaggtcaggagctcaagaccagcctgaccaacatggagaaaccccatctctactaaaactacaacattagctgagcgtagtggcgcatgtctgtaatcccagctgctcgggtggctgaggcaggagaatcgcttgaacctggaggcagaggttgcagtgagccgagatcgtgccactgcactccagcctgggcaataagagtgaaactccatctaaaaaaaaaaaaaaaaaaaaaaatcagccaggcctggtagcacgtgcctataatcacagctactcaggaggctgaggcagaagaatcgcttgaacccgtgaggcggaggttgcagtgagctgagatcgcacaactgcactccagcctgggggacagagtgagactctgtctcaaaaagaaaaaaaaagagaaaaaaagaaaaaaaaggccagaggagggaagctaggtagacttagaatctaggcttcattccttgtgtgactttgggcaagtcacttaatttcttggaatctcatacaaaatggagataaaacgacctatctcatgaatgagaatattcttgggatacagcaggatgcataatgcactagtttctagtttctcttgactttttttttttttgagacagggtcttgctctgtcacccaggccggagtgcagtgcactggcgcgatcatggctcactgcagcctcgaactcctgagctcacgcaatcctcctgcctcagcctcccaagtagctggggccacaggtgcatgccaccatgcctggctaatttttttgttttttggtagcaatgaggttgcccaggctggtctcaaactcctgggctcaagtgatcctcctgcctcagcctcccaaagagctgggattacaggcgtgagctgccatgcccagccttcttgacctttaatctcatggttagtactgagaccccagtctggatttccagacttactcagcacttacccagacagcacttgagcactcaaggggtcctagggcaggttcagctgccaatatcttgtttctggactgagatgattgccactattccatggggagggatatctggtgagctgcgccccaacccaacactgacatctgccaggctattgaggcctcagtctccacaagatgacctgtgatctatctgtcctttcagctatttaccccatagagggaaggacccaggtgggaagagctgcagactacaagtgagtcccggggaacctgtgccccagcccctctgtcttcccactcctcctggaactgcccccaatttggtctgggaagccagggaagcagcaggatctgccagttccaggggggtactttggagccagctactatctttcctggggcgtgggatttcaagacactatttcttgcttctgtcgcagcctttaactccacactggggtccccaaaggaaagagaaagatgtgaaacacagattgggggagggggtggttagaatgtgacttagggaacatctaagcaccgtttggtgaaaggtgtaaactgtcttactcctcctcgcccccttcctgccccagtctggttccggccccctcactccacaccttggatgggcccacccctaaccaaaggccccaactctcctgatttggaggcctgacatgggtttcagggtcctcccgtgactcgccacttgtgtgatggggccattggacggcagctgcctgcaggtgctcccagctatatccagtgagtgccagtgtgagggagcaggggtgttgatgtttgttttagtaaggccaagaaaatggtgttgggtttgttctaggagcctctggttactgttgggaatgtagaagtccagcatgcttgatgggtgaagagagaccagtgttatggttattgctggccctgtgccacccttcccctcacatgtagggactcctggggacactcccccttaccaggctttttgtctcagtgtgttcaggaatggggacctggtaagtcccccatttagtctgaagctgtcccaggctgccagccaggactgggaaactgtgttgaagctcctgactgagaaggtcaagttgcagagtggggctgtgtgcaagtgagtatggggactgcgagggcccaaaagtccccaaagagagcctcgccactggcttcagctgtggctgaggatgaagaggcaaaaggaaagcatgttcccccacatgggacttccccctatgccactgggagagggccctctgcccagccctcagaggcagggtagagcctgggtgcctagaggccagagggcaccttggaatagctgcacccaccccttcagtctgctgaatgtgaagaagcatcgagtctaccagcccttatcctcctcacctctctctcccagactctgcaccctagaggggctcccactgtcagcagggaaggagctggtaactggccattactatgtggctgtcggagaggatgagttcaaggaccttccctatctggagctgctggtgcccagcccctccctgcccaggggctgctggtatgtatgtgggaggtggagcggtaacaggccgggcagaggaagccaccctctgggtctgtgtgctttgactctatgccctctgcccactacaagcctttccttttgtcattgtaggcaacctccaggctcgaagtctaggccccacaggcagggggtaggtgacgcaggggacaatgaggggtgggaagaaggggagtgactggctgacaactcttctggcacaggctctgaccttatttcactgcatcctctcttttttctttttctttgagacagagtcttgctctgtagtccaggctggagtgcagtggcaggatcttggctcactgcaacctccgcctcccaggtcccggttcaagcaattctcctgcctcagcctcctgagtagctgggattatgggcacgctccaccatatccagctaattttgtatatttttagtagagatggggtttcaccatgttggccaggctggtcttgaactcctgaccttgtgatctgcccgcctcagcctcccaaagtgctgggattacaggcgtgagccaccgtgcccggcctccttttttcttttaaatatagagatgagtctcacgatattgcgaaggctggtcttgaactcctgggctcaagcaatcctcccaccttggcctcccaaagtgctgtgattacactatgcccagcctgcatcctcttaataatttttttttttttttttgagacggagtttcactcttgttgctcaggctggagtgcaatagcacaatctcagctcactgcaacctccaccttctgggttcaagtgattctcctgcctcagcctcccgagtagctgggattacaggtatgtgccaccacacccggctaatttttttttttttttttttttttgagatggagtctcgctctgttgcccaggctggaatgcagtggcgcaatcttggctcactgccagctccgcctcccgggttcatgccattctcctgcctcagcctcccgagcagctgggactacaggcacccaccaccatgcccggttaattttttttgtatttttagtagagacggggtttcaccgtgttagccaggatggtctcgatctcctgacctcgtgatcagcccacctcagcctcccaaagtgctgggattacaggcgtgagccaccgcgctcagccacacccggctaatttttttaatttttagtagagacagggtttctccatgttggtcaggctggtctcaaactccctcaggtgatctgcccacctcagcctcccaaagtgctgggattacagtcgtgagccacctcgcctggccactcttaataatcttgtgaaagaaagattatccccattttccagaggtggaaactgaagctgaaaagtgaagtgggccttgggcacgatggctcacacgtgtaatcccagcactttgggaggctgaggagagtgaattacctgaggtcaggagttcaagaccagcctggccaacatggtaaaaccccatctctactaaaagtacaaaaaaattagctgggcatggtggtgggtgcttgtagtcccagctacttgggaggctgaggcaggagaatcacttgaacctgggaggcggaggttgtggtgagctgagatcacaccactgcactccagcctgggtgagagagtaagactcaagtctcaaaaaaaaaaaaaaaaaaaaaaaaagtgaagtgatttgttcagggtgacagagttattgagtggcaggggccagaccagaattctcatctgatttgcaggacttaataccttcttgctaggttggacgctgggagagagaattggtatatttggcacagcagggtccaagggaacttatattatccagctctaagccctcccaagaaatgagccagtgagcatggggcatggtggtgggggtggggaagcacagtctggtttcactgggcatcgaggagtgccaggcatctactgctctgtccctggataagtcaggctggtgggaagaggcagcaaggagggaggacgtactttgtgaagacagacggtgtctcctctgccatgttcctgcaggcgtcaggggctctctgaagcctgaactggggagtaggaaaggtaagaatggccagcaatcagggtccaagcccagtgtcccttctctaggcccaaggccacagggcccaggtaacccagccctctccaaaggaaccagaccgaattaagccatctgctttctatgccagaccccagcagaccattcagccaagaagcaagctccccacactctcattcccatcaggtgaggggtccctggggctcaggcccttctcagctgccctttgacagtgacataggttggtccctgctgttgttggggatgtccatgggagcagaatgctcagacacaaagccggcactggaaaaaaaaaaaaaagataaaggagtctgaacctactgtggctcaggagactgcccgtaaaaaaaaaaaaagctggtactgacctcatcataactgtctccagctgcccccgtctgtatatcctgtcccttcttcacagggcctcatcacatgaaaagaagcacctggaaagggcagtgcttaaagcgataagacttcaggggtgggatatagaggggatgggggtgggaccaaaggcccacctctcacttccttgccatcctgggaggtggtggggaatgcagaaccaggttcaggggagggaaaggggctagcatgaaggtccagggcaggaatgctgagggctcttcagcctgggcatcacccagtgctgcctcccctctttaggagttataggagtatatggagctccccaccgaaggaaggagacagcgggggccctggaagtagcagatgatgaagacactcagacagaggagcccttggatcaggtaagctgttggatcaggaaacagtatgttggggtgggaggagctctgagctggaaactggcagccttgggccccaggaacagttctcctcccttgtgattgaaagtaaatgatctcctaacttcctaccttgttaaatgaggaagcagttcctaatttccagtttcttccttccttggggttggggacctcctggctgagagctggaggctggccatactcacggctccattctgtatggccttccacctcctgcagagggcagcacagatagtggaagaggccttgtccctggaaaaccagcctggggctggggctgctatctcagcctcagccccagctctgccatcttgagagccagcagctccagagggcaactggggaccactactctggccaccttttgtccttagcctccagcagcttgttcctcaggagccagcacctccgctgggctcacagggtacactgcggcctcctcagccctccccgttctcctgctcctaaacccacagcccagccttcccttcctctgagcagagcagccctggctgtgggggctatttccttatgggattctctggccagagaaaggagtagctgactaagcctgggagagggtttgtcacaataaaagaatacttactaacctcttgtctgtttaccatagatttattgacagctactactcgccaggtgtgctggagtcaggtggggctggggctcacagctctctacctgtttaagaggggctggcagtgaggatttctgcctacctcatgggtggggcaggcaaggctaatagacagctcatttcctgcatctgccactccgacgcaccttcttccctcggttccacccctcattcagccaaagcgctctgactgagtcccagaggcctcccgtttgcatttctggctcaaagtctgcagctggccctttccatgcagctggagttctgcagtccatggaacctgccaccatgatagtccagatcaggccacagtaatggtggctgggctgggagcctgagatgttagcaggaagagagctgctggggcagaaaggttgctgagggtgagcgtagagtctcctgtgctaaatccccgcagctgaacagcacttgaaggttacaaaactctttcactcttgttctcttattgtgatccatgaggtagctgttatccccataagagaggaggaagctaaggccagagaggggaagtgctaggtccatccgctcactgccagcacttcatggcccaggggcttcctggaggcagcagagctggaagtgggttcggcccactcaaagggtagactgttgcccctgggtcttactcactgagcttgtgatgcagagtgaaattcctatcacggtgagcaccatgccagcaactgctcctgggataataggcagaaatcaggagggtctgagctcagccatgccagtaggagctggtacagggctggaggaagggctcagatggggtctggtcttcaatcccaaaccccagcctctgtctttctccagactgtccaggggaagggaactctgatggccacaaggaagcaaaacagctgcagaggaaagggcaggatgggaaaaggccgtgtcctcacccactctggggagatgggttctgggaaggaactaacacaggtatgtcgagatccacagagctgcgtcccgcactcgcagtagtctaacttacgttttccaccaatatcttctccaagggccttcccaacaatcagtgtgaagatgatagccagagagttacagatgggcacagccagggtcagatctgggtggtcagaatgaaaagaatgcctgagatgcaacaaatgcctttctaggcacaaaacacttccatcatcatcatttcatacctttaaaaaaggtatcaaaaccccatcttccagatgaagtcacagcaaatctcaggactcaaacccacatctcctgactccacgttcagtgcttcccaggattccagcatgaagacctgaactctgaggtctgggaccagcctggtttgataatgagaatgaggtctttgcactcaaagagaactcgtgagatctcaaggacatctggacggacaggcaggcacccaaatcccaaaggatgagtagagagtcaggtaacaccaagcacagccaccatttattaagcacataccatggcctaggtgctttgtgtacatatctcagttttcacaacactgcaagaaggggattatcaccattttgcgtaaaagaaacaaaggctcaaagaagtcacataaactaaggcaagttgaggatttaaaccaaggcttgcctgactccaaagcctgcgccgttattaaactgtggatatagacagagcagaacatcagatgaagcacattttgtttctgtttcagcccaagctcaggccttatggagttaaaaataaaaagtgtcagaaggaaggagcaggacctgttcaggacattgggctggacctgtggtgtgggtagagggcatcatagcccaggatctgttccttaattttgaagttccaaggggctgactgccaataagcaaacttgaaaaagagtaatggagttggctgggtgcagggtggctcacgcctgtaatcccagcactttgggaggctgaggcgggcggatcacctgaggtcaggagttcaagaccagcttggccaacatggtgaaaccccgtctctactaaaaataccaaaaattagccaggcatagtggcggacgcctgtaatcccagctactcaggaggctgagacaggagaatcgcttgaacccaggaggcagaggttgcactgagccaagatcacaccactgtactccagcctgagaaacaagagtgaaactctgtctcaaaaaaaaaagaaaaagactaatggagttaacttaaaatttgttgagggtagatctcctgttaagtgttcttatcacatcaaaaaaagagccacagccaggcgcagtggctcatgcctgtaatcccaacattttggaaggctgagacgggcggatcacctgaggttgggagttagagaccagcgtgaccaacatggagaaaccccgtctctactgaaaatacaaaattaggctgggtgtggtggctcacgcctgtaatcccagcactttgggaggccgaggcgggtggatcatttgaggtcaggagttcaagaccagcctggccaacattgtgaaaccccgtctctactaaaaatacaaaaattagccaggcatggtggtgcatgcctgtagtcccagctacttgggaggccgaggcaggagaattgcttgaacctggtaggcagaggttgcagtgaccagagattgcaccactgcactccagcctgggtgacacagcaaggctccatctcaaaaaacaaaaacaaaagaacaaaattagccaggcgtggtggcacatgcccataatcccagctagtggggaggctaaggaaggagagtcacttgaacctgggaggcggaggttgcagtgagccaagatcgcaccattgcactccagcttgggcaacaagagcgaaatgccgtctcaaaaaaaaaaaaaaaaagcaccacatacacataaaaaagaccaatggacgaatcagctgagttatccatggtaacaagactcaactgcagaccagatgttcacactggctcctcagcaaattctttcccagcactcccagggctcgcctgtgtgaggcaaaggagcaaactgtcctgctcctcatcccctgggaggccccagcatggaggcattacccatctaagaaattgatacaaccccacttacaaagagctgctttcttttttggttgtttttcgtttttgttgttgttgttttgagacagggtctctctctgttgctcaggctggagtgcagtggtgaggtcaaggctcactgcagcctcaacctcctgagctcaagcgatcctcccacctcagcctcctgagcagctaggactacaggcacacaccaccaagcccagttaattttcgtatttttgttgttgttgttgcctagggtgatctctaggctcaggttatctgcccacctcagcctccaaaagtgctggaattataggcctgagccactgtgccctgcccagagctgccttcttaagtttacataccttacaaggagtgtcatggctgctaaggtctggtttgcaacagtagatggaagaaggatgcagcacggtgcagtggaaagtgagggcattggagtgaggcagatctgagtttcccttgcaatcttggttaggatattcaaacactcaacctgtttccccgcatgtaaaataggggtcacagtataccatttcttttgttgggttgtcgtaagatgaactgtgataatgcatggatagtccctggctgaagtggatgcttcataaatagttattactgttctggttattagaaaggatggatattaaaggatacaggcagaaagggtaatgagataaaaagaacctaaaactgcaatttgattaaaacttggtgaatggctacctgtagtcagctggtcaagggttcagcattcttccacagcagtgaatgcatgaggccagaggttttcaaactctttaaataagtgcatattatttctttctttctgtttttgagacagagtctcgctctgttgcccagggactggagtgcagtggcatgatctcagctcactgcaacctccgcctcccaggttcaagccattctcgcgcctcagcctcccaagtagctgggactacaggcacacaccaccacacccaactaattttgttatttttagtagagacggggtttcagcatgttggccagactggtctcgaactcctgacctcaaatgatctgccctccttggcctcccaaagtgctgggattacaggcgtgagtcaccatgcccagtcgagcataaacttttaatatatggcttcaaatccttctgcactgacatcctgtgggacttgagaggtgaaattgcacaaagttttgcaacttcattttctaagataatcatatctgctttacagagtcatgattggaattaaataatgtgtaagactagtgcagtatctgacgtagtagagggcagtcacaaatgtcaagagaaaggaaatttatgtatatggagctctgactgtgtgccaggcactctcctagatgtttcccattcattaaatttaatcctcacaatgctatgaagccaactatataaaaccaaggctcaaatgggtgacttgctcatggtcaggtaggtagcacacagtggaagcaagaatgtgaaagccagcacttggcacagcaaaatgaaccttccttcttcctccgctggtcacacatgactgccaggcttcaaaccaactccagtgcctagcaacatactcataaccagcacactgtgcccctcttgttcagagaagaggatagtaagagggaactagagctagtcagccctctctcactgatgggaatgaggtgtttcaagctccaccccgccccccccaatcactcttccaggtggcctcaaacactaagcagaacagttccaagccaggacccacctgtcgatgccaaggtgaggtaatagagaagggatccacactggttgaggagaaagggcatcaggtactggaaagaggagaaacctgcagtcagtgtgatggcctgactgagcagcactgccttctttgagctcctagcgaatgtctttccttggagggaggcagggttataaggacccagagaacactaatccctctaaggaggatccttccagggcaaagagggaaacagactgaagtctgtgcctttgctcaaactaccctctccctcacctctgctagttcccatcctgcaaggccttgaagccaatgtcagcccctccaggaagccttccccaagtcctccagctccagccttcctcctctgaactcctcccctgcagggccaatttgagccccaagccctccctctggaaaggctcacaaatgttgccttatgtaactgaaggaatcacaataaaatgtgaataatggcagccatagattgagcacttactatgttctaggcctaatgctaagtgctctacgtatctcacctaattcctgcaactgacctatcagatggttattattataatcgccatttacagatgatgaaactgaggctcaaggacaactgacttttccgagaatttctagtgagtaagtggtggggctgacccagacctgtttgactccaaagaccaaattcttggcggcaactccaccgagagaggggcctttcacagagacgcacctcagtattcaagaagagggtcttcatctcctgtagcaactgctgggcccaggtcggctcatgaacccgctgcaggccggcggaggcccgcttcagcagcggctgcgtgccaccccacagagcggccaccagcaccagagccaacacctgccctgaatgcagacgagtgagtcaccctgacccccaccccaaacggccgcccaccccgccctctcctggccttctagccccagctagccgcccccacttccctccttcgctctcttcgcctcggctgcgactggcggctaaggcaggcccagggaagctagggagatgaatccaggagtccggcctctggggttgtagcaggggtcggggttagagggtggatgtggagcaggaaatgaattcgaggcgagggtcgggaaatccatggaagggcggggccggctacctacccagagacgccgccatggcaacgccgctgtcttctacttccgggaacgaaggggcggagacccataatccggaagtgacctcgaaaccttttccggtcttactcacgttgcggccttcctcgcgtcacagccgggatggtgagtttcagagttaggggtattgcagtgggggtcctgggctgaggctggggcccaattccgagcactgacgttactgtcttgtccccacagaagccgatcctactgcagggccatgagcggtccattacgcagattaagtataaccgcgaaggagacctcctctttactgtggccaaggaccctgtgagtgttggctggagggggtccgggaggggcgggatccttctgccaggacgatgggtggacacgccagttttgccgttagcggggaaccaaagagcagcccattgtgagaagtagggagaggccatgccgggggtaggttggcgaaagtattctaccgggaaaggtggggaagaactctattggccgagtgcggtggctcacgcctgtaatcccagcactttgagaggccgaggtgggagggtcgcttgagcccaggagttggagaccagcctgagcaacgtagtaagacccatctctacacacaaaaaaattagcctgacatggtggcctcgcgcctgtggtctcagctacttcggagtctgaaacgagaggatcgcttgagcgcggtgagctgagatcgtgccactgcactccaagaaaagcaagagaccactgtggaaaggggataaagatgagggtcagcttgcccagagaacgggatgcgacctttagggataatctaatctttctaccaggataggtgcaggctgtgttattcagacacagggaacttaatgagggtgtctctagtctcattttaagtcaatcccatcctgctactcaatgccaaacaatccctcatgatactgccttttgaggcacctggccattttattttattttttcttgagacggagtctcgctctgtcgcctaggctggagtgcagtggcgcgatctcgactcactgcaacctctgcctcccaggttcaagcgattctcctgcctcaacctccctagtagctgggactacaggctcgtgccaccatgcccagctaattttttgtatctttagtagagatggggtttcaccatgttggacaggcttgtcttgaactcctgacctcaggtgatccgcctgcctcggcctcccaaagtgctaggattacaggcatgagtcaccacacccggcctggccattttcaagatgagaaaactgaagttcagaggagagaagcactgtatttgagatcatatagtgagacagtggcagagcaggcaccagaacccagacttccttactaccagctgctcccacttggataagacatcagagatactgtttttctggactggagctcaacttggccttttattctttggagccgttgggagtcccaggagagctggagctaacaaatgaggatgcctttacaagccgcctgactcctctgttgcttcccttcaggaagggaggagaatccaggagttggtctttttaccagctccctgctgtttcccaagaaataaacagaagagggcagaatcagccttgctacaggctgctgagggttcctggggcaaaataggaagccattgctcttactgggatgtgtactatcctgtggtttgacttttccagatcgtcaatgtatggtactctgtgaatggtgagaggctgggcacctacatgggccataccggagctgtgtggtgtgtggacgctgactgtatccttattttgggtctgagtccgtgttgctagggtctgtcagcgatggagaggctgagttgggagttgggagttgggggtgctgttgagggcctagagaacgatacctcctactccctggtctcttcactgactgaggaaacattcaggacaaattccagttctggataaggaggtaagaggggtagaaaggctctttggggctgaacagggagatgattcacttggcatcccaagaggacaagggctcgggtgaacttcgtcatatttcttaacaactcttcaggggacaccaagcatgtcctcactggctcagctgacaacagctgtcgtctctgggactgtgaaacaggtaagctgggttcattcacctttttagcaaatattgaggacctacagtgtacctgtttgagtaaacaggtcctaggaaaatagagatgaaatccatagatagtttccagtctagggaataagagacaagaaagatagatgagaaaatacacgccatggtagaggaagcatagattaagttttctttttttttttttttttctttttcttattttggagacagagtctcactgtcacccaggctggagagcaatggcactatctcggctcactgcaacctctgtctcccgggttcaagggattctcctgtctcagccagccccagtagctgggattataggcgcacgccaccatgcttggctgatttttttttttgagacagattctctcgctgtgtcacccaggctggagtgcagtggcacaatcttggcttactgcaacctccgcctcccaggttcaagtgattctcctgcctcagcctcccaaatagctgggattacagacatgcgccatcacacctggctaatttttgtatttttagtagagacagggtttcaccatgttggccagactggtctcaaactccagacctcaggtaatccacccacctcggccttccaaagtgctgggattacaggcatgagccactgcacctggccaccagctaatttttgtatttttagtagagacagggtttcaccatgttggccaggctggtctcgaactcctcagctcaagtgatccacccgccttggcctcccaaagtgctgagattacaggcacaagccactgtgcccagcctaagctgttctgtttagtgccaggtctatgctgggtactggggacatggagggaaatcagatcaggtctttgctgtggagaagcacagtctgagggagagacagatatattgcagtctacgtatgagtagtgccacattagcaggatgtctgaggaaagagtctaggtaagaagttaaaatacttggccaggtgtggtggctcacgcctgtaatcccagcactttgggaggttgaggcaggtggatcacctgaggtcaggagtgcaagaccagcctggccaacatggtgaaaccccgtctattaaaaatacaaaaatgagccaggcatggtggtgggcacctgtaatcccatcgactcaggaggctgaggcagaagaatcgcttgaaaggttgcagtgagccgagatcacaccatcgcacagcagcctgcaggacaagagcgaaactccatctcaaaaaaaaaaaggccgggcgcggtggctcacacctgtaatcccagcactttgggaggctgaggcgggcggatcacgggtcaggagatcaagaccatcctggctaacacggtgaaatcccgtctctactaaaaatacaaaaaattagcggggcatggtggcaggcgcctgtagtcccagctacttgggaggctgaggcaggagaatggcgtgaacccgggaggcggagcttgcagtgagagccgagattgcaccactgcactccagcctgggcaacagagtgaaactgtctcaaaaaagaaaaaaaaaaagaaaagttaaaatactttttaagtttgggtcactggagcaagacaaacagtgagatgtgatggtagcattctctagaatgtcctccctgcaattgcaatggatggtgtagcccagactttgcctgactccaggaaagcagctggcccttctcaagaccaattcggctgtccggacctgcggttttgactttgggggcaacatcatcatgttctccacggacaagcagatgggctaccagtgctttgtgagcttttttgacctgcgggatccgagccagattggtgagggctgggaatagggctggggttgaggtaaagggtacagttctagagcccagggcctaacatctactgccccacacagacaacaatgagccctacatgaagatc

SEQ ID NO: 3839 - DNA, 534 bp, Homo Sapiens
  misc_feature (54)..(54): n is a, c, g, or t
tcggcacgaggcagaagaccgcgagattctcgccctgagcaacgagcggacggnctgacgtcggcggagggaagccggcccaggctcggtgaggaggcaaggttctgaggggacaggctgacctggaggaccagaggcccccggaggagcactgaaggagaagatctgccagtgggtctccattgcccagctcctgcccacactcccgcctgttgccctgaccagagtcatcatgcctcttgagcagaggagtcagcactgcaagcctgaagaaggccttgaggcccgaggagaggccctgggcctggtgggtgcgcaggctcctgctactgaggagcaggaggctgcctcctcctcttctactctagttgaagtcaccctgggggaggtgcctgctgccgagtcaccagatcctccccagagtcctcagggagcctccagcctccccactaccatgaactaccctctctggagccaatcctatgaggactccagcaaccaagaagaggaggggccaagcaccttccctgacct

SEQ ID NO: 3840 - DNA, 3949 bp, Homo Sapiens
ctccaggcacacgcagcacacacagcacatgcaccacacgtagcacacacactgcatgcagcacacacacaccagaggacgcaccacacagagcacgcacagcacacaccacacagcgcacgcaccacacagagcacacgcggcacacacagcacacacagcgcacgcaccacgcagagcacacacggcacatgcagcatacacaccaaacagcgcatgcaccacacagagcacacgcggcacacgcagcacacacaccacacagagcacctggagcacccacagcacacacaccacgcagagtacacgcggcacacacaccacacacagcgcatgcacaacacagagcacacacagcacatgcaccacacgtagcgcgcacactgcaggcagcacacacaccacacacagcgcgtgcaccacacagagcacctgcggcacacacagcacacaccgcacgcaccacacagagcacatgtggcacacacagtgcacgcaccacacagcacccgcggcgcacacagcacacgtggcatatggcctccatgaccctgtgtcttgagggcaggtcctactttttgctttgttgtgttggagcggaatttctcccctggcttctattggagtcctagattatttaaatcacttcctctgttaattgtgcctggaattaacctgttagatttacttcctagcagttagttgctcagtatgggtttctacactattaaagcaacctagcggtagtacacaaggttttgttaggatagctgtgagattttttttctctaacaatcatcattatttctgtgtctgctccgtttttcttcagtgttttatatgatattaataggggatgtctaattttgtatctttaaaaaaactttatcaaatctgaagcatttttcgtgttatagcttctctataatttttcatggatattgaatatttggtgttgatattcttcactcagttttgaacattgagttttcttctaatgttttgtgcttatgaaaaccatttctgtgtaacgtgtttaagtagcttatttatctgaaagaactctaataatgaaaagaaataaaaagtttttcagaagcatgatcatattcttccagaagagtcaggaaccatgtgtgccaggaaagggaaacgggactgagcgtctcgtagcgaaacgcctgctgcagacttgacgcggctcccctccaggacgggctggcggcacacagactgtgcacttacctcactgccggcctcataatagtaatcagtgtaaatggtgtttctctttcgttttgttatttcgtggcgtacgtgttaaagtgtgtgaaactacaaggccagctagtcctttcatcattccctttggtgcaggttttggagcagcaccacagggcacacccctcgccactctttatggggaatttttgcccaggcaggcagaggagtcatcttggtcacaagtctcccttttccccctccccagcatcttcgatcctgtccccacccctccagatgcatccaggggttgcaagcctgccccccaaccagtccccgtgaggaacagtggccgggattgtcccagggccccttccagcagggggacctcctgacttgagagtccccaaagccttcccagggcagctagaatctgcctggagagaagggatcttgtccccaagggttagaggcagtaaactaatagcaaggacagctgcctttagcaattgtgtgtgtcgcatggccggtccctgcatttttcttcagttccaaagctgcactggcatttttatggtcatctctggagtccctttgattcaagaaattatacctctaggatgccaactaaacgaacaacaaacagaaactccacctgtttgctagcataacaggcgtgaaggcggcagtgtcgccggcgtccttccgcggaagcccagtgtgtgcagacagcacggggtggcgctgctctcaggtgctctggctgcttgggttcctggcatgctgatttgtgacttaagattaaaatcacattgccagggattaccacgcaaccacgaccttggctgctcctccagaaaccgtggtcgcgctcactgcagattggagaacaggtgcatctcgtagctcttctttggaaacaaaagaagccaccagctgaggaagatgctcaccggtcaccgtccctttatttatgcccagcgatgacctctctaacaaggtgcagagcttagctgattggtgaacagtgattggtttccgctttgttcacagtggctaagttctgcacctgaagagaaggtgagatggggacagttaagttggagccgctggggcagaggccgttgctgacgggccggccgctgctgcacagtcagcttgggtgcggagcgcgatcctggaggatgagagaccacttgaccccaaggatgcactgtctcctgctgggaatgctagccatgtactgagtccttaagtctgtccacagaaacatccactaatcggacatctgtctgaaaggtcaaatgtattgaaagttgcaaaaattcttcttacaaaaaactaaaaccaaatgcatcacctaagtcgtgtgaaatcatgtggtagctcatggctgtgagcggggcggggcggggctttcggaggagctcctgttgttctgggcgcggtgaactctctcttgtatttgcagtccaggccttcgcgtctcctgcgccagcagacggtgcccacggagctcccagctgaggcgctgcttctccgggctgtcgattggacccgccctccggtgcctactgagctgatatcagttctcattttacacactggctcagttcagcaggaacaggagtcgagcccttgagcaaaaagccttcgtgtctgtaagtgcccgaggctcaggagagctggggctcccactcgcggcagacaggcccgcgtccaccctgcgtccaccccggcccggcggcagcacggtgccagtcatctgcatgtgctcctgcggcgtgggggtttgtagacttggaaaaccctgttggcagaaagttaagagctcccaggcctgaaggcaggacacagtgccagcagggggccgtttgcccccatgtgtaagggaggcagggcccagctctcccacggcgaggtgagctgagactttctgagaatagttagagtgggtgcgtgtctgaaatgggtactcctaccagctattgtgtacgcaaagcctgagtacagcctgctggtgtcatggccacgtgtgagcaaggccagcgtcacacggctcgctgtgacccgtcccggagactgaaatgggcctgggtcttctccttgtcctgtgattaaagtcctctcttgaaagtggagagcaaaggcacacagaggtgcgcgctcacaagaattcctcccggtgactgggtaatcaatgttactgctgtttcctttgcaggaaagaccacagcaagattctttcattcgtctcctcstagcctgggggaccaggctcgaactgaccctggacatcaaaggagggattatgtggctgctaaagccatcggcccacagccctgttcacgtcttggtgcttctctttcccagaggctggtcccagccaggcacacacaaaaggcagattctcgtaaacgcagcctccctccctggaggctgcctcctgccctggatctggagtggagctgctctgagattttgagttcttctgcagagatgattaaatatatccaagagacattggaaaacctgctgaacattttacattggtctgctcagcacatggctggatgcggatatttctataattccagaaagtcacacagctcctctgtatgagaccagtgggcgccatttaaaagaacaggatgagaatctaagatatattattaataaatgtaatggattttttttttgttaaaaaaaaaaaaaaaaaaaaaaaaaa

SEQ ID NO: 3841 - DNA, 264 bp, Homo Sapiens
tttttttttttttttttttttttttttaaatttaaaggagtttaattgagcaatgaacaatgcacgaatcgggcagcccccaggatcacgggagattcaaagagactccagggatgatcgcttttcggccttttggctaaaatcaagtgtgagactccagggatgactcgggtctagctgtggtcccctgcaaccaggtgcctccaaaatggggctggcgttgacaataaccatttcccagcttttaaaaagaggggacagagc

SEQ ID NO: 3842 - DNA, 264 bp, Homo Sapiens
tcggccgccccacataaggaaacatgtatggacctcaatacttccatattgcctatataaatgtgacaaattcagctgttttgtggcatagataagtgtcgaagctgttcagttagtctacccgtttctagttcatgttcttcatggctttgcagcatttgtcactttctatgatgtgttcaaagaccagaaaaggccacacttgacctgtcagctggtccttgaacagctgtaggtttccttttttttttgagacagagtctc

SEQ ID NO: 3843 - DNA, 496 bp, Homo Sapiens
atagtcgttaaaccataaaaccaatacctggtatatacatgacaaaacaaagcatgtaaaataatatgcagcctaaagaattcaaagacaacaaaggtgacaaagtcgggtaaaagaaaggcaattagggacataagatattttttaaagcaggaagctgatgatgtccactgtaagcctggaagaaaccaggagtctgaacacggagcagttactgataggaaggataaagtgctacatctctaacagcaagcaaattaactctgctgaaattgccagaatgaaggccaaggtggttttcagtaaagagtgttctccttgacagcatagccagcatgtggttgagccgggacctgataccagcgaagtggaattgccgctctttgttcaagtttctaagtgagtcactcaagtacagttccaggtggggggtgcccaggtactttggatagccaggattgtggaagtcagtggttctgatggaagcgggagaacc

SEQ ID NO: 3844 - DNA, 431 bp, Homo Sapiens
ttttttttttttttttttttttttttttttttacagtgcaagggttttaatagtccacactaaaataggctgtacagttttgtagtttaacattaaaagcaatcctgccttattttaaaatgcttctacttaagaatgcttcttcctcccccactccttcacttaaggtataagtctacccctaaagtgcatttctcaggcattaaaaacagcactgtgatttgctttccacagagtcctaaataacagccaccttcttcatttgagaggctacagagttcaagctgagctgtgacaggagccagggggccagggccatgaaaatggctttttgaaaaaaaataattatgccaccctcctccgcggcaggtatcttctcttaccacaaataaatatttaatgcatccttggagtcatgaaatattgagaac

SEQ ID NO: 3845 - DNA, 428 bp, Homo Sapiens
ttttttttcatgtttccagaaatctcttttatttctttagatatataaaacactgttactttatattctctctgataattctagtatctgggtctagagtcaatctgttgcttctgctgggtctcatagtgtattgtttccttgtggtgtttatgaatttttaaacctggatctctcattttctttctttctttttttttttttgtagagatggggtctctcactgcgttgcccaggctgctctggaactcctggcctcaagtgctgggattccaggcgtgaaccaccacgcccggctgagatgttccttttccttggaacttgatcaacacaaaatcctgaggcctggtgtgggtgtgttcctctggggcagattctcaactggggacacttctgcccccaaggacacatttcaacatcctgagaca

SEQ ID NO: 3846 - DNA, 235 bp, Homo Sapiens
attttggagaataaagagacctgtggatttgaggtgccatttgggtagaaagaaaagacgtttacaccgagaaatagtctgtgttgccctgaaggagcagagggatgcatcgctggaggtgacctacagttgaagaagactcattatgacagaccttgtccttcttccttgtggaaagtgtttcctctgctgctactgctcatgagactcttccccctccctgtcccagggaacc

SEQ ID NO: 3847 - DNA, 428 bp, Homo Sapiens
atttttctattgtttttaataaagccacaaatatagaacttttaaacggatgtctcagactgtaagcgaaggacaaatttgtgagattcggggtctatgaactcttcagagagtatgatgaatggaattttcttcacattgactacgaggctgaagtccaagcacttaaggacgaacacaattccatcccgtaatccattagtcacagcctcatcactgacaagcctccactgtgtagagagccagcggtccttgtcatattgcagggtggggcccgcactgaggtacagttctaggaaggccttgggggtcatgccgttggtgatgcagaaggccacgtgctgcaggatgctctccatgctgtggtagttctgctgccgggtgatgcgcaggtacttctggagagccctggccatgggagggaaaat

SEQ ID NO: 3848 - DNA, 435 bp, Homo Sapiens
tttgagacagagtgtctcactcttgcccagaacccaggctggagtgcagtggcccaatctcggctcactgcaacctccacctcccaggttccagcgattctcatgcctcagcctcctgagtagctgggactataggcatgcaccaccatgccccactaaattttgtatttttagtagaaacagagtttcaccatgttggccaggctggtctcgatctcctgacctcatgatctgcccgccttggcctcccaaagtgtgggattacaggcgtgagccactgtgcccagcatggtgtttcttatatcaggtgttttagggagctcgcttgcttattccattctttaatccttacagtgtgccacacgtatgaagtttataacgtattaatgatctcattacccaaaaccagaacataatttcacaagggttcctact

SEQ ID NO: 3849 - DNA, 428 bp, Homo Sapiens
tttaacaactagaagctgatgttgtaggatcagctctaggatcctctgcccacagtatacagtagaagttaatttatctggtttttttaacaactagaagctgatgcacatggatttctcatttgccctataacaatcatcattctaataactaaagtccaaaagaatggcaatgcaatagtttgaaacgcttggtttagcatttatttatcagaaaaattgtgattctttgttgtcatttttggaggcaagagggcatagtgagaaaagaaaggacatatcaccaattaactgtattttgtttgtttgctagctaaatgacaccactcctttttttttttgtctctgcataaggtaatagaacatttacattttctttacttcatcttgaagacccttacttagtcatatgtaacatgtttgcctat

SEQ ID NO: 3850 - DNA, 446 bp, Homo Sapiens
ggcacgaggccgagaccacgtggcctccgagcagctcagggcgcccttgaaagttcttggatctgcgggttatggccggtcccttgcagggcggtggggcccgggccctggacctactccggggcctgccgcgtgtgagcctggccaacttaaagccgaatcccggctccaagaaaccggagagaagaccaagaggtcggagaagaggtagaaaatgtggcagaggccatataggagaaaggcaaagaggaacccggccccgcttgggctttgagggaggccagactccattttacatccgaatcccaaaatacgggtttaacgaaggacatagtttcagacgccagtataagcctttgagtctcaatagactgcagtatcttattgatttgggtcgtgttgatcctagtcaacctattgacttaacccagcttgtcaatgggaga

SEQ ID NO: 3851 - DNA, 335 bp, Homo Sapiens
tttagaaccaaaaaaagagcataaagaaaaagaaaaacaaggaaggagtaggtcgggaagttctagtagtggtagttccagtagcaatagcagaactagtagtactagtagtactgtctctagctcttcatacagttctagctcaggtagtagtcgtacttcttctcggtcttcttctcctaaaaggaaaaagagacacagtaggagtagatctccaacaatcaaagctagacgtagcaggagtagaagctattctcgcagaattaaaatagagagcaatagggctagggtaaagattagagatagaaggagatctaatagaaatagcattgaaa

SEQ ID NO: 3852 - DNA, 467 bp, Homo Sapiens
tttttttttaacctattaaattgacagattctttcatgcatagtgaaactggtaaggggacaaggaaatgaaccctctaatagcctctagtgaggttatggtggtggagggaacaagcaaaaagcctagagttcataatctttaacctaagttgcacttctaggaaaccaagtgttgtgtaaaaagacatgtaacacatctatataagtattcactacaagcatcgataccagcaaaaaaaagaggaaaaactgaaaatactgattacatagctatggtacacagaatactacagttagcagttagcaagtaaacatgtggaacaaacacatagaaaaacaatcagtgtgaagtcaaaaaagcaggtgatgaaacagcatgtgtcatttcattagatatatattttattgtatttctatctgtccatgtcagcagccacctacctccatggtcactggtactcagaa

SEQ ID NO: 3853 - DNA, 468 bp, Homo Sapiens
ttaaataaaatgtaccagctctttcggggaactgcctgaaagttttggtactcatgatcctgaagtaattaacttattttattcccaaaggttgtctgcagatcgttttactgtggaggttaatgctgtgacaataatagaatcaggaggttatgtcaaacagcgatgggtgagagcaaccagcctcagtcctttgagctgtccatagataaagctaaaaaggtgataccacacagccctcacatctgcatttgattttgccaagtataactcagctgtggatcctgttatggaacagaccaatagaaaaacatccttctggacacagagcaggaactctggcctggcagacagggaaaaattccataatgcctggcaaagttctttagtaccacaggctattctcccagctcaaaaaaaatccttggaaaagggcaggtaactcaccagaaaaatgccaacttctcc

SEQ ID NO: 3854 - DNA, 351 bp, Homo Sapiens
gagggctatgcggcgggggagacggggcaggcccctcctcctttgtccgccctgccctcccattggtcctagcggggggccgggggcggacaccggcgcggggccggagcatcgcggctcaggctgcgggaaagcggtgcgcgtgcagcggggtggggtgccctggtccgcgggcgagctcgagcagccaaccccgggcgcgtcggggccatggacggcctgaggcagcgcgtggagcacttcctggagcaaaggaacctggtcaccgaagtgctgggggcgctggaggccaagaccgggttggagaaagcggtatcttgcttgcagaagccgtcactctgctaagcctgt

SEQ ID NO: 3855 - DNA, 471 bp, Homo Sapiens
tttcatttttaaaaagtgattttatttctatatactagtaatgaatgtttgaaaatttaaaaaccactaccattgacaacagtagaaaatatataaaatatttggtataaatataaaatatgtccaggatctgtatgctgaaagtggaaaaaaaagcaagaccaaaataaatatacagctatatcatgtttgtggcctaaagacaaaatattgtgaggatgtaaattttcttcaaattcatctatagttctaactcaacagatatactagcagaattttttatagaaagcaacaattctaaaatttctggaaaagcaaagtagtaatcaacacgatttttgagacggacgaagttgtacacactatctaattttaagacttcctatgattaggaaagtgtggtatttgtgaatggataacaatggaacagaataggcagcccagaattagacccaaacaaatataatcaat

SEQ ID NO: 3856 - DNA, 332 bp, Homo Sapiens
  misc_feature (332)..(332): n is a, c, g, or t
ggtctcgggctcctgccccgtcctgctcacgagttcagggctcctgggcggccgccttttccagttccaggtgtgcagaggtgttttctccccacgcgcggcgtgctgcacttggtcgctggctccgagatcgcgcggggccgccggaagcccaagacggtaccgggggccgcagccgcagccggcgccgccctccgccctccccaacagcaggccgagtcccgtagcatccggtagggaaatggtcgtgctttcggtccccgccgaagtcaccgtgatcctgttagatatcgaaggtaccacaaccccgattgctttcgtgaaggacattn

SEQ ID NO: 3857 - DNA, 3802 bp, Homo Sapiens
aaaaaaaaaaaactttagagaaaggaagggccaaaactacgacttggctttctgaaacggaagcataaatgttcttttcctccatttgtctggatctgagaacctgcatttggtattagctagtggaagcagtatgtatggttgaagtgcattgctgcagctggtagcatgagtggtggccaccagctgcagctggctgccctctggccctggctgctgatggctaccctgcaggcaggctttggacgcacaggactggtactggcagcagcggtggagtctgaaagatcagcagaacagaaagctgttatcagagtgatccccttgaaaatggaccccacaggaaaactgaatctcactttggaaggtgtgtttgctggtgttgctgaaataactccagcagaaggaaaattaatgcagtcccacccactgtacctgtgcaatgccagtgatgacgacaatctggagcctggattcatcagcatcgtcaagctggagagtcctcgacgggccccccgcccctgcctgtcactggctagcaaggctcggatggcgggtgagcgaggagccagtgctgtcctctttgacatcactgaggatcgagctgctgctgagcagctgcagcagccgctggggctgacctggccagtggtgttgatctggggtaatgacgctgagaagctgatggagtttgtgtacaagaaccaaaaggcccatgtgaggattgagctgaaggagcccccggcctggccagattatgatgtgtggatcctaatgacagtggtgggcaccatctttgtgatcatcctggcttcggtgctgcgcatccggtgccgcccccgccacagcaggccggatccgcttcagcagagaacagcctgggccatcagccagctggccaccaggaggtaccaggccagctgcaggcaggcccggggtgagtggccagactcagggagcagctgcagctcagcccctgtgtgtgccatctgtctggaggagttctctgaggggcaggagctacgggtcatttcctgcctccatgagttccatcgtaactgtgtggacccctggttacatcagcatcggacttgccccctctgcgtgttcaacatcacagagggagattcattttcccagtccctgggaccctctcgatcttaccaagaaccaggtcgaagactccacctcattcgccagcatcccggccatgcccactaccacctccctgctgcctacctgttgggcccttcccggagtgcagtggctcggcccccacgacctggtcccttcctgccatcccaggagccaggcatgggccctcggcatcaccgcttccccagagctgcacatccccgggctccaggagagcagcagcgcctggcaggagcccagcacccctatgcacaaggctggggaatgagccacctccaatccacctcacagcaccctgctgcttgcccagtgcccctacgccgggccaggccccctgacagcagtggatctggagaaagctattgcacagaacgcagtgggtacctggcagatgggccagccagtgactccagctcagggccctgtcatggctcttccagtgactctgtggtcaactgcacggacatcagcctacagggggtccatggcagcagttctactttctgcagctccctaagcagtgactttgaccccctagtgtactgcagccctaaaggggatccccagcgagtggacatgcagcctagtgtgacctctcggcctcgttccttggactcggtggtgcccacaggggaaacccaggtttccagccatgtccactaccaccgccaccggcaccaccactacaaaaagcggttccagtggcatggcaggaagcctggcccagaaaccggagtcccccagtccaggcctcctattcctcggacacagccccagccagagccaccttctcctgatcagcaagtcaccggatccaactcagcagccccttcggggcggctctctaacccacagtgccccagggccctccctgagccagcccctggcccagttgacgcctccagcatctgccccagtaccagcagtctgttcaacttgcaaaaatccagcctctctgcccgacacccacagaggaaaaggcgggggggtccctccgagcccacccctggctctcggccccaggatgcaactgtgcacccagcttgccagatttttccccattacacccccagtgtggcatatccttggtccccagaggcacaccccttgatctgtggacctccaggcctggacaagaggctgctaccagaaaccccaggcccctgttactcaaattcacagccagtgtggttgtgcctgactcctcgccagcccctggaaccacatccacctggggaggggccttctgaatggagttctgacaccgcagagggcaggccatgcccttatccgcactgccaggtgctgtcggcccagcctggctcagaggaggaactcgaggagctgtgtgaacaggctgtgtgagatgttcaggcctagctccaaccaagagtgtgctccagatgtgtttgggccctacctggcacagagtcctgctcctgggaaaggaaaggaccacagcaaacaccattctttttgccgtacttcctagaagcactggaagaggactggtgatggtggagggtgagagggtgccgtttcctgctccagctccagaccttgtctgcagaaaacatctgcagtgcagcaaatccatgtccagccaggcaaccagctgctgcctgtggcgtgtgtgggctggatcccttgaaggctgagtttttgagggcagaaagctagctatgggtagccaggtgttacaaaggtgctgctccttctccaacccctacttggtttccctcaccccaagcctcatgttcataccagccagtgggttcagcagaacgcatgacaccttatcacctccctccttgggtgagctctgaacaccagctttggcccctccacagtaaggctgctacatcaggggcaaccctggctctatcattttccttttttgccaaaaggaccagtagcataggtgagccctgagcactaaaaggaggggtccctgaagctttcccactatagtgtggagttctgtccctgaggtgggtacagcagccttggttcctctgggggttgagaataagaatagtggggagggaaaaactcctccttgaagatttcctgtctcagagtcccagagaggtagaaaggaggaatttctgctggactttatctgggcagaggaaggatggaatgaaggtagaaaaggcagaattacagctgagcggggacaacaaagagttcttctctgggaaaagttttgtcttagagcaaggatggaaaatggggacaacaaaggaaaagcaaagtgtgacccttgggtttggacagcccagaggcccagctccccagtataagccatacaggccagggacccacaggagagtggattagagcacaagtctggcctcactgagtggacaagagctgatgggcctcatcagggtgacattcaccccagggcagcctgaccactcttggcccctcaggcattatcccatttggaatgtgaatgtggtggcaaagtgggcagaggaccccacctgggaacctttttccctcagttagtggggagactagcacctaggtacccacatgggtatttatatctgaaccagacagacgcttgaatcaggcactatgttaagaaatatatttatttgctaatatatttatccacaaaaaaaaaaaaaaaaaa

SEQ ID NO: 3858 - DNA, 960 bp, Homo Sapiens
cattgaggaatcattattagtaaagaggcaagttacctctcaacacagattttgtttttaaacctcacagtcttgccaggtgtcattgtcctcattttataaacaagaagagtgaagttcatacatggtgagcaggttgttcaaaagcacacccctaagaagtgacagggccaggactcatctcttcccttctcaacacttcctctcctccttgctgggtggggtggcaggcagagggagaacctgcaaattaacattgtgtcattatttgggttctgaagtccctagatggtcttttatggtcttttatacttatggagagaaataggtggaaatatgtctcctccatgttcctggttttaacttcatatcactgaaagaggcactgaagaggtaggaaaaacagtcttgaagccccgacaccatccttccctcatccgcagcagtgcagcatggtgtggagagtatttctgggtgacaaacacacccacacggttgggtagttgccgtctcccggggagctccagaagtgtaagctctcagccctccctctgacttcagaagcctgaagctactaagcccgcagcccggtgcgtctcttcgcagccttaatcagtgcccgggcaaaggcctgcagagaattctctgggcctcgcaccaggcccaagaacacactggagactcgtttcgccttctcccctcgccgtttcccccctccaggccgagtccgggggaagcccgatagcggttctccggctcgaacacaactacaacactggggagcttgcctgcagttagcgtcagcgggattggccttcggttctcatcttcaactcttcctcggcgggccagctcaagcggccgtgttacgttcgggatccgcgggcgccgtttggcctgtcttttcccatggtgggcgcgtcgggatgtccccggagacgggggcgtttggaaggggcg

SEQ ID NO: 3859 - DNA, 1009 bp, Homo Sapiens
gcgcgggggagccattaggaggcgaggagagaggagggcgcagctcccgcccagcccagccctgcccagccctgcccggaggcagacgcgccggaaccgggacgcgataaatatgcagagcggaggcttcgcgcagcagagcccgcgcgccgcccgctccgggtgctgaatccaggcgtggggacacgagccaggcgccgccgccggagccagcggagccggggccagagccggagcgcgtccgcgtccacgcagccgccggccggccagcacccagggccctgcatgccaggtcgttggaggtggcagcgagacatgcacccggcccggaagctcctcagcctcctcttcctcatcctgatgggcactgaactcactcaagtgctgcccaccaaccctgaggagagctggcaggtgtacagctctgcccaggacagcgagggcaggtgtatctgcacagtggtcgccccacagcagaccatgtgttcacgggatgcccgcacaaaacagctgaggcagctactggagaaggtgcagaacatgtctcaatccatagaggtcttggacaggcggacccagagagacttgcagtacgtggagaagatggagaaccaaatgaaaggactggagtccaagttcaaacaggtggaggagagtcataagcaacacctggccaggcagtttaagggctaacttaaaagagttttttcaatgctgcagtgactgaagaagcagtccactcccatgtaaccatgaaagagagccagagagctttttgcaccatgcatttttactattattttccaatacttagcaccatttcactaaggaaccttgaatacaaccaggatcctcctttgcatgcgactgtagctgcatttcatgaatagtttgaacccttgtcaatgcattttttgaaaaagaaagaaaaaaaaaacttcgtgtatgtgactcaaagcatgtaaccttaagatgttgcattctaaactgacaataaagacctttcccc

SEQ ID NO: 3860 - DNA, 371 bp, Homo Sapiens
aaggatgggaagccgagcagacggccccagaacaagcggtcatgtgactgggaagatggccgtctttccttggcactccaggaataggaactacaaagctgaatttgcatcatgccgactggaggctgtaccattggagtttggggactatcaccctctgaaacccataactgtcacagagtcaaagacaaagaaagtgaaccggaaaggaagcacttcttccacgtcctcctcctcctccagctccgtggtggacccgctgagcagcgtcctcgatgggactgaccccctctccatgtttgcagccactgctgaccccgcagccttggcagctgccatggacagctccagaaggaaacgtgatagagatg

SEQ ID NO: 3861 - DNA, 2025 bp, Homo Sapiens
cggcacgaggcaccccgagaggagaagcgcagcgcagtggcgagaggagccccttgtggcagcagcactacctgcccagaaaaatgctggaggctgggcgtggccccaggcctggggacctgtttttcctgtttcccgcagagttccctgcagcccggtccaggtccaggcgtgtgcattcatgagtgaggaacccgtgcaggcgctgagcatcctgacctggagagcaggggctggtcagggcgatggcagcagacctgggcccctggaatgacaccatcaatggcacctgggatggggatgagctgggctacaggtgccgcttcaacgaggacttcaagtacgtgctgctgcctgtgtcctacggcgtggtgtgcgtgcttgggctgtgtctgaacgccgtggcgctctacatcttcttgtgccgcctcaagacctggaatgcgtccaccacatatatgttccacctggctgtgtctgatgcactgtatgcggcctccctgccgctgctggtctattactacgcccgcggcgaccactggcccttcagcacggtgctctgcaagctggtgcgcttcctcttctacaccaacctttactgcagcatcctcttcctcacctgcatcagcgtgcaccggtgtctgggcgtcttacgacctctgcgctccctgcgctggggccgggcccgctacgctcgccgggtggccggggccgtgtgggtgttggtgctggcctgccaggcccccgtgctctactttgtcaccaccagcgcgcgcgggggccgcgtaacctgccacgacacctcggcacccgagctcttcagccgcttcgtggcctacagctcagtcatgctgggcctgctcttcgcggtgccctttgccgtcatccttgtctgttacgtgctcatggctcggcgactgctaaagccagcctacgggacctcgggcggcctccctagggccaagcgcaagtccgtgcgcaccatcgccgtggtgctggctgtcttcgccctctgcttcctgccattccacgtcacccgcaccctctactactccttccgctcgctggacctcagctgccacaccctcaacgccatcaacatggcctacaaggttacccggccgctggccagtgctaacagttgccttgaccccgtgctctacttcctggctgggcagaggctcgtacgctttgcccgagatgccaagccacccactggccccagccctgccaccccggctcgccgcaggctgggcctgcgcagatccgacagaactgacatgcagaggataggagatgtgttgggcagcagtgaggacttcaggcggacagagtccacgccggctggtagcgagaacactaaggacattcggctgtaggagcagaacacttcagcctgtgcaggtttatattgggaagctgtagaggaccaggacttgtgcagacgccacagtctccccagatatggaccatcagtgactcatgctggatgaccccatgctccgtcatttgacaggggctcaggatattcactctgtggtccagagtcaactgttcccataacccctagtcatcgtttgtgtgtataagttgggggaattaagtttcaagaaaggcaagagctcaaggtcaatgacacccctggcctgactcccatgcaagtagctggctgtactgccaaggtacctaggttggagtccagcctaatcaagtcaaatggagaaacaggcccagagaggaaggtggcttaccaagatcacataccagagtctggagctgagctacctggggtgggggccaagtcacaggttggccagaaaaccctggtaagtaatgagggctgagtttgcacagtggtctggaatggactgggtgccacggtggacttagctctgaggagtacccccagcccaagagatgaacatctggggactaatatcatagacccatctggaggctcccatgggctaggagcagtgtgaggctgtaacttatactaaaggttgtgttgcctgctaaaaaaaa

SEQ ID NO: 3862 - DNA, 2948 bp, Homo Sapiens
atttggaggaaagtggagaaattaaagatatgttacttgagtgcttcataaatattaattatatcaagaaagaagagggaagaagatttcttagttgtctcttcaactggaatatcaacttcatcaaaatgatccacgggaccattaaaaaccagttacagggattacaaaagtctttgatggtatacattgcagaaatttatttcagagcttggaaaaaggcttcagggaaaatactggaggcgattgaaaatgattgcatccaggacttcatgttccacgggatacaccttccgaggaggtctccagtgcattccaaagtgcgggaggttctgagttactttcaccatcaaaagaaagttcggcagggagtggaagagatgctttatagattatataagcccatcctttggagaggattaaaggccagaaactctgaagttcgatcaaatgctgcattgttgtttgttgaagcatttcctattagggatccaaaccttcatgctattgaaatggatagtaaaatccagaaacagtttgaagagctctatagccttttagaagatccttacccgatggtccgttccacagggatccttggtgtttgtaaaataacttctaagtactgggaaatgatgcccccgaccattcttattgacctcctgaagaaggtgactggggaactggcatttgacacgagctcagctgatgttcgttgttctgtctttaagtgtctgccaatgattttggacaacaaactgagccacccattgttagagcagctccttccagctctcagatacagtctccacgacaattcggagaaagtgagggtagcttttgtggacatgctgttgaagatcaaagctgtgagggctgctaagttttggaaaatatgtcccatggagcacattctggttcgtctggaaactgattctcgacctgtgtctcggcgcctggtgagcctcatctttaattctttcctgcctgtgaatcagccggaggaggtctggtgcgagcgctgtgtcaccctggtgcagatgaaccacgccgctgccaggaggttctatcagtacgcccacgaacacaccgcctgcaccaacatagcaaagctgattcacgttattcgtcattgcttaaatgcctgtatccagagggcagtgagagagcctccagaggacgaggaggaagaggacggaagggagaaggagaatgtgactgttctggacaaaacactgtcagtaaacgatgttgcatgcatggcaggtttactagaaatcattgtgattctctggaaaagtattgacagaagtatggaaaataataaagaggccaaactttacacgattaacaagtttgcctctgtgcttccagagtatctgaaagtatttaaggatgatcgctgcaagatccctttattcatgctaatgtcctttatgccggcctctgctgtccccccattcagctgtggtgtgatttccacgctgagaagccgggaggagggcgctgtggacaagagctactgcactttgttggattgcctctgctcctgggggcaggtggggcacattctggagcttgttgacaactggctgcccacagagcatgcccaggccaagagcaacacagcttctaaaggtagggtgcagatccatgacacacgcccagtcaaacctgaattggcattggtctacattgagtatctgctgactcatccaaagaaccgcgagtgcttgctctctgctcctcggaagaaacttaaccatcttttgaaagcccttgaaacgtcaaaggcagatctggagtcacttctgcagacaccgggtgggaagcctcgtggcttcagtgaagcagctgccccgcgagcctttggtctccactgtcgcctgagcatccatcttcagcacaagttctgctcagaaggaaaggtgtatttgtccatgttggaagacactggcttttggttagaaagcaaaattttatcttttattcaagatcaagaagaagactacctgaagcttcatagggtcatttatcagcaaattatccagacctacctgactgtgtgtaaagatgttgttatggtaggccttggtgaccatcagtttcagatgcaactcttacagcggagtcttggaatcatgcaaacagtgaagggatttttttatgtttcattacttcttgacattctgaaagagataactggaagttccttgattcagaaaacagattcagatgaagaagttgcaatgctgttggacacagtccagaaagtatttcagaaaatgttggaatgtattgcacggagcttcaggaagcagccggaagaaggcctgcgggtttctgacgtagaagagcttacccctccagagcatctttctgatcttccaccattttcaaggtgtttaataggaataataataaagtcttcgaatgtggtcaggtcatttttggatgaattaaaggcatgtgtggcttctaatgatattgaaggcattgtgtgcctcacggctgctgtgcatattatcctggttattaatgcaggtaaacataaaagctcaaaagtgagggaggttgcagccactgttcacagaaaactaaagacattcatggaaattactttggaagaggatagcattgaaagatttctctatgaatcatcatcaagaactctgggagaacttttgaattcataaccaagccaacatctccagacatgtaaaaatagggaaaagtgattcaaattgaaatgcctgtgtattttcctattgtttttaatgttaataacccatataatagggaaagggtgggatttttttgtgggaatgtgggaaggtgggggttatggaggagataactcaaaacttcttcaattttgcctagtgcctgcgtaaataatatatttaatataaaggactccaggtataaaaaaaaaaaaaaaaaaaaaa

SEQ ID NO: 3863 - DNA, 475 bp, Homo Sapiens
  misc_feature (454)..(454): n is a, c, g, or t
gcgtcgacttttttttttcagatgaaggaatattgactgtaataaacattgtacagaacacccagataaaggaatattgactgaaataaacattgtaggctatactccagtagctggggcaatggatccatgtaaatggagctacaaattcaagtcccaagtttttttgctccagcaggttgaccttcaagggctgcatcagtcttcagaaacaggagctgccagcctcaagcagtttgttgcctgggagggagggtggaccacattacccaaatgttaagggttggacacctttctgctgttctttgtgtagctgctgggctcgattttttagcacctcggccttggcctcatccttatcaacaccatcccccagcttgtacatgcgactggcattggcacaggcccagatatgacccaggtcacaggctttcatggagtatttacatgccangtccatgtccttgggaaagcc

SEQ ID NO: 3864 - DNA, 388 bp, Homo Sapiens
tttttttttttttttttcaggtttgggggttcacaagcccccattgccggcgaggggtgacggatgcgcacgatcggcgttccccccaccaacaggaaagcgaactgcatgtgtgagccgagtcctgggtgcacgtcccacagctcagggaatcgcgccgcgcgcggggactcgctccgttcctcttcctgcggcctgaaaggcctgaacctcgccctcgcccccgagagacccgcggctgacagagcccaactcttcgcggtggcagtgggtgcctccggagaagccccgggccgaccgcgggctccaggcggggttcgggggctgggcaggcgacccgccgcaggtccccgggaggggcgaacgggccagcagctgacattttttg

SEQ ID NO: 3865 - DNA, 363 bp, Homo Sapiens
ttttttttttttttcgtttcacaccgtttttattgaccgatcgcagcccagcaagattgatcgagctggaatgggaagggacttctcctcccccaggcccagctcgccagggcctcgggccgtgctgcagtttctggcctttggtgtcgctccccgccccccagccccgcagattcccggcttcttttctgtctgcgcggccgggaccgcccaggcaggcgccggggctccggggctccggggggagggactcggcggctcggctcggctccgcttctttcttctgcctgcaaatatttgctgcctcgctggaaatccgacgatttcgcgcgcgctctgcttgcaaagtctttaagtaaacac

SEQ ID NO: 3866 - DNA, 545 bp, Homo Sapiens
gctgaatataaggaaatatgtctaatggacaccagttaatactttttaaaactactctttaaaaaaaaaatacgttccccttggttaactgattttttaatccagggtggacattttttcaacctttattaaaaagacaaataaactattttgtagaagatcagactcctacttaactggaagagaaatgtctattaaatgtctctcctctttctctgggtcaagaccatgtaattttatgcttcagagatgaagatactgtttgtttacaaagagtttagtttttaagacatccaaaactctatgctagagcaaaaatcaaatagcaaaggacactagccagaaaatacagtgtgtgtgtgtgcacctgtgtgcctgctgaacaacttgacagtgtaacagataaggtaactgaagatggtggatatttgaattgtattagcttaatgtctacatatctttggccaaaactctattgtcatattagaaacatgttatctttttcatgtttattagtaatttatttttgattctttgttttcttt

SEQ ID NO: 3867 - DNA, 421 bp, Homo Sapiens
tttcacaataattccattctttattttaatgggagtttttaatcagtggattcgcctctatctaaaactaaaatcaaattgtaggtgcaattgttcattggcaatgctaacaacagtgagaatacaaacaaaaactcattgtgagtgaccaaaggtccccaggtatccccttcatcaacatacctgctccaggttcccactgggaattctctggcagagactgattcagttctgaataacatgctgccagccctatctggaaaagggtgtgcaaggcgccttctcgcctcttttacaggaagtttaaacctgatcatctcacctttaggtatatataaatttgttgtttagcactctgagaacttggtattttatctatctaaagagatcaaaaagggcaaaagatggagcgagctgaggc

SEQ ID NO: 3868 - DNA, 452 bp, Homo Sapiens
  misc_feature (431)..(431): n is a, c, g, or t
cacgaggggcttctctgtccaatgcccacccggagctgggaggaggagtctgcgtaatgtgcgtgtgaagagactgggggagctggccggggctcacggtgtttgacccgtcggtcgtgcgtgagaggaaagggaaggaggaggtcccgaatagcggtcgccgaaatgttccggtgtggaggcctggcggcgggtgctttgaagcagaagctggtgcccttggtgcggaccgtgtgcgtccgaagcccgaggcagaggaaccggctcccaggcaacttgttccagcgatggcatgttcctctagaactccagatgacaagacaaatggctagctctggtgcatcagggggcaaaatcgataattctgtgttagtccttattgtgggcttatcaacagtaggagctggtgcctatgcctacaagactatganagaggatgaaaaaagatacaa

SEQ ID NO: 3869 - DNA, 472 bp, Homo Sapiens
agagatagggtcttgctatgttgcccaggctggtctcaaactctgggcctcaagccgtcttccctctcagccttccaaagtgctggaattacagtcgtgagtaactgcacctggccaacatgatgccatttacatgcagcttaaacgcatatacatgtgttgaatcagtgtcatgtgttgatgagggacataaacacatttactaaaagtataaacagttgcatgggaattagtaacttcaaattcataaaattgtattggctatcaggtgagtaggggacaagtggaatgagggaatgagaccagctgggtacccaaatattgctaatgttattgcttaagctgtgtggtgaatacacaggtgttcaatttactattatttcgcactttccgtgtactttagctatttgacaatacatttaaaaatcgaaaacttatcccataatcccaggctccagaggtgatagtaggt

SEQ ID NO: 3870 - DNA, 439 bp, Homo Sapiens
tttttttactgcaaatttaaactgcatgacaataaagaacacaatgcctgctactagtttggtgctattgctcagggttatgctaacgttttaatcagcattgcttttggatatcactgcaaatgttaacacagggaagaaggcaaatgatgacttagtattattatgaaactattctgatctcacagactccatgaaaggagtctattctctaggattccacagactacactttgaaaactgctaggctactctaacacacttgtttaataggtaacctaccaattcatatttatttccaagtttaatgcaaactacttgacagcaaatctcttctttgtacttcgctttaataccccgcaacgatttgaatgtgtcccccagaagttcatctgttggatacttggtgcccaatgcaggcgtgttaagaggcgagacc

SEQ ID NO: 3871 - DNA, 488 bp, Homo Sapiens
tttttttttttttttttttttcctgctcttgggcagtttatgttagtaataacaataatagtaataatagcaataacaatcatagcaaatacatactcagtatgtggcttaccatgtgccacctactgtgttaagtgctctactgtattattaggtaccatcaccccattttacagatgaggaaactgagtcatacagtttaagctatttgcctatggtgacatcactaatcaagcagtagctttagggcccagaatcaggcagtctggttctggagctgacacattgaatcactcagcaaacacttcctcgagtgcctcttttatgcccggcccagtggtaggcggtcctggggacacagtcatgacagtgacagcctcaggtctgctatcttggggctcacagtccactggggatgacaaacaagtcccccacggtgatgacccaaaatgggcaaggctggagtgggagagcctagtggatgcttg

SEQ ID NO: 3872 - DNA, 445 bp, Homo Sapiens
tttttttttttgctgctgaacaaattaacatggtggtatttgaaccttttttttttgctcgcaaaccaccaaaagtgctttttaaaattgcataccctttacccattaagatgacatttaaaaaatatcaccataagattaaataattgcaaagggtgaatttctagaatatcacagtaacattttaaagtaaaactgattatctcattcttttaaatgtataattattaccagcatatggttggccaaaaaatataccctgataacataaaaaaaaaaagcaactttattggaaatatctctcttaaggaaatggatggggaagtgccaggattaaaagaggctttccctaacactatagtggtattttaaattatccctttgtaggccaaggcgcggtgcctgtaatcccagccttgtattttgttttaactagagaggcatg

SEQ ID NO: 3873 - DNA, 125 bp, Homo Sapiens
  misc_feature (59)..(59): n is a, c, g, or t
  misc_feature (109)..(109): n is a, c, g, or t
  misc_feature (116)..(116): n is a, c, g, or t
  misc_feature (121)..(121): n is a, c, g, or t
tgacagaccccagcgccgactgagcctctaaagcgacttcagatctgtcccaccaacancaccgcgcgcccgggaacagacgctccgggaagaaacctgaggggacttnggggggnacganggac

SEQ ID NO: 3874 - DNA, 255 bp, Homo Sapiens
gagaagacgacagaagggatcgtcgaaacagcctgccagcagcgcctcagtgcccgagctggtcccctgccattccgggacctctctggagtacacttcggagtccaccaccgagatcacctgcagctggccacaccacaggcccccgtgcctgcagcactactggtgcctgaaacacctggcctgctaggaggctccaataaagctaacccggaccaaaaaaaaaaaaaaaaaaaaaaaaaaaagtcgtatcga

SEQ ID NO: 3875 - DNA, 1163 bp, Homo Sapiens
agatccagcaggtgcgcgaaaccgcggcgcgccgccctccgccgttatatgaggccccgctccggccccacgcggaacccgcggctccgagccttcgccggcgtcccgacccgaggccggacccgaggccagtcccgccgctgcgcagccgaagccagtgcggggcctgagagggacgcgcgccccggggcccccgccgcgggcaccatgggcgctgcccactccgcgtctgaggaggtgcgggagctcgagggcaagaccggcttctcatcggatcagatcgagcagctccatcggagatttaagcagctgagtggagatcagcctaccattcgcaaggagaacttcaacaatgtcccggacctggagctcaaccccatccgatccaaaattgttcgtgccttcttcgacaacaggaacctgcgcaagggacccagtggcctggctgatgagatcaatttcgaggacttcctgaccatcatgtcctacttccggcccatcgacaccaccatggacgaggaacaggtggagctgtcccggaaggagaagctgagatttctgttccacatgtacgactcggacagcgacggccgcatcactctggaagaatatcgaaatgtaaagtggtcgaggagctgctgtcgggaaaccctcacatctagaaggagtccgctcgctccatcgccgacggggccatgatggaggcggccagcgtgtgcatggggcagatggagcctgatcaggtgtacgaggggatcaccttcgaggacttcctgaagatctggcaggggatcgacattgagaccaagatgcacgtccgcttccttaacatggaaaccatggccctctgccactgacccaccgccacctccgcggagagactgcactttgcaatggggccgcctccccgcgtagctggagcagcccaggcccggcggacagcctcttcctgcagcgccggtacatagccaaggctcgtctgcgcaccttgtgtcttgtagggtatggtatgtgggacttcgctgtttttatctccaataaaaaaaaaaaaaaaaggtttgttaattaaaaaaaaaaaaaaaaagaaaaaaaaaaaaaaaaaaaaaaaaaaaaaagaaaaaaaaaaaaaaaaaaaaaaaaaaaaaaaaaaaaaaaaaaaaaaa

SEQ ID NO: 3876 - DNA, 389 bp, Homo Sapiens
gagtatcttcatcttaaaatgggatgtgcagtgtaaggattaaggcagtaaagtatagaggctaagccgtgtgctatagcactggagctatcttacccaggtttgaatctagcttggccattttctagctatgtggccttgggtatgtttaaccttactttgcttcatcttgctcatttgtacaagcactgctcgttttattgcatttcactttattgcacttcacatatattgcatttcttacaaattgaaagtttttggcaaccttgtgtgggataagtctattggtgccatttttctaacagcatgtactcacttcatgtctctgtgtcagcattttttagcaataaagtattttttaaatcaaaaaaaaaaaaaaaaaaaaaaag

SEQ ID NO: 3877 - DNA, 3211 bp, Homo Sapiens
atcggaaaagcaccttgagttactggcttcccctttacctattccatcaaccttccttccacacagtagtactcccgctttgcatcttacagttcagaggctaaagttgccaccaccacagggatcttctgagagctgcacagttaacatcccacaacaaccacccggaagcctgagcatcgcatcaccaaacactgcctttattcctatccataacccaggtagtttcccaggctctcctgttgctaccacggaccccatcacaaaatctgcatcccaagtggtaggactcaatcaaatggtgcctcaaattgagggaaacacagggacagtccctcagcctaccaatgtgaaggtagttcttccagcagctggcctctcagctgctcagccaccagcttcctaccccttaccaggctctccccttgctgccggcgtgttacccagccagaactccagtgtgctcagcacagcagcaacttctccccagccagcgagcgcaggtatcagccaggcccaggcaactgttcctcctgcagttcctacccacaccccaggccctgccccgagcccaagccctgccttgacacacagtaccgcgcagagtgacagcacctcttacatcagtgctgtggggaacacgaacgctaatgggacagtagtgccaccgcagcagatgggctcaggtccttgtggttcttgtgggcgaaggtgcagctgtgggaccaatggaaaccttcagctaaatagttactattatcctaatccaatgcctggaccaatgtaccgagtcccttcattctttactctgccatccatttgcaatggcagctacctcaaccaagcacatcagagcaatggaaaccaacttcctttttttctgcctcagactccatatgcaaatggactggtacatgacccagtcatggggagccaagccaactatggcatgcagcagatggcaggatttgggagattctatcctgtatatccagcacctaacgtagttgccaacaccagtggttcggggcccaagaagaatgggaatgtctcatgttacaattgtggtgtaagcggacactacgcacaggactgtaagcagtcgtccatggaggccaatcaacaaggcacttacagactgagatacgcacctcccctccccccttctaatgatacgttggattctgcagactgaaacgagtaaagcttgcctacttaatacactcaagtgtggggagtcatggggtgtggaggggaggaaaggaaaggtattttgtttctttgtctatacatttcctagatttctatgcagttgggatttttcatttctcttgtaccaatgtccaaaacaagaaagaatgcaatgcttttgagcctctggtctcctggttcaacaacaggcttatatgtatgatacatgtaatttaaaccttcagacaaacttaaatgttggtgcgtgcttttttttttttttacactgaatacttgctgtgtgcaatgtttactgaatctttaaaactgtgtatttgaccttttttttacaacactggtgacagtcatatggttttgaaaaaaaaaagaaattttgcttcttcccagcttttctcactttcaccctaaacgacacttcctccccagccagcctcactctgtctccggcccgcagcaggagcagccagcagtgcattcaccccacttttgtaaactgctctgcatataaaccaagggcagaatgtttcaccctgatcttatgggaggaatcgaactcccaaaatagtgtgtatatatgtaataaacagcgtcacgtaaatacatatatgcagtgcttgttgtccaaatagaaatgaaaataagtggaagagagaggaagaagtcaaccatatgaaactgaaaaaatatgacgtacgaaatggacaaaaagctttttctgaaaccaactttttacttccatcatccttttttagcctgttgcttcagagagacacaaagtgaacacactggtgtgaatgtcgctctctgtgtgcttgtgtttgtaatgaaagtctacagccaattttacttgtctaccaccgtgttgtgctcaaagagacactacttgagtgaagatttcttctttccctgtaccagctgttacagtgttacgttgtgtttaaaatgtgtatggtttattgcaatctgaacagagctatgggtttctaccataagtcaggttgtttgttccctaacctgtctctcgtagcaaagtcacttttataacagtttaccactatgcttgattataatgtgaaaggcggaattctgagtgtgttaagatggtattaatcatgtcggtgtcatgtcactaagtttaatgctgctgtttttaaaaaaaaaaaaagtttttttaaaaagccaatctatgtactaaattgcttccaggtaatttttgatttcctaaagtgcactgaggttatctggaagattgggtgtattttttggtgactgctgcattcatcagcaatgaacagtttccactgtatagtcctaggggtcagggggtgggggtttcattttccattcctcagcacagagcagaaatgatagatttttattgtttggagtaacgttggtatgcagcagaggaacataaacatttggtcttggttcagaagcctaacagattgctagacaagagaaaaaacttgaagaaaaaagaagcttaatttcatgcttcataagtagcatttatatttatagcaccaatgtacattttgaaactttctttcaggggtgggagttatggggaaggggtgggtgtgaaggggtagatgaaagctttaatttagaaagaaagttcaagtaaaggaaattattttgattaaatatattttatttgatctgggtatttttggaccacattattaaattaattgttaagctgcagttgagttgttcaagtgagagttttgataagccacttatgggccgcgttgtgaatcacttgccagttgtactttatggagcttattttatgatttaaaatactgtactgtacataggaggtatgttaccttctccttatttgtatgtttaccatatactttgatatttgaaatgttatgtactggaaaggccacttatatttctagaacagattggattttatgcaaccttttttccttgaattaacagcaataaaaaaatgaaaaacaaaaaaaaaaaaaaaaaaaaa

SEQ ID NO: 3878 - DNA, 139 bp, Homo Sapiens
gcacatgcagtctgcacgccactcttgggctctgctggcggagatccccttccttctgggtgcagactgactccggatgcagttttgatgtccatcttccaggagagagacggtctcgggtccagggagtggagggggc

SEQ ID NO: 3879 - DNA, 2472 bp, Homo Sapiens
caagcagggcctacaagccgaggagggctgtttaaaggcgcaggggccattttaccctccaggttggccctgctcaggaccaggaggaaacacctccagcccgcgacctcctcccacagggggaaaaggaaagcaggaggaccacagaagctttggcaccgaggatccccgcagtcttcacccgcggagattccggctgaaggagctgtccagcgactacaccgctaagcgcagggagcccaagcctccgcaccggattccggagcacaagctccaccgcgcatgcgcacacgccccagacccaggctcaggaggactgagaattttctgaccgcagtgcaccatgggaagctctgaagtttccataattcctgggctccagaaagaagaaaaggcggccgtggagagacgaagacttcatgtgctgaaagctctgaagaagctaaggattgaggctgatgaggccccagttgttgctgtgctgggctcaggcggaggactgcgggctcacattgcctgccttggggtcctgagtgagatgaaagaacagggcctgttggatgccgtcacgtacctcgcaggggtctctggatccacttgggcaatatcttctctctacaccaatgatggtgacatggaagctctcgaggctgacctgaaacatcgatttacccgacaggagtgggacttggctaagagcctacagaaaaccatccaagcagcgaggtctgagaattactctctgaccgacttctgggcctacatggttatctctaagcaaaccagagaactgccggagtctcatttgtccaatatgaagaagcccgtggaagaagggacactaccctacccgatatttgcagccattgacaatgacctgcaaccttcctggcaggaggcaagagcaccagagacctggttcgagttcacccctcaccacgctggcttccctgcactgggggcctttgtttccataacccacttcggaagcaaattcaagaagggaagactggtcagaactcaccctgagagagacctgactttcctgagaggtttatggggaagtgctcttggtaacactgaagtcattagggaatacatttttgaccagttaaggaatctgaccctgaaaggtttatggagaagggctgttgctaatgctaaaagcattggacaccttatttttgcccgattactgaggctgcaagaaagttcacaaggggaacatcctcccccagaagatgaaggcggtgagcctgaacacacctggctgactgagatgctcgagaattggaccaggacctccctggaaaagcaggagcagccccatgaggaccccgaaaggaaaggctcactcagtaacttgatggattttgtgaagaaaacaggcatttgcgcttcaaagtgggaatgggggaccactcacaacttcctgtacaaacacggtggcatccgggacaagataatgagcagccggaagcacctccacctggtggatgctggtttagccatcaacactcccttcccactcgtgctgcccccgacgcgggaggttcacctcatcctctccttcgacttcagtgccggagatcctttcgagaccatccgggctaccactgattactgccgccgccacaagatcccctttccccaagtagaagaggctgagctggatttgtggtccaaggcccccgccagctgctacatcctgaaaggagaaactggaccagtggtgatgcattttcccctgttcaacatagatgcctgtggaggtgatattgaggcatggagtgacacatacgacacattcaagcttgctgacacctacactctagatgtggtggtgctactcttggcattagccaagaagaatgtcagggaaaacaagaagaagatccttagagagttgatgaacgtggccgggctctactacccgaaggatagtgcccgaagttgctgcttggcatagatgagcctcagcttccagggcactgtgggcctgttggtctactagggccctgaagtccacctggccttcctgttcttcactcccttcagccacacgcttcatggccttgagttcaccttggctgtcctaacagggccaatcaccagtgaccagctagactgtgattttgatagcgtcattcagaagaaggcgtccaaggagctgaaggtggtgaaatttgtcctgcaggtccctcgggagatcctggagctggagcatgagtgtctgacaatcagaagcatcatgtccaatgtccagatggccagaatgaatgtgatagttcagaccaatgccttccactgctcctttatgactgcacttctagccagtagctctgcacaagttagctctgtagaagtaagaacttgggcttaaatcatgggctatctctccacagccaagtggagctctgagaatacaacaagtgctcaataaatgcttgctgattgactgatggaaaaaaa

SEQ ID NO: 3880 - DNA, 4648 bp, Homo Sapiens
gaggagcggctccggccgccgcgcctgacccttgtccggggtcttccgcacagtgggctgagggccatgtcagttttctgccacctacaggatagaccatgaagctgaaggaacttgagcggccagctgtccaggcatggagcccagccagccaataccctttgtatctggccacaggaacatctgcccaacagctagattcctccttcagcacaaatggcacattggaaatatttgaggttgatttcagggacccttctctggacttgaaacacagaggagtcctttctgccttgagcaggtttcacaagctggtctgggggagctttggcagtgggcttctggaaagctccggggttattgttggcggcggggacaatggcatgcttattctatacaatgtgacccacatcctgtcttcggggaaggagcctgtgattgctcagaaacagaagcacacgggggctgtcagagccctcgacttgaatcctttccagggcaacctcctggcttcaggggccagcgattctgaaatcttcatttgggatctgaataacttgaatgtgccaatgaccctgggatccaagtcacagcagcctccagaggacatcaaggcactgtcttggaaccggcaagcccaacacattctgtcttctgctcaccccagtggcaaggcagttgtgtgggatctcaggaagaatgaacctatcatcaaagtcagtgatcacagcaacaggatgcactgctcaggcctggcctggcatcctgacatagccacccagttagtgctgtgctcagaggatgatcgacttcccgtgattcagctgtgggacttgcgctttgcctcctcgcccttgaaggtgctggagagccacagcagggggatcttgtcagtgtcatggagccaggctgatgctgagctgctgctcactagtgctaaggacagccagatcttgtgccggaacctggggagcagtgaggtggtatataagctaccaacacagagcagctggtgctttgatgtgcagtggtgccctcgggacccttcagtgttctctgctgcctccttcaacggctggatcagtttgtactctgtgatgggtaggagctgggaagtccagcatatgagacaggctgacaagatctcctcttccttcagcaaaggccagcctctcccaccactgcaggtgccagagcaagtggcacaagcaccactgatacctcccctgaaaaaaccccccaaatggattagaagaccaacaggtgtttcatttgcttttggagggaagctggttacttttggcctccccagcacccctgcccatctggtgccacagccttgcccccgcctagtcttcatcagtcaagtcaccacagaatctgaattcctgatgcgatcagctgagctgcaggaggccttgggatcaggaaatctactgaattactgtcagaacaagagccagcaagctttactgcaaagtgaaaagatgctgtggcagttcctgaaggtgaccttagagcaagactccagaatgaaattcctaaagcttttaggatacagtaaagatgagcttcagaagaaggtggccacatggttgaagagtgacgtggggctaggtgagagtcctcagcccaagggaaatgacctcaacagtgacagacaacaggccttctgcagccaggcctccaaacacaccacaaaggaagcctctgcttcctcagccttctttgatgagctggtccctcagaacatgactccttgggagatccccatcacaaaagatattgatggactcctaagccaggctctcctgcttggggaactgggtccggccgtggagctgtgtctgaaggaggagcgctttgctgatgccattatcctggcccaggctgggggtacagatctgctgaagcaaacacaggagcgctacttggccaagaagaaaaccaaaatctcctcgcttctagcctgtgttgtgcaaaagaattggaaggatgtggtgtgtacctgtagcctgaagaactggagagaggcactggctttgctactgacatactcaggcacagagaaatttcccgagctctgtgacatgctgggaactcgcatggaacaggagggcagcagggcactaacctccgaagccagactctgttatgtgtgctcagggagtgtggagcggctggtggagtgctgggcaaaatgccaccaggctttgtcccccatggctctgcaggacctgatggagaaggtgatggttcttaacaggagcttggagcaactgcggggtcctcatggggtgagcccaggccctgccacaacctacagggtcactcagtatgccaacctcctggcagcccagggcagcctggccactgccatgagctttctacccagggactgtgctcagccaccagttcagcagctaagagatcggctttttcatgctcaaggttctgctgtcttgggccaacagtctccccctttccccttcccccggattgttgtgggagctaccctccactctaaagagacatcatcttacagattgggatcccagccttctcaccaggtcccaactccatctccaaggccaagggttttcacccctcagtcatcaccagcgatgcccttggcaccttcccatcctagcccttatcagggtcccaggacacagaatataagtgactacagggcacctgggccccaggccatccagcctttgcctttgagccctggggtaaggcctgcttcatctcagccacagctattaggagggcaaagggtgcaagttcctaacccggtgggattccctgggacatggcctcttcctggttcccctctacccatggcatgcccaggcatcatgcgacctggctctacctccctgcctgagactcctagactgttccctctgcttcctctgagaccactaggtcccggccgcatggtctcccacaccccagcccctcctgcaagcttccctgtgccataccttccaggggacccaggtgccccatgctctagtgtcctcccaaccactggcatcttgactcctcacccaggacctcaagattcctggaaagaagccccagcccccaggggaaacctccagaggaacaagctgccagagacatttatgcccccagcaccaattactgctccagttatgagcctcacccctgagctacaagggattcttccctcacagccccctgtctccagtgtgagtcatgctcccccaggagttccaggagaactcagcctgcagcttcagcacctgccacctgagaagatggaaaggaaggagctgcccccagagcatcagtccttgaagagcagctttgaggcgcttctccaacgctgctccctgtctgcaactgacttaaagacaaaaaggaagctggaagaggcagcccagcgtctggagtatctatatgagaagctctgtgaggggacactctcacctcatgtcgtggctgggctccatgaggttgcccgatgtgtggatgcaggaagctttgagcagggccttgcagtgcatgcccaggtggcgggctgtagcagcttcagcgaggtgtccagcttcatgcctatcctgaaggctgtcctcatcatcgctcataagctgctggtctaaaccaggcagcctctcttgctaggaggccacttctgctgttacataactcctccctgcagaagaggggacttctgcaacagattctgtttctttttcccgactcttttccttgctgccaggtatgtgatgctgtaggcttggctccaaaccagctgagtgcctgctttttactcctttatgtctggccttctaggatctgtccaagacactctcaggcctggaggcagggcatagaatcagttcttcactctccctaatactacactctgtaaggacctggggcaggatatcttctcccccagggatcttctatttaagtggcttctgagagggtgaacaggattgttacttttaagcctacctctgctgtgacccatcatgtgggtcttttgtttctcccttctgtggtttatgagcctgcccttaccttttccctgcctctgacttggtatttccaggtccgtatttctctgtagcccagggtctggggtagagctgactgctgttcaccctttgaacaactcatggacgtgagggatgggtgctgagcagaaccaagagaggaaactttggcgctgttaaaatggaatttctcatctgccggcattattaagggtgggctaggttggatggaaggtgaaagggatgaactgccttttgctggaagctgtcttaggctgtgagacaggagcaggggaaccacagcctatggggaactgcccttgactccacctatgttggagccttagcccaaggccattccttctgtgatgataaagcccagttctggaattggagccatattaaggaatgattctcttccagcgctgctcctcaagggttgggggtccttctccctcgcagccaccacatgtctcagggctaccttctccgattggatttgcatttgtggcactgtctttgatgcagtgatgtacttaatggtgcaataaagctgcttcgatttgaaaaaaaaaaaaaaaaaaaaaaaaaaaaaaaaaaaaaaaaaa

SEQ ID NO: 3881 - DNA, 2749 bp, Homo Sapiens
cggtttcctcccccatccccttgactctcccctcccagccctcgctctctcgctcgccctcagcgcggcccccgccatgacggaggcgggtgccggtgccgttgccgccgctgccgtcgcagggggggagtcgggttcccagaaagtagcttgatgagtgtccaaagtagcagtggaagtttggaggggccgccatcttggtcccagctctccacgtctccaaccccgggctcggcggcggcggccaggtccctgctgaatcacacgccgccatccgggaggcccagggaaggtgcaatggatgagcttcatagtctggatccaagaaggcaagagttattggaagctagatttactggagttgcaagtgggagcactggaagtacgggcagttgcagtgttggtgctaaagccacaacaaataacgaaagctctaatcacagttttggaagcttgggatctttaagtgacaaagaatcagagacaccggagaagaaacaatcggaatcatccaggggaagaaagagaaaagcagaaaaccagaatgaaagtagtcagggaaaaagtattgggggacgtggccacaaaattagcgactattttgaataccagggtggaaatggctcaagtccagtaagaggcatacctcctgcaatccgttctcctcaaaattcacattcacattccactccttcctcatctgttcgaccgaatagcccttctcctactgcattagcatttggggaccaccctattgtacaaccaaagcaattatcctttaaaattattcagactgatctcacaatgctgaaattagcagcattagaaagtaataaaatccaggacctggaaaagaaggagggacgtatagatgatttgctcagggctaactgtgatctcagacggcaaatagatgaacaacaaaaattacttgaaaaatacaaagaacgattaaataagtgcatatcaatgagcaagaaacttcttattgaaaagagtacacaagaaaagctgtcaagcagagagaagagtatgcaagatcgattacgcctcgggcactttacaacagttagacatggcgcttcatttactgaacaatggacagatggttttgcatttcagaatcttgtgaagcaacaagaatgggtgaatcagcaaagggaagatattgaaaggcaaaggaaacttctagccaaacgcaaacctcccacagctaataattctcaggcaccctctaccaattctgaaccaaaacaaaggaaaaacaaagcagtcaatggagcagagaatgatccctttgttagaccaaatttaccacaactgttgactttggcagaatatcatgaacaggaagaaattttcaaacttagactaggacatctcaaaaaggaagaggcagaaatccaggcagaacttgaacgtttggaaagagtcagaaatcttcacatacgtgagctgaaaagaataaacaatgaagataattcacagttcaaagatcacccaacattaaatgaaagatatttattacttcatctgcttggtagaggtggctttagtgaagtgtataaggcttttgacctttatgaacaaagatatgctgctgtgaagatacatcagcttaataaaagctggagagatgagaagaaagaaaactaccacaaacatgcctgcagagagtatagaatacacaaagaactggatcaccccagaatagttaaactctatgattatttctccttggatacagatacgttttgtacagtgttagaatactgtgaaggcaatgacttggatttctatctgaagcaacacaagttaatgtcagagaaagaagctcggtctattgtaatgcagattgtaaatgcactaagatatctcaatgagatcaaaccccctattatacattatgatcttaagccaggaaacatcctactggtagatggaacagcatgtggtgaaatcaaaatcactgattttggtctgtccaagattatggatgatgatagctatggtgtagatggaatggatctaacttcccagggggcaggcacttactggtatttacctcctgagtgttttgtagttggaaaagagccaccaaagatttccaacaaggttgatgtatggtcggttggagtcatcttctttcagtgtctttatggtagaaagccatttggtcacaatcaatctcaacaagacattcttcaagaaaatacaatattaaaagccacagaagtccagttccctgtaaaaccggttgtaagcagtgaagccaaggcatttataagacgctgtttggcatatcgaaaagaagatcgatttgatgtgcaccagctggcaaatgacccataccttctcccacacatgagaagatcaaattcttcaggaaacctacacatggctgggctgacagcatcccctacacccccttcttcaagcataattacttactgactttcctccaagattggcatgatatctttgaatttgcttccagatgcacacttaagtttgagagcatttgagtgtttgttttctttttctttttttttttttttttttttttacacaagacgtggttaaagaactgtttgtgactgaagttcctcatagtgtcattggtatgagagaggatcatggacaatgaataaatgcacacttctgactataattttgagcagtgaaggaaggatgactgcctgttacacagaaacaggaataccatgttaagatagaggaaaaaaaaaaa

SEQ ID NO: 3882 - DNA, 283 bp, Homo Sapiens
cggccgcccttttaattataattttcacataatcctctcagacaaattttatttgtattctgctctagcaaatatagtatgaaggcaacagttgttttttagtgtatggcacagatgacaagaaacaaacagatttagaagcagtccagcatttaaatgccggtttaacaaaagaggcacgtattatcctatttagcagtttataccagatatcagaagccatttttttttccttgcaagcaacagactacatttatttgcattaagtaaaaacatatcttga

SEQ ID NO: 3883 - DNA, 546 bp, Homo Sapiens
cctggcgaagtccgagccccctcccggggctgtcaggtgtgtggcaagcgggttccgatgtgcaaagcctggtgccccgagccctgcggagctcggggccagcatggcccccacgctgcaacaggcgtaccggaggcgctggtggatggcctgcacggctgtgctggagaacctcttcttctctgctgtactcctgggctggggctccctgcttgatcattctgaagaactgagggcttctattccagcacagtgcccagcctgagagcagccaccaatcaccacccagtgatgcagcagcgcagcgtggaccatggctgctgacccatgcaggacgataatgcatcaaccattgggcttcaccagttggttcctatcgtgctcagacgccactcacacctagccactaggggatcctacattggacccgcttatggccccacgaacctgtgcggctaggttggccagttgcctgcttacactagcggtactgcacctacatggacctaggcctcccgggacgtaggaagctctgtctaccgttga

SEQ ID NO: 3884 - DNA, 459 bp, Homo Sapiens
tttttttttttttttttgtgagcaacaaggccgtttattcacttgggtgttagtgggctgaatcggaaaagggagtcagcccggaggtgtgagggagagcagtctttacagggcaaagtggcgggtggaaaattacaacatggttttgggacttgttgactcaagaagttgatcaaccagttggaacagaaacccgttgttcttcttttgtggtttttggttgttgcaggttttctggttccaggaagtctggaggcatatgtgctggtcacagagttcttaatggcccaccgtcaataatggcctgctggcaataatgcagccatatttgtgggatatgacattcctgtctttttgttttaataagaaaagaagtggacggggtgatgtttctcagggattcttcgagcgggacttggggcggcatggactcctaattgggagagagatccctcgtgc

SEQ ID NO: 3885 - DNA, 561 bp, Homo Sapiens
  misc_feature (99)..(99): n is a, c, g, or t
  misc_feature (144)..(145): n is a, c, g, or t
  misc_feature (323)..(323): n is a, c, g, or t
  misc_feature (555)..(555): n is a, c, g, or t
tatagaattttatcttcctttagttaaaaaaaataatcgtaccacggaatgaagaagtagcttttttggggggtggggtcggggagaagggaaggtganaagggggggaaaaaagaaccaaaaagcccaaagaaaaaaacattnnatattcatctgtataaacatatccgctaaggcaaacgcaatccgggtccgaggctgctgcgctgggctcggtgcctcctaatttctgcagattctaaggccaaaaaataaaacctctgcaagtccgcgtagcttccaggactcctgggcattttactaaaataaagagttatcgagtntaaaaagcagtgacgtcgttatgacacacacttgaagttgcataactgtgggcctgagggccactcacttggttggactgggtgatggtcacaggttcacgacacagcacagacaccacacacaggcacacgcatgcagcaagcacctggggagctgtggcaaacccggcccgtgcctgggctgaccaccgcctgtctgtgcgggcaccacggggtaggtccccttcttctnaggggg

SEQ ID NO: 3886 - DNA, 267 bp, Homo Sapiens
tccgaagtaaatcagtgtgtattgaatttaacaagtaatgcagtttgggatgcttttgctacattttggtggcattttaactagttatctgaatatttattaatcgtacttcctcttgtaaagttaactacttacttttttgttgttgtttttttaacatcaggttctgtatctaataggagatgtaacactttatttcatggcaggtttttattgcagagacttgaagtcttagtttttctaaactggcacataaaacactttttg

SEQ ID NO: 3887 - DNA, 1531 bp, Homo Sapiens
gtcgccttccagcccgtccgcctcccgaccagggcccgcgccccgtcccgcctctctcccgcccagccaaatgcaggccgccgccctccctgaggagatccgttggctcctggaagatgctgaagagtttctggcagaaggtttgcggaatgagaacctcagcgctgttgcaagggatcacagagaccatattctacggggctttcagcaaatcaaagccaggtactattgggattttcagccccaagggggagacattggacaggacagctctgatgataatcacagcgggactcttggcctgtccctcacatccgatgcaccctttttgtcagattatcaggatgagggaatggaagacatcgtaaaaggagctcaagaacttgataacgtaatcaagcaaggatacttggagaagaaaagcaaagatcatagtttctttggatcggagtggcagaagcgatggtgtgttgtcagcagaggtctcttctactactatgctaatgagaagagcaagcagcccaaagggaccttcctcattaagggctacagtgtacggatggccccccacctgcgaagagattccaagaaagaatcctgctttgaactgacctcccaggataggcgcagctatgagtttacagctactagtccagcagaagccagagactgggtggatcaaataagtttcttgttaaaggatctgagctccttaaccattccatatgaagaggatgaggaggaagaagaaaaagaagagacatatgatgatattgatggttttgactccccaagttgtggttcccagtgcagacccactatcttgcctgggagtgtggggataaaagagcctacagaggagaaagaagaagaagatatttatgaagtcttgccagatgaagagcatgatctagaagaggatgagagtggcactcgacgaaaaggagtagactatgccagttactaccagggcctatgggattgccatggtgaccagccagatgaactgtccttccaacggggtgacctcatccgtattctgagcaaggagtataacatgtatggctggtgggtgggagaactgaacagcctcgttgggattgttccaaaggagtatctcaccactgcctttgaagtggaagaaagatgaaacccaggaaatatattcttccctctctcctgcctttatgaggaaactgatcatcaaaagttcccactccctacttctgccaccccaccaacgccttggactcctctctttgctgaagagacccaagtctcttgacacctcagagtgactgtaagctaccagtaagacaagtgggaagaggcacgttcatcaaacctgttactaaaccagcctagtcatagctcatccccatgtgtaaatgtgtccacacaaccacatctgccttttccacaagcttttcacaaagaaggtgagagagaaggaaaccttgggaggaggacattactggttgttctggctggtttgaaaagcacaaataaacttgggatgtggttccttgcc

SEQ ID NO: 3888 - DNA, 1043 bp, Homo Sapiens
gcggccgcctactactactactactatgctgcgagaagacgacagaatggtgaggttcgacggtatcgataagtttttttttttttttttttcaaaaatgttaaattaagagttgtacatgtctttgaggtgcctatgatattttgatacctgtatcgaatgtgtaatggactgaatgagggtaactgggatttccttcacctcgcttatcttttctttgtgttgggaatattcttattctagctgttttcaaatatacaatcaattattgttaaatgcagtctccctactgtaatatcgaatgctggaactattccttctatctaactgtatttctgtgcccactaatcaacttctgttcatccccgaccccaggcctgcgcatttctgactgtgcttgttagaaaagccccagctggagggggtgagcagtccctgttgctgtgaccacggaaggccgcaggggaaggcagattacatatgcgaaggaggtgtctgtggccatgtgtctttaagggagagcccacagaaaaatgagcctaagggaaataaagcgagaagtctgcttcaatcacagagacggtaaggtgtaaattcttaagaaggtcagaggaatgattgacaattatgtgagtgactcacaaagtgaaatgatggaaagactgaactgcatgagagttaaaaaaaaaatcttttccagggcaataaagctctgtctacacagcgtaacgaatggtttaaaaatagggccaccactcacgcctgtaatcccagcactttgggaggccgaggcgggcggatcgtgaggtcaggagttcgagaccagcctgatcaacacggtgaaaccctgtctctactaaaaatacaaaaaatattagccgggtgtgggggcgggcgcctgtaatcctagctattcaggtggctgaggcaggagaattgcttgaacctgggaggcggaggttgcagtgagccgagatcgcgcccttacactccagcctgggtgacagagcgagactccgtcttaaaaaaaaaaaaaaaaaaaa

SEQ ID NO: 3889 - DNA, 594 bp, Homo Sapiens
tttttacttaaatcaactgtctttaattggacaataatcacatgttaaaggggtcaatttgctctaatgtgtctttagtcttgactatcttccagtgaatatacactcatgaaccacgtaaccatgtttctgtcaaagacataccacttacatgacggtggtcccataacattgtaataccatagttttactgtacctttcctatgtttgtaaacacaaatactcaccactgtgttacaattgcctgcggtattcagtgcagtcacatgctgtacaggtgtgtggcccaggagcaacaggctgtaccatctggcctgggtgggtcataggtgtcccatctaggtttgtataagtgcactccatgatgttcacacaataaagtcaccttacaatgcatttctcagaatgtttccctatcattaagtgacatgtgactgtattatttctaactgccttatacatttgtaacttgaatattgaaatattaaagcatactcgaagttgcattattctaatctaagaacatatacacattaagagtcaaattaagttaataattcaagtgataaaggcactgaaattgatttgagctat

SEQ ID NO: 3890 - DNA, 621 bp, Homo Sapiens
attgcgtttacctgtgcgagtaggactgtttactcgttttcttaagctgctgggtgctttgctgctcctggctctggccctctttttgggctttctacagttgggatggcggtttctggtgggactaggtgaccggttaggctggagggataaggctacctggctcttctcttggctggattctccagccttgcagcgttgcttgactctgctgagagatagcaggccatggcagcggctggtaagaatagttcagtggggctggctggagttgccttgggtcaagcagaatattaataggcaggggaatgcacctgtagctagtgggcgctactgccagcctgaagaggaagtggctcgactcttgaccatggctggggttcctgaggatgagctaaaccctttccatgtactgggggttgaggccacagcatcagatgttgaactgaagaaggcctatagacagctggcagtgatggttcatcctgacaaaaatcatcatccccgggctgaggaggccttcaaggtttcgcgagcagcttgggcacattgtcagcaatgctgaaaagcgaaaggagtatgagatgacacgaatggcacgagatgagctgagcgggtcag

SEQ ID NO: 3891 - DNA, 476 bp, Homo Sapiens
gaaaaataattttgattggtccctcactcacagaggactccagaagccagggtctgttgcatccatgaacaccgctccatgcgactgggagctccgcccaccacaccaacgctggctcgctgcttttccagcattggaaacttccacaacaagggattcttgggaaaggcagtggctcagactaccttccaccaccacttgcatctgtcagagcgttttagaaacccttaaaattcaaacatttctgctggcttctcttttagcttcctaacttttcggtagccctttatggccaggacagcccccagggcaaagaccacaatgcccagggcagcaaagattccagctcctatatctgctccgtggaaactgcagccgaaaccgctgtagcctttgctttggtacagcgcctgcctctctttacacacaggagagccataggcagcagagaggtagtggaagtagaagtacaaggg

SEQ ID NO: 3892 - DNA, 6450 bp, Homo Sapiens
cggcctggtccgggccatgtccgcgtgaggaccccgccgctgtcgccgctcccgttccggccctggcccctctgcccggcagcgcggcgcaccatgggctccattctcagccgccgcatcgcgggggtggaggacatcgacatccaggcgaactcggcctatcgctaccctccgaagtccggaaactactttgcttcgcactttttcatgggaggagagaaattcgacaccccccaccctgaaggttacctctttggagagaacatggatctgaacttcctgggcagccgcccggtccagtttccctacgtcactcctgccccccacgagcccgtgaagacgctgcggagcctggtgaacatccgcaaagactccctgcggctggtgaggtacaaagacgatgccgacagccccaccgaggacggcgacaagccccgggtgctctacagcctggagttcaccttcgacgccgatgcccgcgtggccatcaccatctactgccaggcatcggaggagttcctgaacggcagggcagtatacagccccaagagcccctcgctacagtccgagaccgtccactacaagagaggggtgagccagcagttctccctgccctccttcaagattgacttctcggaatggaaggatgacgagctgaactttgacctggaccggggcgtgtttccagtagtcatccaggctgtggtggacgaaggagatgtggtggaagtgactggccacgcccacgtgctcttggctgcctttgaaaagcacatggacggcagcttctctgtgaagcctttaaagcagaagcaaattgtggaccgggtcagctacctcctgcaggagatctatggcattgagaacaagaacaaccaggagaccaagccctcggacgacgagaacagcgacaacagcaacgagtgtgtggtgtgcctgtccgacctgcgggacacgctgatcctgccctgccgccacctgtgcctctgtacctcctgcgccgacacgctgcgctaccaggccaacaactgccccatctgccggctgcctttccgggccctcctgcagatccgggcggtgcggaagaagccaggagccctgtcccccgtgtccttcagccccgtcctggcccagagcctggagcatgatgagcactcttgtccctttaaaaaatcaaagccgcaccccgcctccctggccagcaagaaacctaaaagggaaacaaactctgacagcgtcccacctggctacgagcccatctcgctgctcgaggcgctcaacggcctccgggctgtctccccggccatcccctcggcccctctttatgaagaaatcacctattcaggcatctcggacggcctgtcccaggccagctgtcccctcgcggctatcgaccacatcctggacagcagccgccagaagggcaggccgcagagcaaggcccccgacagcaccctacggtccccgtcttcccccatccacgaagaggatgaggagaagctctccgaggacgtggacgcccctcccccactgggtggcgcagagctggccctgcgggaaagcagctcccctgagagtttcataacagaagaggttgatgagtcgtcgtcaccacagcaagggacccgagcagcttccattgagaatgtcctgcaggacagcagccccgagcactgtggccgaggcccacctgctgacatctacctgccagccctggggcccgactcctgctctgttggtatagacgagtaagccggtacgtgaccttccagacgcgcttcgggggctctgacgcgcgtccttggagagaggagccctcccctgctctctggcgggggttccttctggtttttgggtcttcgtccgcatccgcatcttcccaggggccctggattccgaatccagagctctccagtggctgctgcaccttcccccagaaagtggcctcctggggggtcctgactttcggggccagaggtctctccatctggactaggcggccggtcaggctcttcttccagccttgaggggccctggaacagtcccagcccaggcagggagacagacacagcccaggtgcgccagagccactgtccactgcgggaggcaggagcttgagggatgagggcagcaccgtggagggaaccccagggagacatggggtgagcgtcccaaggggagaggcctgggcctggccttgttccggatggtcccaccatgagttcgcatcggtcctgcagcagacacgttaggacgctcagcaggtccactcccgtgttccggtcatggctttaacaattcatggggaaagaatgcgccccgattgggagagcccctggatcacgtcttcccaagctcagtccctgtctcttggagggagtccgtcctcgaggggccctctggtgcccaggggagagtatcttgcgtcctgtcctgagggcgtccgctcacacagccacctgctcccccgctccctccttcccttgtcagcatggccaccgtgggcctggcatcaccatgggcctggcacacagtccctcgtgggctgcctttgtgccatgagcccactgctgccgactcacctgtccctcccagtactggaaccttctggaacaccagcactaaaagataggaggccctgtgaggttggcatcccccatccccccccaagaggtgccctctaccagggtggcccaggtgagtgttttacagaaggcggctctgtccaggcagtggttcgcacctataagcccggtactttgggagaccgaggggatagatcacttgagcccaggaattcaagatcagtgtagaaaacatagaccccctctctataaaaaataaaaaattggcttgggcgtggtagcttgtgcctgtggtcccagctactcaggggtgctgaggtgggaggattgccggagctggggaggtcaaggcccactccagcctgagacgctgtctcaataaaaaaaaatacacacacacccacccacccactccagcctgagaccctgtctcaagaaaaaaaaaaatacacacacacacacacacacacacacacacacacacacacacacacacacacgggggagagagagaaggcagctccaggagtgccaccaaaatgtaggcagacggattggggaccctctgccttcccagagggtcttggcacacaagctgcgtgcagctctggtctgccgaggcccatgcagcctgctgggaggtgcctggccgggggtgcaggctctaagaggccctttccccttgggtggacttgagccgggtcagggagaacttcgcttcttttgactgcgctctgcattcccatgaacctctgtcttcttgagcccagcgagtccctctgttgacccctgtcctgagccattatacccctagattgaaacagtcagcacctttcagacggccccggcctgcgcatcggtggaaggtgccatgcgaatgtcacgattcaggtcaagcttccggagctggggagtgcaggtgtgatctagaacagggctcacagcctcggaaacctgctctcgccgcggcccccgaagaaaatagacgcccttcaccggagagtggggcctgggccgtgtctgctgggagccatgtgtcagggctggtggctgggtgtcaggcagccctgaggccatgctggccccgtcccaggctctgcaccagcaccattgcccaagccccagggacgccagacccatccggggacagcgcccggcggcgtcgtgcaggccacagtctgggcattggggctctgtgggaggctcctctctttgccttgcagtagccatccgggggctactctgagcacgggcttgttctcacccagggccgctcccgacccctgcaccctgggttgaccgagttccaccctaacccagccgtaagaaccttggcaggacagtggctggccacatcccaggaaaccggaaccagggcaagggcaggaggcccagagggcatccactgcggtgccgtgtcgcgctctgactcggggctgcagatctgctgtgggtgtccggggatctgggatcgtctgtcccaagagggacacagcgtatttggcacagttagggagtccccgggcccttggtgtgctcacatctgagtgaatgctgttgtggccacaggcggcgggagtgggggtgctggatggcccagcccctctggggctccagatcggtaggagcgggtggcgtggcaccaggcatccgagtgtgaccctcctccctctgctcccacctgcaggacggcccacctccatggagacggcccacggcctcgccaccaccagccccacctggcctccacttggtggccccagccccgatcccagcgccgccgagctgaccccactctgagagcctggccgagctggcagcatggagccctcggctccccagactttgccgaggggctgctccggaccccgttgtgagccggcctcctgtctgcatgccccctgtggccaccaggctccgaggggccgtggtgactcttgatcaaagagcacagtgaactgtcccttctgagtctcccttttctacagttgatatatttgtaactggtacaagatgaaggacagcagctttccatccctagttcagagcccccgttccccagggtcctgtgggctgagcggctggggctggggctgcccacgtgtggcctccgctggctctgcctgctcctgcaacagtgcggtccctgcccggagaactcaggaggcctgcagaagagaactgattggtggtcgaagcaccatcttcacagatgttcaggggcagtggggggctccaggcacggtcaatgaaggaaacagtgcctgtccacccaccctgcgtgtcactgtggcggcctggctgtcgctgctttttgtcctctgccgtgtttgcgcggcctcagtgccctccctggtgcgtctgcgctggggccctcagtgctcggggccttggggtgcatgggcgccgccctgggcagctagagtgtctcagcccggtgctgggcctggccgaggggcggaggcacagctgcttccagcagccagcattcagtggccttgtcaccaagctccacacctcctcctggtgctggctttggtgacatcacaaggcccctccaggtgcaggggcttctgtttggcaggcccctgccagggaggacctggtggcctcctcattctcttttgccattggaatgtccccttgcagttctcttctctttttttttttttttgagatggagtttcactcttgctgcccaggctggagtgcagtggctcaatctcgggtcactgcaacctccgcctcccgggttcaagtgatcgtcctgccttaggctcctgagtagctggggattacaggtgcctaccagcatgctcggctaatttttttgtatttttagtagagaagggatttcaccatgttggccgggctggtctcaaactcctaaggtcatccacctgcctcggcctcccagagtgctgagattacaggcgtgagcctccgcgcccggcccccttgcagttctctctgatttggtttgttctgtctcaggcttctgtggcaggactggcccagggaggaggaagccagcagcacacctggggaatggggtcccggccgggaggcttggcctctgggcgacctcgtcctgttttgtttgtttgtttgtttgtttttttaaaggtaaacctcctgggccgcagatggcaaagggagtgcctgggcctggtgacccagggctggatccacccctgcggagccctgggccaggcaggtgtctgctgctcacctggctctggagggctgccctgcagctgggcctggggacaggtcggctgtggggcagctcagtaccctccctgaggctcacggtggctccgagcatgagctctgcctcctgggcgagacccagcagtggacagcacggtcctcacacccagctccctgcacacccaggccagccacccctcccgctcgtgcacaggcacgcagatgcgctcacacgtacacacacacaaatgcacgcccacttgcacatgctcacgcacacgttcacacatgcacactcacgctcacacatgctgtcacgcatacacacacgcacatactcctgcacatgttcccatgcatgtgtgtgcactcggaccgagcatctcccacgcacctctaccccaccccaagcacctctctccccccatgcacctctccccaacaacacacacagccccctgcaccgcccgccccccgcccccaccaaggccccagcctctggccatcagtcctggtgccagagctttgcgtgaagttcgggccgcagagtggcccgctgggactcccatgtgctgccgtctgatgtgctcagatgggctcatcgttggttcgtttttactgtatatttatagtaataaaatcatgcagcaat

SEQ ID NO: 3893 - DNA, 733 bp, Homo Sapiens
ggagcaggcggctcccgggggtgcgggagccccactcctccgtggtgtgttccatttgcttcccacatctggaggagctgacgtgccagcctcccccagcaccacccagggacgggaggcatgagccggtcaaggcacctgggcaaaatccggaagcgtctggaagatgtcaagagccagtgggtccggccagccagggctgactttagtgacaacgagagtgcccggctggcacggacgccctcttggatgggggttctgaagcctactggcgggtgctcagccaggaaggcgaggtggacttcttgtcctcggtggaggcccagtacatccaggcccaggccaggagcccccgtgtcccccagacaccctgggaggggcggaagcaggccctaagggactggactccagctccctacagtccggcacctacttccctgtggcctcagagggcagcgagccggccctactgcacagctgggcctcagctgagaagccctacctgaaggaaaaatccagcgccacctgtgtacttccagaccgtcaagcacaacaacatcagagacctcgtccggccgctgcatcacccggactagccaggtcctgggtcatcctgatggatgtgtccacggatgtgggagatctttctgtgaccattctagaggcaggcaacagccgtggggtgtccgagtgtgctctggacaggcaggtgtgaagctctccaggaatgtgt

SEQ ID NO: 3894 - DNA, 373 bp, Homo Sapiens
  misc_feature (269)..(269): n is a, c, g, or t
  misc_feature (303)..(303): n is a, c, g, or t
  misc_feature (315)..(315): n is a, c, g, or t
tttttttttttttttcggcatctcagcacgtttattaaacctttcccgtccctgcgcccgcattactttaataataaatcgcgtgtcactttccagcgacattattaaagcgggtccgctgcaggtggacgcggtaggagctatgggcccgcaaagggcgtcttggagcccagctgggcgaaaaacaagctaggggcggattccctggctgatgctgggactcacacccacgtcccctctttcagcgcccggcggattttggccacagngccgaacaggacgccccacccccgcctacccctntgattctgcttntgtgggcgccctggaatcggctcccggtatccagcccgcttgcgctgttgtgcgcggc

SEQ ID NO: 3895 - DNA, 419 bp, Homo Sapiens
tttttttttgggcttgaagattttattaccggcagcttaatgtacaattttaaaacgacacagtcgcaacccacttctcaaacattttgaattaccacgggaattaaaacatagaagtgtgtgacctaaaatccctcaaacaaggaaaacaactcatccgagccgagtatggaagaatctttactttttaggggagtatcttcaaactatcttttttaaatagtagaaatctgcttttaaatctcagccaacaacaagcggattttaaatctattttacaaccctaataaaaaccaacctcttagctgggggacccagtctgtagctgcaaatacaaagacgtgatttttgaaaagctgcccacaagagcaagtgattaatcattaaaatccactaaaatcaattgtgaacagccactg

SEQ ID NO: 3896 - DNA, 2746 bp, Homo Sapiens
agctggggctccgtcctcgcctcccacgagcgatccccgaggagagccgcggccctcggcgaggcgaagaggccgacgaggaagaccctggagcataactgtgcccacttctgcatcaacatccctggctcatacgtctgcaggtgcaaacaaggctacattctcaactcggatcagacgacttgcagaatccaggatctgtgtgccatggaggaccacaactgtgagcagctctgtgtgaatgtgccgggctccttcgtctgccagtgctacagtggctacgccctggctgaggatgggaagaggtgtgtggctgtggactactgtgcctcagaaaaccacggatgtgaacatgagtgtgtaaatgctgatggctcctacctttgccagtgccatgaaggatttgctcttaacccagatgaaaaaacgtgcacaaagatagactactgtgcctcatctaatcacggatgtcagcacgagtgtgttaacacagatgattcctattcctgccactgcctgaaaggctttaccctgaatccagataagaaaacctgcagaaggatcaactactgtgcactgaacaaaccgggctgtgagcatgagtgcgtcaacatggaggagagctactactgccgctgccaccgtggctacactctggaccccaatggcaaaacctgcagccgagtggaccactgtgcacagcaggaccatggctgtgagcagctgtgtctgaacacggaggattccttcgtctgccagtgctcagaaggcttcctcatcaacgaggacctcaagacctgctcccgggtggattactgcctgctgagtgaccatggttgtgaatactcctgtgtcaacatggacagatcctttgcctgtcagtgtcctgagggacacgtgctccgcagcgatgggaagacgtgtgcaaaattggactcttgtgctctgggggaccacggttgtgaacattcgtgtgtaagcagtgaagattcgtttgtgtgccagtgctttgaaggttatatactccgtgaagatggaaaaacctgcagaaggaaagatgtctgccaagctatagaccatggctgtgaacacatttgtgtgaacagtgacgactcatacacgtgcgagtgcttggagggattccggctcgctgaggatgggaaacgctgccgaaggaaggatgtctgcaaatcaacccaccatggctgcgaacacatttgtgttaataatgggaattcctacatctgcaaatgctcagagggatttgttctagctgaggacggaagacggtgcaagaaatgcactgaaggcccaattgacctggtctttgtgatcgatggatccaagagtcttggagaagagaattttgaggtcgtgaagcagtttgtcactggaattatagattccttgacaatttcccccaaagccgctcgagtggggctgctccagtattccacacaggtccacacagagttcactctgagaaacttcaactcagccaaagacatgaaaaaagccgtggcccacatgaaatacatgggaaagggctctatgactgggctggccctgaaacacatgtttgagagaagttttacccaaggagaaggggccaggcccctttccacaagggtgcccagagcagccattgtgttcaccgacggacgggctcaggatgacgtctccgagtgggccagtaaagccaaggccaatggtatcactatgtatgctgttggggtaggaaaagccattgaggaggaactacaagagattgcctctgagcccacaaacaagcatctcttctatgccgaagacttcagcacaatggatgagataagtgaaaaactcaagaaaggcatctgtgaagctctagaagactccgatggaagacaggactctccagcaggggaactgccaaaaacggtccaacagccaacagaatctgagccagtcaccataaatatccaagacctactttcctgttctaattttgcagtgcaacacagatatctgtttgaagaagacaatcttttacggtctacacaaaagctttcccattcaacaaaaccttcaggaagccctttggaagaaaaacacgatcaatgcaaatgtgaaaaccttataatgttccagaaccttgcaaacgaagaagtaagaaaattaacacagcgcttagaagaaatgacacagagaatggaagccctggaaaatcgcctgagatacagatgaagattagaaatcgcgacacatttgtagtcattgtatcacggattacaatgaacgcagtgcagagccccaaagctcaggctattgttaaatcaataatgttgtgaagtaaaacaatcagtactgagaaacctggtttgccacagaacaaagacaagaagtatacactaacttgtataaatttatctaggaaaaaaatccttcagaattctaagatgaatttaccaggtgagaatgaataagctatgcaaggtattttgtaatatactgtggacacaacttgcttctgcctcatcctgccttagtgtgcaatctcatttgactatacgataaagtttgcacagtcttacttctgtagaacactggccataggaaatgctgtttttttgtactggactttaccttgatatatgtatatggatgtatgcataaaatcataggacatatgtacttgtggaacaagttggattttttatacaatattaaaattcaccacttcagagaaaaaaaaaaaaaaaaaaaa

SEQ ID NO: 3897 - DNA, 1163 bp, Homo Sapiens
ccgtgcgggaatgggcgtggcctgggcggggcgggcgctaggacccaccggagcgccgtgaacgtcaccgagcggcgccgaggccccgggttgagcgggaggcgcgatcggtccggtcggtggctccccgcggcggggccgggcccgatctcgggcgggaaccgagcgcagagccggtagcgggaaggatgaccacgctcacacgacaagacctcaactttggccaagtggtggccgatgtgctctgcgagttcctggaggtggctgtgcatctcatcctctacgtgcgcgaggtctaccccgtgggcatcttccagaaacgcaagaagtacaacgtgccggtccagatgtcctgccacccggagctgaatcagtatatccaggacacgctgcactgcgtcaagccactcctggagaagaatgatgtggagaaagtggtggtggtgattttggataaagagcaccgcccagtggagaaattcgtctttgagatcacccagcctccactgctgtccatcagctcagactcgctgttgtctcatgtggagcagctgctccgggccttcatcctgaagatcagcgtgtgcgatgccgtcctggaccacaaccccccaggctgtaccttcacagtcctggtgcacacgagagaagccgccactcgcaacatggagaagatccaggtcatcaaggatttcccctggatcctggcggatgagcaggatgtccacatgcatgacccccggctgataccactaaaaaccatgacgtcggacattttaaagatgcagctttacgtggaagagcgcgctcataaaggcagctgagggggcacctgccaccccactgatgcccaaactgtcagactttgggggatccccgcctagggcagtgctgcatggctgccctgattccaagtgctcttatcgcctctgtgtgtggatcgcccgccccagcccggggccgctcaggtctgcttggaggatgcctcccccaggagggcagtgagggatgccgcaacctcgacttctcagcctcctggggttccgccggccaacactgtctgtctcaaatactgtgctgtgagttgtttcaataaaggggccccaagggctgggctgaaaaaaaaaaaaaaaaaaaaaaaaaaaaaaaaaaaaaaaaaaaaa

SEQ ID NO: 3898 - DNA, 506 bp, Homo Sapiens
gttgtgtttttatagttacgttattatgtatttacttttgagacagggtcttgctctgttgctcaagctagagtacagtggtgtggacatggttcactgcagcctcacacctcagcctcaagcgatcctcccacctcagccaccaccacatgccaccatgcccggctaattatatggtgaatttaaatgaccagtgatatcccaggacagtcaatacctacaacaagaaccaaagagcacaaaaacacttgaaatatcattactttactttagtgttccaggcattttaaatattcatacaatcgccttatttcagcagtcatttcctctccagtacagattttgtgtccagaaccagagccatgtacgtcactgaattttctctacagcacccgcatgctacacgggacctactccggtgcccatgtctttgctagtagagcctctcaccacacttgcaagagggctggacctccccttgcttgatgtagcctccactgtgaatg

SEQ ID NO: 3899 - DNA, 4390 bp, Homo Sapiens
ctctagctctcagcggctgcgaagtctgtaaacctggtggccaagtgattgtaagtcaggagactttccttcggtttctgcctttgatggcaatttccttcggtttctgcctttgatggcaagaggtggagattgtggcggcgattacagagaacgtctgggaagacaagttgctgtttttatgggaatcgcaggcttggaagagacagaagcaattccagaaataaattggaaattgaagatttaaacaatgttgttttaaaatattctaacttcaaagaatgatgccagaaacttaaaaaggggctgcgcagagtagcaggggccctggagggcgcggcctgaatcctgattgcccttctgctgagaggacacacgcagctgaagatgaatttgggaaaagtagccgcttgctactttaactatggaagagcagggccacagtgagatggaaataatcccatcagagtctcacccccacattcaattactgaaaagcaatcgggaacttctggtcactcacatccgcaatactcagtgtctggtggacaacttgctgaagaatgactacttctcggccgaagatgcggagattgtgtgtgcctgccccacccagcctgacaaggtccgcaaaattctggacctggtacagagcaagggcgaggaggtgtccgagttcttcctctacttgctccagcaactcgcagatgcctacgtggacctcaggccttggctgctggagatcggcttctccccttccctgctcactcagagcaaagtcgtggtcaacactgacccagtgagcaggtatacccagcagctgcgacaccatctgggccgtgactccaagttcgtgctgtgctatgcccagaaggaggagctgctgctggaggagatctacatggacaccatcatggagctggttggcttcagcaatgagagcctgggcagcctgaacagcctggcctgcctcctggaccacaccaccggcatcctcaatgagcagggtgagaccatcttcatcctgggtgatgctggggtgggcaagtccatgctgctacagcggctgcagagcctctgggccacgggccggctagacgcaggggtcaaattcttcttccactttcgctgccgcatgttcagctgcttcaaggaaagtgacaggctgtgtctgcaggacctgctcttcaagcactactgctacccagagcgggaccccgaggaggtgtttgccttcctgctgcgcttcccccacgtggccctcttcaccttcgatggcctggacgagctgcactcggacttggacctgagccgcgtgcctgacagctcctgcccctgggagcctgcccaccccctggtcttgctggccaacctgctcagtgggaagctgctcaagggggctagcaagctgctcacagcccgcacaggcatcgaggtcccgcgccagttcctgcggaagaaggtgcttctccggggcttctcccccagccacctgcgcgcctatgccaggaggatgttccccgagcgggccctgcaggaccgcctgctgagccagctggaggccaaccccaacctctgcagcctgtgctctgtgcccctcttctgctggatcatcttccggtgcttccagcacttccgtgctgcctttgaaggctcaccacagctgcccgactgcacgatgaccctgacagatgtcttcctcctggtcactgaggtccatctgaacaggatgcagcccagcagcctggtgcagcggaacacacgcagcccagtggagaccctccacgccggccgggacactctgtgctcgctggggcaggtggcccaccggggcatggagaagagcctctttgtcttcacccaggaggaggtgcaggcctccgggctgcaggagagagacatgcagctgggcttcctgcgggctttgccggagctgggccccgggggtgaccagcagtcctatgagtttttccacctcaccctccaggccttctttacagccttcttcctcgtgctggacgacagggtgggcactcaggagctgctcaggttcttccaggagtggatgccccctgcgggggcagcgaccacgtcctgctatcctcccttcctcccgttccagtgcctgcagggcagtggtccggcgcgggaagacctcttcaagaacaaggatcacttccagttcaccaacctcttcctgtgcgggctgttgtccaaagccaaacagaaactcctgcggcatctggtgcccgcggcagccctgaggagaaagcgcaaggccctgtgggcacacctgttttccagcctgcggggctacctgaagagcctgccccgcgttcaggtcgaaagcttcaaccaggtgcaggccatgcccacgttcatctggatgctgcgctgcatctacgagacacagagccagaaggtggggcagctggcggccaggggcatctgcgccaactacctcaagctgacctactgcaacgcctgctcggccgactgcagcgccctctccttcgtcctgcatcacttccccaagcggctggccctagacctagacaacaacaatctcaacgactacggcgtgcgggagctgcagccctgcttcagccgcctcactgttctcagactcagcgtaaaccagatcactgacggtggggtaaaggtgctaagcgaagagctgaccaaatacaaaattgtgacctatttgggtttatacaacaaccagatcaccgatgtcggagccaggtacgtcaccaaaatcctggatgaatgcaaaggcctcacgcatcttaaactgggaaaaaacaaaataacaagtgaaggagggaagtatctcgccctggctgtgaagaacagcaaatcaatctctgaggttgggatgtggggcaatcaagttggggatgaaggagcaaaagccttcgcagaggctctgcggaaccaccccagcttgaccaccctgagtcttgcgtccaacggcatctccacagaaggaggaaagagccttgcgagggccctgcagcagaacacgtctctagaaatactgtggctgacccaaaatgaactcaacgatgaagtggcagagagtttggcagaaatgttgaaagtcaaccagacgttaaagcatttatggcttatccagaatcagatcacagctaaggggactgcccagctggcagatgcgttacagagcaacactggcataacagagatttgcctaaatggaaacctgataaaaccagaggaggccaaagtctatgaagatgagaagcggattatctgtttctgagaggatgctttcctgttcatggggtttttgccctggagcctcagcagcaaatgccactctgggcagtcttttgtgtcagtgtcttaaaggggcctgcgcaggcgggactatcaggagtccactgcctccatgatgcaagccagcttcctgtgcagaaggtctggtcggcaaactccctaagtacccgctacaattctgcagaaaaagaatgtgtcttgcgagctgttgtagttacagtaaatacactgtgaagagactttattgcctattataattatttttatctgaagctagaggaataaagctgtgagcaaacagaggaggccagcctcacctcattccaacacctgccatagggaccaacgggagcgagttggtcaccgctcttttcattgaagagttgaggatgtggcacaaagttggtgccaagcttcttgaataaaacgtgtttgatggattagtattatacctgaaatattttcttccttctcagcactttcccatgtattgatactggtcccacttcacagctggagacaccggagtatgtgcagtgtgggatttgactcctccaaggttttgtggaaagttaatgtcaaggaaaggatgcaccacgggcttttaattttaatcctggagtctcactgtctgctggcaaagatagagaatgccctcagctcttagctggtctaagaatgacgatgccttcaaaatgctgcttccactcagggcttctcctctgctaggctaccctcctctagaaggctgagtaccatgggctacagtgtctggccttgggaagaagtgattctgtccctccaaagaaatagggcatggcttgcccctgtggccctggcatccaaatggctgcttttgtctcccttacctcgtgaagaggggaagtctcttcctgcctcccaagcagctgaagggtgactaaacgggcgccaagactcaggggatcggctgggaactgggccagcagagcatgttggacaccccccaccatggtgggcttgtggtggctgctccatgagggtgggggtgatactactagatcacttgtcctcttgcccgctcatttgttaataaaatactgaaaac

SEQ ID NO: 3900 - DNA, 598 bp, Homo Sapiens
gtagagacgtgatttccgccatgttgcccacgctgttccccaacttctgaactcaagcgatccgccagcctctgcctcccaaagtactgggattacgggcgtgagccaccgtgcacagccagtgacttcttaatatatatcctaaagcgcaagaggcactggatatttgtggagtcttgataaccaccagggaggggcccaaggtaggagagaacaattgttctgagagacaagtaaccataaacaacgcgctgacacaacgaccttgctccacaggtagcccaaatggcacaacctcgatcagcatgtagccccctccagaagaccttataaaacttccctccagcccctgcctctttgcagacagccccttctctgtagtgctacatattgcacccttgcaatgaattttcatactttctctaataaatgtgcctttatttttctccccctacaactgtcttggtaaattcctttaccaccggcaacaccagccccagccagtcacacttgtaagagtactcagcagtgagcaacacttatttttcacagagctataggtgagaagacagacagaaacccatatgtaagtataact

SEQ ID NO: 3901 - DNA, 498 bp, Homo Sapiens
  misc_feature (47)..(47): n is a, c, g, or t
ggaaaagtgtgaggggctcttcacgtggggaaggaacagcaggcgcngaggagggggcaagcgtgtgtgagattcagtggtccatgcgtgcgtttgtcgtgtaagggtcattcctggggtttggagtgggggaacaaatcaatgtggctgtttttccgtggaaagaattcccactgcagtgtcccggagcctgcgtgtggtgggcaagctcctcaaatggtatctcacagggaataggggagtcttgaaaacgcagcttcggcagtaggaacatgaacctcttacctaaaagttccagggagtttggctcccgttgactattgggagaagttcttccagcagcgaggaaagaaagctttcgagtggtatggaacctacctggaactgttcggggtgctacataaatatatcaagcccagggaaaaggtgctggtgattgggtgtggcactcagaactgagtgagcactgtatgatgtgggctatcggatatagtgaca

SEQ ID NO: 3902 - DNA, 787 bp, Homo Sapiens
ggactgtggaggggcgcacgcccggaagcggcgagggtagccatgacggcctccgtgctgcgaagtatctcgctagccctgcgcccgactagcgggcttctgggaacttggcagacgcagcttagagagactcaccagcgagcgtcattgttgtctttctgggaactcattcccatgagatcagaacctcttcgaaaaaagaagaaggtagatcctaaaaaagaccaagaagcaaaggagcgcttgaaaaggaagatccgaaaactggaaaaggctactcaagagctaattcctattgaagattttattacccctctaaagttcttggataaagcaagagagcggcctcaggtggagctcacctttgaggagactgagaggagagctctgcttctgaagaagtggtccttgtacaagcagcaagagcgtaagatggagagggacaccatcagggctatgctagaagcccagcaggaagctctggaggaactgcaactggaatccccgaagctccatgctgaggccatcaagcgggatcctaacctgttcccctttgagaaggaagggccacattacacaccaccgatccctaactaccaaccccctgaaggcaggtacaatgacatcaccaaggtgtacacacaagtggagtttaagagatagacttgcaggctgctatccttaacatgctgcccctgagagtaggaatgaccagggttcaagtctgctttccacagaatcaggcatgctgttaataaatactggtttaatcaaaaaaaaaaaaaaa

SEQ ID NO: 3903 - DNA, 289 bp, Homo Sapiens
ttttttttttttttttttttcattactcatatcttgtattttatttcttatgaaaatggctacccaaagaagtcattgtagcaggctactattttaaggcagcaactgtttaacttaaatgctaaaactcactccataaaacaaaaaacccttccccagggctgtaatgggcatttaagtttcccaaacccagggacaactaatttttattacctattgaatagaaacaaatggattttaatagttcccctcccctatagctgaaaaactccacaaacaataattgact

SEQ ID NO: 3904 - DNA, 7392 bp, Homo Sapiens
  misc_feature (7110)..(7110): n is a, c, g, or t
gctgcgcagcgctggctgctggctggcctcgcggagacgccgaacggacgcggccggcgccggcttgtgggctcgccgcctgcagccatgaccctcgcagcctgtccctcggcctcggcccgggacgtctaaaatcccacacagtcgcgcgcagctgctggagagccggccgctgccccctcgtcgccgcatcacactcccgtcccgggagctgggagcagcgcgggcagccggcgcccccgtgcaaactgggggtgtctgccagagcagccccagccgctgccgctgctacccccgatgctggccatggcctggcggggcgcagggccgagcgtcccgggggcgcccgggggcgtcggtctcagtctggggttgctcctgcagttgctgctgctcctggggccggcgcggggcttcggggacgaggaagagcggcgctgcgaccccatccgcatctccatgtgccagaacctcggctacaacgtgaccaagatgcccaacctggttgggcacgagctgcagacggacgccgagctgcagctgacaactttcacaccgctcatccagtacggctgctccagccagctgcagttcttcctttgttctgtttatgtgccaatgtgcacagagaagatcaacatccccattggcccatgcggcggcatgtgtctttcagtcaagagacgctgtgaacccgtcctgaaggaatttggatttgcctggccagagagtctgaactgcagcaaattcccaccacagaacgaccacaaccacatgtgcatggaagggccaggtgatgaagaggtgcccttacctcacaaaacccccatccagcctggggaagagtgtcactctgtgggaaccaattctgatcagtacatctgggtgaaaaggagcctgaactgtgtgctcaagtgtggctatgatgctggcttatacagccgctcagccaaggagttcactgatatctggatggctgtgtgggccagcctgtgtttcatctccactgccttcacagtactgaccttcctgatcgattcttctaggttttcctaccctgagcgccccatcatatttctcagtatgtgctataatatttatagcattgcttatattgtcaggctgactgtaggccgggaaaggatatcctgtgattttgaagaggcagcagaacctgttctcatccaagaaggacttaagaacacaggatgtgcaataattttcttgctgatgtacttttttggaatggccagctccatttggtgggttattctgacactcacttggtttttggcagcaggactcaaatggggtcatgaagccattgaaatgcacagctcttatttccacattgcagcctgggccatccccgcagtgaaaaccattgtcatcttgattatgagactggtggatgcagatgaactgactggcttgtgctatgttggaaaccaaaatctcgatgccctcaccgggttcgtggtggctcccctctttacttatttggtcattggaactttgttcattgctgcaggtttggtggccttgttcaaaattcggtcaaatcttcaaaaggatgggacaaagacagacaagttagaaagactgatggtcaagattggggtgttctcagtactgtacacagttcctgcaacgtgtgtgattgcctgttatttttatgaaatctccaactgggcactttttcggtattctgcagatgattccaacatggctgttgaaatgttgaaaacttttatgtctttgttggtgggcatcacttcaggcatgtggatttggtctgccaaaagtcttcacacgtggcagaagtgttccaacagattggtgaattctggaaaggtaaagagagagaagagaggaaatggttgggtgaagcctggaaaaggcagtgagactgtggtataaggctagtcagcctccatgctttcttcattttgaaggggggaatgccagcattttggaggaaattctactaaaagttttatgcagtgaatctcagtttgaacaaactagcaacaattaagtgacccccgtcaacccactgcctcccaccccgaccccagcatcaaaaaaccaatgattttgctgcagactttggaatgatccaaaatggaaaagccagttagaggctttcaaagctgtgaaaaatcaaaacgttgatcactttagcaggttgcagcttggagcgtggaggtcctgcctagattccaggaagtccagggcgatactgttttcccctgcagggtgggatttgagctgtgagttggtaactagcagggagaaatattaacttttttaaccctttaccattttaaatactaactgggtctttcagatagcaaagcaatctataaacactggaaacgctgggttcagaaaagtgttacaagagttttatagtttggctgatgtaacataaacatcttctgtggtgcgctgtctgctgtttagaactttgtggactgcactcccaagaagtggtgttagaatctttcagtgcctttgtcataaaacagttatttgaacaaacaaaagtactgtactcacacacataaggtatccagtggatttttcttctctgtcttcctctcttaaatttcaacatctctcttcttggctgctgctgttttcttcattttatgttaatgactcaaaaaaggtatttttatagaatttttgtactgcagcatgcttaaagaggggaaaaggaagggtgattcactttctgacaatcacttaattcagaggaaaatgagatttactaagttgacttacctgacggaccccagagacctattgcattgagcagtggggacttaatatattttacttgtgtgattgcatctatgcagacgccagtctggaagagctgaaatgttaagtttcttggcaactttgcattcacacagattagctgtgtaatttttgtgtgtcaattacaattaaaagcacattgttggaccatgacatagtatactcaactgactttaaaactatggtcaacttcaacttgcattctcagaatgatagtgcctttaaaatttttttattttttaaagcataagaatgttatcagaatctggtctacttaggacaatggagactttttcagttttataaagggaactgaggacagctaatccaactacttggtgctgtaattgtttcctagtaattggcaaaggctccttgtaagatttcactggaggcagtgtggcctggagtatttatatggtgcttaatgaatctccagaatgccagccagaagcctgattggttagtagggaataaagtgtagaccatatgaaatgaactgcaaactctaatagcccaggtcttaattgcctttagcagaggtatccaaagcttttaaaatttatgcatacgttcttcacaagggggtacccccagcagcctctcgaaaattgcacttctcttaaaactgtaactggcctttctcttaccttgccttaggccttctaatcatgagatcttggggacaaattgactatgtcacaggttgctctccttgtaactcatacctgtctgcttcagcaactgctttgcaatgacatttatttattaattcatgccttaaaaaaataggaagggaagcttttttttttctttttttttttttcaatcacactttgtggaaaaacatttccagggactcaaaattccaaaaaggtggtcaaattctggaagtaagcatttcctcttttttaaaaatttggtttgagccttatgcccatagtttgacatttccctttcttctttcctttttgtttttgtgtggttcttgagctctctgacatcaagatgcatgtaaagtcgattgtatgttttgaaggcaaagtcttggcttttgagactgaagttaagtgggcacaggtggcccctgctgctgtgcccagtctgagtaccttggctagactctaggtcaggctccaggagcatgagaattgatccccagaagaaccattttaactccatctgatactccattgcctatgaaatgtaaaatgtgaactccctgtgctgcttgtagacagttcccataactgtccacggccctggagcacgcacccaggggcagagcctgcccttactcacgctctgctctggtgtcttgggagttgtgcagggactctggcccaggcaggggaaggaagaccaggcggtaggggactggtcttgctgttagagtatagaggtttgtaatgcagttttcttcataatgtgtcagtgattgtgtgaccaaggcagcatctagcagaaagccaggcatggagtaggtgatcgatacttgtcaatgactaaataataacaataaaagagcacttgggtgaatctgggcacctgatttctgagttttgagttctggagctagtgttttgacaatgctttgggttttgacatgccttttccacaaatctcttgccttttcagggcaaagtgtatttgatcagaagtggccatttggattagtagccttagcaatgctacagggttataggcccctctccctttcacattccagacaatggagagtgtttatggtttcaggaaaagaactttgtggctgaggggtcagttaccagtgaccttcaatcaactccatcacttcttaaatcggtatttgttaaaaaaatcagttattttatttattgagtgccgactgtagtaaagccctgaaatagataatctctgttcttctaactgatctaggatggggacgcacccaggtctgctgaactttactgttcctctgggaaaggagcagggacctctggaattcccatctgtttcactgtctccattccataaatctcttcctgtgtgagccaccacacccagcctgggtctctctacttttaacacatctctcatccctttcccaggacttccttccaagtcagttacaggtggttttaacagaaagcatcagctctgcttcgtgacagtctctggagaaatcccttaggaagactatgagagtaggccacaaggacatgggcccacacatctgctttggctttgccggcaattcagggcttggggtattccatgtgacttgtataggtatatttgaggacagcatcttgctagagaaaaggtgagggttgtttttctttctctgaaacctacagtaaatgggtatgattgtagcttcctcagaaatcccttggcctccagagattaaacatggtgcaatggcacctctgtccaacctcctttctggtagattcctttctcctgcttcatataggccaaacctcagggcaagggaacatgggggtagagtggtgctggccagaaccatctgcttgagctacttggttgattcatatcctctttcctttatggagacccatttcctgatctctgagactgttgctgaactggcaacttacttgggcctgaaactggagaaggggtgacatttttttaatttcagagatgctttctgattttcctctcccaggtcactgtctcacctgcactctccaaactcaggttccgggaagcttgtgtgtctagatactgaattgagattctgttcagcaccttttagctctatactctctggctcccctcatcctcatggtcactgaattaaatgcttattgtattgagaaccaagatgggacctgaggacacaaagatgagctcaacagtctcagccctagaggaatagactcagggatttcaccaggtcggtgcagtatttgatttctggtgaggtgaccacagctgcagttaggaagggagccattgagcacagactttggaaggaaccttttttttgttgtttgtttgtttgtttgtttgtttgtttgtttgagacagggtcttgctctgctacccaggctggggcgcaatggcacgatcttggctcactgcaacctctgcctcctgggttcaagtgattctcctgccacagcctcctgaggagctgggactacaggtgcgtgctaccacgcccagctacttctgtatttttagtagagacggggtttcactgtgttggccaggctggtctcgaactcctgacctcatgatctgcccgcctcagcctcccaaagtgctgggattacaagtgtgagccaccacacctggcctggaaggaacctcttaaaatcagtttacgtcttgtattttgttctgtgatggaggacactggagagagttgctattccagtcaatcatgtcgagtcactggactctgaaaatcctattggttcctttattttatttgagtttagagttcccttctgggtttgtattatgtctggcaaatgacctgggttatcacttttcctccagggttagatcatagatcttggaaactccttagagagcattttgctcctaccaaggatcagatactggagccccacataatagatttcatttcactctagcctacatagagctttctgttgctgtctcttgccatgcacttgtgcggtgattacacacttgacagtaccaggagacaaatgacttacagatcccccgacatgcctcttccccttggcaagctcagttgccctgatagtagcatgtttctgtttctgatgtaccttttttctcttcttctttgcatcagccaattcccagaatttccccaggcaatttgtagaggacctttttggggtcctatatgagccatgtcctcaaagcttttaaacctccttgctctcctacaatattcagtacatgaccactgtcatcctagaaggcttctgaaaagaggggcaagagccactctgcgccacaaaggttggatccatcttctctccgaggttgtgaaagttttcaaattgtactaataggctggggccctgacttggctgtgggctttgggaggggtaagctgctttctagatctctcccagtgaggcatggaggtgtttctgaattttgtctacctcacagggatgttgtgaggcttgaaaaggtcaaaaaatgatggccccttgagctctttgtaagaaaggtagatgaaatatcggatgtaatctgaaaaaaagataaaatgtgacttcccctgctctgtgcagcagtcgggctggatgctctgtggcntttcttgggtcctcatgccaccccacagctccaggaaccttgaagccaatctggggactttcagatgtttgacaaagaggtaccaggcaaacttcctgctacacatgccctgaatgaattgctaaatttcaaaggaaatggaccctgcttttaaggatgtacaaaagtatgtctgcatcgatgtctgtactgtaaatttctaatttatcactgtacaaagaaaaccccttgctatttaattttgtattaaaggaaaataaagttttgtttgttaaaaaaaaa

SEQ ID NO: 3905 - DNA, 826 bp, Homo Sapiens
  misc_feature (519)..(519): n is a, c, g, or t
  misc_feature (553)..(553): n is a, c, g, or t
  misc_feature (570)..(570): n is a, c, g, or t
  misc_feature (580)..(580): n is a, c, g, or t
  misc_feature (586)..(586): n is a, c, g, or t
  misc_feature (592)..(592): n is a, c, g, or t
  misc_feature (607)..(608): n is a, c, g, or t
  misc_feature (610)..(610): n is a, c, g, or t
  misc_feature (619)..(619): n is a, c, g, or t
  misc_feature (630)..(630): n is a, c, g, or t
  misc_feature (632)..(632): n is a, c, g, or t
  misc_feature (644)..(644): n is a, c, g, or t
  misc_feature (649)..(649): n is a, c, g, or t
  misc_feature (662)..(663): n is a, c, g, or t
  misc_feature (668)..(668): n is a, c, g, or t
  misc_feature (671)..(671): n is a, c, g, or t
  misc_feature (675)..(676): n is a, c, g, or t
  misc_feature (686)..(687): n is a, c, g, or t
  misc_feature (689)..(689): n is a, c, g, or t
  misc_feature (695)..(695): n is a, c, g, or t
  misc_feature (718)..(718): n is a, c, g, or t
  misc_feature (720)..(721): n is a, c, g, or t
  misc_feature (729)..(729): n is a, c, g, or t
  misc_feature (732)..(732): n is a, c, g, or t
  misc_feature (735)..(735): n is a, c, g, or t
  misc_feature (741)..(741): n is a, c, g, or t
  misc_feature (750)..(750): n is a, c, g, or t
  misc_feature (758)..(758): n is a, c, g, or t
  misc_feature (772)..(772): n is a, c, g, or t
  misc_feature (779)..(779): n is a, c, g, or t
  misc_feature (781)..(781): n is a, c, g, or t
  misc_feature (786)..(787): n is a, c, g, or t
  misc_feature (789)..(789): n is a, c, g, or t
  misc_feature (793)..(794): n is a, c, g, or t
  misc_feature (816)..(816): n is a, c, g, or t
  misc_feature (824)..(824): n is a, c, g, or t
gaatcggcacgagatctcacgtgtctacccagacccttgtgcggcccatgccccgggggcggcgtcctgtccctgagctgggaggcggctttggatggtccgggcgtcaagagcaggggtgggccggggaggggtcctttgcggtgagctatgtttacatgacacagtgtgccaaagtgacttactgcggttgcgttagtttctagtcatcaggactatctcaccctcccactcctgtttttaaaactcagaattctttcctaagagcccttcgagcaaagcgtgccgaagttagttgtcttctctgtgctggtcctttcttatgtcctcataaaagctcagatgatggtatctgtgagtatgttttgcaaattcaaaatatagtttggtaatttttttttccagttgatttttaaaaagaaactgctgtacagagcttgtactttgtcccattttatagatgggaaccatccttgaaaatggttaacttaaaaaaggggagatacttccagaaccgcnaaaaaaaaaaaaaaaactcgagggggggccgganccaattcgcccaaaagngggcggatanaatcancggcgnggttaaaaggcgggnncnggaaacccnggggacccaantnaaaggcctgganaaaancccctttgccaannggggnaanaacnnaaagggcccnnancgggtngcccttcccaaaaagttgggccncnnaaaagggnaanggnaaattnaaaccgganaaattttngaaaaaaccccggnaaatttntngaaannancccnnttttaaccaaaaaggggaaacngggaaaancc

SEQ ID NO: 3906 - DNA, 518 bp, Homo Sapiens
gcggccgtgtgatccaaaaagaggagccaggttaaattaacagatggaggcatgaggtaagtgcttcttagcactcgaagaatcaggaagattttcagaaacaggaattagcaatctggaaggaaagctcagaataacacggttgtttcctgcgcagtggaaggccttgggctgcgcctccctccacctgtgatctgcgttaacgggccccttgctgcaggtgttggcagtggtagttttctagacggaacctcacacccccgaatggctgtcagtgtgtgtgtgtggagactcaggagtcacctgtgcagggcttgtgagtttcctagagaaagagacggaccatgttctcaaaactgtgcctcgagtccactccttcttcatgggtgtgcaggcgcaaagccacaacctccaccctgctctccctcctgtgtctcttcccccggtgtctgtgcaaatacgggtgtcttcgtgtctaagtgagagagtctttgtgggtcgacagcacatctgagctg

SEQ ID NO: 3907 - DNA, 1034 bp, Homo Sapiens
ggcaggcaggagagtgctggggcagggagttcagtctatgtggtggaggctcagatttggagctggaggggttggggcggttcttagagctgagcttggggccaagggtccctgtggtctgggctgggagactcagtcagaaataggtattgcttatcctctgggactatgacagcccctccctggggttgggggtgtgacagtggacagaagccgagcccagggggtccctgagtagcccacgggcaggaggatgcctgggactgcatctgcctcctgtcggggcctggacagtggaagggggccagaccacaagcggcccctcctccggtcattgtgcggtgcctctgagggctgtggcaaggtgcgcggtgctcacagtctcatcgtggtgccgggtcaggtcctcgccagtagttggtggcctgactgcccacaaacatgttccaattacccaggattaccgctttgctcagccgcccatccttgtccgtgtagctctcgtgcagcaggtggttggcttccaccagggctggtcctgggcatgggggcagcacccagtggcccaacctcactctcatccaggtgccatccttgttcagatcccggaagtcccggactgctgactctcccgtatgcaccacggccggtcctcctccccaggctcggctgagtacagatccggatgtactcctccactgacctagacatcttgatatcttgtcaaggtcctccagggttacaggaatcacgatgtcccggatgtgagggacttccacgggtgcaagaatggtggagatccaaccgagtgacagcaaatcccatcaggataggcaacgaaaagccggagcagaaacaagaatcaagaggtttgaaacatcaggcgaaatttccacgagggaaaagaaaagggaataacaatctccaaaaagacagaggagtataaatcacagcagacaaacagtcagaaagacaagagggtaacagaagagaactatagtttaaaagattgatacgagatgagatgataataa

SEQ ID NO: 3908 - DNA, 495 bp, Homo Sapiens
  misc_feature (354)..(354): n is a, c, g, or t
  misc_feature (467)..(467): n is a, c, g, or t
gcggccgccgtggctcctgcgtctcccatcgtgccgtgcgtcccgcgccgcgttcgagttctcggaggggagggggcgttagccccgcgcagccgccggcgtcgccgccatggacctaggacccttgaacatctgtgaagaaatgactattctgcatggaggcttcttgctggccgagcagctgttccaccctaaggcactggcagaattaacaaagtctgactgggaacgtgttggacggcccatcgtggaggccttaagggagatctcctcggctgcagcacactcccagccctttgcctggaagaagaaagccctgatcatcatctgggcccaaggttctgcagccgcacncccgtgaaccccgtccgacacagagaccacggtggcaaggaagaacctgttcttcttcggtgggcaaccatgatccccaccatcaaccacaccatcctcttcgagctgctcanatcccttgggaggccttctggactcttt

SEQ ID NO: 3909 - DNA, 429 bp, Homo Sapiens
  misc_feature (429)..(429): n is a, c, g, or t
ctccccagggtcatctcacctagatctttctctcccaggtcatctcagctcaatctcaataaccctatgaaagccctggtctgttgtgttccttcaccgtacggtttctgtaataaaaagtgttaatccatgttaatctgtgtgaaaattattgcgtgcaacagtattttctccgtgtacctctttttcctatgtgaattgtccctcttttttatttataaatgtctacttttgtttttttaaagacaaaccaatgtgttgtagacctatatgtaacctattccttagtctcatattataggtatgttataagaatggatattttacttggctttagaatgttttacaagaaaactaattcttaactgatcaagtccttgctactaaaatgcttgtgtttttcatcatgacgtcgtgtgcttctaaatn

SEQ ID NO: 3910 - DNA, 258 bp, Homo Sapiens
gcggccgccccgcttgccgcgggctggaggctgcagcgcgtctggcccggaggcgccacggccggggagcgagcggcagcgcggcccggcgcggcgggagaggaactggctgtctctgggctcggccgagaggtcccagctacttcctggtgctcggatttgcatattgagcccggagggcggggaagtgaccgtttggtccctgcccaaggtttgggtgtttggtgtggccgtcgcgcagggctttgaaggcacaga

SEQ ID NO: 3911 - DNA, 440 bp, Homo Sapiens
gtagagacagggtttcactctgttgcctggactggcctcaagtgatcctcgtatcatggcctcccaaagtgttggtgtttcaggcataagccatagcacccggtcctgaaacctaccctttacaagaggtaatgcccctaaaagggacctaattttattttgactgctaacttcccatttttattctttttttttttttttaaatgtaaagacagggtctcactatgttccccaggctggcctcaaactcctgagctcaagcgatcctcccacctcagcctcccaaagtgctgagagtacaggcataagccactgcacccagcctttgttttaaaatgcaaataatgctatcagtcccaaagtgacattattgagaaggagaattattttaggtattaatccctaattattttcttcctggaacagcctagaatcaagag

SEQ ID NO: 3912 - DNA, 298 bp, Homo Sapiens
  misc_feature (204)..(204): n is a, c, g, or t
ctttaataaaaaatgttttcagaaatagataagtgaaagctgagtgtttctttgataggttcccctgtactataggagtgataattgcagctattgcaatagtagtaattgttaaatggatactaatgaatagcatagcatagtgggtaagagtttatatagcacaggctctagaatcagattaagtaggttcaaataccagtnctgccagtaactggttttagaaccttgggcaagttaaagaatgtctcccagcctcagtttccctatttgtaaaatggaaataatggtagctacc

SEQ ID NO: 3913 - DNA, 412 bp, Homo Sapiens
gaggcgcggcctggcctcgcactcaaagccgccgcagcgcgccccgggctcggccgacccggcggggatctaggggtgggcgacttcgcgggaccgtggcgcatgtttcctgggagttactgatcatcttctttgaagaaacatgaagttacactatgttgctgtgcttactctagccatcctgatgttcctgacatggcttccagaatcactgagctgtaacaaagcactctgtgctagtgatgtgagcaaatgcctcattcaggagcctctgcagtgccggccgggagaaggcaattgctcctgctgtaaagagtgcaatgctgtgtcttggggccctttgggaacagtgctgtgactgggttggtatgtgaatcctcgaaatttagtgacacaccttcaacttcaaaga

SEQ ID NO: 3914 - DNA, 3988 bp, Homo Sapiens
tgcaactccgagcgtgagtccaggctaaggggacgccggccggggaagaggcgcggcgggagaagcgaccgcagcgggagcccggccaccgagggctgccggcactaggcgcagagccgccagcgctcggaagcccgcggggtgcgggagcgggaacagacttcttttgtagaattatcctatggaatgatattttcataatgagtcaacaaggttacgtggctacacctccgtattctcagcctcagcctggaataggcctttctccacctcattatgggcactatggggatccgtcgcacacagcatctccaacaggtatgatgaagccagcagggcctttgggggccaccgccactaggggaatgttgcctccgggtcccccacctcctggaccccatcagtttggtcagaatggagctcatgccactggtcaccctccccaaagatttccaggccctccacctgtcaacaatgtggcatcctcacatgcaccataccaaccctctgcacaatcttcttatccaggtcctatatccacttcatctgtcacccagctgggcagccagctcagtgctatgcaaatcaacagctatggttcaggcatggctcctccaagccagggaccccctggccctctgtcagccacatcattgcagactcctccacgacctccacagccttccattttgcagcctggatctcaagttcttccaccaccacccaccacactcaatggtcctggtgcctcacctttgcctctaccaatgtacagaccagatgggctctctgggcctcctcctccaaatgcccagtaccagcccccacctcttccaggccagaccttgggtgctggatatcctccgcagcaggccaactctggtccccagatggcaggcgcacaactgtcttacccaggaggcttccctggaggtcctgcacagatggctggtccgccacagccccagaagaagctggatcctgactctatccctagcccaatccaggtgattgagaatgatagagccagcagaggaggacaagtttatgccaccaacaccagaggccagatccctcccctggtcactacagattgcatgatacaagaccaaggaaatgccagtcctcgattcatccgttgtacaacatactgttttccatgcacgtcagatatggctaagcaagctcagattccattagctgctgtcatcaagccctttgccaccattccttcaaatgagagtcccctttacttggtaaatcacggcgagagtggaccagtcagatgcaacaggtgcaaggcctacatgtgcccatttatgcagttcatcgaaggaggaaggagatatcagtgtggattttgcaactgtgtgaatgatgttccaccattctatttccaacatctggaccacattggaagaagactggaccactatgagaaaccagagttatctctaggatcttatgaatatgttgccactttggattattgcagaaagagtaagcctcccaacccaccagcctttatcttcatgattgatgtttcatatagtaacataaagaatggacttgtcaagctcatatgtgaagaactgaagaccatgctggaaaaaattccaaaggaagagcaagaagagacgtctgcaattcgagtgggttttatcacatataacaaagttctccatttctttaatgtgaagagtaatctggcccagcctcagatgatggtggtgactgatgttggagaagtctttgttcctttgttggatggtttccttgtcaactatcaagaatcccaatctgtgattcataatttgttggaccagattccagacatgtttgcagactctaatgaaaatgagactgtctttgcttctgtcatccaggctggcatggaagcactaaaggcagcagactgtcctgggaagctgttcatcttccattcttccttgccaactgctgaagcaccagggaagctcaaaaacagagatgacaaaaaactggttaatacagacaaagagaagatacttttccagccccaaacaaatgtctatgactcattggccaaggactgcgtggctcacggctgctctgtgacactcttcctctttcctagtcagtatgtggacgtggcctcgctggggctggttcctcagctcactggaggaaccctttacaaatacaacaatttccagatgcacttggatagacaacaatttttgaacgacctcagaaatgatattgaaaagaaaataggctttgatgctattatgagggttcgtaccagcacaggtttcagagccactgatttctttggtggaatcttgatgaacaacaccaccgatgtagaaatggctgccatcgattgtgacaaggcagtgaccgtggagttcaagcacgatgacaaactcagtgaagacagtggagccttaatccagtgtgctgtgctttacacgacaatcagtggtcaaagaagacttcggattcacaatcttggcttaaactgcagctctcagctagctgatctttataagagctgtgagacagatgctcttatcaacttctttgccaagtcagcttttaaagcagttctccaccagcctttgaaggtcatccgggaaattctagttaatcagactgcccatatgttggcatgttaccggaagaattgtgcaagtccttctgcagcaagccagcttattctaccagattccatgaaagtattgccagtgtacatgaattgcttgttgaaaaactgtgtactactcagcagaccagagatctcaactgatgaacgagcataccagagacagctggtcatgaccatgggtgtggctgactctcagcttttcttctacccacaacttctgcccatacacacgttagatgtcaagagtacaatgttacctgctgccgttcgttgctctgagtcccgtctttcagaagaaggaatattcttactggctaatggtctacacatgttcctgtggttgggagtaagcagcccaccagaactgatccaaggaatatttaatgtgccatcttttgcacatatcaacacagatatgacattgctgcctgaagtgggaaacccatactctcaacaactcagaatgataatgggtattatccaacaaaagaggccatattcaatgaagctcacaattgtaaagcagcgagaacaaccagaaatggttttccgacagttcctggtagaagacaaaggactttacggaggctcttcttatgtggatttcctttgttgtgttcacaaggagatctgtcagctgcttaattaattgaaacttctctgtcattgatgttgcatttccaaggagataatctccttcttggtgcctaattttctagatgataataggctagttttgatttcttgctcattttcagaataactttccaggaagagatggcatttagaacttcagctttggtgctcaggtataaagccaattaaggtacaattgtaccataaagggaacaatctgtttctgattgcacagtttctaatttttaaaactgatgtggtttgcatttcataaaaggcaaagtttacagaaccataaacattctcaattttctttatgctagacatataaattatttttcaaactgtatagatttggggtaaaaagttgtctcagttcctctcccaattgcaatgagaaaaaaaagcttaatttttacattatacttaattttctaaaaccatgtaactccattgaacatttttcaacttaaggtctgcatagcagacttttaataaccttgggatttatctggtagaacaatatgtgttctacatttttttcataattatatattgtgtatgttaaaactattttccagttgttttgtctgtaaaactgtctttatcaatatgcttaatggttctttgtacaattttgaaagtttctacctgtatataatggatgttaaccagtatcaataaatcacttcgtataatctt

SEQ ID NO: 3915 - DNA, 277 bp, Homo Sapiens
tttttttttttttttttggcgagatggcgtggggggatcggagttagaggcagggaggagaaggggggaaagttctcgggggaggcaaaaaaaaaaaaaaagttttttctcctctgcaaaaggcgggcagggcgccctaagtccaaggacaatccatggaagtgttcgcttcttcacaagttgtgcaaacgatttgttagttcatgagcctaattagtgcggggatcacataaacagcttcctccgaagcctggaaaatggcttgatcctcgtgccg

SEQ ID NO: 3916 - DNA, 484 bp, Homo Sapiens
tttttttttttgtttatttattcattcattctttctttctccagatccttgccgagcatctgctctgtacaggccgtgtactaagtgctagagagatggtgtggggtagataatggcttccaaagatgttcacgtcctgatccacagatcctgtgagtatgttaccctgctttctaaggcactcctgctggattttggtggcaaatctgggtagtcatttttcattccgcaggactcctccttactcacagttgagccaaggacagccaagtgacctgggatcctggtgacgtgttaaatgctggttctgattcagcaggtttcgggtggagctggagattcttcattccaacaagctcccgggccatgctgatgcttaaaatggaagcagtgccattggaagaagcactgctctcaggctcaggagaagacccagtctttcaaagactcctttgggaatgtccagacttcccacttcagacag

SEQ ID NO: 3917 - DNA, 1024 bp, Homo Sapiens
tttacaaatttgggttaaacccctgcctctggttcttgcccagagctgaagagtgaatctattcacatgagatcagagctgtcaggataattatcaagtgcagtaataaagtagcattttgaaaaaaatatataccttgtagtattgcctttctagaattaactataagcaagaaaaacttattttttaaagaagaacaagaatacttttctcactcttacttataagagctggttgtaagcagcactactaaagctagttggtatgctggaaagaaatctaaaaggaattctatgaatcaaaagaaactctccagagattttctctaaaaatcaaacgaattctgccccttttgcctaaatccaactcaggagccccctctttgcacagtcctttagctgagtcccacggtgcactgggatggcacagggtgatgctgtgtaaaggcctttctttgctcagacatgcaggagacagctgtggctaatggctgcaagctcagttctggagctgggcagactcaggttcaagccctcctcgcccctcaagagttgtgtggctctgggcagtttccttggctgtagggggactaatattgccgatctcacagggctacggagaagatgaaacatgacaacccatgagcaattcccagcacagtgtgtggcatgcaggaagcgggagtatcactaaatggttcatagaaatatgaggccacgcatgctattactgagagaaagtttgacagaattaaagactccctctcaggaagggcctgatgaaccaaagggacctggggaatctgggccaaactggttaatccttccgggaacaacggcctttctcagagccgtcggggagccctagtataaacggggggtccctcccgggatgctgtgggcccggaacgcaaaggctgccggagttaagcgcaaaggcccaactggaatcgggcaaagaaatcgtcacagataaaggcagaaaacgggcgaccccgaggagacggggcaaacaaggacaaaac

SEQ ID NO: 3918 - DNA, 437 bp, Homo Sapiens
gacatcgctctctcaggctctggcaaagtgactggatgtaccaggttccctctgcagggtttcggtaggaaacacagttattcacagtggccatccccagcagaaagtcagcctcatccgggatatatctcgtttgaggtgatgataaatccatttctaaatagggttgctcctctgaatcagtctcaacaggtatacctttctggtagttatccccctgacaagcctgaataaaaaacactttgggttttccagcaagggaagggcacttcaaaccagtgaactgagatgtcagctcatagatgggggcctcctgtccatcagtgccatagatgatgcccttgtctccatgggagatggatacagcagatgaagcagtccatgttactgtggtccatgagttggtagattttcaaaatctcatagatttgctctaa

SEQ ID NO: 3919 - DNA, 405 bp, Homo Sapiens
tttttttttttttttttgagtttaacagaaaaagtttattttaagaagacacaaacagctctagctatagaaagaatacagttcaattgctggtagcaagccagtatggaatgccttttttttttaaagaaagacaagaaaaaccctttgtaatatcaccccacagagggctcccttccattttgtgttggtatcctaaaaagactgagatcgggatctctcctactttctgcttcttcttgaaatgttagggacacattcccagctctaggagatgtgtctttcctgtaccttccagtttagggtatgggctgtaaattcttgtctcccttatttttctaagggcattggtggcattcagtaagcactaaatgggaagtgtagtatttttgctgcttttgggtc

SEQ ID NO: 3920 - DNA, 554 bp, Homo Sapiens
  misc_feature (436)..(436): n is a, c, g, or t
atgcttttttttttttttttttgttttttttttgagtcaaggtctaactctgtcatccaggctggactgcagtgacccagttatagctcattgcagcttcgaactttggggctcaagccatccttacacctcagcctctgagtagctgagacgacagatgagtgtcatcacatccagctgttttttgtttgcttgttgttttttgtttgtttgtttttgtagagatgggatctcactgtttcccaggctggtctcctggcctctagcagtctttctgcctcagactcccaaagtgttgggaccacaggcacaagccaccaatcttgaccattgttgaaaattaaattgttttcttaacatcatttttgatttattcattgatactatattgaaagataaccaatttctgcatatttaatcctgtatcctgtaactntgctgaatttatttattaataaatcatgcctttggattttctatagttttcccttggattactatgcacaaaaccaccatatcgtctcccatctctatttagttatacttcttccttt

SEQ ID NO: 3921 - DNA, 613 bp, Homo Sapiens
ttgcatttaggtgacactatagaagagctatgacgtcgcatgcacgcgtacgtaagcttggatcctctagagcggccgcctactactactaaattcgcggccgcgtcgacagctaaaggtgcttgactaacagtagttgcagaaatggctattttaactgtcctttcctacctgtagcaagccatacaaacttctttgataaagatgctttcctgataccaagatgagaagatggctctaatcagctgagacagcaccagaggaatctacaaacaagaaactattagtttcttaacatatatttaccttccacagtttctgcctctggaagcctaaaactgctttccttcgtcttgtcacacttctctgaaatgtattctttgtggaagatgctatatagtccagagttgtaagccactacttgtgtttaccttttcattgagttttctcctgtgtgatgtacgttgcatatattaataaaattacttgtttttctcttgttaaaaaaaaaaagtcgacgcggccgcgaatttagtagtagtagtcgacccgggaattccggaccggtacctgcaggcgtaccagctttccctatagtgagtcgtattagagc

SEQ ID NO: 3922 - DNA, 519 bp, Homo Sapiens
tttttttttttttttaatggtaggaatttgtattttttgcctttgttcagaatacatgacattggtaaatatgccacatgcctttggtggaagtacaactgttgttattactctatacaagtatgagatcagggttaggaaaaaaagacaaagaggtgatgacagacacacagtggaaaccccacatcgtctcatggcaaaccgaagaacgggatgtgggaagctcagcttcatttgactgcaaagtcccagggttttgttgcacatttgctcatgcacatgggtggcgggaggaaagggggatagcaaagacacacagaagagggtacagggtgggtgagaaagaaagtagaagggctaatacccccaaagaacaaggccaactacacctggtgagcctcagagggacagaaacccaggaatgattcctgtgatagggctgggagagccaagaggacggattcgctccaggcttgggacacatcgaggacagtggtggttcttctccagcggtgaccc

SEQ ID NO: 3923 - DNA, 395 bp, Homo Sapiens
tttattctttccacagtttattgagtgcctgctacacaccaagcactattccaggcactggggatacagcagggaaacgagacagaggaaggccttgccctcatggagcttacattctagttcagggatacaaacaagtcaaataaataaggagttctgagagcaggggtgctcttaagaattcagaacaggtgatgtggcacccctgcagagggggtcctgggagtgatctctccaaggaggaaacagccaagctgagattcgaaggggatgggggtgggggagctccggaaagatgggggaagagttggaggcagcgatgacagaagtccagtggtggcaaacacctgatgcctcaaagaaccaagagaagagagtggggcaggaccatggag

SEQ ID NO: 3924 - DNA, 602 bp, Homo Sapiens
  misc_feature (585)..(585): n is a, c, g, or t
gaacaccaactgtttattacaggaattcctatgaaacagctccaagaaaaaacccacacataggaggaaaaaaaataacaaagcaacactcaacagacatggggctggggcttcccccacagttcgccgggtcctggcgcggggaaggctcagagacccgtcgagaactcgagctggggtaccgaggcactcctcggagacccccccccctccctccagggccccaggcctggcgcggggagcagcggagggggcgaccgctcctcggcagggccccccgagccagcgtcccggccccgcgcgcgtttccaaacttggtcacgctcggcggcggctgcgcgtcccggccctccccaagctcggcgttgcgagtccgggcagggtgggcgggacgaggtgcgatcgccggctcgccttcgctacgcccttgtgatcttggggccacggaggccaccagggcccggccaaggatcggatgccactcccaacctcccagagccgcgccgaagcctcgtgcctgcccaggcttcccggctctccggaaggtctgcgcgctcccatgtccagggcgggaccacgggctgngcagcctccctccccgt

SEQ ID NO: 3925 - DNA, 5402 bp, Homo Sapiens
gccggttcccaggccgggtggagaccaactctggggtctcttggtgggagagtggggagcccgtcttctgctgagtgctgccgccccttcccaggacagcggaggtggaacttcgtcgcgctgcaacccccggctcgggatcctggggcgtcctttggcagttgattgcaccctgcactagagagaagtccaggaatgatatattcttgggctgtatttctctaccctggagttcatccagttcatcccagaaacactgacctgattactgtgacaaagtctgatggatagaccctttctgttgaccttgtggcgtttttctttcatgtggaagttggaagacaaggtgaaaggggccaaaagttacctgctttggtgaataggagtgctctacttggttctcagaacatgggccctcgtttaaagctgcagctgtgatcctcggctgtctgttggcattgacgggacctgatgttttacgttattggtggaatcacagtgtctgtggttgcattcttcttcacaattaagttcctctttgagcttgccgcacgtgtagtcagcttcctccagaatgaggaccgcgagcgccgaggggaccggactatttatgactacgtgcggggaaattacctggatccccggtcttgcaaagtctcctgggattggaaggacccctatgaggtgggccacagcatggccttccgagtgcatttattctataagaacgggcagcctttccctgcacatcggcctgtgggactaagagttcacatctctcatgtcgagctagcagtggaaattccagtgacccaggaagtccttcaggagcccaattccaacgtagtaaaagtggccttcactgtgcgcaaggctgggcgttatgaaatcacagtgaagcttggtggattaaatgtggcatatagtccctactacaaaatttttcaacctggaatggtggttccttctaagaccaaaattgtgtgccacttttctactcttgtattgacctgtgggcagccgcacacccttcaaatagtaccccgagatgagtatgataatcccaccaacaattccatgtccttgagagatgagcacaattacaccttgtccattcatgagctcggccctcaagaagaagagagtactggtgtctcatttgagaaatcagtaacatccaacaggcagactttccaggtgttcttgcgactcaccctgcattctcgaggctgcttccatgcttgcatttcataccaaaatcagccaatcaataatggtgaatttgacattattgtcctaagtgaggatgagaagaatatcgtcgaacgcaatgtgtccacttcaggcgtgagcatttactttgaggcttatctttataatgctaccaactgtagcagcactccatggcacctgccacccatgcacatgacctcttcccagcgccggccatccactgctgttgacgaggaagatgaagactcgccctctgagtgccacacccctgagaaggtgaagaaaccgaagaaggtgtactgctatgtgtcaccaaagcaattctcagtgaaggagttctacctgaagatcatcccctggcgcctttacaccttccgagtgtgtccaggaacaaaattttcataccttggtcctgaccctgtccataagctgctcacactggtggtggatgatggcattcaacctcctgtggagctcagctgtaaggagaggaacattctagcagccacttttatccgctccctgcataagaacataggaggctctgagacctttcaggacaaggtgaactttttccagcgagagcttcggcaggtacatatgaaaagaccacattccaaagtcaccctgaaggtcagcagacatgccttgttggaatcgtctctgaaagccactcggaatttctccatctcagattggagcaagaactttgaggttgttttccaggatgaagaagctctggactggggagggcctcgccgggaatggtttgagctaatctgcaaagcactatttgataccaccaatcagctcttcacccggttcagtgacaacaaccaagcattagtgcatcccaaccctaatcgccccgctcatctgcgcctgaaaatgtatgagtttgcgggacggctcgtgggcaagtgtctctatgagtcctctctaggaggagcctacaagcagttggtccgagctcgcttcacccgctctttcctggcccaaatcataggactgcgtatgcattacaagtactttgaaacagatgacccagaattctacaaatctaaagtttgttttatcctcaacaatgacatgagtgagatggagctggtctttgcagaagagaaatataataaatcaggtcaattggataaggttgtagaactcatgacaggtggagctcaaactccagtcaccaatgcgaataaaatcttctatttaaatttgctggcccaatatcggctggccagtcaagtgaaagaggaggtggaacatttcctaaaaggcctgaatgaattggtccctgagaaccttttggctatttttgatgagaatgagcttgagctgctgatgtgtgggactggagacatcagtgtgtctgacttcaaagcccatgcagtagttgttggtggctcatggcatttcagagaaaaggtcatgaggtggttttggactgtggtttccagtctgacccaggaggagttggctcggctacttcagttcacaacaggctcctctcagctaccacctggaggctttgccgccctctgtccctcatttcagattattgccgctccgacccatagcacgctgcctactgcacacacatgttttaaccagctgtgcctccctacatatgactcctatgaagaggtgcacaggatgctgcagctggccatcagcgagggttgcgagggctttggcatgctctgaccactctcctgtcatccagttggctcccatgctctctggagcttctgggcgcaagttacagacatcataaccactgatcctaacacacataaccatcagccagaagatgccgcatgctcccctgtgtctggaggattttgtcacctacaagccttgtctttacctcacctgctccctgcccatatctaccacaggccactttggcatggtatgtaagctgagctcttcattctgtcatgagaagaggaccatgctgctatcatttatttggtcctttgaagatctcagtagctgagggagatggcacacggggctcagccctgttgggaaactggtgtggagacccttaaatccacactgtgctccaaaactccctctgctgatactccttggagacaccctctttggccctcactacttgaccagactggtacttgagtccttctcatgggtggggtgattgcctcttctcatcaggagccaggagagagggggacagataggaggtggcccataggagcagtcccgctgcacaatggtaggcataggccatggcactggactgcctctaaggactgctaaaaagaatatttttttgtggtgtcagaactggaaaaagcactttcccttcgggcatttctggaaatgattattaatcacaaagaagaactctgtaagctttttcttgaattgtagccagtgagaaaagcagatagactgaagaatatgaaggatagctgagctgtagcctccagagtggggcatgcctaggcatatggctggcttggagactactgatgcttttccctgagtttgttattggcactgaagtatggccggcttgggccactgacttccccattatgtagtctgctaaaagctggggatcctttagcattctactgaagaaaattttgtagcaaaagattagaacagtaagaatagtatgccagcaatccctgattctctctctgcttggtgttctctggcagcactaagacaaaggaacagggactaggagtttacgtgcttatcacaggtccttggcgtcaggacactagggatgaacatggaggtgatatgttacacagtaaacacctgccaacccctgtactcccctttgctccatcagttatcaggaaggagaactaaggagggaggaagcttattaggttcactgttgaatgatgattgaagagtacctgctgctgtatcttggaagatgacaacatcctttttcattactgtttgattgaaaataatttcaagattcaaaatctcattgacttcccaaatttgtgtttttaagaaggctttgctgcaagctaccattcccaatggggcagtcaactctgagaatattacaagccatctttattgccaaaaccagcaagtacacagagtcctgaaacaaggcaggactttggcaatgccttggcctcctggaagcatgtctgagccctcctgttcgcagggatcatgaggaacaagccctcctgagctgctacagttcctgcctgacctcagtctttcgcagtcatcatttgtcctttcttggcacatgggtgctgacctcactcatccttggggtccgggatccagcatcagggtctctataccccaggatcctccatgccacatggtcactgctctcctcagggaccaggacaaggtgctgctgcttgcccaaatgttttcccatgggatatgtaccggaaggtttatcaccaccctgggaaacataatgctgccccttgggcccagaaaggggtttccagctgggggcacgtggactggttctgctgtttttggcagtcgcttttctgaattctcccctccggcagccttccagagactgatcctggagattgagttgattgtcttggctagacctgtcattttaagctctagtcatagcactttttcagagcatcttaggcaccattgcaacccaaccagggaagctgcatccctgtggtggtccttaggcaccagtctttgttaaacaaaaccctttggcactattgtggttttctattctctgtctgaactctattcaaaagtatctttgctctcttgggccttttcttttactgttttgttttttttttctaatcctgctttcatactagccagtgtggggaaaaggtacaatatgtcaaagagatgagagagtgttatttcttgggcaattttctattagtgtttcttattttggccagttcttttatttatgtccttgtgacccaggtacttggggggccagctacccttctggccttttagcgtctttgaaggagaccagacatgagtgaatacctaggagagtgtcagcatgtttctggaaaattggcagagaccaagccctgctgcagattcgtcaggccaggtgaaagggccaggcagttgcagctgatgatgtaaatattttgtacagtagataaataaatgtttaaaag

SEQ ID NO: 3926 - DNA, 332 bp, Homo Sapiens
attttcattaaggaggtggcagccgtctgtgccacccagagccggcgggccgctaggtccccggagaccctgctatggtgcgtgcgggcgccgtgggggctcatctccccgcgtccggcttggatatcttcggggacctgaagaagatgaacaagcgccagctctattaccaggttttaaacttcgccatgatcgtgtcttctgcactcatgatatggaaaggcttgatcgtgctcacaggcagtgagagccccatcgtggtggtgctgagtggcagtatggagccggcctttcacagaggagacctcctgttcctcacaaatttccgggaa

SEQ ID NO: 3927 - DNA, 689 bp, Homo Sapiens
cagcctgcccagggcccacccagatgcctctggggttacccctgtctgcttctggtttttctgttggagatctataggtccttttcctgcctccttcacatttcctccccagcttttgcggccacaacacatcagtgtcatttgggtgttttggcaactcaggggccttcggatgatcttaaacctttgtgttcagccagagcccctgtgccctggaaggcgttggggttagtatctctcgggtgccctcagagccacctctgcctgtgatcgtctgatgaggctccctcccaacctgatccaaaagccagtctcaggagtctacccctgggatgggggatgcatctgcacctgactttggggccacgtgccctgtggcaccccagctcactgggagtctcaggagggataaccggatttctgctctttcccttgtcactcccacatgacacagaaaaatggcattcctctctgtctctccctggcatggagagggcagactgtgcacatttcactagggtccaaatacataagggcccaaggcccaggggcttgcatcttcgtgaggagtctctggcccattttccaatgaatcaagcccttttgacggctggattaccaaaactggttaataaacctgggggaggggcccggtccccaatttcgacctatactgggtcgtattacaa

SEQ ID NO: 3928 - DNA, 294 bp, Homo Sapiens
  misc_feature (43)..(43): n is a, c, g, or t
cagtcacaggcgagagccttgggatgcaccggccagaggcatngctgctgctgctcacgcttgccctcctggggggccccacctgggcagggaagatgtatggccctggaggaggcaagtatttcagcaccactgaagactacgaccatgaaatcacagggctgcgggtgtctgtaggtcttctcctggtgaaaagtgtccaggtgaacttggagactcctgggacgtgaactgggagccttaggtgggaatacccaggaagtcaccctgcagcaggcgaatacatacaaaagt

SEQ ID NO: 3929 - DNA, 4611 bp, Homo Sapiens
gtgtcgctcgctttctgtcagcctctctccctctccctctcccctctccttcctctcgcttcctctctcgcacctgagcgtacgcacctgcccgggcccggctccctcctcctctcccctccctctttccccgcccggccgcgggagcctcgtggctgcgtcaccgccgcccccccagacaagatggacaccgcggaggaagacatatgtagagtgtgtcggtcagaaggaacacctgagaaaccgctttatcatccttgtgtatgtactggcagtattaagtttatccatcaagaatgcttagttcaatggctgaaacacagtcgaaaagaatactgtgaattatgcaagcacagatttgcttttacaccaatttattctccagatatgccttcacggcttccaattcaagacatatttgctggactggttacaagtattggcactgcaatacgatattggtttcattatacacttgtggcctttgcatggttgggagttgttcctcttacagcatgccgcatctacaagtgcttgtttactggctccgtgagctcactactgacgctgccattagatatgctgtcaacggaaaatttgttggcagattgtttgcagggttgttttgtggtgacgtgcacactgtgtgcattcatcagcctggtgtggttgagagagcagatagtccatgggggagcaccaatttggttggagcatgctgccccaccgttcaatgctgcggggcatcaccaaaatgaggctccagcaggaggaaatggtgcagaaaatgttgctgctgatcagcctgctaacccaccagctgagaacgcagtggtgggggaaaaccctgatgcccaggatgaccaggcagaagaggaggaggaggacaatgaggaggaagatgacgctggtgtggaggatgcggcagatgctaataacggagcccaggatgacatgaattggaatgctttagaatgggaccgagctgctgaagagcttacatgggaaagaatgctaggacttgatggatcactagtttttctggaacatgtcttctgggtggtatctttaaatacactgttcattcttgtttttgcattttgcccttaccatattggtcatttctcccttgttggtttgggatttgaagaacacgtccaagcatctcattttgaaggcctaatcacaaccatagttgggtatatacttttagcaataacactgataatttgtcatggcttggcaactcttgtgaaatttcatagatctcgtcgcttactgggagtctgctatattgttgttaaggtctctttgttagtggtggtagaaattggagtattccctctcatttgtggttggtggctggatatctgttccttggaaatgtttgatgctactctgaaagatcgagaactgagctttcagtcggctccaggtactaccatgtttctgcattggctagtgggaatggtatatgtcttctactttgcctccttcattctactactgagagaggtacttcgacctggtgtcctgtggtttctaaggaatttgaatgatccagatttcaatccagtacaggaaatgatccatttgccaatatataggcatctccgaagatttattttgtcagtgattgtctttggctccattgtcctcctgatgctttggcttcctatacgtataattaagagtgtgctgcctaattttcttccatacaatgtcatgctctacagtgatgctccagtgagtgaactgtccctcgagctgcttctgcttcaggttgtcttgccagcattactcgaacagggacacacgaggcagtggctgaaggggctggtgcgagcgtggactgtgaccgccggatacttgctggatcttcattcttatttattgggagaccaggaagaaaatgaaaacagtgcaaatcaacaagttaacaataatcagcatgctcgaaataacaacgctattcctgtggtgggagaaggccttcatgcagcccaccaagccatactccagcagggagggcctgttggctttcagccttaccgccgacctttaaattttccactcaggatatttctgttgattgtcttcatgtgtataacattactgattgccagcctcatctgccttactttaccagtatttgctggccgttggttaatgtcgttttggacggggactgccaaaatccatgagctctacacagctgcttgtggtctctatgtttgctggctaaccataagggctgtgacggtgatggtggcatggatgcctcagggacgcagagtgatcttccagaaggttaaagagtggtctctcatgatcatgaagactttgatagttgcggtgctgttggctggagttgtccctctccttctggggctcctgtttgagctggtcattgtggctcccctgagggttcccttggatcagactcctcttttttatccatggcaggactgggcacttggagtcctgcatgccaaaatcattgcagctataacattgatgggtcctcagtggtggttgaaaactgtaattgaacaggtttacgcaaatggcatccggaacattgaccttcactatattgttcgtaaactggcagctcccgtgatctctgtgctgttgctttccctgtgtgtaccttatgtcatagcttctggtgttgttcctttactaggtgttactgcggaaatgcaaaacttagtccatcggcggatttatccatttttactgatggtcgtggtattgatggcaattttgtccttccaagtccgccagtttaagcgcctttatgaacatattaaaaatgacaagtaccttgtgggtcaacgactcgtgaactacgaacggaaatctggcaaacaaggctcatctccaccacctccacagtcatcccaagaataaagtagttgtctcaacaacttgaccttcccctttacatgtccttttttgtggacttctctctttggagatttttcccagtgatctctcagcgttgtttttaagttaaatgtatttgacttgtgttctcagcattcagagagcagcggtgtaagattctgctgttctccctggatcttctgacattactgctgtctgagatttgtatatgtgtaaatacaagttccttgataccctaaaaccttggattaaacagaatgtgcattgtacatctttaaacaaaatgtatattaatttattaaatctagttgtcactttattttggacctgctgtgatctcgacaggaaacgtgccacagagcagtagtgcgcaggcaagacttttcagtgacgccttgtggaacgcagttcatgatgtcctagcagctctcactaagggaactgtacattctttctttcttggctattcagaccttaccaagaacgttaaaggaaacaagtagaaatcagcagtggagtgtctgtggtaagaaaacatgaactttatgcttcactgttagttgtttgtggaagttattttgtataacaccaaagctgttgtacatttcctactgcctgatttttttcatgtgtctgtgtttgtaatattgtatagtatcttgtgctaggtgaggaaattatttttaattttgataatttaatattcctagtgtgatcagcattgggagttgggtttcagtggggcatgtctatacttagagaaaaaaagtccaaatgaagattttcatgagtcagcccccccgcccgcccccaccccacacccacatcctctcttttccacacacaactatctgtttattttttgtagcagtggccgaaagtcctgcaaggtcataaatctttcagagtgacatcaccaactgtactgcatcttactggatttaggacttctgagatgcttgtgaagtatagatgtggttgtggtcttagattgacagcattagagaagactggttagaacatctggtctcgctggttagtgcctcgttggctgaggactaggtgtgcatttctcctagcttttcatcaggaaatcccaaagtttccaaagctttttgtttacagaataaaacttcaaataaaaccaattcattatttgtccagaaggaagcttggctgagctggccttttaacataggaatgtatttcgttggaaacattctgaaaaatctcagagaactgaacccttacaaactttgttttccctcataaccaaagcttcaggttagaagtttagaaaaatagaatggttgggtacatgatctaaatgtttaatgctaaaggtatatcgtaagggtagtgtttgtttttgaacgataatttagaagttctcatagaaagcgtataacataggtcttcagaaactataaaagaattttcatatagtattaaaatccatagactaaaatctgagaattttttaacatatgcaagtcagccaaacataagctaccaaaataaagagcaatgtgttctggctgttttatacttcaacaattttttccctaagtggtaagcaattactttaaaacatatttttaaaaacatcggtatcgggagctgcggtggctccggccggttgtcctggcacacaaggaggcgaggctatgcgttcgaggccaacctaggcaaaattgg

SEQ ID NO: 3930 - DNA, 456 bp, Homo Sapiens
  misc_feature (14)..(14): n is a, c, g, or t
  misc_feature (417)..(417): n is a, c, g, or t
acttctttttttanttagggtctcgctctgtcaccctggctggagtgcagtggtacgatcatggctcactgcagcctctacctcctgggctcaagtgatcctcccacttcagccttgcaagtacctgggactacaggcacatgccaccatgcctaatttttttgattttttgtagagacagggtctcattatgttgcccaggctagtcttgaactcctgggctcaagagatgctcctgccttggccttctaaacttctgggattataggcatgagccaccatgcccggcctattcctcattttagttctcctatctacacaaggttttttaatatttctggtattgtaacaagctgtggggttagaaagggaaaacattaggtagcttagacattagatttctttcacttgaggatncaagttctacttagggaatattttaagctttgtatccgg

SEQ ID NO: 3931 - DNA, 603 bp, Homo Sapiens
ttgaatttaggtgacactatagaagagctatgacgtcgcatgcacgcgtacgtaagcttggatcctctagagcggccgcctactactactaaattcgcggccgcgtcgacaattcatcaaattgtgacaggtgcataattcaggattacatactgtgtcggaattgatgggttcttggtctcactgacttcaagaaagaagccacggaccctcatgaggtcattttcttctgaggaagtcattcttaaggactgttctgtccccaaccccagctggaacaaggacctaagactgctctttgaccagtttatgaagaaatgtgaagatggctcctggaaacgtttgccttcatataaacgtacacctactgaatggattcaagacttcaaaacccattttcttggtagaaacagccactttcccattaatatatctgagcatcaaatataaagctaagaacagattgaagtactagttactacctgaaaaaaagaaagaatataatgcaggattatggttctatagtcaccaattttatagaccagaaatcacaataaattttgcagaatggagagcaaaaaaaaaaaaaaaaaagtcgacgcc

SEQ ID NO: 3932 - DNA, 732 bp, Homo Sapiens
gctcttctctttatccttcagtagcttctgccgggatccaggcagagagagcactaatgggggaaagggagcgagcgcttcccgctttccccaagcgtgggccctcggagttgggtgtgggggcagcagggccagaggaaaggcacaggtggcgatttgccccagccctcccccctaagatgcagaccctcagaacacgtcgcggaaggtgagctccctgctccgagaggcagactcgggtgtaacgcaaagacggtttctttcatcaataaggtccccactgcctcacagcccctaaggccacccgctggttctggcattctagacgggggtgcccttggcccttcctttgtcttcctgttttgcagggtaatcccagggttccatgcgtatcctctgcacattcagcatgggctcctcggtgcttgtgtctccatttttctgtcgttctgcgataatcatggcccggaggagaggcgggtacggcacggaggccaggctgtcttccggcgccggcgtgaacgcggtgaaggcctcctcctcgtgcttgggcaccagccgccagtcatggtacatgacgtgttcgatctcccgcgcctcgctctcagtcttccctttgacacggtcaggatgccccaggccttcccgtggtccaagttctgcgccgtgtagtcgggccgcacccgcgtgaggcgccagtagcacggctcgtcgtgctgccacagccaggac

SEQ ID NO: 3933 - DNA, 235 bp, Homo Sapiens
ttgagtagggcttcagctttttcatgcaatcctgaactcccggaccactgggtttggcacagacttgccgccccttcttggtgaggaatatgacacctggcttggaacactcgctgctcgtttcaaaataacttttcatgagtgaacacgggatgctttgtgagatgtaggaggtgcagcagtcagcagcaaagtgaaagctgttcagaactactggattttccagtggaagctt

SEQ ID NO: 3934 - DNA, 472 bp, Homo Sapiens
gcggccgctgcgcagggcgcgaatctcgtgctgtgcccggagctgttcgcgatgccgtacttctgcctcgaccagaacgtgcgccatctcgaactcgcgcagccgttcgaaggcaacgcgcagatcgcccggttcgcggcgctggccggcgagctcggcatcgtgctgccgatcggcttcttcgagcgcgcgggcaatgccgcgtacaactcgatcgccgtggcggacgcggacggacgcgtgctcggcgtctaccgcaagacacatattccggacggtccgggctataccgaagaagttctatttcacgccgggcgacaccggcttcagggtgtgggatacgcgtttcgggcggatcggcatcggcatctgctgggaccagtggtacccggagacggcgcgcagcctcgcgctgatgggcgccgagatcctgtgctttccgaccatcatcggctcggagccgttcagcagc

SEQ ID NO: 3935 - DNA, 1003 bp, Homo Sapiens
gcacatgcgcagaatcatcgtggtgcagggctctccctttgcttcttcggttgcagtcctcttgcttcttgcgcgtgcgtgtagcgcttttgcaaagccgcggaggtgaagtgaacttagaggttgtggggccgaggggtcgtcttatagctaccagcccacaggcatttagtctacgttgggaggtaaacaaatacgggtcctgcttaggagaaaagaaaaacgtcttacagccagtgtctaaactccaaacaacggaatgtatcaatgagaccttgtatatggatacacgtgcatttaaaaccgccctgccggcttgtagagcttttgccgttctccagcgctttacaggggttatcgcacttaagcctcggaacaactttaccagtgattctaccagaaaggaatgaagaacagaaccttcaggaattgagtcacaatgcagacaaatatcaaatgggagattgttgcaaggaagagatttgatgatagtattttctactagccattgggaagataaaaggagacagaagattgaagcctttgccagccattctttccctttttgcttccaaactcctcaactgggaaccttcatatgtgcagtatttatattggatcatactggtgattataaaagttcctaggaggctagaagagccaaccaacagagaagggaaagcagtctgttctgaacatagggacataagttcattcatgccaagtatctttccagcatgtttctcccatttagaatatctagcatgtaaggcctttcaatattaatataagcccaatatcagctctttctctttgtatttcatctctttctactctcctatttgtattttgtgttcctatcaaagtgtcgtatctgggagatgacctgccttatcctgttctataacagttttgtttggtgctgtgtctttagaacagtgcctggcacacagtaagcactcaataaatctttgatgaatgaaaaaaaaaaaaaaaaaaaaaa

SEQ ID NO: 3936 - DNA, 420 bp, Homo Sapiens
  misc_feature (107)..(107): n is a, c, g, or t
  misc_feature (246)..(246): n is a, c, g, or t
  misc_feature (280)..(280): n is a, c, g, or t
  misc_feature (383)..(383): n is a, c, g, or t
  misc_feature (403)..(403): n is a, c, g, or t
  misc_feature (413)..(413): n is a, c, g, or t
gagaacataattttgaatttattatctctctatacacacacagttcataattggattacatataataataatatcaacaagtctatcagtatcgaagttggatactngtaatttctcatgtgaggctcttgtgtcacagtcagcatagatttctggagcatttgtctgttgatcttttggtggcctcaaacctcattaagtggtgtgggagatgctgtttctgccatgtgaagaatgtgatggcangaattaacacaacccccaccaggggtaccaacanagcactttacatccaaaggcagagagggacacagcaatgcagaattccagcacacttaagaggagcaccatgcccatccagacccaggccttttggtagttcnaattcccggctgcaattganaaggatcccnggaaata

SEQ ID NO: 3937 - DNA, 946 bp, Homo Sapiens
tgacagcccaccagtgaccatgaaggctgtgctgcttgccctgttgatggcaggcttggccctgcagccaggcactgccctgctgtgctactcctgcaaagcccaggtgagcaacgaggactgcctgcaggtggagaactgcacccagctgggggagcagtgctggaccgcgcgcatccgcgcagttggcctcctgaccgtcatcagcaaaggctgcagcttgaactgcgtggatgactcacaggactactacgtgggcaagaagaacatcacgtgctgtgacaccgacttgtgcaacgccagcggggcccatgccctgcagccggctgccgccatccttgcgctgctccctgcactcggcctgctgctctggggacccggccagctataggctctggggggccccgctgcagcccacactgggtgtggtgccccaggcctctgtgccactcctcacagacctggcccagtgggagcctgtcctggttcctgaggcacatcctaacgcaagtctgaccatgtatgtttgcacccctgtcccccaccctgaccctcccatggccctctccaggactcccacccggcagatcagctctagtgacacagatccgcctgcagatggcccctccaaccctctctgctgctgtttccatggcccagcattctccacccttaaccctgtgctcaggcacctcttcccccaggaagccttccctgcccaccccatctatgacttgagccaggtctggtccgtggtgtcccccgcacccagcaggggacaggcactcaggagggcccagtaaaggctgagatgaagtggactgagtagaactggaggacaagagtcgacgtgagttcctgggagtctccagagatggggcctggaggcctggaggaaggggccaggcctcacattcgtggggctccctgaatggcagcctgagca

SEQ ID NO: 3938 - DNA, 844 bp, Homo Sapiens
ccccggcgtccacaggtccggaggccgctgcgtcgcggggagctgggctcgggccgcggcggttgcgccggggcagcccgcggggagagcaccatgaggactgactcgggggctcggctggaggagggccacctgcgtcctccacgagctcttccacctgtgccaagtcaagatgatattccacttagtcgtcctaagaaaaagaagcccagaacaaaaaacacaccagcaagtgcttctttggaaggccttgctcagactgctggtcgaaggccctctgagggcaatgagccatcaactaaagaactcaaagagcacccagaggctcctgttcaaagaagacagaaaaagacaaggctacctcttgaattggagacttcctccacccaaaagaagtcatctagttcatctttattacgaaatgaaaatggtattgatgcggagccagctgaggaggcagttattcaaaaacctcggaggaagacaaagaaaacccagccagcagaattacagtatgccaatgagctaggagtagaagatgaagacataatcactgatgagcaaactactgtggaacagcagtctgtattcactgcacccactggcattagccagcctgtaggcaaagtattgtggaaaaaagccggagattccaggctgtgatcgttcaggagttgataaagaccacagaaaacatagatgttgtcagtggccggtgaagccttctggacaccagagatgtggcacttacagtgcacggggtttcaggatgatggctctttctatggatcttggtggggtgctggtggacaatggtggggatatgtctagcggggatcaggac

SEQ ID NO: 3939 - DNA, 2240 bp, Homo Sapiens
ccccgcgggctgcagcgagccaggcatgctcactggcgcaggcccggcccgcagcccgagcaggaagcgccggcgtaggcggccccctgcgctgccagctggagccgggcggagccagcgccccggcgcagggtggctctgccagtccccgcgcgcctgggcggccgcacacgtgtccaggcgtcacgtccgcgcgcgcccccggggcttgcgtcagcggctgttccagaagcgggtgggccagggctctgcgcaccgctggggttcggggcccgggacgccgccgggaggagggcaccgcgcggggtccgacgcggaggcgtgctcggaacgccgggggctgcggagtgcatcagcgcggtccagccctccgcctgccgggcgccgagcgtctccgccgcccggacctgggctgggcgccgtggcgttgcctcggagctcgctgcccgcggggcgcgcaccgccttgacccgggcggccccgcggcaggcaggcgcccgcagttccatggttggttcggagcgcgatgagccgcccgtcctccaccggccccagcgctaataaaccctgcagcaagcagccgccgccgcagccccagcacactccgtccccggctgcgcccccggccgccgccaccatctcggctgcgggccccggctcgtccgcggtgcccgccgcggcggcggtgatctcgggccccggcggcggcggcggggccggcccggtgtccccgcagcaccacgagctgacctcgctcttcgagtgtccggtctgctttgactatgtcctgcctcctattctgcagtgccaggccgggcacctggtgtgtaaccaatgccgccagaagttgagctgctgcccgacgtgcaggggcgccctgacgcccagcatcaggaacctggctatggagaaggtggcctcggcagtcctgtttccctgtaagtatgccaccacgggctgttccctgaccctgcaccatacggagaaaccagaacatgaagacatatgtgaataccgcccctactcctgcccatgtcctggtgcttcctgcaagtggcaggggtccctggaagctgtgatgtcccatctcatgcacgcccacaagagcattaccacccttcaggaagaagacatcgtctttctagctacagacattaacttgccaggggctgtcgactgggtgatgatgcagtcatgttttggccatcacttcatgctggtgctggagaaacaagagaagtacgaaggccaccagcagttttttgccatcgtcctgctcattggcacccgcaagcaagccgagaactttgcctacagactggagttgaatgggaaccggcggagattgacctgggaggccacgccccgctcgattcatgacggtgtggctgcggccatcatgaacagcgactgccttgttttcgacacagccatagcacatctttttgcagataatgggaaccttggaatcaatgttactatttctacatgttgtccatgatgtgacttccgtaaaccttcaaaattatttgggcatactgctctatgtttaataaaggtttttatagatgttttattccatatgtcttcacaagtcaggacccacaattacccgtgttttgtttgaacagcagtgtcccatctggcttcgacccaacaaagttcattaacctgggatgaatggggttggcctgttggtgatttggatgctgttctgtgatctaaaacaactcttattgaattgtatttactccctaaacaacacttgacaggctgttgcacagggcttctatagatcagtgtgttaggaatgggaggccccttcctgcctgccttcccatattggtcccttgacattgacaaaagcacagtgactgtcagcagattcctttacttttgtttgtgggaggtaggaattgttttaatgcattttaaacagtgtttctgaaattggatggctggctaatagacactgaatcacccggagtgcttatcttaaaattgcagatttagggagcctgccaatttaacagtctcatcagtgatctttcaacagtaatgtttgagaattactgggttaaattgtggaaagggtccagattttaaaggtgctttaaggttgccctctgccgatactgtttgtctttctactgtttcatcccctaacttcccccaaccctcaaattaaaactagaactatagatccacatgaacgcacgcctgagatttggccactcacc

SEQ ID NO: 3940 - DNA, 461 bp, Homo Sapiens
  misc_feature (412)..(412): n is a, c, g, or t
tggtgtgaaatattgtgtgaatatctaggcaaaacataacaatttggctcaattttcttctttagaggattcgtgctgtttttgttcataaagggtagtgaaatcattgaactatattttagaatgaaaatttttgattttattaaaatgattttttcaaggcagaaagtaaaaggaatgattgatagcggagtgcatatagagctagagcatatcatccttgaactctgcaaatcctttcttccattttaatatagcaagaacaattttgtctttactacatcttaaagaattagaacttgggttggtgtaagtgacttacttccagggaatcatgccctatttctaccagcaggtcatacccaaatgtcacactatctattgttaaccatgaatgatattcagatctatntactttcgtgaaaagtggaacatgttacttccaaccatggcctgtcacc

SEQ ID NO: 3941 - DNA, 391 bp, Homo Sapiens
gtcaagtgcgtgctggtcggcgacggcgcggtgggcaagacgagcctggtggtgagctacaccaccaacggctaccccaccgagtacatccctactggcttcgacaacttctccgcggtggtgtctgtggatgggcggcccgtgagactccaactctgtgacactgccggacaggatgaatttgacaagctgaggcctctctgctacaccaacacagacatcttcctgctctgcttcagtgtcgtgagcccctcatccttccagaacgtcagtgagaaatgggtgccggagattcgatgccactgtcccaaagcccccatcatcctagttggaacgcagtcggatctcagagaagatgtcaaagtcctcattgagttggacaaatgcaaag

SEQ ID NO: 3942 - DNA, 341 bp, Homo Sapiens
gcacgaggcagtggtgggcaaaggacagtccgccgaggtgctcggtggagtcatggcagtgccctttgtggaagactgggacttggtgcaaaccctgggagaaggtgcctatggagaagttcaacttgctgtgaatagagtaactgaagaagcagtcgcagtgaagattgtagatatgaagcgtgccgtagactgtccagaaaatattaagaaagagatctgtatcaataaaatgctaaatcatgaaaatgtagtaaaattctatggtcacaggagagaaggcaatatccaatatttatttctggagtactgtagtggaggagagctttttgacagaatag

SEQ ID NO: 3943 - DNA, 384 bp, Homo Sapiens
agcggccggcctttttttttttttttttttaggagcatcacaattttaatgagaaaagataatcaactgatgccaacaccaacatgaatcaggagttggaattattaatatctgacaaggattataaagcagccatataagaatgcttcaatgagcaattgcaaatcctcttgaaacaaaggaagagctgcagaaccacatagagacccagatgtaccattgaacgtgagtggcccggccagcttcataagggcgatgtcattgcccagcctctttggcttgtacttgctgtggtagacaatcttctccaccaagtgggatggggctggattgtccaacagggaaactagacccacctggatggtccatgacttggggaggtac

SEQ ID NO: 3944 - DNA, 647 bp, Homo Sapiens
ggcacgagggaaaggtagcggggaaaaaaggaggggataaagctcccatatgctctacagtgtatattcctacaaccttcctccctctccttcccttcatcacatttctattgagcatatgccattgccgtgtaccaggtgtgtgctaggtttggagatacaaggtaaacctgagactttcccagtctccaggagacaaaaccctaatttctttcatctgctgtctttctctttggaaagaatcaacgatatcccaggggaatgtgcccatgtcccagggtaaccaactacagacagatgccccattctactcaagcaacttttagagtgccttgagatacacatcagataattatgcagggccaggcatggtgctgcacacttgtaatcacagcactttgggaggccgaggcagcagattgcttgagcccaggaattcaagtgtagcctagggaacatggcaaaaccccagctctacaaaaaaaatacacaaattagctgcgtgtggtggcctatgacaggaggctgagatgggaggattgcttgagcctgtgaggtcgaggctgcagtgagccgagatcatgccattactccagcctgggtgacatagggagacccctgtcttgaaaaaaaaaaaaaaaaaaaaa

SEQ ID NO: 3945 - DNA, 640 bp, Homo Sapiens
ttttttttttttttttttttttttttttttttcagtaacagaatgttttattttaaacttactgtaaaactttcaaatacaacacatgtggcaaagaaacaacagttcacacacaacatctgccacaattctctttgaactgccatttctatattatgtgatattttacaatttctttcaatttcttacattcatggtattcttaagggcagcaatgtcaatttttctgctttgaaaatagttcagttaatgttctgaaattgcttaacatgacattttccttttagtattctactgttgcccacactgacataattcaacatattatttataaactgttgagaggtatactgtacttaataaatcaactcccaactctaagttaacctcaatctaaaacaagcattttcttaaaccagtatactcagttacttttctcaaaaatatttccattctgaaatagattttttggagatacaatagtttcatcttttattcctaacagaactcatgccgtactttttttctcaaaatatatttgatatattctgggcaaaatgttaagttctgtataggcatgacccttatattgaaaaagtttataaaccataattcctaaaaccaacctcaacattagaca

SEQ ID NO: 3946 - DNA, 575 bp, Homo Sapiens
tttttttttttttcaggtcactgcctcttcagtttagtgcttacactgtaggatacaccatccaaaaggctgtaagggtggccaagcaaagggaaaacaacttcagttgggggggtggaagcacaaattcaatggaaataagggtatacatcatttaacaacaaaatcaaaaaaatgctaaggatgaaacagggtactcaacaatcatgctgaaacaggcataaactaggaccacgccagcaagctaataggtagatgactctactttgaatattaaatcatattacgagccaactttcttaagaaaaaccacggatatctaggattacttgactagtgtaaaatacacagttgcctgaagaacttatctctaaaaactatcacaggccccagctacctcgcactggtaagagtatactgccttttaaaaacaatcactattgcccacattattagtagtattaatgctattaataatattgcactccaatgtgtccaataattgctttttgctaggtatatgcacagcatcatgggagccggagggagcttttacccaacctcatgaggaatga

SEQ ID NO: 3947 - DNA, 511 bp, Homo Sapiens
agtgactccagaggccttcacaaagggcagctggagtggggaagtaggactcaaaggtgcggcagagagccccagctgggcacttgttaactcctgaggtccagtcccatcctctgtgccagttgctcttgcacgtgtgggaggtgtgacaatcctcccaccagcgctgacagtcctctttgcataagggcacatccaggaagcgttctttgcgccacatctgattcacctgctggatccagggccccaggttgggtgagcactcatagagacaggtgtcctggatgaagtggcgcttgcaggcgggctccatcttgccgcagtggtcccagttaaagttgtacaggcgggaggtgtccttgtgcagctcctggctggtgctggctgtgcagcaggcattcttcttccagggactgcattggtcatgcagcttgtcctcaggacctggctttgtcttgtggtggctggcatccatacagacattgaggagatcagtcctgtcctgggcact

SEQ ID NO: 3948 - DNA, 461 bp, Homo Sapiens
tttttgggatgttagcacatcacatctagccataaccttagtacatgcacatgtgcacacacactttaaaagaaactcagtaatttcaacactgaagaactacttcagttttattgtattatctactcataacaaattacattgcaatgagagatttttgccatgctactaacagaattctggcttataatttggccactggtggctgtagcataaaatgcattaaaaacaactcagtagctctttgtaggcatactgtgaatgcaatgtgtgaacctcttgctcctgaaaagatcagacaaagctgaggttcaggtaatttggaatgaaaacaataagaaaaagctctgttctgttttgaaagctattttgtgatagcaaatttctctgatcagtattaagggccctgaaaaacaagccaggagggccacagatctagtcatctaaatataaaggacata

SEQ ID NO: 3949 - DNA, 477 bp, Homo Sapiens
agtagagacggggtttagtagagacggattactcctgaccacgtgatccgcccacctcggcctcccaaagtgctgggattacaggcgtgacgaccacccccggcctgtattttcagagaggagagcttggtgtttttgtggtgccaagtggtaagataatgtctctttgaggcttcctatggactgcctttattttagtaaactcaagacaccagttaacctcaacagagttttggccttattagaatttgttgtgcatcttattgaaagccaggtttacatcacctcaccccattattctttttagttaaataaatttaccatgccaagtaaccagaatggagcaaattggttgatctttaaggcagtaggtttgactagctagctatcattattgtcacatctaatgctaggcaccagaaaccatttgagccaggagtgtgaatgaataattccagagaccctttagacattttt

SEQ ID NO: 3950 - DNA, 1890 bp, Homo Sapiens
atctgtcgactgctaccgggcgcaggcggctgggacaatggcggtggactgttcgagcccttccgctgggacccgggccctggctccggccccgcgatgggagctgctctccgcgggctgagcctgtcagcatcctcgacgcaccctggtccctgaagtcggagaagcgcccctacccacccacacccccttgccccattttgggtcgcctgggtcctcagtcctagcggatcctcagtcctagcggccaccgggtctgaaaggagcaagacgatgatcctggcgtcggtgctgaggagcggtcccgggggcgggcttccgctccggcccctcctgggacccgcactcgcgctccgggcccgctcgacgtcggccaccgacacacaccacgtggagatggctcgggagcgctccaagaccgtcacctccttttacaaccagtcggccatcgacgcggcagcggagaagccctcagtccgcctaacgcccaccatgatgctctacgctggccgctctcaggacggcagccaccttctgaaaagtgctcggtacctgcagcaagaacttccagtgaggattgctcaccgcatcaagggcttccgctgccttcctttcatcattggctgcaaccccaccatactgcacgtgcatgagctatatatccgtgccttccagaagctgacagacttccctccgatcaaggaccaggcggacgaggcccagtactgccagctggtgcgacagctgctggatgaccacaaggatgtggtgaccctcttggcagagggcctacgtgagagccggaagcacatagaggatgaaaagctcgtccgctacttcttggacaagacgctgacttcgaggcttggaatccgcatgttggccacgcatcacctggcgctgcatgaggacaagcctgactttttcggcatcatctgtactcgtctctcaccaaagaagattattgagaagtgggtggactttgccagacgcctgtgtgagcacaagtatggcaatgcgccccgtgtccgcatcaatggccatgtggctgcccggttccccttcatccctatgccactggactacatcctgccggagctgctcaagaatgccatgagagccacaatggagagtcacctagacactccctacaatgtcccagatgtggtcatcaccatcgccaacaatgatgtcgatctgatcatcaggatctcagaccgtggtggaggaatcgctcacaaagatctggaccgggtcatggactaccacttcactactgctgaggccagcacacaggacccccggatcagccccctctttggccatctggacatgcatagtggcgcccagtcaggacccatgcacggctttggcttcgggttgcccacgtcacgggcctacgcggagtacctcggtgggtctctgcagctgcagtccctgcagggcattggcacggacgtctacctgcggctccgccacatcgatggccgggaggaaagcttccggatctgaccccacagcctttggcctgctcacccgaccagcctgggccgcattccctgcaggacctcccgggtcaggcagggcggccccctgctaccacacactgctgcatcttgggtctcagggacccagacagatggacttacatggagctgggcactgccctgcctcaacagggtccattgcctcttgcctccagaacttggagagcagggaagtgggcacccttgaggcctccagcaccagttccgtcattctcgttcctggggaacccccactctgacctgttattaaagttcacattttgaatgccctctcgggccccgtgtgtggggagggcaggtgaaaaaaaaaaaaaaaaaaaaaaaaaaaaaaaaaaaaaaaaaa

SEQ ID NO: 3951 - DNA, 672 bp, Homo Sapiens
  misc_feature (443)..(443): n is a, c, g, or t
agcgagcggcgtctccaccagcatctgccgcggccgcctttgcccgaagcccggggacgaaccgacggaccgaccgcctggcgcacggacgcgggcgctcgctttgtgttcggggctagcgtcggcgaggcttgagcttgcagcgcgcggcttccctgctttctcgcggccaccccggctccggcggcctcggcgcgcgaggggctggaggtgcgggagccgctctccgccggtcggtccccgcgcggctgagcccaggccgccagcgccgcggccccgtgcggtgtccctgagctcctgctccccgccgggctgctccgagcaacggtgcttcggagctccaaactcgggctgccggggcaagtgtcttcatgaacccagaggatgtccgggaagcactacaagggtcctgaagtcagttgttgcatcaaatacttcatatntggcttcaatgtcatattttggtttttgggaataacatttcttggaattggactgtgggcatggaatgaaaaaagagttctgtccaacatctgttccatcaccgatctcagcggctttgacccaatttggctcttccttgtggtgcgcacgaatgtgtccatttttgggattgtcaaggtgccatttgaccccctcaagaaaaacactttctttctaaattgttttcta

SEQ ID NO: 3952 - DNA, 656 bp, Homo Sapiens
gccccggctgggcagcagcggggacgccgggggccggggccaggctttccgggcttcggtgaggccgccgtgggccccatcttccggcggtcgccggagtttgtggtgattgttgctgccgccgccaccgccccggctgccatctcctcctcctgggccgcgcctcctcctcttcctcctcctcctgggccgggctgatcccctccccgctgccgcctcctcctgggctgggcccgcggtgtctcgtcccctcgcggagccgctcctgccgccgccgccgccgcctcctcattcatcctcgtgcaccataggcggcacaggcaccaagatgtccaaccgagtggtctgccgagaagccagtcacgccgggagctggtacacagcctcaggaccgcagctgaatgcacagctacgaaggttggctttcacaagtacagtctacaaaaagacctgctagagccattattgccccccatgcaggatatacgtactgtgcggtctcgtgcctgcccatgcttataaacaagtggatccgtctattacccggagaattttcatccttgggccttctcatcatgtgcccctctctcgatgtgcactttccagtgtggatatatataggacacctctgtatgaccttcgtattgaccaaaaga

SEQ ID NO: 3953 - DNA, 579 bp, Homo Sapiens
attatacggaggtgagatcctcctggatagtgctggtagctcagctgctgctttggcaagacttggtcgtctctatactgagagagcaaaagctcttttcctggggctgcatgttcttccataggaaagtgggcttcaggtgctgcctattaaacctcctgcctcccctgctgcagtgctttgatgcctttcacctgtgtctacctgcgaacctctgcccaccacggaagagcagctcacatttggaaggggctaaaatttttacctagtttgaatctgctctgcaatgtccccatcaagttcttaaccatcccgggttccaatggttacagagttctgccctggggagggaggaattgcttagcaaatgatgttgagaatagtgattatttgggggaaaattcaggtaagatctcaccttcataccatataccaaaatacatctcagtagattagtaagctaatgcaaaaaaaaaaaaaaaaaaaaacaaaacaaaaaaaaaaaaaaaatgggcggggggggtttgtttgcccttgttcccccactttcttgggaacctcggggggggggttttttgc

SEQ ID NO: 3954 - DNA, 441 bp, Homo Sapiens
  misc_feature (358)..(358): n is a, c, g, or t
  misc_feature (382)..(382): n is a, c, g, or t
gtctatagtttgtgaggttcacctttttcctctttagaaaatggtgatagctttgcttttcaactgactcccctaatgtccacttttcttcagagattacagacaatggttttccaaatctccttattcttttattgccttaggatctaattgcaagcagttgaaagattaaaatcctctaaagaaattaaattatttctaattatcccatgacctgttttaaactacaattttctcttaaagaaacttaccctccatttttcttttaaaattactccctgtgatagagaaagtaggagacaactgtctcaaaaatctgcttgctcctcttgatctattaaaataccattaaaaattntgggtttactttgctggtgtcagntgatttttgtgcttactataatagatccatttgaccctttcatattcattgatatctac

SEQ ID NO: 3955 - DNA, 747 bp, Homo Sapiens
tagcgctaggtacgagtgctgggtgggttacgcggggctggtagcggccggagccgtgcgagttctctaccctgcttcgcgagcgggcgagagaacgcgagtcccaggatccccggcacccacttctcttccactgcattcccccggcgcgtgtgggaccgaggtggacatggatccgcagaggtcccccctattggaagtaaaggggaacatagaactgaagagacctctgattaaggccccttcccagctgcctctctcaggaagcagactcaagaggaggcctgaccagatggaagatggcctggagcctgagaagaaacggacaagaggcctgggtgcaacgaccaaaattaccacatcccacccaagagttccatccctcactacagtgccacagacacaaggccagaccacagctcaaaaagtttccaagaagacaggaccccggtgttccacagctattgccacagggttgaagaaccagaagccagttcctgctgttcctgtccagaagtctggcacatcaggtgttcctcccatggcaggagggaagaaacccagcaaacgtccagcctgggacttaaagggtcagttatgtgacctaaatgcagaactaaaacggtgccgtgagaggactcaaacgttggaccaagagaaccagcagcttcaggaccagctcagagatgcccagcagcaggtcaaggccctggggacagagcgcacaacactggagggcattagcca

SEQ ID NO: 3956 - DNA, 997 bp, Homo Sapiens
tggagatgcaagaagtaattaggtccttttcctgcccttaaggagctcacattctagtaaagacttttgagtaaataaaacaatacagtacgatttaagtgacttacagatagaggtaggttgtcattacagtggtgacacgaaagtggaaagttagatgacatcgtccttgagtggcacgcaaaggaggtttcacagaggaaatgcttatgtcatggcctgcaagatgcatagtgcaattttccaatgtggggaaggatgactatcacacttgatgcaaagagtacagcatttaccaaggcgggaggcctggccaatatgtggcttctgaagaagtgtaagtctgtttcaccagaacattcggtggaggaaacacatctatgaagaccttgtacaccaaacagaggagtttggctttctcctgaaagttcctgaagtcactgacaggatattagggagtaacactgtcagagtgcttctagaaagcctgctgtggtaacattgagcaacagagaggagaccagctaggtataggaggcaggttagtactgtaggtatctattcatcatagcaatgaagatgaaagagtgatgtatcagaagaggtggagataaaatcagtaaaacttagacactaatatgataggggaaggtggaggagaggaatgagcctagaaaacattcgaatattcctggtcctagcgagtgaacccaagtaagggacacaggcgcttcagagctaggtgctgcaagagaatgaatgtgaaaggatacaaacagggtgtatctgggacaaccaggcaaaaagtgcacagggcagatggcaatggacgggcaacgccgggccataccggaacagggagtaaaagaagccggacgacagtacgcaccagacccaaacgggtaacagcagaggcagcctgcgactcacgacacgaaacacacaaacgggccagccaccgagaacacacagcaagggacaacaaacaagaggccaa

SEQ ID NO: 3957 - DNA, 490 bp, Homo Sapiens
gcggccgccttagtggctccagactctagctgggggcggggggcctctggcaacctcggtctcttcaaaggccctttggggtcttccgactgtgtggaagggggagcggggtccgcacgggtaggactgggccccgcggcccccaggccaggagcgtttaagtgcgcgttcccctcccccgccaagggtcctggcccggttcgggggcggaggcagcggagccagtcccagtgcccagtgcggcagcgggcagagtgaggagggtgcctctccagccgcgcgcccgccctgggccgctagcgaacctttgcgtccttctggctccagggaaaagttcgctgtttctccgccttttggccaagatcaaggatagtatggagcggggacgaggggtggggggcaaagttcgcgggtcactggcagaaaacgcctctgatcgcgtgttgcgtttttgttgttgttgttgtttgaacttctggagcattcagtg

SEQ ID NO: 3958 - DNA, 564 bp, Homo Sapiens
  misc_feature (425)..(425): n is a, c, g, or t
  misc_feature (506)..(506): n is a, c, g, or t
  misc_feature (518)..(518): n is a, c, g, or t
  misc_feature (536)..(536): n is a, c, g, or t
  misc_feature (554)..(554): n is a, c, g, or t
  misc_feature (557)..(557): n is a, c, g, or t
gtcagcgctcgcgccgcgcgcgccgcccgcctccgctgttcggcgctctgctttaggcggtggggggcgggcgcgcgcgtaaaagcatagagacgggcattgagctcttgggctagagcgtcgccgagtcggagccggagcctgagccgcgcgctgtgtctccgctgcgtccgccgaggcccccgagtgtcagggacaaaagcctccgcctgctcccgcagccggggctcatctgccgccgccgccgcgctgaggagagttcgccgccgtcgccgcccgtgaggatctgagagccatgtcggccagcagcctcttggagcagagaccaaaaggtcaaggaaacaaagtacaaaatggatctgtacatcaaaaggatggattaaacgatgatgattttgaaccttacttgagtccacaggcaaggnccaataatgcatatactgcatgtcaaaatcctacttacccagttactacagtcccttcattgggttctctattctttgggngaagctgctggnctaccgggggggacacangcatgccttcttaacttnttnttgacag

SEQ ID NO: 3959 - DNA, 2284 bp, Homo Sapiens
gggggcagcaggaagagctttgtgtacattcccagtctccagtgtggaccaagggaagccattacctattctgactcatatgggaccttgcagaagtctggcaactgactcaggcggtggtcttacgttggaagaagctcccaactgaactttgtgatacaaccttgagtagggaagaactcctttagccagaactggggggtaagtgggaagtgtgctgcaatcatgagcataggagctgggcacccctgtcgtgcaggtgcgcttttcatgcatggcttgaaagctgtggttgttatccctgcagagaaggtatatggcctgggggagttttgagttctgtgctcagatggcctggaacttagggtcgttgctgctagtagaaagctgtgggtgtgagatctgccttgccaagtgtgtgggagctgggtgggacttaccactgcctgctactccacatttcctgcagtacttttctgttcaacagaggcagctatgctcctctttggaacattaccccagggtccagagaactgtctcctgactcccacaggggctgctgcttgctctgcacatggagagtcagaccaaagacctgcctaactcagcccccacctggctttgcccctctacctgcctggtatcttaacacaaaggacagaaacttttgggagctttatgcccaccacctgagaaaccggagtacctctcttgggtaacataaagcaagcacaaatcccactgctactaccatagctggtgctcttttgcaagtgccacattttggctggaggccagctgacgcagtccattacagcatctccaagttgaataataccacacccaggaaggagaaaacttgtgtgtgacctcagctatcaccattgcctacacaaccctggctaaccaggaggtcctaagtctgtacatgtgaccagttcattactactataaccagcatttgagaaagccaacacactaaggctatctataaccaaggaatttcacaggatctacatcactcccttgccacccccatcagagctggtgctagtacacactcctgggaaacttaaagacaggtcacatctctggatcccttgaagacattccccagaaccagcctggagtttaccagccccactgggcaacttgactcaggggcaacagccttcacagtagtctggccctcaggggctcctactcccaggggaagggagagtgcagctcatcaaggaaacaccctgtaggacaaaggagcctggatggcaggcttgagtcccagatctttctgctggtgggaagtttctttcagcagatgcacagttgcaatgctgggttcaactgggaaagtctgcagttttgccccaacaatcaggaggccctggtgcccatgaaggatctcggagaagggggggttcttctcctccttgtccaccactgcagacacagctggtgttctccccacaggagcttagcatgagtgcacctatacacaggctttctgtaacacttcagggtgactgcatctccacaggaggagcaccttccaggtgcaggcttgcatgagaagtagggtcacatttcctctctacttggtacatcagcatttctgccgatgaaaaagaggcacttgtctgatctgaacagctggaacacttggtcaggagtgtgtctgggaggtggatagctttcctgttggcctggcaggggagctgagatggttatggccattccctctgataagacctcagtgtgtttcactgagggtgcccccagccacttctgtcaaggctgggacttctgcccaccattgagtgttgcatttacccacctgctttagctacagctggttttaatctgtggacacctttcctattggccccaatcctgaagcattcaatccagtaaataaaatactggggaataaataaagaagtacacaccaagggggaatcaaatacacttcaagatacctctgtcattccaaccctataggagacagtgaacttgctcactcaccgagcacgttggtactgcaaccagcatctgaggaagccatcatacaaagactctctataaccaaggaactcatacacagtcttcagccctgaaagcaccaagagccaaattaagctataaactataaacattaaaagtcacatccttaaagggggaaaataaatttaacaaaatacaaataaaaaataagttcaagaataatcaggagaaactgtctacccaaactaaacccaaagctagcagaaaaaaaaaaaaaaaaaaa

SEQ ID NO: 3960 - DNA, 422 bp, Homo Sapiens
atacctcagacagataatgaaattttcaccagaaagtgttgcagcgtttatagcagtccttggcattctttccattattgcacagaccatagtcttgagtttacttatgaggtcaattggaaataagaacaccattttactgggtctaggatttcaaatattacagttggcatggtatggctttggttcagaaccttggatgatgtgggctgctggggcagtagcagccatgtctagcatcacctttcctgctgtcagtgcacttgtttcacgaactgctgatgctgatcaacagggtgtcgttcaaggaatgataacaggaattcgaggattatgcaatggtctgggaccggccctctatggattcattttctacatattccatgtggaacttaaagaactgccaataacaggaacagact

SEQ ID NO: 3961 - DNA, 343 bp, Homo Sapiens
tatacggctgcgagaagacgacagaagggtgtggacatgataaacactgagagcccaaccagcacacctacagagtttccagcgagacaatgccagaagcacttttctagagagcccaagcccaatcaggaggaggctagagaagaggcgggcagggaggaaggggcgttcccagcttcaaaggttcctgaaatgtcgcagtgatacttgtgtaggggtacatgtactttatttgtcaataaacgtatctgtacactgaaaaaaaaaaaaaaaaaataaaaaaaaaaaaaaaaaaaaaaaaaaaaaaaaaggcaaaaaaaaaaaaaaaaaaaaaaaaaaaaaa

SEQ ID NO: 3962 - DNA, 283 bp, Homo Sapiens
  misc_feature (203)..(203): n is a, c, g, or t
tttttatttgagagtcggtgtgtatttaggaatcagaggtacagggtacagcgttcaggggacccagaggtggcccggagattgaggaatacacacttacaggccaagtaaattggattcaaaggtgctaggggctcaggagggtgcacctgttgtccaggtgtgttgccatgaaaatgctggtgcacgaaagttgctaagtnagacaggctgaggcagacacacaaaaaaagccagggggagccagggcacagctccactagggctgggggcggggtggaga

SEQ ID NO: 3963 - DNA, 131239 bp, Homo Sapiens
gatctatatactgtaaggcaagaacgtttccatttaaaacgttccttgcagtaaggcccagtggctcacgcctgtaatcacagcactttgggaggctgaggtgggcagattacttgaggccaggagttcgagaccaacctggccaacatggtgaaacctcacttctactaaaaatagagaaattagccaggtgtagtggtgctcacctgtgatcccagctacttgggaggctaaggcatgagaatcacttgaacctgggaggcagagattgcagtgagttgagatcatgccactgtgctccaacctgggcaacagagtgagactgtctcaaaaaatgacaagaaaaagaagaaaaagtaaattgttccctgctggcaaactattgagggtctgaactagacgacactgtcctaaaacctatgtattacacagaagttcaattgatttagggatctgtaaaaacaaatagcattgacaatttttacctaacacagatgttttaatcaatggtgtgtatgtgtcttgatgcacaattaaccacaaatgtctccagaagatacatgctatttcaatgtgcacatggggagtatctctagaataaggacctgaaaaagtcctattgttcttcatcttgttaaaaacttcaattctggcactttatgcattcatagtagaattgagaatcgtgatatagctatgctgataattcaagttaaaaacacattttctttgattatctagatgttgcaggcaaatgtaagaacttattagcatgaattattatccagagaattggctcaattttccatttcactttgctcatgtaagcatggtctaaatcattaagtgagaaatattcttagcaatgaactgcatttaaaactctggtaaaaagtcatttttatctaatggccaaatgtaacaaatataataacagcgatttcttatacttatagggttgacactggtgagatgtcaccatcaagggatttgatggagattataaaatttagaactcatgggtcctagttcagtgttctttccactactgcaaggttcttttttttttttttttttttgagacagggagtgcagtggtgccatcaaaattcattgcagcctcggccttctgggctcaagtgatcctcctacctcagcctcccaagtagctgggactacaggcacataacaccactcctggctaattttttaaaattaattttttgtagacatggggtctcactttgttgcccaggctgtacttcaggggttcttagccttttatatgccatgagcctccctaggaattggcagaagcatttggacaccttcttagaaaaatgttttcaaatgtatttctaaaacatcatgggattatacagaaaaccaattatattcaaatgtaattatcaaaatattttaaaatttgtgacactgtcgtacctgtgcctctttattaacatattaaatatcaagaaacagtagcaattctaataaatgtcataatttcaaagtagtgacaagtataaacaataattcaaggtgtttacaacaattgtgacatgcaaataactgtgatttctgttggtaacaaagtcactgatattgctacatataagacattgggagttaccagtaaccagtaatccaaacaggatgtggcattagagttttgaattgagataattatttaattaattaactaatttttttgagacagagtctcactctgttgcccaggctggagtgcagtggcatgatgttgggttactgcagcctcagcctcccaggttcaagggcttctcctgcctcagcctccagagtagctgggattacaggcatgtgccaccatgaccagctaatttttgtattcttactagagacagggtttcacctggtctcgaactcctggcctcaggtgatccccctgccttggcctaccaaagtgctgggattacaggtgtgagccactgcccctggccgagataattatttaatcagttgttgggttcttatgaatgagactaagaccttggagtagctcgacattaaaccaggtgcaggggcagaggggtgctgtcatcgaaaggtctaaaacccaatctgagttatatgcatcccagagccaggaaagctctataagttatattgcaatgacattcattcattcaacaattaccttctgggaaccaggaactgagtggacacttcctcagcaacttggtcctatcttctgatattcgaaagccagtcatcaaaaatccagagatcaatgggaaacaaaattgcattaattcgagaaaaagctattcctcttgattggattgggtttcaagacaggaacatatatcttacatcttgccattcccctggttctctcagtaatcttggcccattcccttttgtgtgtgtgtgccaaaatatttttatagactttatgtttttagaacagttttaagttgacagaaaaattgagaagataatacagagggttctcttaccccctacactcaattttccttattattattatcttacattagtatggtacatttgttacacttaatgaactaatatttatacattatgattaaagtccttactttatccagattttttagttttcgccgaatgtctttttttctgtcccagggatgctacattgctgtcgtcctgcctccttagactcttagacttgtcttgactgtgacaatttctcagattttccttgttttttttgaccttgactgtttgaaggaggactggtcaggtattttgtagaatgtctctcaattgggatttgtgtgacgtttttgtcatgattagactgaagttatgggttttggggaggactatcgcagaagtaagtttctattttcaagacctcatatcaaggatacaagctatcaacttgagtgtggatgatgaccttaagttatcactgttgatgatcaagtgactaaggtagtgtttgtctggaccccctgcaaattcactttttacatttatgtaattaactattaaagagaaaataattctcactacacatgataacctcgtcctttacagaatcataggtctagaagagattttgacagattagttggtccagtctcttgtccctgtattcaagccaccctgcacagatgagtttgtggtaggcctatttttaaagatagaaagtggctgggcatggtagctcatgcctgtaatcttaacactttgggaggctgaggcaggcagatcactcgagcccaggagtttgagaccagtgtgggcaacatagtgaaaccccgtctctacaaaaaatacaaaaattggccgggtgaggtggagtgtaactgtggtcctagatactcaggagactgaagcgggaggatgacctgagcccaggaggtcaagtctgcgatgagctgtgattgagccactgcactccagcctgggtgacagtgagactctgtctcaaaataataataataaatatagaaagggaaagggactccacagtgaaagaattctgaactcttgacaaatgaggttctctggctcaatcaatcaataaatatgcaatgtagagtgttggaaccatatgcaagctgcttagatatatgtgtaactccaaggcacttataccatcttaaatcatttctgaaacaaggtggtgtatgagtgaagatacaaataattgaaaaaaaggcagtataacacagtgggaatcagtacgaaaaacagtgcggttataaacacagtttttggattcataatgtctaaatttacattccaggtccactgaatgaaggcatgccactttagataagtcactaaggcctttctaagcctcagtctccttagctataaaatggggataatcgtacccattattaaaagttgtgcaagtcaaataacatatcaaaagcatctggcacatagtaggtcctcaatacattgtagctattgttattaaacagggaataattatatgaccctgtaatcattatattacatggtatcataatagttacatggcactgtaaattaaatggagtgtgttttaggagggctttctgctgaaggagtacacactgtggatctttctccttagttttcttcctgcttcccagcttcctccactccctactttcttccttgtttggtctcggatttcattacctcctccctgttctcttagtggctgatgccttcaaaccattccccactgccaagcccttttgttacactggcatttgtcaagcagctgagtttcttagtgactgataagaaccacttctcccccaggtagtcagggagaggcagcgagctggcaagagtggagaaaatgtttctgtgtacaggacttggattcctgcgtttgtttgttttgttttaagtggttgctttgctgatcctattactgtaaagggtaatgatatttgggaatgaaagtctatgaataagtaatgataatagaagtaagacccagaactgtgggatagaaagctgtgttaaaaatagtctgtcattttccactctgcctactaagccttttcctagactgaaagacacagatcacgcttccacgagctgagccaacacagcatggcaggagtaaatccacaacccaaagaaaaccgtactcctgagcaaagcaactttctgctgtggtcaaagctcatccactgggtttctctgatggaggcaatgaaacttttcccctcaaagcctggtaacctgagttaaaaatgtaaaatgtattgatttgagagtggaaactacaaaatgagaacacgttaggctttgctctgagaactttatggttcttgagacagttattcttagttatttgattcaattaaaatgcagatgtaagcaaggtgaaccataaggaaatatgataagagactttagctcaggatgaaagtgtaaaccatagcatcagaggcatcatgcataccattatctagaaggctggtcaaactgaggtcctgcagcagcctcagcacaaatggctgccaaacctcgattctagtgaactaagagaaaacagacagtgaggcaagcaaggactttgtactcagaatattctgcagttcaggaagtccagatcctaggagtgcaagccaagacattacaaccgatgtgaggaattgctctggtgccaatcgtggcctcagatttatcgctttaatggctaaggtcacaggctaaggcattctccagattctgctgttgaatacagacactaccgcccctcctgtctccccaccatcaaacacaaggagtctggtagggcagaactgcacaaatgggaaacacccatcaaatgcagcaggaatattaacttcactaggaagcctttgtatgccattactttagaaaggattccttgttagtcctaccattaaacaattaaattgtcagagatgaattctgtgcatgtgtgtgcagagcttgcctgtgtgtgcaggatgtgtaatttcccactcaggtgatgtctgctgcaggttgtctttctctctctttctctctctctctctctctctctctgtccctttcccaccccaattgtgtgcttttccctttacattgttgaaaataaatacatcttcctgatggtataagcttttattatgaactttgatatgcctacacattctatactacacagaaagtagtaatataaaatgaaatgttcaaaaattaatttgtctccaggtatttctctgccagaacatgattccttagttcccctctcctgacactagttattgatacagtcggtttactctacatgcattctaaacatggatgttatatcaaaaaactctaaaccaagtcaaggctaatgcctacaaacaggaagaatgatgagcaaatgctgtgtcccttatattttcatcctaattaggaatttatgccttcataatactggcttacttattctagttctctattgtaaaatgtctgacctaggaaaatcaatgcttgtgacaagtacacatatttcacttaaacccagtaataattattttagtcaagaaaaagcacactacctaaaataaatttaattatatttaattcatataattagggccacacttaaatctctatactttcttatatagctcacatttttacttaattggaatatattcttgccctcgtcaattaccaaaacttttctttgaggtttcataatcttttaaaaatgctaaaaacaaaatagactagctatacactaagatgaaaagacttttagaaattccatatgtataaagtgaaggggccaggtgcagtggctcacatctgtaatcccaattctttgggagtccaagagggtaggattacttgaggccaggagtttaaggttacaatgagctgtgatcccacagttacattccagcccaggtgacagagtgagaccctgtctctaaaaaaattaaaataattaataactaataatttaaaaaaataaggtgaagagtaagcttaagaaaatactccaatatctgcaaatcctccagctcctaagaaaaccatgttggattaattctctatgtgccggtgcaactattagtcacttaataaatgctccttgattgtgatgacatcgcagcatcacgaatatatcccgtgaacgaatattaagcctcataaaatgtttagcctatcttttttataacaatgtacagaaggggcaaatagagaaggaaaggagtcttgaaatcagattatgagtagcttcagtttctctccagactgcctgttttttggatctcgttttctttggcttatgatacggtttgaatatgccccctctgaatcttatgatgaaatgcgactctcaatgttgggagtggggcagattcctcactaatgacttggtgccatcctcatggtaaagagtgagttctcagtctgtgaattcatgtgagagctagttatttacaagagcctggcacccctcccctctctcgtttcctttctctctatgtgatacagtttcctcctttgccttctaccatgattgtaagctccctgaggccctcaccagaagcagatgttggcaccatgcttcttgtatagcctgcagaactgtgagccaaataaacctctcttcttcataagtttacccagccacaggtatcctttcatagcaacacaaacagacaaacacagcttatatctgttagatgttagaatgacatctctttacaaataattggtatgggccaggtgtggtggctcatacctgtaatcccagcactttggaccagcactttgggagcgggaggatcactggaagccaggagtttgagaccagcctgggaaaccaagcaagacctccatctttacaaaaaataaaaaaatagccaggagttgtggtgtgtgtgtgtgtagtcccagctactcaggaggctgaggtgggaggattgcttgagccaaggagttcaaagctgcagtgagttttgctcactctattgcactccaacctgggcaatagagtgacaccctatttctattttttttcaattaaaaaaggattgatatgtttactgaaaccactcctatctatttactgatataggttttccaaaatattaccttgagcaagggactctctctctatacatatgcatacatatataaatatatagtgacttccattcagaaataatactcattagcttgtattacgtctgaaatcatgtcattagttattaattgctttgattaaagtttttgtagcattatgagactcctattaaaatacaaatgtccctgagagagataacactccaagctcactgtcagtgatttacaacttttcaggaattattgcaggattatttatgaaatatcaaatctctttccatctgtgatggcaaataagtaaattcagccacatgaggaagtccagcacataactacttctgtgtcatgatatcagggcagttagaagggactgcctgctacccaaactccaccatcccttctcaaattttttattttaaattttagccaaaagggtctttgtatactattaaacacagatattcctgaaacaagtcacacattaagcccaaaatgttatttttttcatctctgagcaaatgtatttatcagattcttgaagatgctgactgaaaccctttactgtttaattctctgaaatgtcttcagtaattttatgaagtcctaaaacttcaacctttatgtttattgaaataatcacaattttttgtaatttgctctcatattatgtccacacctagactggaatattcagctaactagtggacatccctgtctacacttcatactcaaaatacccagaaccaacacatgctattctcttcatacctgcttctcatttgttacaggtttccttagccacacagtagtagtaacgtcactcaagtagtaatgtcggagtcatctttccttcttctcttccccacagtcagtgattacatcctgaggattccaactcagtgataccttgcacttgaaggggctctcattcagaggccccctatctcatgcagaccttcacttttcctccctagactgccaaaagagcttcttactcacaattcccagcaccgctccccactgcacgttactcttcctaaagcttagcttcaatcatatcattctccagtttgaaaactgtaatgtttcccattgcttattaaattcagatcaaactcatcttgcttttcagtgtatattatgatacactgaattatgtatattcgtaatacaatattaatagcataatatattatcatacactgtattatgtaatatacactgtattatcatacacaatattatgatacactatattatgatacacttttactttcatgtacccactagtaaaaccggaacactcactcctctcaaagattccctttgctttccagcctacgtgcctttcctcaaattgtttcctccacatttcactcattccccatttccagccattgagagctacctatcttcaaggtcaacttcaggttttactttcttcactacgtctttctggctttcccagctggatgtgatcgtctcatcgtggaactcccatggccactgctgtgccccgacttactaaatagtgccatcatgcctatgcttgccttatgctactcactgtattgacaatccataagtctaggaatagtgtcttattaatctctacttcacctgcagtgcctagatctattcttgcatgtaaaatgcacttaattattgaagtatttttgaatgagttttgaaggaggataagaaagaaagtggaggaactctgaaagggtagctatgccaagaaatgatatcctaggctcctggagagcaattttacacactttattatcttgtataagactgtagcttagcacaagcatcttggcaatgaagaaaatctgtgttgggggcaaggcaggctggtccagagcaccagcatccacatggataaaatctagtactgggactctcaggcagggagggcagcatgaaaccactgggtcccgggaatcttggtagtatcttcaggtcctggaaagctgcagggcagatggcagctctaggccagaggattctgggaggcaaatgaggtaataaaactaactgcctgtttatccattctacatccactagattagactagcactattttagccttgtttgggttctgtatatacgtgaaactgtcagtcagttgttcaaacaatcattatatatttattgagtgctttcagtatgccaagtacttgtactgtgctaggtgctgaagatacgggggctaacaaaaaagacaaaaatccctccccttatggacattactttctagtggaagaagagaagtgatacattgaacacatgcataacagattagaaggtgatctttattttatcctctggatgaaaatcaagcaggctataaaggtgaagtgttagaatttcaagcatagtggtcagggcttattaaaaagatgatacttgagctgggatgtggaagaggtggacatgtatctgtgcagctatctgaggaaagagcacaaaaggaagagggaatagccagtgcaaatgtcctgaggacagcaaagctggctgttagaggaacagaaaggaggccagagtggctggagttgttggaggcagagtgagatcagagaaataaagagagacttctagtctttgcaggctattacaagaacatggcttttattttgaatggggagctctaggaagagccttggcaaaaattgacaccattgctgttgacccgagattgaactagaaagagggccaaagatgtaagcaggaagaccagttaggaggccattgtcatatcctaggcagaagatcatgatgaaagcgtggaccagaatggtggtggtagagataatgagaagtgatcagagtcaagaaatttttttttttttttttgagatggagtctcactctgtcacccatgctggagtgcagtggtgcgatcttggctcactgcaacttccgcctcccaggttcaagagattctcctgactcagcctcccaagtagctgggacaacgggtgcatgccaccatgcctgactacttttttttttgtacttttaatagagagggggtttcatgatgttagccaggatggtctcaatctcctgacctcgtgattcacccccctcggtctcccaaagtgctgggattacaggcatgagcaaccgcgcctggccgagtcaagaaaaaatttaaaggtagcctctcaaggactttctgatatattagataaaggagatgaagtaaaaaaaatcaatgatgactctaaggagttttgtcagagcaagtagaaaaatactgttgtttattgaaggagactattaaaggtggcataggttgggaaagcagagataataggggttgagttttgggtctgtaaagcttgtgatacccattaggcatctacacagagtctggaagtcagaagagagtcttggctacagatatgaatttgggagtcatcagaatatagagagttttgaagggaagagactagatgagatccacaagagagtgactgtagagaagagacaaggtgcaaggactgagcttgaggcaacccaacatccagaggtcctagataagagggggaaccagcaaaggagactgagaggaacaaccagtgaggcaggaggcaaatcaggtggatgtgttgtcccaggagccaagataaaggcgtttaaaggaggagggagtgggcaactgggtcaaatgctgcttaagggtcaagttagatgcaaaatggcctttggatttaacaacgtggaggtcagtggtgacattgaccagaacagtttcaatggagtgatcggataagaaagcctcagtggaaaaggtttgagaatagaagaggaattgggtgcagatgcttctttttgccattaaaaaaatgttttttttttttttattgttgctgtttgtttttttgatggattcttgctctgttgcacccaggctggagtgcagtggtgcgatcttggctcactgcaacctctgcctcctgggttcaagctattctcctgcctcagcctcctgagtagctggattacaggcgcctgccaccatgctcagctaattttttgtatttttagtagaggcggggtttcgccgtgttggtcaggctggtctcaaactcctgacctcaggtgatccacccgccttggcctcccaaagtgctgggattataggcgtgagccaccgtacccagccaaaaatggtctatttttttaagccagtaattttaactttcaattaatccaagtgggtattgtgtccacaacaatctgaataagtcaaattttacttgtgaaatccccctatcagacaaatgacaaaaaggttttgtgaaatgggtttcagcaattttaagtctgaaagtctctttgttaaacaaaggaaaacaaccactgccttcagtaaatttgcagctcaaagtattataagttttataatcaaacttctatttggagcttctcacacacacacacacatacacacacacacacaccccaaaatgatgacatcatagttgtcaattaaatattgtacctcattataaataacaattactcattccaaatttttcattattgatttatagttggttcttttttcatgccatagctaccacatagtcaccttaaatttgtaatgaggtttctcattccatagacatttgtctgcctcttgtacttgtagacacaggttcatgttgtcaacagttgggtattgaatctcaaaaaacattaagcttaggattaaaggtagggcagggaaagctgtcagtaaaacatgctaacctaatgtatctgatgaggacagggtctagttcatactcagaactgcaaggatgctgtgaagtacaatgatttgatacttgtgataccattttgttgtaacattaaagccaagagtcttctccacccaagggcaatgccagtttcccagaaggctcatttctccgagccaaagctccaaagatgccagtgcacccatgctgataacttagtctcatgttatttctcaattttatgcttaatttgctccttttgattttatgtattttcacacagccaagtgtacatggggatttacccatagtcctttaaatgccataaaactttaatatagggagataaaaaccataataagccatgcctccaaaccctcacatttagttcttttgagtttgacaataaccagttttagattatttggaaatttggatttctacgtacttgcactgctttaaatgcccttgtgcctttcctaaccctcctctcccacccagatgaaaattatactctactcttaacctggacatgcaacttccattgactgcacaaaatggcatctttacaattcttaaattatcatcataatggcccacatcatgcatgagccaatgcaatttaatatggttcagaataaagccaagatggatgcccaattcccaattttaggcatgcaaccctggaatgtcttttggaaaaaatgaaataatgctcttggtaggctgttgggttcatctgttttaagcataattgccatctctcagcttcctaatacccttaaaacctctgagagtctttaatgtacaaagttcaacaaaaacaccttcaaaacaaattagttctaattatgtttaatattggtttgctgctttattgaataatctacatttgcttttaaaaaaaggaaattcacttaactgcatgtcagtcacccaagttttaagtgtacaaatgaaatggaaaacatttattacacaaatttaattacaattctaagaaataaacatgcaaattagatagagttcaatttgcagatgctaatcctcatccttgatcttgttccttcctcccttgattttcagtctgtgcgtcttcttgattcctagggagccaggcagccagaggtctggtttttcacagtcggaggatcactgttttaaagaagtgttatatttagcacatctggtatagtggcagtaaacaaacattatagtctttgtaacacttttgtgcaggtgccttctcccgattttattaggtctatgccttccaagcctctgccttcattacacctgaaatgacccatctcgactatggaggggtccctagacagaagttatgaattaatgattttaaaaaataaactctgaggccactataggagaaaattactatttgcaaaatattctgattccaaggcttaaattacattctcttgagcaaggacaatctcttgtattactttttatttcctggaggttttccctggaggctccccacccagaaagggttgccaattcaagttgcagcaggaccaaggttgcttttttttttttttttaatacgtacgcagctcaggagggaaacgggcgggggcgggcggcgagggagaataactgtttggtcctgcaaagacatctgtttctcatctccgtttgctgtggcaaaggagaagaaagtcttttgcaaagggtgggaaaggcacagattttttttttaatcacacgcacacacaacaacaacaaaactaaaccaaatttaaaaagacaagatatctcggaaggttccagagtgaatacattattcggctggagccaagcccccagggctagggcgggagcccgagagcgcgtggggtctgggctgcgggctggagctgggcccgcgtgtccccgggcaccgggaggggaggggaggaaaaggaggagggagggcgggaagcagggaaggaggcagggggcgggctggggtgggggtgcgggaaaggcgccccgtgtgcagcctgaggagcggcggcggcggcctgagcagagggagggagggagagcgggcgcgcttgtcatgttccctctctcaccctgggggcatcctgcagaacctctcctcggaaatccacggggaaatggcaaacaggattgacgggtttcacacgctcctcgctagacagagccgctcattaccataaccgtctgcagcgacggcggcgcagcgccccagtcgcggcggcgggacctgccgggacccttgcccgccgcgcacccgcagtcaccgccgagcgggcggccgggccgggacccgcgagtgtgcaccggcggccgggctggcgccgagcccagagcggaccagcagcagctcaagcgctgcggccgccgcctccccgctgaccccgcggtaagagccgggctgggcgcgggccgcgggggcgggagggccgggcagggtggagggcgagggccccccggggctcctgccctcgcagacgggcacccacgcggcctcccgcgcgccctcttggcaccagggctgtgccgaggtcaccgagtggactcgcagcggccggagcggagtcggggcggcgtgggggccaaggcacagctgggcgcggaggcggcgcgggcttttccctgggctagcgtgcgccgcggcgccttcaccagggcgggaaccgccgcctcctctagggctgctcgggctgccacccgcgcgcaccgagacaactccaggggcgggtggggtcagaagctctggtgagacctcatggtcctccgtggccgcttagtccctcatcgtaggggaaggggttaagtaggaggggtgcccccaggtccggatgccgcggcgcttggcaggtggggagagagggattgtggatgtcaggagcgcgcgtttgcaagaaaaaggaattgatgcagtagctgacaccttctgtcccccgccacctccgcccccgcaccctcctcccaggcagcagagctgcgctgcgggcggcggcggctcctctgtcctcagctcacctcctcggcgggctgaggctgctgcccgcctggtccacgcctccgcctctcgcttcccttcctcccctcccgcctcttcggccctagcaactttccgagtgcccagctgtggtcgcagaagcagggaataggcgtcctcgccgccaggtcccacgggcgcagggcgctcccgcaaccgcgggcttccagcgggtttggccggcaagggagggagggaaggccgggccgacatctgctgcgggctggagcgcgggggcccgggccagccccgccagagccctgccagccgctgtgagtcatttccttggaatcctacctttggtgtttatttcccttagaaggaaacttggttttttttttaaaaaaaaaaaaggataagacataaagaataataatagctcttattcttcagaagaggcacacggctgcggcaccgtagaaagacaacttgcctttgttcccggacacttggggtgttgtttactttctcctgcggccagcggccgaccgggcgctgctggctacccggggaggggctgagggctgcggcaccgacaccccgggggtgtgtctgtgcgggagccaggatgtggttggtggctgccgcccgccttcaagaggtcggccctccaaacctcggaccccacccccgcaaccgccacacacacacacaccttgggcaccagggctcgggcatcggagcaccccttcgtgctctttaggcccagcacctgcagccccaaccacaggacccagcttcaagctcttggcctcgcggggctgcagctgagaaatgtacttcccagggcagacaggtgtactgcaggaacggcagaaaagcgacatctgtttgtttagaagggttgaagaattttgttccgcccatccagtcccttccactaccaccaccaggagccggacaagctattgagatcattttgggacaatgtggaggtcaggggcttgatgccatttaaaactggcagcatcgatcgggggtggaaatagccctttacttccctgctttccagtgctggaatcagactgctaactgctataatgatcttaatcaaatgctctccaattttcaatgacagatggaagaagaagtgagcaaagaatgacctggagccccttgttagattcaaggtgccgctgaattcatagctaccctgttttgtgtgccagccactcctattagcatcataattgcttctaggaaagaacaagcccaactcatctggaaaaaaacaaattgtatagaaatgcctggtaactttactacgaacatttgctggaaaagcttggcattctagccctcagtcttctggggatgctggaagtgtcattccactacatccacctgggtgtcaaaacagacattcaggagcctgaggatgaagggttagggcttttttttttcttatcttttaaacccatgcatagacaaaacacactctaacaccctcctgttgaatccatcacctctgatcttagaaaataaattttgccataatgtatatccttttctttatttaatattaatagaacacgaatttgtggacttgaattgctgacgtcagtagcagaattataaatcttatcagacagagaattatgacagtttagatctctacatataatacgaagaaagattcacgttaagcatttgtgcttaacgctgccctgtccaatttttcgtgaacattcaacttgccttcttaatttgttaacatccagtgtaagttttaaatagactaggaagactcaattgcaaaatctcctccccgctcccaaataatcccaactcattcatgttttattcagatttacataaatcacttgcagaactcagcctctctagtttagggttttgtgtgtaacagttctcaatttaaaaaagaaaaacttagtaaaattagatattgtgaacaaaataatagccaagataaatactgttatgccatgtttcaagttcacgtgcataataggatatgctggaaataatgctaacaaatagaaacgctgaaattcctcacaaccaaaaaaggtactaccaaaaagttattaaaatataaacaaactctgacaaacataaaacagcacagggcccatataatgtcctgttaaacaaaagtaattgctgccaggagcctgcaaatgtttttctttcttaaggggcatgagtttgacaacctgcttttgtttacatgaaataaaagtctgcataggcaaaaggcttgcatcttattcccatgatctaacacaaaagtgagtgtaaacttcaaactagaaaatgttgattctctcaataagaaagggctgctgactgttgaaaagctgtaattcatgtgctcttggcaatagtatttcctgatatgattgtctcttagaataggtgaagaaactggacaatttcatgagagtcttccagggaataaatcatcatgaagtttgataccctacttggatgaggagtttgagaaatgatagacagaaggacttaatttgttaaatcaatgtaggctaaatttctttgttgatgactcaaagagaaaaataaatgacatgtcccatcgtttctttgtaaagatttaatcgaacctttcttttgcccacttgttttaaggtttactaataagtccgtactgatgtctctttggagggcatcttaaaagagaacggggaggtgttgtagcagcccaaaccagctgagtcctaattctctccactgacctgtacaccttccctgtctgtcaaaagatcttgcttcattattcagtgtggttgggacagaatttgagacctcagagagaagactgggtgaaaggtagagtcattgctgccaagagctgctcttttagccagaaggacattgtcactttaatgatgctatttcgccttaccctggtgtttttcctctttttccttggaagtggacccttgttatagcatgtaggtaataatagtctcccacgagacaatggtagattcactctttcccagaaacattacaagctgtataatttggaaaagaaagcaagaactgggcccttagtttatgtttgaaagacaatcaatcttcagaaagcctgacgtcacttgtgtgacagttcttgaaaccacagaatgagatagtgggggcttgagtctcctaaagggattggcagttaaggaggcactgaggttgcgctactgtcaccactggtctatggctgctaggtctttttaccttcatatcagactctcctctcccttgaacttactcttgaccctacctcgagacctgcaaagggccaagtgaagacacagagcccccatgaaagcggcctcactgcctgagctatcgaggggcccaggaagcctcacagagcagagaagctcccatctccctgcaggcccaagggagaagggcgtgaactggagagaagggcagtgatgtgttgcctcttggaaagttcctgctctgtgtctgggctttgcagtgtaaagagttgttggctgcctctggccccagagcctggctcctgtttaatattctgcctgctccgttgatgttgtgcttggctcctgtgggactgcaactcacggcttgaaactggagccaattttctgtcttcatctcgcagtgttttgactggaggcagatccagttcaggccgatcagggctggtggaaacaactaccaagtgtctctctgtctgctttgctttgggagaagaaagtggagggagccccagcatgttgtagaggaactggcctgcggaaacgagaggaggagggtgcagggggcagcggaacagactgaacctcagagcatcagttggaattacggtggatatttctgcttcccctgcccttttcttttgattgattagtggatttcatcaaaggagactcccgggggattgactagaaaattgattttgccttattaatagaaaggaagcgcaagggttttggcttcttagcagtacattttctttggaaggtcaggaggaaaatgtgtttaggaggcaaagcagctgtctagaagagggctgaagggaatctgagaacaataagaaatggggttttaaagatccgcccatgaaatgcagattgctgaacacagaggctgagctaatagcagctagagagtttgctgaggttttctttgaaaaaataataaaatgtttcagggtaaaggggagggccgagaagtaaaagtttcccaaagcaaagaaatgaagatgccaaggccgtcccttggcttgctcttgattagggctgttttcttcattcttgttttttttttttttcttttcagatctgaggctgtcagagatgactctggttctgtccatgaatagattctgcgagcccattgtctcggaaggagctgctgaaattgctgggtaccaaacactatgggaggctgacagctacggaggcccaagccccccagggccagcacaagctcctttgcagggagaccggggagctggtcccccactggcaggtattgcccttgacctgcgcccatcccccccacccctcgctgccctttgcagccagcctggtggacaggaggtggtgtctggggtgcccctctgagccaggagagctaaagctccagggacttcccgggctgcctgtgcgcctctcataagtgagtccagagctccagagagaggaccagaggtgatatttaaattgcattcaaacctgtgtctacccatgctgctttttgaatataagtcatgtgtctgtatttttaagagggccaaaccagatattgaaactctgagtttgggttttggttttctaccctgtggaactgtatggttctctcacaactatgaaagctctggtgggctcaacaatgacacctttatcccatgagatataaaggaatctgcactttgggccagcagctatgagcttcttttctttgttaacccatttatgcccagtgttccattattggaacgctaagcttgtggaagttatttatatcctactgctcaaggtcatcaccaaggtctgacttttcaaacacaaaaaaatttgcaacctatggcataaatgggtaaagcacacaattggttttaggattgtaggaaaaaaatttaaagccaagaaaatagaagtatgttcttcctgattctttcttcttatagtttaagttcctttggatttttttgcagtattagctatttttaaaagaaactaaaatataaaacaagtactcaatgaagtctgttttgctaaaaaagattaaaaactgtggtcttcatggttggcatactacattttggagagtgaaaaggacattagttacccaaaattttaactcaaattttaaaaatttgaattttgtattttgaaaaaaaggaatgctataatcccaatgtgcagataaccatttgttcactaacctaaagccaataagatttcaaagttgtttggttatcagtggttacagttaaagatgtatacatctttaacagtggtgctatgttgtcatgaatttaattaaacaatttaaataaatactaatatattttagagaaattacactcctcccctttatgaatgttgcagtttccttttgcatagaattaagattctgcatatttattaaatgctaaaatatgtgattttcctctataattgcctagaaatcttttcctagcctgggtcacaggattccatatgatagcaactattaagacaaatgtttatttttaatcaccacatgtacagacaaatatgtagccaagttatcctctagaaggaaaggaaacgaaagtattttgtttggagaacctctggcaaaccgcatgtcatttgtcatatctgatttattaccacaggatcacattacaggggaatttcaaatcctataacaacatccaagatcacatactttaagaggaagtatgtggaagaagaggattttcacccaccactcagcagctgtagccataaagtatgtttttttaatagtcattatttttattaagagtttaagatacttagtaacagttgcttgatccacttccaggaattaaattgtttcacccaagcaatgaaaatgagccacttctcagtggagcctcattaatcgttgtcgcttttttgggtcctgtgttatttttcacaagtacttgaagaaaaagctggcaagagctattctacccagaaatgtcaaaattatgtaatccaaggaattttttttaacgtatgatttaatatttctcagactgtgttttgggttatggttcttccacacttttgtgtgtggggaatgcgctcgttctttcctgtcatgttctccccagtctgagttctggctcctgcagccaatgctacttccctgtgtgtccacatgggggtggttacacagggcttttcctgacctcttatgggtagactcatcatccttgaatgtgtgtatacaagtagaaatatgcacttcactggacatgggttacatataagtttgttgaaacatggacttcatttccaggaaaagaccaaagctaacttttttgtaggtatagttaaaaaaaaaaacaagatggggaaattgcatagaattatgaatctgggcatctaagcttttgaaatatcagttcatttttctttagagttaccttccttcaataactatctgctgatttaatcaaggcaggtataagcacagaccatagttgtctgaaatgcagagaggattttcaattcttcttcctctctgtctcctcttgccttccccctctgccacctcatcctttagatgttgcttttaccttgctcatgaaaagacagcagaatgcattggtaggtactgggcttttccctgcatgtgtagtccctgcctttggtcagtatgggctggtttagttcacagctcctcaggttatggtgccagtttgcttttttgatggcctggaataactggtccccaggacacaagcagtttatttcctttttagtttctgtgttgtggttgtagcagtttcccagttgctactggatttgcaccaaccatcgcatagtgacagtgtcacacagctcaggagtgagccctctcatttcctctcggcatctcgtctcccactcagctccacaaggaagcctactttggtccttcaactgacacattctgtcagggtctgagcctcattcattagtgtgtcctcttatcaagcaaggataattgcaagtatgaaacccaaaggattaaaagagggacagcattaaaagccaaatctcatgctccttcttggctagaccagggtttgaagtatattcattatgacttgcattttggcatcattttaaaaacatgtattgatgtacaatatatgagttatgtgtctgtgtgtgtgtatttgtatagacacacataaaaaagtacaggtatcacagtacagcttgatgaatttcatgaggtcatgtaactaacatccaggtcgagaaccaaaacataactagcaaccagaatcttccttctgccggcttctaacactacccctcgccccgctcaccccaactctgaaagtacctcctctcctgacttctaatagcttagattagttttgtgtttcagcatcttccttattgggccataatagatcaaaccacctgaactgtccctcctggggcctgcactgtggctcgattccctagtgcttgaccacaccagtgagtcaggaagtgggtgggtgctccagccaagtgaggaaagggaatatcagcagaatgggggacagcctctctaaattaaccctgcggaacaagaccacaacatgcccagacccagacagtgccaagaaagaagtatgctatgatgatgttttcatatagtccattttctaagctttctctcttcctttttctgtttgtttttttcttttttttttttttggtttgtagaccatctcaatttttgaggaacgagcccacatcctttatatgtccttagaaaagctaaagtttatcgatgatcctgaagtgtacctccgaagatctgtccttataaacaatttgatgaaaaggatccatggagaaattatcatgcagaataactggtgcttccctgcctgctctttcaatggcacctctgcccaagagtggtttatggctcaagactgcccttaccgaaaacgaccacggatggccaaagaggaatgtgaaaagtttcatgcctgctgcttttaccaagaatgtggtggccactacctaaatttacccctttctgtcaatgctaatgttggaagtgcctccactgctgcctcctctccctccgcctcttcttcctcctcatcttcctcttcctctccccctttgcctttaccgagttgttcccgccaggtggattttgatgtaggtagtgcatctatttacaagagtgatggccagatacctgccaatgaaatctttgtcactaatgtcagatcacttggtgttcaggaaaaggccaaattaaatgatgagaaagcaaatgatgacaccaacagagatggtggccccctcagccacgaacctgtgggaaatgaccttgcttttgagtgcaaaggccaattttatgattattttgagaccggatataatgaaagaaacaatgtaaatgaatcttggaaaaagtccttacggaaaaaggaggcttcaccaccaagtaacaaactgtgctgcagcaaaggaagtaaaatatgagccatcttctcaccgaactttgaagcatgcacagcatgatcagttagctctcgtaaattttattttgaatggattttgtagttttgtacaacagataaaattatgccatgaacatgccatgtcgttttaatgcctggagagcagattgcgtaaaacatctgtatagcaggcatcagcgagcttcttataaatgtggtgatttttaccaaggaaacgattgacttaatgcttaaaagtatatcatagttttcttacggaaaagatcagtagatgagattgggggacaatgtgcccttgcaatatttccattgccccccaaggagcctgtcactagctaagaaatttctacatgtttgccagttaattagggagttatttggtaagcaaatcaatataaccagcaaagatacctgcttcttctatatgatacaatattttttttaaataaaagactaaagacagggagctagatgaaatggcttaatggtgctgttaagtatttgtacctaacagtcttgtgtgacagatgaaaataggatgtaacataatgaaacacacctgtctaggggcggcaatcaacagtcttacacagagagggtattccctgcaagtttctggcttgcctgtgatgggtgatgaggcttttagagaggtgttatacagggcgatttttggtgccttacttttatcttaatttttgccaatgtgaaaattaaggataaatcagagttacagcagggatttaacaaacaggacaaaaaaaaaaaaaaaaaaaaaaccacagggtggatcaatatggtttggaaactgttaactttgaactattgtgttcagcttttgattcgacatctctattctttatttttgatgcccaattgcttttggattcgccgttttttcaatagggatggaggaaatgagagagagagctgttagaaagcagcacgggctgctcgagcttttctatggcaactgtgtgttgctggggttggggttttctgggttttgggttgttttgttttgttttcttgtccaatgaagttcacgaaccagtggcatgcattatacttttctctgttttgcatcatttcacttgtttagattataaaagcatgtgggtttttatatatgaactttgctgttgattaagaagcacaatgttaataaatgatgtggtgatcaataaggtttatcttaaagaatgtaaagactttaggtttttgaaagttattttggagaaatgggacttaatctataatagttactatgtatttggtctacattttccaaataatatctttaacttgtacatttgaaaagtgttcagagtggccctcctaccatccttccttccactccagccaactcttcctgctaaactgtattccagtttccaagtttactaattgacttgggcctgttcaaataatacttcacagaaaccaaatgccaaacggaggaaataagtaagccctcccagtttctccaagataaagctttttttattattgctattaatattaaatataggtctcattcatacagtgtatgagtaggatcatttggacaattgtccacaaagaccaatttttaaaacattttcttgtgttatagttaaatagtctagtaatgttttgtcctttattttcaatatttgataaacatttgatgttcaaaacttagctaatagatgcttgtatatgaatgtgttgtaataaagtgaggttttcttgatatatatttattaagatgataaaaattcattaagttttttaaattttaatggctattggctatgtttctcttttccattattctctctcctttaaaaaactcaaaacatctagaaactgtagtggatagtggccacacaggagttttctaaattaaagagtattttaaaatgccaatctgacaggtgtttcagaatgatcctagttcgtaagtttaagtttctattgattaagaagcacaatgttaatagatgatgtggtgatcaataaggttatgtctgaaagaatgtaaagattttcctttctggagtgtctctgaaaaaaattgtataacacgaagccataaatactgaatcttagctgattgcattatgaactgtcaaactgtgaagatgacccatatgtaaacagttataacagctacagattattgctagtagcattccatacaattccatattaatgttcttaggagctaatatttgataaaggggaaagctagttaaaaactaattaatttgtcaaatgtagcattcttattatgagtgtaatatctcatggagatttaaatatgaacgaaaggacttatccttctgctttttaaaagccccagcattactagatagtgtttttcttgaaggccaaagctgtaaaatgacaaagttggtgattttcagcagcactcacctgagctgtgagcgcctgcacctgttcggtagaacccactagaatcacttctctgtaggataagtgatgcctttgaatccagcagcataaaaatctgttctttttagtcatcaagtttttgtttccaggatatttctagcattgcaaaaaaaaatttcttcaccaaacactaattcctaaacacccatccaaaccacaaaaattctcttgttagtaggcgagagtgctaggacttcctgtgttcacctcccatgcacccagcattgtcttttatgcatgagatattccattagattttcctagagtggccaggacacccttcatagtaagttatatctcttaactggattctatagttttatctcgagcaacttggaaaagctaagacatcctccacccacactggtatctacgcgcctggaagctgcaccttctctcattgctgtgctctgctttaaggaaaacctgatatgacagaatcaagactattaaaagataaatgaggggaaatcttcatttaagaaagttgccttgctccccaagagtgcctttaattgctattcccctaggcatctgggtgcatatcattaatgaaatcattaacctttgtctctggtccttcctttctaaaaacagcagattatagaaggtggtctggcaaagggattttcaaagggcaaaagtctcatcatcatctttccactcaaaatcctattattctacatttcactttgcaggggtcctagggacaggattgcagggacaggggacatgggaggaagacagaaaaattcaaaaccagcagatgccactacctggcaatgaattgaaaattaggggaaagcatctttggcgtgaccttttattaagacaacagaaatttagaacattttacatgcttctttgttaaatggtgaagcaagggaatgaaagtatttatttttagagctcatagttaactccatcaagacatggctacccacccctccagttatgaacttgtattacagctccacttggtgacttcctttctgtgtatcaggagcagagcagaggacaacttgtagaagacatgaccattaagagacatcaacttcgcaacaaatataagacaaggatacaaggattcctatgtgatgcagctaggtttttatatccttctaacaaatggtgagcaggagacttttttggaaataattagttgtgaaattccatttttctgacagccccttaaatttgaagttatttcatttgtagttaaggttatcacatccctgccaattttactagattttttcagagacaagcattcagcatggcattagtaatgatggtttaaactaggtgcagaactgtcccatgaagagaagaatgatatcagtatttaaataataaaagaagagacaatgtatggtttatagtgattcattttaagattgctgtattttgattttgtggtttaaaataaatgcattaaggatcttttaagttactacaagatgcctctctgttgctttcttagctatagtgcctaagcaaggtatattatcttgacatggctaaaatgtctcaattctatgtgatatagctacacgacctggggtgaaagagttactagtttggagattatttcccagccttgggtacctgccatatttgagctgggagaactcacttaggaaaagcacttgcaaagatgtaagttatgaacacttgaatctcgcatcctgccataaagtgcatcagcaagtgactttaataaaacatgctgtttaaaatagtctgtaatttcctgtttctgcatttcccttcagtatctgtgacaggctgaagaacgatgactaaacgaagggaatttacacaagctagtctggtggtgtttgcaaaccatcgccatgagcttcatcttctttggtaaacaatccgctggtgggctgtctatggttggtttcttttctttgttgttgatccaatttgttaactttgaaaatgcaaactacttattcacagtgtggaaacacctgcttttgaccacaatgaaactgatagaatgtatggcgatgtattagttgtttctcatgaaatttcttatatttctcaaccccatttctatgactcttctcttgatttaaaaatatgaaaatcgaataaaatcttgtggggaggacctacatataaaagaacttgcagagatgtaagttatgatcttgctttgtgccaagatctccaagacaataggcaaatatcagaactttgggggaaagggatctaacgtaccctagtcttgtgctgtgcagaccagcctggccttcggcaggcattacctctatccagatctttccatggaagcagctgagtccaggcatcaggcatatgattctccactgcctcctctggtcagcacacacatgaacccatctttgatacttctagacgcagtgctttttcttcagataccctctaaagtgactgcaatgaactaagctctcagatgtggtaagaccctggtatcctctcagccaagagatgagtagatgtctctgaaatacacttggcacagcactcagatatctataccatcttcaaaactcacaacatccctgtgtgcacaataagcaaaagatagagaatgacaggctatgcaagggatttgcgcaaaaggttggggagttgatctctggtccagtacactgaaggaaatctgagaaatacagtgctccctgtacactgcagagtgaatccactctctttaaggaaaagtctaaagactgcaagggaaagaagacagaattttttgtttctttgtcaaacctctttaggaaaacagaaaaaaacatttcagggactaaaggattgttttaaatgtttttgcaggaagagagaaatggcttgtctgccctttctggagctgggaggggttctccttgttctccatgtccttagatgctgtgcttttcaataaacccaccaaactgtatttgtgaacagttatggtcattagcccaaggaatctctctcctgttcagtttaggcacagaggttgtgggtttctcacaagactggagtatagaagagggttaagagtagggggtttggagttagactgcctggatgaaaatctcagctctgccagggtagctgtgcaagcttggccttggccaacaagccactttacctcctagtgcctcagtttactcatctgtaaaatggagcagcacacattatccacctcatcaggttgtcaggattaaaggttttaatatcagggaagtgactcaacattgcctgggtgtacattatgggtttgcagtgaacaagcctccatgacttctccattactgtccttgaatgcccggcaagtggaacccaaccgtgccagatcctccttttggtggaaagtattcagcctctttggttctgtacagcaagcttgaagttaaacagggggatggtatgaaacctggggtcccagggcccttagctatgaaagtcgtcattggtgaccttgagatatgtttagtatttaaaataccaaatcataaaatcttctgaaagtggttgcacaggctaaccccacatcagatttccttacctttggctggaattaaatcagctccaggctgtcacaaactgagaagaaactctgactgggaaaacgaaggcattatccttaataaatacaatttgtttgtcagacagaatctttcagaacattggctatgtgaagggaataagaggtgtcccttacaaatggaaagattaaaaaccactaacctctgactcatctctaggatttgccaaagttcaagtttatttagttgttgtatcaaataattttcttaaacctagcttttactcagaaaaagtacagtattaagttaggaaaaaaagggggggcaggcgcggcagctcatgcctgctggtaatcccagcactttgggaggccaaggcggatggatcacttgaggttaagagttcaagaccagcctggtcaacatggtgaaaccccgtgtctactaaaaatacaaaagttagccgggcctgtgtggtggggggcgcctttaatcccagctactcgggaggccaaggtaggagaattgcttgaacctcagaggcagaggttgcagtgagcctagatggatccactgcatacagcctggatgaggaagtgagactctgtctccaaaaaaaaaaaaaaaaaaaaaaaggcaggaggggggcaggggagataatttagactaaacgctattccttgtgctcctctacctgataattttggaggccaaagcagaattgtctggataaccacaaccaaggacacagcctattataaaataactgggatacagtttccatgtataaggtcaactagaggttggttatccctatttcaaattcttatcccttctgttttgccagtaaactcagaaacccactgataatttcaaaatagaattccatttacaaaattacattctgtctctctatttttgaagagtatatatttttccctaaggtgaggttcatttgtagcaggcttgctgatgggtaggtcctgaaatgagaacaaaactgaaccatatggcttgagaatgagaaatgggcaacagagtataatgagagcaaatgcagtgttgtaccatgggggtcccaggacttctctgcaagaggctcccctcctatctgactgggctaggatctcatgattggcaacattagttgccatttgagccagctgagagaggcagtgggaagccaggacacctcagcctgcccagggaggtctaggctggccatctctaaacctttgtcctctcagagtttggaaaaccagcagctggagtagatatttttatttcccaatcagtagaattttaaccagttaagatgatcaattagaattctcaaccagcccaatcttgacctagctggttttaggcaagatgacttaatgcacaagggacatctctatctagagatggtattggtccctgcacagaaagaactcttaaagaaattctggggccatttatctgggtgttttaagtgatgaataaagaaatacatactaggaagaatcctgggatggaatttgtacgaattaattgatttctaacacttgttcttattatagatccaacaaagcttacctcaatcttttaaaaatgtcctgtttaggccaggcacgatggtgcacaccttaatcccagcactttgggaggccgaggcaggaggatcgcttgaaaccgggaggtgggggttgcagtgagcctgcagtccccaccactctggaggctgaggcatgagaatcgcttgaaccccagaagcagaggttgcagtgagctgagattgcgccactgcactatagcctgggtgacagagcaaagagcaagaatctgtccaaaaaataaataaataaataaaagaagaagaaagcaaaaagaaagaaagaagaagaaaaagaacaaatcataactcttcatttatttgcttagagtcaatctattgtattgatttctggtcaaatgactgctgtttcttaaccacaagattataaccaacttagtggtgagaactagattaggagttaggaaacagagtcttgcccaggtttgccactcactagctgtctaaccatgaacaagctccttcacttctctggatcttgattttccatctgtcaaatgatgaggctggattcaaagggcctctaaaagattgttcccttctaaccttctcttctgattctaacaattcctgattctaacaatcagggatctttctgaagatgttcacttgagttttctgcatgtcaccctttcctttccttcccttccccagaatgccttttttccctcccagtgaaactgagaaactgcttctggatctttctttaagaacacatctctgagttttcctgtcccaaatgattgttttctgcatatggcggctaatctattgtcttctgtaatatacattcctccggataggccatgcttccccattctcactgcagttcctctgcccctccccctggagtgctcctgcccccgcctcctttagccgattagctccacacacccggagccagccaggcacaacgcggctccccctggcacaagactgtcctcgccttcaagcaaccagcctgtctgcaccatgcaggcaggagatccgtgaaccctcttctctctcattcttatgcgtaataaaatagcggactttcccccttctttttatgaagacagttcttgcagctgtgactataactgttttttttttttttttaaataccagccaagattatggtcccataacccaattagtgtcatttggttgtggtccaagggcttcccctgcacgagttttaatttggggatccccggaggctgcactccacatctgtagccggcctgttcttcctctccccttatttgctcgaggtttatgggaggattagctgtgtggtctgggaggcggctgcttctctttcatcctcacggctctcgagccgcggaggagccttttacttttcatcatcaagccctggcacctggagggcgggcagccctagcgactggaatgaatcagaggatgccctgcaggccccggggggcgcggccctgcaagcatgggggaggggaggacgggggaaaggctgcttattgggctgctcagcacccggccagactgcgctgtgctgggacggcgagggggtggtgaggagggcagccgcagtgtgaggtggcccccccccgccccgcccccactccctggctggcgagggctggcaagggctccgggcgctcattgtgcaggcagctggcaccagctgggaaggggaattagcataacaaagagccggagcgagcgcggcgcggcccggcgggggctctgccgagcgccccgggctcggaggagccgcgctgtcagcggctgtggcgcgctcgggcctcctggcctgagaccctcggagcagcggggcccggcccccagcgggcgcgctctgtctgggttccggccgcaggactcgcccggagaatgcagtgggtgtgggtgtgtccgggacagcgtgaatgggcgtgggtgtgtgtgttcgggtgagtgtgggtgcccgtgtgtccaagcgtgcgtgtaaccgtgtccctgggcgtgggaatgcgggtgtgaaggggtcacctgcacacgggtggggacccgccagccctcttcccttccgccccaggaaggcctctttgtttatttctttccggagaccgcggtggttcttcaatcaccagttctcaatcctgattgcacctcggagcccccttcgggagcttttacaaaaccctcaggcctgagccctaccccagaggctcgcgatgaattggactctgctgaggcccccagcggatgtttcttcagacgtccgcgtggattccgacatgcggcgtggttgggaaccgccgagtacccactcccactgtccccagccctgctgccgaccctggacgccagcgagcgccaaggagaccggggccggcttggcctcgggtttagggcctggaagcttatccttcgccttcactggttgaggtcaagtgcacattcccccgacactagcgctgggtcttaggctaccgactgggcaacctcacctccattattgcatctaagccttacagcagccccatgggaaaaaagctgtcgtgaaacgaagctcagttgagtgtcacaaagggtcacaaagctaggtattcgacccaccgaattggagtccagggctatgggactccaaagtccacgttctttccactgtaatatttaaaaataaaaattaaacaactaaatcaaaaaccaccgctgcttttcaagtgctgccaagacctcaagctgaccaggtccctggaaaaaccctgggaggactctggaggaggcggggttagggtgtagcaagactcctgaccccagaaggtagatacggcctagacgacgtcactagaaattgcccggggcgtcttctctccagcaaccttctgcaccgccttccacctgggtagtctccctccccgtcccggcccttccaggctccagctccccaccccctccctacaggaaggaaatgtgacagcacaagccgttcgccatcacccaggagctgtcagcagctgcgcagcccggggcgggagagagcaccgcggtcagagacccggggaccggggagctgcaccaccgcgttccgggccccgcgcctgggcttcgcctcgctgcaccgcgcctgcttgctcctagcgggagcccagagtctccgagtctcctcaacagcttcgcgacaggagtctcttgcctcagctgcctgagcagtcctcctggagagggaggagaggaggatgaaatgagctctgggctctgctagccccagactcccccattacccagaggtgtgggtttccacgagtgcaggctccaaccagcgccttagcatcaccaagctccagagggccctgggcttctgaggccacccaggcccacccacccttctcacagcaggggagataaaggtccagggaggtgaagtgactggaggtttcatggcctcctgactgcctgcccagctttactctggctgcaccagaccctttaacaggcaaacctgtcagtgcttacttaccggggacattttctacagagagaacctcagtgctggggaaaggagtaactataggcttgcaggcagcatctgcccacaaggtgccctggagagagggaaaagttggaaaccctgggcccccagcctgagcactacccagtttgagtttctggggcctgatggggctggtggtggctgctgttgttattattaagagttcagaattctcgtaggttctaacaactgtgttcattctcaataaatggtttcttaataatcgttttaattagcaaaaaggctgtcttattaaagctaattaaaggcaatttgggaaccttattttcatacaatcataaaattagagaaacaagaggcaggagaaatgggaaaagtctcagcttttctgcagagggggcagggaggagctggggagaccctacctccaagccaggcatgcagaatgccagtgcccaagggggtggactggagctcctagatttgggtgtggcctcaggcagtgctggggaccaactgctgagagggatactctgttcacatcctccaactggagtctcagagtcacctgaactcctccctctgctctcacacaattagtcaattctctccctctagctatctttacattgaaaaagaaggtgctactattgcacctctgccattgcacctggcagccataacctaggtggtttagcatccatcaggtgccttagcatcaccaagctccacaggggcccagacttctgagcacccagggttatctacccttctcacagcaggggagattaaggtccaccgaggtgaagtccacagcctcagccctgcccagggtgccccctaagtccccaagcatttccactccatccattctgtagctgatcatcctaaatcaccaggcaaacaggaatactttacctcccaggtttgactttcaatgccctccagacctcagcccaggctacatgcccagccccaccttctgctccctggggggaaccttctgctccagccacttctgtcctctcaatgtcctctcttgctgacctgcaacttttcacctcccagccttcactcctgcttttcccttagcctgggataacctctccatgcccccacttatacaaagagtaacttgccctcaaggccacttcaaggtccacattttgtgtgaagcctttccagggctactataggtctgttctgtgatacataaaatgtaatatcccccctctctagaattacttttcaactagaatcatagttttgggggagattttttttggaaggcattataaagtagaaattaaacatgggctttggaatcagagagcttagttacaatcctggcttcctataactttgtgaccttgagtaaatgtcttgacttctgtaagcgcaggtttcttcatgagtaaaatgtggctaactatacccataactaagttattgggatggtgtatgtaagtcactttacataatgccaagcacacaatatgaatagctgtgggacccttgtccttgttgatgtgggggaatagtttagagtgacaatttgttgttttatgagcatgtcctccagaaaaagagagcacccagtcaaaggatagattccatggctatctgaacttccactgcactcatccctaggggttctagtacctcagtacgcacccccattccttctctccagggtcccttccaaatcctaggaaggggctctaccctcgggtccatgggatagtggtttatgggcacatacttactgtaagtgtctagtgtcagaactctacacaagaaagacactaaacatggggttagctccttgccttcttgttttaagttgcccagtctccatcctcagtagacctccctgtaaacaacccattctggcaggaatctaacagtctaaagggctctccagtaaattctaccataacaccaggaattcttgcctgtccttaaaaatgcagctttgtgcatacatagatttttttgtacagcaggctttgtccctctccttatctgaaggccatgggacagtgggtggccacgaatctgcagggggctccccttctgtccttccctgaacatcctctggatgaaacaaccatagcaaaactgacctgggaggaagagcaatgagcccatgcatgaaatactagtgtttagctgcctagtctcaaagcaattgtttaagtaggggcctcagccatgctaatagctattatcataggaccttatgtctattaatgtctcctcagcagaaggaaatgcaaacttatgacattctgattgtgataagcagcacactttcacctacgaggggctgtaatcgaagcagaagtgcctcacaaattaactagcagtcgcccacacatcaagcacagaagatactttctctatcataggtaagaaagggacttatttctcatcctggagcatcagtggctgtgtcagccccaccacagcttctgatgggactggagctacactgacatgtatgattaaagctccatgttataccgcagtggctgagttttcaaggagatggaggaaacctcacaggacccctggggcaggacacaacactgctcctcagaacattccttttaaaaaagttgtcatgaaatccaattaaccagctggaaggccatcgtgggcaggcctcctcggggttaataaataatagaatatgccctacattggaaggggcatctctcttttctaagcttgcaggctgtgacaagggctcctggcaggaagagacatgtactaccaccacgtcctggtccctaaaactttggtgagtccagcagtgaaggtcccctagacagatgcccagagtcctgggggtaccttccccctcccctacaccgtaagccacaaattcatcaacccagccccaggtatgagggaatgaggggtcctgtcttgagagaacagagcattagaatggggtcaggagctttagttctagctcccggtcagtctcattgtcaggcaagctgttcacaggctcctgttcccagctgaacaagactgatggtagagaagacttcaaagtgggcacagcaggctctctctcactggtcccctctccgtggctgatccccccgtggggaacactttacttctgttagaccagcactgctcaataaaaatacgatgcgaatcatgaatgtcattttcaattttctagtagtcacattaaaaaaaaaagttcattaaaaaaagtgacattaattttaataataaaggctgggcgtggtggctcacacctgtaatcgcggcactttgggaggctgaggctggagaatcacttgagcccaggagttcgagaccaaactgggcaacacagggagaccttgtctctactaaaaattaaaaattagccaggtgtggcgttgcacatctgtagttccagctactcaaggaggctaagcagggaggatcttttgagcccaggaggtcgaggctacagtgagttatgattataccactgcactttttttttaaatttttttttaatagagacaaggtctcactatgttgcccaggctggtcttgaactcctggactcaagcaatcctctcgcctcagcctcccaaagtgctggaattataggcatgagccaccacacccagtcccttaatttttaaaaaataaaaaaaagttttaaattataaaacatttaaataatatattttatttaacccaaatatacacaaattattgtcattttaacatgtaatcaatataaacattttgactgagatattttatattcttttttgtcttgtactaagtctgaaatctggtgtctagtttacaatgacaacacatatcaattaggacaagacacatttcaatttcaatgctcaatagccacatactgctagtggctaccatatcggacaagtcaaggcctggatctccgtgatcccttgtacagggaatcatgcagctcccatctggctcacaaccacatcccctctcctctgggccctctgggcaccatgttcttgcttcttggggacccttagcccatccccctagttcactcccagggactgcccagtgaaaactacccggcaccagagggtcaacgttttggggctggccggctctgatctacaccctccagcatcatccccacggcccagagagggttgtgtgggactatcctagagtggcagagtcaaggacaggggaggcaggttgggggagaggaggagttgcagacagtagctccagtagtttctggagtggtgagggctttagttagaagcagactgaggagcctttaatcctctctgttaccagagaggaaaatgtgggtggcaagtaaagtcttgtcagggaaaatactggcaggaaggtgagccacatgcccgagtaatcgccgactccaccgctctcctttgatgtagcacctcggtgccatgcaggccaggccaggcctgtgacagacaggcccttcctgggcgattgcaactgtgtgtgtatgtgtgtgagtgtgtatcctggctccttctcaagctgcagatgcccgtctctgcatgccctcaatctgacagcatcccaaggggagtgagtcctaggttcatgctttctgaacctcacatttagacatgtggcctaagaaattaggagtgtcacggagtggaccacaggctgggacagatgatactgtactcaccatgcccgtcctacttccttgactgctgtctgctacctagtggaatagcagtggatgaatgagcacgtgactgttccagacagtgggcaggctcggtcagcaaagtagaagagggcgctgcagacagcaaagagctccagtggaagtgctgtttatgggcctggaacagtggaacaggatgaagcctcaataaggtcccatgggagggtgagagtcacccatttgtaagagacaacattactggggtccagttctcaggcccttgtgtggtaccaggaactctgccagctctagcctgatgttgccacaatccctcaggctttagaaaaaggaagggagctggctgattgatcactcttatacaacactttacagtttacaaaaaactttcacctctattacggtgtaattctcccaacaattctatagtgttggcaggacaggtattgttatccttattttataggtgagaaaactgtggctcaatgaagggaaacactctttccaggggcagagccaagatcagcaggcaggctttttcacagagctctccagaatcattgctcaagctgaccttagagcagggctcttataattcgggggtcataaatccctttgggagtctgattaaaaaaaaaaaaagctttgaatcctcttactgaataatggacttcaaacagtccatgacccccttgaaattttatagaaaatattgtctgtacagtttttagagggagggactggggatgaaggaaaaagatcagatttttttttttttcaagagtcttgctctgttgcccaggctggagtgcagtggcatgatctcagctcaccacagcctctgcttcctggattcaagtgattcttctgccacggcctcccgagtagctgggatcacaggctgcgccgtcatgcccagctaatttttatattcttagtagagacggggttttgccatgttggccaggctcgtctcaaactcctgacctcaagcagtccacctgcctcggccttccaaagtgctgggattacagatgtgtgccactgcacctggccaaagatcagattttttttttctagtcagagtctcactttgtcacctggactggagtacagtggagtgatctcagctcactgcaacctctgcctcctgggttccagcaattctcttgcttcagcctcccaagcagctgggactacaggcacacactgccagtcccggctaattttatttatttagttatttgtattttagtagagacggggtttcaccatgttgcccagtctggtctcgaactcctgagctcaggcaatctgcctgcctccgcctcccaaagtgctaggattacaggcgtgagccccccaacgtggcccaaagatcagatttttaaggaagtctacgacacccaaaaggttaagaatttgtgatctagaccaacctcttcatttgacagatgaggtaaatgaagccgaaagatggccggtgatttgcccaggactagcatcagagcagaagtgggacttgaaatctgagtcagtctgccctttcactatacaccaattataatgaggtttacagatgcctgagctgctcctggctccagggagccctagcttgggaaacaccaagcccctacacaatgagatccagattaagaatggatgtgtcatcccagctccaccgctagccagctgcacaactatcccgcactctctgcacatcattttaccttccagagtagcattttaccttccagagagaagcattccctgacctccctacttctgaggaacagtatgaggaagcaaggacatgaaatgtgatggagctccagagatggggcaggggaggggaggaagagggaagaacagaagacagcaagtggttgttcaaagaggctggggctgggcactggatagatgggatggttttgttttatgcagccgtttcatcttctggggctaaatttccccatccctcacactgtaggtaacgagtctcctcaaactctgcccttgcatcctctgaattgatcagggtccttctttgtaaaacaaagcaaatataaaaacctggaatcctccccatctggtttaagcatgagaggattcagtaagggtattaagagggctgaaaaacagactagagtctgagcttccaggatgactcccagagccacactgcagatctggctgccaggggagcagctgcctccgtcaggagcaggaagttgccagttctaacccattctgtgcctgctgtgatctggtgccagcaaaaagggaggaccccttcctgccatgtccctgtccctaggtaactctgttcagagacaaagattagctcagattggtgcgactagcacccctagcagcaacggaaatgaaaaaataagggcagttttcttttgttttagttttcattggaaaggtaggatgcatccttgaaagactatcaaaatatcaagagggtgttgaaaacatttgggcagccatgaatacgtctatgatagtgccccttgagatgctggggacatagtcccaggagacttgctataacaactgtattttgaggtctctcattttaacttaatttttttttgagacagtgtctcactctgtcacccaggctggagtgcagtggtgtgatcatggctcactgcagcctggaccttctaggctcaagcaatcctcccacctcagcctcccaagtagctgggactgcaggcatatgccacgacacccggctaattttaaaaatttttctgtagagatggggtttcaccatgttacccaggctggtttcaaactcccagtcttaagggatcctcctgcctcagccccctaaagtgctgggattacaggccccacacctggcctaatttcaacacattttttaaaaattcattgacttctgtattatatgtgtatatatctcttatcatctatctagaaatatatatatacatacacacatatactatttataagcacacattgtatacatacatgttttatttaccataataatcacatttctctaaaaatcaagtagaattggggtgttgaggagaatatttgaagctaatccttcagtttctcataaccctcagctacacacacacacacacacacaggcccttaaagatcttagaaggaagggagggtaaatgtcctggtttatctggaacaggcctggtttatgcctatgggcccagcataatgattaataacacacctactgtctccaaagtcctcatttaaatgataaattatatagtcgtcttaatcttgggggacacctgacagtccctggcttctgggatgtgttgacagaaacgaaattgcaacctgacccagccagcccttggggaaaactaggtggtcagctgatttgtctttattctcctattttgagaggtcggacctccaggccctacctcaccacccccagccagttgaactaagacctctggggacatgggctcctaagtcctgtcccctaagaatcaagaatgcataatcacagatgctcacacacaggctacggtcctagccaagccacggccatcttattgctcaaaactttcctcctctaggaaccatccctaacactgatccactgtaaatataagtcctttagtatatgatgtccccacattgcataaaactcactgaacctgcttacatgccaattctgtatgagtttgattatttcgtttactacagtcctgcctttcccaccagactagggatcccagggttagggggctatctactaggtatccccaagtgcaggattgagttcttcccccatcaaactaggggtctctaatggcaggaaccagtctcccctatcagatgaagctcccaagcacaggagtcctgtaacctggaagacaatcatgtcatcttctctttacttctgcctttgccttcagtgcccaacttaggtccaagggaaagtgtaggtatggatcttgttctcctaactaccccgcacctgggctgggtgaaggggtgagatttgttcctgtgactccctttcaaagcagttctgatttttccagtctgcctgggcctccaggctgcagagtggactgactcgtgcttaatgaagcacattctccatctgtggtctgcccctcctggcagctccagctgcctggggcctggctttgggggaagcagtaaagaagttccttcatctcaggctgccccccactacagacacaccaagggatccactcccccaggccagccccaccccacccatgttaggctaatgagacccagaccccacaccagagctgtcctgattgggttgacctatttaattaaaacagcagcttccaaaaacggaggttctgctccaaggctctgcccctggcctcaaagacagactctggctgtctctggccagcttggactttggcactccttctcagaccccgactttcttctctccctccctccttccttctcctcatttttccaacatctgtgtccagaaaggaagaaaaaccgtgtttggactggcctccttccatcagtcatttttttccactttcaaacatcttgtctaaagcagagtcagttacataaacattccacctctttccataaattggccgcagttactgaacaatagcgttactgtgcaggggaagagggagctcaaggccacaccccacaagtgctggtcccccagccaaatagaaccagagactcattctttgaaagaaccaaagaggaaatccagaatcttcgggcgagaccttttctgctgtgcttggagtggttcctttaccaaagcccctctctgctctgccctcccggcagccatcttccatctcttaacttcaagctgtttgaacggatgcccaatttctgctttttccttaactgcctgacagtgtgtgtcactgtgtgtccctgtcctgagggcagagtgtgtggatgatggagttggtggtggtggtgatgtgtgcctgtgtgtgtgtgcgtgtgtgtcttttggcaagatttttggaggcacgccctcaagattttgttgccttttcttaaatagaagcagttagacctcactaattcagaccagttggagaaaagtccacaggggaaaaaaagtctgacttaacagaacacagttcttcttaggccctctcccttctcccaagtgcatccagttactggaactggactaaccacattggcagatacagttttgccagacttgctccgtgaataggtaaagaccactttttccattatcttgagtacctaattaaatgtgtgggccactcaaggtgtgaaaatgcgtttttttttcttttcatagtaggtcagatatcttcaacacttatatagtacttgtcattggcttagtgaactgtcttcttagccagactgtatgctctttaaggacaagttctatatctgaatccattcactatccagtgcctattgtagctccaagcacatagtaagtgtgcaaaataaatgttgaataatggatggatggatggataaatggatggatagatgaaattagtgaagtgggaatagaggggtggagaaagagccttggcaggggaagtttgaaggaagcttctattgacctccttctgatgaggagcagaagtagcagagagcgatgttagagcaagagcaagtaacagacagcattgccatcagctctcacagcaagtggcaggagaagggggaggcagagatggttggagctggggctggggaagtgagtggtaaagcaggagtaggaaggctatgattgaatggggttggtgggaagatgtaattgtgtgaatgggtctatgagcagctctggtgctagaggcagatgtgggtgtggtaaaaagagattgctatgggtaaactaagttgaaaaggtgctgtatcagttaagctgcttttggctgcaagtaatagaaaatttagttcagttggcttatactagtcattctcaactgggggcaattttactccccaggggacatttcacaaggtctgaagacatttgtggttgtcacaactgggatgtgggggatagtcatactggtatctagtgggtagtggccagtgatgcttctcaacataccacaatgcacaggaccacacataatgcacagctgcccacaacaaagtattatgtggcccaaagtgtcagtggtgatgttgagaaaccctggcttaaaccaataagaaacaatttattgttccatacaatcagcagtttcaagggtggtcattttatgtgttcattgaggaggtgggttctccccaccaggagcctttgcctctgccatgtattcggcctttgttccctcagggccacaagagactacagtggctccaagtatcacatcctcacccaagagcatcttcctgtccctttataaaactcaaattcctttcatgtctcactagccttgtgtttcatgcctattcctcaatcaatcctgggcgaggggattgccatgattaatttaattgacatccctcacccctatccccacactgacactggggtgtggaatgtgaaacatgaagaaaatgtatattctgttaaaaagaaaatgtatcttctggagaaagaagagggtgctgtgtggttcacaacaggctctccccagtgtattgggttcatgaaactgagaaatgcagtcctgggcctcaaggctggaacttgctgctctgttactcactttggattcacaccttcgttcattcattccataagcaatagatatttacggaatgcctgtgcgtggtgtaagggacataacagacatgtggttcctgccgacctggagctttcagtcttgtaagggagacactaatcaaatagtctcatggatgatgtgcaattaaagacagagacaggctgggatttaaaagcacatggagcagtgacagtatattacagaagacattacaaagaaggtgagggagagtcaggaagggtttccttggttgagctaagatctgaagaatgcatgaaaattagcttggtaaaagacagggggcagaagagatttcccgagaatagtaaccatgtctgcacatccctctgtggggagaagctcagtgcaatccaggaactgtcacagtggagtgcagagcagagatccaggggaggacagcagggattttgagaggttaggcaagggccgaatctcgtagggtttgctcatgttaaggatttttgtcttggtcttacgagcaaggaaaattcattcaggtgtcccaaacaaggatcttttttttttttaagtgtttaaagtttgtaattcctagtaggaaaacattatctgaacgaataccctaatggcaaaccactgtacatgcttcagctgcactgggggagaggggtaggggattatcttcaaagcaccccagctctcttgatgagaaggtcagaggtacactggtttgtatcattgcgacatccataaggtgatgtaggttgctttcccttcagcaagggctttatttatcagaaggacattatgcttgacctccaaatttggctgacaatttactgataagattcataaactttgggttgttctggtattgtgacatatttgctaggtgctgagccacatcctggaaggctgccataacttctggatcctgcatggctgcaagaacctctggatgaccaagaatttcattgattccaggcattctggccattcattccaggcatgccccctcccattccaggcattcctccgggaaaattaccaggcattcccccaggaaagccacctggaaaagagccatactgagctcctgactgtcgtctggcttcttcctccctctgggctctctcatgctcttctcgagccttcttaactctttctattctttctttgatctctcgctcttcacgttttcgctcatactttctccagtgttctgcaattgtgccctaggttgaacttcttttagcattgcactaacatcttcatcataatccaatttacaggcaagagcaagatcatgggctgcttcttctcagtggcctataagtctgtgtgctttcccgccgggcgcggtggctcacgcctgtaatcccagcacttagggaggccgagatgggcggatcacgaggtcaggagatcgagaccatcctggctaacatggtgaaaccccgtctctacttaaaatacaaaaaattagccgggggtagtggccggcgcctgtagtcccagctacttgggaggctgaggcaggagaatggcatgaacccgagaggcggaggttgcagtgagcagagattgcgccactgcactccagcctgggcgacaaagcgagactctgtctcaaacaaaacaaaacaaaacaaaaaacaaaaaaattagcccggggtgatggcgggcgcctgtagtctcagctattccggaggctcaggcaggagaatggcgtgaacccgggaggtggagcttgcagtgagtcaagattgcgccactgcactccagcctgggctacagagcaagactccgtctcaaaaaaaaaaaaaaaaaaaaaagaagtttgtgtgctttccctcgccacttgtaaggctgagctgaatcgggatttatttcaatggctctgtcacagtctcagatggcagcatttggcttctgtaatttgacgaagacactggccctcttggcatacaaaatggccaagcaaggattcagcttgatggcatctgtgaataagtcaatggctttctgcagtttaccatcatttagggctcaatggcagccactttcttatcatttgcctgatccctcatctcctctgttatctctgcattttcatctcccatttcttgaggggcatcagtgtctggttcaatcacaccttcattatcaatttctagatcactttcctcacttggttcgtctgcctttaagtcttcctccaccttcttactatcaggtttttcttccttggtattttcttctgatttagctttctgagtagcaggtggtactttacccgccatgctctccacccactctctcaggaagcgcatttccttggtgtatggaacactcagatcctgtttacacattttcacaaaggcccgaagttcattcgctttgtgggggtccgtggtccggaggcggtcggcgaagctgaggggctgcagcccggttccaggctctggctccgcgtgaccgcgcagaaacgggctttttttttctttttttgaaacagagtctcgctctatcactcaggctggagtgcaatggtgcgatctcggctcactgcagcctccacctcctgggttcaagagagtctcctgcctcagcctcccgagtagctgggattacaggcacaggccaccacgcccagctaatttccaaataaggatcattttgattgcagtgtgaagaacaaagtggagagaagcaggctagatttgggaagacaagaaactactgcaggggtgcaagcaggtgaggtgggatggtgggttggatcagggcgaaggtgggaatgtagagaggttgtgagatttaagatacatttggccagacaccgtggctcaggcctggagtcccagtacttcgggaggccaaggcaggtagactgcttgaggccaggagtttgagaccagcctggccaacatggcaaaaccctgtctctactaaaaatacaaaaattagccaggtgtggtggcacgtgctgtaatcccagctcctcaggaggctgaggcaggagaattgcttgaacctgggaggtgaagattgcagtgagctgagatcatgccactgtactccagcctgggagacagagcaagactctgtctcaaaaaaaaaaaaaaaaaaaaaaaaaaagagagacatttaaaaggtaaaattgaccaaatttattgatggatttcttgtggaccagtggggaaaagaaagggttaaggacggattcctaaatttctggattcagaaaatggttggaaggtagagccatttattaagaaagaaaacagtggaaaaggatcagaactctgggaaaattagagttcagttttcgtcgtggtgagatcacagctcccttgagacatccaagtggagatgctgagcaggcaattcgatatatggatccagagatcaaaggagaagactgcgttgaaaatatacatttagagaatatcggcatacagatggtatagtgggtgtctatcaccaagtaacaaattacctcaacacttggtgacttcaaacaacagccatttattatctcttacggttttgttgtattgagactttggacagtgcatggaggggatgactttgttctacagtgtctgaggtctcagctgggagactcaatggctgggacctgaaactatgtatatttttttctttcttttattttatttatttatttatttatttttattattattttttttttgagacagagtctcactctgtcgcccaggctggagtgcagtggtgcgatctcggctcactgcaagctccacctcctgggatcaagtgattggttcttcagcctcagcctcccgagtagctgggactacaggtgcccgccagcatacccagctaattttttgtgtttttagtagagacggggtttcaccatattggctaggctggtcttgaactcttgacctcgtgatctgcccaccttggcctcccgaagtgctgggattacaggcgtgagccaccacgcctggcctatatgatattaatgttggctgctggctgagagcttagctagagtcgttggctgccaacacccacatatggcctctctacgtggcctgggcttcctcagcacaggatggattgcttctaaaatcaagaaacccaagagagagatccaagtggaaactgaattcttcaaatgacctaacctctgaattcatacagcgttacttccatttgaccaaagaagtcataagctgccaggaagattcaaggggaggaaacttagaccctacttcttggtggaagagtgtcagttatgttttaagaggagtatgtgggatgggataaatatataggtgtgaccattcttggacaatactatgagccacagatggtggtaacaaataaggtgtcccaaacaaaaacaatatggatgagaagaggagagtgtctaggatggagatttggagttatcttacattataaagaagaagagtctaaaaaaaaaaggcagagaagaagcagacagggagtagaaggaaaaccagagagcatggcgtcgcagaagccacggaaagaaagttcactcatttattcactgagtatttatcaggcacctactgtatttatcaggcacttataccagactgttctaggttctgggactgtactaatgaatgcaaaattccttgacttcatgattattacattctagaagagaactatccagttagttgaagactgaaaaaaaaatgtgccttggacatagtcacttgaaggtcaatggtgatcttcatgaaaatggcttttataagaaatggggaccaagcatgatggctcatgcctataatcccagcactttgggaggctgaggcaggaggactgcttgagcccaggagtttgagatcagtctgggcaacatagcaagaccacatctctataaaaagtaacaaaaaattagccaggcatggtgacgtgtgcctgtggtcccagctagttgggaggctgaagcaggaggatagcttgagtcttggaggtcgaggccatagtgagcagagatcatgccactgcactccagcctggatgacaaagtgagaccctgtctcaagaaaagaaaagaaatggaacagaagccagattgggtgggttgaggaatcaattggagatggggagtataaaaaatggattggggaggtaaaggcagctatggggctctgaggataaagacaaaacccctgacagggcatttccacttctctgtagcatgtcctattatcaggctgcattggaaggggctgaagccccactgtgactggcaagggacctgcatcatttttttctgcgctccgctcagcattgttcaggagtaaccaagaatgtgctgccttgtgcagttccagcctccaacccttagtcacagctctgtcatctcctgcaccttcatggattctttcctggattgtttctttgttgctgctaaactccgtcctgagcttgcagcccagattctagccacgttgatctcctcacaagctatgcctgaactcccctccttccttctatctatccctttcactatttgagttcacttcaaaactccttctccatgaagaaggacccacgccagccctcatggatgctcttacccactgaaggctgcactgagctcagctctgcaccatgcacggttctggctggcctgtgatgtttgcgtcttaatctcccacaccacaggtaacttatttgaaagcagaccagggtggagatgtttcctatgtctttacagtgtccccgaggcaagctcgatattggactaagtaaatagcaggggcccaatatctgttgcatctgttgaatgacttgatgcagagcctacctgagccctcccacacttgccccagacgacctgctctgtgagcctgtagcagtagctgaatacaggataggaatgggggctgcttttctcaagactctgcttgcagagctcctggggaataaacagcaggagaggccctctctctactcaagaatctgagttcaatctggggatagaggaagagggttatagttccccatccccataagcacccccagataaatcaaagagaacacaccagcccacagcagtagctgaacaagcccatttaggtatggcaaatagataacagaataaaagactgactgaggcaggatgatcttctctggtagagttttatccaagtgaaaggtcttaagcttgatgtgggagacatacaaatgccacttgttagccataccaccttgtacaaatcacataaacccctctgagcctccgtttcccaaccttttttttttttagaagctgagtcttgctatgttaccttggctggactagtggtggactcactgcagcctcaaaatcctaggctaaagggatcctcctgctcagcctcctgagtcactggattacagacatgagccaccgtgtccagctcccaagttttctaatctttaaaattggaataataatacccaccacaggctggacatggcggctcacacctgtaatcccagcactttgggaggctgaggagagaggattgcttgagcccaggagtttgagatcagcctagggaacaaagcgagactctgtctctacaaataataataataataataatacctaccacatagaattgctaggagaagtaaatgagataatgtacagttggtcctgttagttgtgacctctgtatttgcaaatttgcctactcacaaaaatgtatttgtaaccctcaaatcaatatttacaatgtttttggggtcatttgcagacatgcacagagcagcagaaattcaaatcacgttcccagctgaggctggataaggcatgctcttccttcttctttcagccctcatgctgtaaacaaatgccctttttgcagtctatttagtgccatggttttggcattttttgtgctttttcttggtgatttcactgtctaaaatggtccccaagcatagcactgaagtggtgtctcctgctcctaagcacaagaagactgtgatgagatttactgagaaaagaagtctgttagataagctttgttcaggccgaaatgatagtgttgtgggctgtgagttcaatgttaatgaatcaatgatacatacttcatagaagctcataaaacaaggctatgtattgattggttaatgaaaatgttctgaccagaggttcgaggtctgcagtgattttgtagggcgtaagtaccctaagtaatgagaatgggcagtatgtagaagtgcctatatagtgcatggtgtagacgagacgcattgagaagtgctgactcctgaacttggtgagaagatggcagaaagcactccaagcagtttctttccatggttgtttgtgctttgccgggaatttggatcctgtaagagtcaaacaatttttgctcataagtttctgtccctttgcatccattgaggtacagagttaaaaaaaaaaaaaaaagtttctgtcttatttctcttgtatcctgtgggcgactcatgtttctgccccagacagggagcttaggcaggggctgagtctccaaaaggactatgtctcttgccttctttgtgttttctaccctccttcttgtttgacacccagaggtcccaactatcttgtgtttcagtggttactctcactgtggttcatcctggggtgggtggaggagcaaaagccctgtctggatccccgttcccctgcagggtgacagagaagtctctaagccccggccatgggggaaaatgtgggggcgggggaagggggaccctgaccaccagctttccccccataggaaaggccctcccctattgggctactgtcttttcccaggtggggacgaaagcagcaagaactaagaaaaaggagtagaggttttctccacacatgggtctgattagactctcattcctgaggctctctgggcttgaacactttctctccaggaagccagacagccagttagagaaaatctgcaaacctgcactgaggccaggcttcaggaggcagccccgggtgggatggaagggacgggagggctgtgggcacttgatctttatcacagccctcagcctcccggcctcctgccagctcccatagcccctggccaggatcctccaagaattcagagcctgaggattgtgttaccttctgaattccattagcacaggccagctgggggcggggatgggggctggctagggcttacctgaggagtcgtttggtgccaagcaggcgccttgggtcacttgtttctgcctttccagctttgattccccctttgccttcattctctcacgttctctgcagggaaggacatgaattgtgtatatgttaatataaacaaaaaaagataggggtttttcagatgttcatagggaagagaagttaacgatgatactaataatagcaaaactgtgtgccagacactgttctaattgcttatatgtatacagtcctgcattgtttaacaaaggggatatgttctgagaaatgtgtcattaggcgatttcattgttaggcgatttcaccattgtgtaaacatcatagagtgtacttgcacaaacctagatggtagagcctactacacacctagggtgcatggtatagcctatctctcttaggctacaaacctgtacagaatgttactgtactgaataccataggcgattgtaacataggcaatggtaagctctagaatgccacaggcaattgtaagtgttttttgtatgtaaacttatctaaacatagaaaaggcatagtaaaaatacagtataaaagataaatgatggtagacttgtatagggtactcactgtgaaaggagcttgcaggactggaagttgctctgggtgagtcagtgaacgagtggtgagtgaatgtgagggcctaagactgtgcactactgtagactttataagcactgtacacctaggttgcaataaatttataaacaatatttttctttcatcaataacaaattaaccttagcttgctgtaacttttttacctaataaactttgaaaaattttaaaacctttttgactcctttgtattaacacttagcttaaaacacacattgtacggctatacacaaatttttctttgtatatttgtttccttatgtcattattctatatgcttttttctatttttatataacttttttgttaaaaactaaaacacaaacatacacattagcctaggtctacacagggtcaagaaccacctccatatcttgtccaactggaaagttttttgtttttgttttttttgtttgtttgtttgttttttgagacagagttttgccctgttgcccaggctggagtgcagtggtgtgacctcagctcactgcaacctctgcctcccaggctcaggcaatcctcccacatcaacctcccaagtagctgggactacaggcctgtgccaccacactggcctaatttttgtgtaatttgtagagataggtgtctcaccatgttgctcaggctggtctcaaattcctgggctcaaacaatccacccaccttggcctcccaaagtgccaggattataggcataagccaccacgcccggccccattggaaggtctttgggggcaatagttgtctcctgtgataacaatgccttcttctgtaatatctcctgaaggacctccctaaggctgttttacagttagctattttaaaataagtataaggtgcatactctaaaataatgataaatagtatcgtaaatacataaaccactaacatagttgtttattatcattatcagttattatgtattgtacatcgttgtatgcttttatactagtaggtttgtttacaccagcacatgagtaatgcattgcgctacaatgttacatcggctaccatgtcactaagtgataggaatttttcatctccattataatcttatgggactaccctcatatatatgggtgggtcatatatccttgaccaaaacatcattctttatgtggtgcatgactctattagcacatttaaaaatcaaaatatctctattttacagatgaggagattgaggcagaactgtgttggactacagtttcttcataaccttaaagaagttagacaaaatgaatctaaagtaacttccggcagagcgcggccgaatgatctccgctcactgcaatgctaggctcatgcttgtaatcctagcactttgggaggcttaggcaggcggatcccttgagcccaggagttcaagagagcccaggagttcgagaccagcctgggcaacatggcgaaaccccatctctaccaaaaacacaaagattagccagccatgatggcgaatgcctgtagtcccaactacttgggaggctgaggtgaaaggattgcttgagtctgggaggcgggtattgcagtgagctgagatgacaccactgcactccagactggacaacaagccagatcctgtctcaaaaaaaaaaaaaaagagtaactttcatgttcatttttcatttgtttttctttttcttggtctctttccataacaagaaggaggaaaaggaaacagaaagaagaatttatttaatctttactacactgggctctataacaatggcagcaaactgtgttttcaagagccagaaagtaaatattttaggctttgtgatccatacaatgtctgtcataactattcagctctgtcattgtagcaccaaagcagccagatacaatatgtggaccagcctgtgtagctgtacttcaataaaacttcacttaactaaacaggcagagggctggatttggccctctgacctgttgctttataagattacccaggcaggggtcctgccctcagaaagctcaccttctgctccaggcttcactgtgagatatatgaaggtgactgacatattccatttgttcgtgcaaaactacatatacatgtggacacacacacatgctcatacacacatgcacatagtgttccccagctttacatgtatttacacacaccacaggcctcttttacacattgcctggtggtttacatctccaaaaggaatagtcctgctgggcattcacgatgttctaagccctatgatcagtgattttcatgttttctcaggtcacccttcccacagtttcgtccataggaattttggtccctgtattagtttgttagggctaccataacagagtaccacaaactgggtggattaaacaacagaaatgtattttctcacaattctggaggctagaagcttgagaacaagttgtcagtaggagccaggcgtggtggctcatacctgtaattccagcactttgggaggcgaaggtggggaaatcatttgagcccaggaattcgagacgagcctgggcagcaaagtgagaccctgcctctacaaaaacattttaaaaattgtctgggtgtggtggtctgcacctgtagtcccagctacttgggaggctgaggtgggaggatcacttgagcccaggagtttgaggccacagtgagctacgatcacaccactgtattccagcctgggcaacagagtgaaactccatcttaaaataactaactaaacaaggctgggtgcagtggctcatgcctgtaattccagcactttgaaaggctgaggtgggtgaattcacttaagcccaggagttcaagaccagcctggcaaacatggtgaaaacccatctctcctaaaaatacaaaaattaggccagtgtggttgcacacgcctgtagttccagctacttgggaggctgaggcaggaggatcacttgatcctgggaggcagacgttgcagtgatctgatggagtgagaccctgtctcaataaatataaattaattaattaattaattaatggtgtcagcagggttggattctcctgaggtttctcttcttggcttgtggatggccttttcctctttgtatcttcatatggttttctctctctgtgtctgctatggtctgaatgtttgtgtttccccaaaattcatgttcctatcctaatccccagtgtgatggtattaggatgtagggcttttaggaggtgattaagtcacgagggcagagccctcgtgaatggaattagttcccttatacaagaaaccccatcccttccaccatatgaagacacagcaagaaggtgccatctatggtgaaagggacctcaccagacactgaattttctggagacttgatcatggacttcctaccctccagaactgtgagaaataaatatttgatctcgataagccacctagccttgtggtattttgttatagcagcccaaacggactgagacagtgtctgtgtccttatctccttttgttataaggacacctgtcatgttgcattagggcctacccatatgatctcattttaaatgacccttttaaagaccctgtctccaaatggtgccattctaaggtactgggggacagggccgcaacacataaatttctgggggatacgagtcaacccacaacaatcccatttacagaaaagataacagaaaagacactgagaggccaagtaattggcccatggtcacagagcaatttgattgcctgacttcaaagcccatgttgctgcatgtattagtagttcattcctgtttattgttgagtagtattctattggatgcatacattatgttttcttcttatgcattaatttttttaattttttttattttttggagatggagtttcactcttgtcatccaggctggagtgcaatggtctgatctcagctcactgcaacctttgcctcccaggttcaagcaattctcctgcctcagcctcccaagtacctgggattacaggtatgcaccaccacatccggataatttttgtatcattagtagagatggggtttcaccatgtaggccaggctggtcttgaactcctgacttcaggtgatccacccgcctcagccacccaaagtgctgggattactggtgtgcaccaccttgcgcccagccatgcatttttaaattgatgaacatttatgttatttccagactattaggaataaagtcactgtgagcattattataccagtctttttgtggctgtaactctaatttctcttgcctaaatacctaggagtctaattgctgagtgatagaataggtgaaacatttaactttgtaagaaactgccaaacagttttccaaagtgcttattctattttcacttttatcagcaatgtatgagatatctggttgttccttgtcatcatcaacatggagttgtttttccctttgctattgagttggagttcgtgtgtgtgtgtgtgtgtgtgtgtgtgtgtgtgtgtgtgtgtgtgtgtgatcctttgttgaagagattgatttccggtatgatgatttgggaagctccagtgaaaatgatgaaaatcacttttttaaaaccccaaacacttaaaggctctggaaacatgcctaagggcatacagcaaatgaagaaatatctattaaagaaaatctacaaatatctggtaagaaaaatgataatctattgtatatgaacaattgtttctttgtagaaattgacaagcgaattctcaaattcataaggatttgcagaggacccagaatagctataacaatcttgagaaagaatcttggctgggtgtggtggctcacacctgtaatcccagcactttgagagactgaggtgggcgggtcaaaaaaaaaaaatacaggtcacaaagactttgctgctaaaacaggctgcggtaaagaatccaggcaaaacccaccaaaaccaagagggcaataaaagtgacctctggttgtcctcattgctcattatacgctaattataatgcattttaatgctaaaagacactcctcccagcaccataacagtttacaaatgccatggcaacatcaggaagttaccctatatggtctaaaaagggtagaaaccttcagttttgggatttgcctacccctttccctgaaaactcatgaataatccaccccttgtttagcatataatcaagaaataaccataaaaatagccaaccagcagctctcagggcttctctgcctatggagtagccattctttattcctttattttcctaatcaacttgctttcactttactctatggatttgcctcgaattgtttcttgcacaagatccaagaatgctctcttggggtctagatcaggacccctttcctgtaacacaggataagtgctctcccctctctctgtgggacgagggcccactgagtacttttcctagagggaggtaaggaaacaaaggattttccttagggaaatggcccaaacaccttgtgggccataaccaaacgttggtaagtacactctgatggtacttatagaacctgacacagggtttcactagctaaggaattattttggttccacccatagtggaaacaatagaagtaaccctgttgtgattggcagtcccaagggggccttgtgtctttggatggaatttatagatggctctttgctgaccagagttcatcataatgggtaggggaagggctgagtgcataagactggcgttggttgagtctttgaaccagtaaaatggctccctttagatgtgggagcctgacaaccaaaattagtgactgaagcataagtttcaaatcatcaaggtttattaagccagcttgagggtgcgcccaggaaaaatgagagtcacagacacatctgcagctctttttttccaaagaggttctcaggaggtttgatatttatacattttccttaaaaaaggaatgggagcagtgagaggaattactacatatttgtcagactttagttagtgcccaggaaatctacattttacataataaaaggtgaacatttgaagagaagaggaatagaggaagcagatgtctcagagaagggtgaagaagcgactaatctcatctcgtctttgttctatacctgggaagataagttagtcattgacattatcagcgtggagtctttcgaaagagctggtttctgtgtagcccttagggaagaaagcctaatggcagttatcaagggagcagatgtaatgaggtatgtccaaccttctatagcatcatggccaggacttagcttccaaggtttctctggggtccccttggccaagaggggatcacttcagtcagctagggccttggaattttattttttatttctcaggtctcagtaaggcaacctggggaagagtcattccccacctggggattcttgaagacacatgttagatataaatgaggcttggtgagaaggggggatgacaggagtcttggggacctgcctgggtatcatctttcctactctgaacttgtccgtgtgaggaagcacccaaggaccaacacggagatgatatctgcctttaggtccctcagcccagatccacggtggaggcagaattaattaaggtgtgagttggtgactccctccccgcatttccccatcatcctgtctctcctttgcccaagacaaagccctcttttaaaggctaggagcttctgctactatgagaatgtgagaggagaaaggaagaaaccagtcaggcaggcagttagggtgggtcctcagttaaattctttcaaacaaaagaacagcctgaaaaatcaagctgcaggcaaagatgaggaaatttgcacagggggtcgtgcctaagacattcccacagctgcacagataagaacaactgcacaggtgacttgcccagatgtgcttgcaatggaaaattccgtcctttaacacatatgcgtaaggggaacaaaacaatatggagtaactcaagctaagggctcccatgcgcattaggagaatgaggtggagctaccagaaatttgtgccttatgtacatgagaggcctagcccttatcagtttcttataaaaggctttatattcaactataaaaatggcaacccattcgggacccctctctgctgtggagagctttcttctttcgcttattaaactttcactccaacttcatcctttgtgttcatgctccttaattctcttggttgtgagacaaagaacttggggtgatacctcacaatgagagactgctacattgtggtacattgctgagactgtaacaaaagcagcctttgcttactacatatttcatcaagaggaacttacatatttattataaggtttttacttttaaggactgaatcccagtatcatgtctctgctcagtgctacaggaaagcaagtggcatccaggcagagcctgtggagatctatcactgtggggccaatttaacctgcagtaaagaggcttgtgcatttgagctttatagtaacagccttcaaatgctagttccatgtccatggaacacaaatgaccatgtgtctgagaaagagtttgggcatgcaatgtagcagcttcatgtgaggaattgtatttgtcaaactaaggcagcctaaactgttggaacttatgcttgatttaagggagttgatgatgtaggcaggggagacaacccagagagctcatctgcagtccacagacctcctaaagaatccataagtggagctctgtctcaatataattggtttcctaggtaatcctatacattttatcttatgtatttaaagacactattcagagaaggggtccataggctttactagtttgtcaaagtcatctatggcaccaaaaagactcaaagaataagaacctagtacctctctctcctttctcctctcttttcccttttcttttctccatctcctttctcagtttttatagcagggcaattataagacaaaaaagcccgctgttactaacactgatccctcttcacagcatacttttgatatgtttgtttaaaaatctacattcctatcaggagaggagtggggaaagacaaaggagatgacctaatttttagtttctagtgaggaagggatccattgtgtggtttatttatacccagttccctccagaaaagccttgggacaaatataaacatttcaacatatgtaaacctatgttttaggcattaaacagcaggagagagagcagggagtgatcctggggtgcttgcacagaccttgctcagctgtggaaatcagcattagcatttggctctattccaaaaagctccttcatcaccttcagagcatatctcagaatctaataataatttaagtgagtatttttgtcaaactttaaaagcttggcacgttctgtcctttaatatcttccctcagaaaaggaaagctgcttaataagtctcaatggcaatggatggaatcattaatcaagaggaagaaagttttttttaatagtcatttgacttaattcatcttaatttgtctccaaaatattttcctagggaggaattggacaattcaagtcttttttggtcatcagcattgataaggctttggtcctcaggtagtagtggggtcattgtaggaaagttccagcttccaattctttatgtagtttggtttttttgaatgttggtcaaaaacaagatggtgcaactttatcagacgttttcagaaatcattaggaataaaaattccattacgatcccaaaatatgtattagtcctatagcagacacaattcattgcccactccccatagtcatttttccttccctttccctccattcctttccctgggcacatgactacccagctaaagaccacatttccagcctcttttgcagcacaagatggacacataactaagtcttggccagtgagatgtgagcagaagtggtacgtgtactttctaggtcattcctttagcaaaagaatgtgtccactctcacctttcttcccttcccatgagctggaaggtaggagttatggcaggagctggagtagactgggaggtgaagccacatgctgagaatggcatggcaacaaggtagaagaaacctgtctgtcctacaagatagaagaagcctagatctccaacactacagaaccaccataccaaccctgaaccatctactcattcttttatgtaagagaaatatgctttgttagagacaccattattttggcctttggtatagtagctaaatctgtaccctaacccatgttgatctcagtcacacttcttcttactcctagttactcttattctcttctgggctccatttcattttgccagccaacctctgacattttgctatcatgatacattgccaaagctgttgcaggtgagcagggagtacctgggccagcggtgcaggggtaaaataatttaccaagacagttgtagacaaaaacaaaaggcagatttattagagaaagtaggaaaatacgttgcaaggaggcaatgggcagccagcagaagagaagctaaccgccaggaaacaggcttgctggagattctatagaagagtgtttatgctgtctgttgaagagggctttgtgcagttctgataacaccaaggttgcagtgagctataatagcttgcaggtgtctggtgatagttggatgcaggaagattgtgagttatttgtgcaggagggctatgtgtcctggaccatgaagaaaggaagacttgtagtttatctgctttctttttttttcttttttttttctttgagatggagccttgctctgttgcccaggctggagtgtagtggcatgatctcagctcactgcaacctctgcctcccaggttcaagcaattctcctgtctcagcctcctgagtagctgggattacaggcacacaccatgacgcctggctgatttttgtatttttagtagagacagggttcaccatattggtcaggctggtctcgaactcctgacctcaggtgatccatctgcctcggcttcctgaagtgctggaattacaggcgtgagccaccacacccggccgtttatctgctttctctctttgctttcccttggtcctgccagcctaactctgtttctctaattaggactccacaaaagcttcctcagtcactcgcccttcctgcagcttatatgacttcctcatccaatcaccactccacatctcattctcaattctccaccatggcctacctctagataatccgtgatctctaacttctgcaaaggattcatagagataaagcaacaaaagctgccaatatttattttaacacttaacacatgccagtttctattctaaactaattatgtatgaatgtaatgtctaaactaattacatctcattttaacctttcaccagcccttcaaggtaagtagttttattccctccattttgaagatgaggaatctgaggcacagacaggtgaggggatgcccttcccactcatcctgacagcagttctgactccagaaaccctaaacagagacaagcaagatcagaaaagtccgtgaacgaggcaggtgaattgctagaggccaggagtttgagagcagcctgtgcaacataataacaccatgtttccacaataaagttaaaaactagcctggcatggtgggcacgcctgtagtcccagctactcaggaggctgaggttgggaggatcccctgagcccagcagtttggagctatggtgagctgtaatcacaccgctgcactccagcctgagtgaccctgcctcagaaacaacaaaagaagaaagagagaaggaaggaaggaaggaaggaaggaaggaaggaaggaaggaataaaggaaggaaggaaggaaggacggatgggagggtgggagggagggaagagaggaagaaagaaaagtccttgaggtcactgaagagtatgacggccaggctatctatgaccagtggcagctgctgggtggtggagacaggctgagcagttttgggggactcctgcatctctgtctctcaagaaacggcacaacttttgttggggttctgctctctctccctcgctcccaaacacacagaattccatggttgttttaaatggtgttctccccagtgattccctcagaatcctccaattcctatccttgggctctctcttattttttattttttcctttgtcaagctttctgcttactgagaaccacataatagcagaaagcaacttaccaagccagaccccagagagccctacaagttggaactgggtctctcctctcagcctggggacaactgtgtctctcttccccattaggcacattgaccaactgacagatattcagtatggtcacagagaaggcaatctggagtaaaagatgcttatttaaaatggaaaattcttcctctctcatccttccttttttctactgaaaatgtctctctgtcccttgctccctctggcagcttcagcaaggatgatgtgtgatcacatgttaattgagttgtaattcctcctcctgttaaagtgggtagttaattgttcatgggaaaatttaatgctgttgtactagggatgtcacagagagttcttccttcttcacaccagtatgtagtccatgctacatgtcagctgtattgtcattatcctgccaaatggatgaaaggattgcagtggttacggtcaattggcactcagcatctagtccgccttcccaggtagaatttcctgtttgatttacagaggctggtaaactaaactcttcatttctcagactaccttgcagctaggtttctagaagagaattagattctcccaattagatgtgcctgactcaagtgagacaaaggctctcttcctgcagctttgactattaagtatctactggagaaccaagcagctaagcttgtcctacctcagggtcttgctcagagccatccctggaaccagcagcaagcatggctgtacagacgttatgtttctcaatagcagacttccagtgctctgtcaccagccttgtagttgtcaggggcaatgatgtggtggcagtgttggtggtggtagcagatgcctgaatccagctatggctatggccacatggatttttaattcatcagcttcagatttacccaccttggtagcagctcccctattgggccagttctggtgtactgttctgaaagttgttctaggaggcacagtctggggtcggctgcttcagccctggcaataatctttcaggcgtctaattcctgatactacataatctttttgtttaaaattggtataatgggttctgtttcctatacctgaacgcttttaaaacgtggaggggggggggggttgggggtttggaagtacaaacagctgagagccatggagaaaaattctagcatttggctatggaaaggggacagtcatagtactgttcttgctgaaatgcccatgaaaagctagaaaggtattttttatgcctatttgtattacaagttggtcagagggcttagatttaaagcttgtcctaggaaatttcattcatttagtcattcaacaaacctttattttctaccaggaacgatactaggcactgtggccaaataaagaataaaccataaccatgctctccaggtgtttagagcaaacatccaaaggaaaattaaaggcagcttggaagaagcatcttaatcaaagtttgggaataagaccaaatttagattaaattgtgattgatgacagttaaaattacccaattctgtagagctgttccccttaaattctttttggagctgacataagtcagtagataaatatcactgcctatgtgtttcattgaaatgcttgtttcctgagcatcttccccaagtggagtgtttgtttcatatgcattagcaaaaaattacatttttcatttaaaaaatatctagaaatgttattctaaactagaactgaggtacaacacacatactgtggtttggaatgtgatatcaaggaatctatcaccagctcggcacagagcattccaactctgggaaaaatacagcatcctaaatgacgaatttgccagtggcacccttattgaccaattattaggttggtacaaatgtaattgcggtttttgtcattaaaagtaatggcaggccgggtgcagcggatcatgcctgtaatcccatgactttgggaggctgaggcgggcggatcacctgaggtcaggagttcaagaccagcctggccaacatggtgaaaccccatctctactaaaaaatacaaaaattagccggtggtggtgtggttgttgatgcctgtaatcccagctactcgggaggctgaggcaggaagaattgcttgaacccgggaggcagaggttgcagtgaaccaaggtcacaccactgcactccagcctgggtgacaatgagactctgtctcaaaaaaaaaaaaaaaaaaaagtaatgggaaaaactgcaattacttttgcaccaacctaatatattgagtgtttattttaacctctttaaaacaaaaacataactcttcattttcttccccaaacatttgtttccatgagggcaaggaccttttctattttgttcactgctgtatctccagcaactaaaaatagactcttgcacacagctgggctcgatcaatattatttgaatgttgaatatatctttttaaaagattttctgggctgggcacggtggctcacacctgtaatctcagcactttgggaagccaaggcaggtggatcatgagatcaggatatctacagcggcctggccaacatggtgaaaccccgtttctactaaaaatacaaaaattagctgggcatggtggcaggtgcctgtaatcccagctacttgggaggctgaggcaggagaatcgcttgaacccgggaggcaaaggttgcagtaagccaagattgtgcccttgcacttcagcctgggagacaagagcgagacttcatctcaaaaaaaaaaaaaaaaaaaagatattttctgggccaagctcagtggctcatgtctgtaatcccagcattttgggaggctggggcaggaggattccttgaggccaggcatttgagaccagcctgagcaacatagtaagacccccatctctacaaattttttttaaaaaaattaactaggcatgttggcctgtgcctgtagtcctagctactcaagaggctgaggtaggaggatagcttgagcacagtggttcaaggttatagtgagctatgattgcaccactgccctccatccagcctgagtgacacagcaagactctgtctctaaaaaataaaaaaagatccttctggctaatgtgtgaaggataggctatggggtgcaagatggcaagcaaggtggctacagtaatccaggtgggcaggtgagagatggtggtggcttggattaagggtctttggtggaagtgataagaagtagtctgatttgggatctccttagaatggaaaccagtcaagacctgccaatggataggctatggagtgtgagaaaaaaaaaaaaggaatcaagaatgactcctaaatctactgctagagcaattggaggaatcacggtccatttaccggaactctcggcatagggacagcccaggcagcagcctaggcaggtgtgtacatggcctgttcaaggaagagcaaggaggccagtgagcagtgagccagaacaggcaggagctgaggtcagagaggtgtttggcacagatcatgaggatcttgtcaaggaaggtgaagacagttgatgttgttctgagtgatgggaagctcttggaggtacaaactgcaagtgttctaacacatgatcacatttgcatttttaaaggtgactcaggctacttgtgtagaaaatcgaccacagaaatgaagaaataaaaatggagagactggttagagctatagcaggggagcaggtaagagacagtggtggcttggaccaggttggtggctggggtggggatgagaccagtgagatcatgtctgcttctgaaacatgccaagctcattccctcctcctggacccttccctggttgttcctactaactgggctgcgcttcactcactattccacctcatgcaggtctctttccaattatcacctcctcagaggtcttccctgaggaagatcccctttaacatggtgcctggtgcctcctctctcactcccctttctttgctttattttactcactctgtgtcatccactgtttttatattttactgatgtatttttatcatcaacttcccccactaaaaggtcaactccatcaggacagaggctttgttgtacccactgctgcatcaccagcctctaggtccgtgtctgcaaacaggtatttgttgaatataaacgaagcacttaggtaggtgctgggaagattttctttatatgacaaagggtttcctatgcaaatattcagtgtaaacatgactaaaggacagggaatattcaaactatgttaaggaacatgctatgttagggaactttctacgtaggaaaacttttttttttttggagacagggtctcactctgtcacccaggctagagtgcagtggtgcgatcatggctcactgcagcctccaccttcagggctcaagtgatcctcctgcctcagcctcctgagtactgggattacaggcatgcaccaccatgcccagctaattttgttcattttttatagagacaatgtctcactatgttgcctaggctggtctcaaactcctggcctcaagcgattctcccactttggcatcccaaagtgctgggattacaggcatgagccactgggcccagcctacacgggggaacttctcattgacatacagtcaacaggtgaggggcatagcagcaggtcgattcttatgtatgtgagtactctcttgcaccaagatacaggtctaaacgaaaaaaatttagttatttttaataaaaatgcctggttcatatttaaaaaaatagaacttctggggggtgtaattcctgtaattcctgttaaaaaaaaaagtagcacgtattcacaatatagatctttacacaaacacatgcattgagcaaatacatgttgtcttattatttttgaatgcagtcttttctccccatttccttttctatggtcagccctcgccccattttcttcccaccataacaccttgaatatggagtatactttttttttatgtaattctgtatagaatatatacctatacacatacccaggggaatgctgtttattgttttacaatgtgggatcatttatacatcttttctctcctcatctcaacaccacctcatagaaactcctccaagctatctggcatactctgattttccatgttcattggttacatactatgccatggtgtggacgtgtaataatgtgttcagcttttccctcttgggaggcaaccctctgtttcctggcttttgctccaacaaactatgccataacacccatctttgaaatgtacagtttcagagcaggaggtgaagttggatgctctttcattcaatcccacagttaagataaataaggatcagaaaagtaaaagaacatgcccaaggtcacacagctatttgcttggtgctttgtaaaaatttgaatagctattatttcacatgctcttcacaagcagggcaagtattatcaggtcaaccttaaaagtggagaaactgaagtcaaagagaccaattgctttgattttattaccagtgagggctaaagctagggcttaaagccaggacttctgattcctgatccccagtagcttcttccactcctgcgttgatggaaaccattaactcaaaacttctacagggcagccttctgttaatatattctagacatcaactgtacaccaagcctgaaaaaaaaaaaaagtttcgttaagagaatgacacagtgtggatttacccataattcatagcatactttccttacctattagaataaatgatagttgaggttgttaaaagtctttaaaattaaatagattaaattgtgagtgctggctctgccagtaactctgcaaccttcagcagattacccagcatccctaaaacccagtttcctcatctataaccaaggatataattgcacggcacctgccttctcaggtattgttaagattagatgccacaggtgtaagagcagataggatagtaggatcttgataaagattagctattattttggatgctgtaattcttaggtctcacccaactgaaccggtagatatctttgatatctttccttcttcactcttgtctaggacagggaaagcctttcttatctatgggtccagggcagttcgatatccttgctggttactttgttatttcttcgtaagtgtagggttacagcgggaaagaccttgagagttgtctcttttagcattgtacattggctaaagtggaggggaatctgtccccaaaaatggcagagtgggaatattctgacccttctgagcacggctgacagtgtgagccatggagaatgatgacatttttcagcaacagaactgtcaatggatgtgttacagctattttagtgccttctcccctcctggagaaaagccattttcaaacccgttgcttgcaatgcattaagtgatgaaatacagataacaaattgcgcatttgtttggcttcatgcttattacacccccggttctggaaagcattgcacttagccccttaataatccctctcctgagatcaattactaggatttatctggttcctcgagcataaaagtgttttattgtttttacttttgctccaagtgaagtgtgagtgggtaggccaggttaaaatggactgtcccagacaagaatatgaagctgggatcattggccctgcttttactgtctaccaggtcctcatgaccaggaaaggggggaatatttggaagccacttccctggggaggcaccaggtccagatgtcctcatctctggctatttgcacgtatatagaacacaggtctgcaggtgcctaggaaggtgggtgctgttccacgggagaagctggaaagcagaaccaagttaccatctcagaccaaatcgtttttcctctagaatttcactgtaatccaaaccagttgaacatttgagaagaactgggtaccatgaaaaggggtaatggaattagctttcatgtttttccaggactctaaaccatatttcctgtcacaactgtacattattaatacaaggcatctgttagcgcacaactgcctgaaaatgtgcacccaaaaaccttacatctggtttcaataatttatttctgacatttgtagttggtggtggtggggagtggggggaggatgggaaaaaggggggaattaaagcaagatgttgcctttaacccatcagaagctcctgttggagccgaaagctggagttcttaacgtggtttctgcattaggtaatatattaatttagcagcaaatagcaagactccgggcctggtgggtgtgggtgcccgctcgcttttatcctgccttctctggctgcagcaattagcttcctcttgcgaaggggattaggaggaccaccccccagcggcgggggttggggggctctcgcagagctgtcaggtgtcattcggcttacccagcccccccaccactccccgcccctgcaattaactccctctcccgctttgccagcccctcacccgcacagagacaaagaggcctgttcccgaggtgtccgacctcctgcccccttggcgggccccgcccgggttcctccagcaggaatcgccccaggcgctgggagccagagctggccgggtctgacacccgccccagactttccacgatcaggtttcagctcgactaacgagggggaaagaaagaacgcgcgacttccgcgggccggagccgcgcgggggcccgggggaaacgccggcctggtctgggtgggaggggacgcgaagaggctccgggctcggccagtgtctgccccgggactgggccctgggactaggcggggcacaggtgtcccaggagggggcgccctgacttgacgcgaacgggccacctgtccctcccacgcctgcgctgccacccgccctgctccgccatcgcctcctccaaagctccccggatcctccgaggcgtcgtcgtccgagttgttctgcgggaggaacttctgctaaagccggtcctcgagtcccccccgcctcaggaggggcagcgcccggattgtcttaagtacaacacttgccaaaaggggctctttgggatttgggactttttttcctaagcaacagacgtacctttccagactcaccaacttagaagcacaggttttctgtttgtttcattattagactttcaaagatcatcatgtcccacagcctcctccttttccagatgaggggactgaaaatcagaaacattttgccttttgctcaaggtcacacagctcaagttcactgggcggctgggactagagggtccgaatattctgcagctatgatatgaaaaaaataagtttggctggagggtggagggcatccaggtctgtcctggccagccggcggggaggctcagcccagggttcagattttcctggagccagtccaccagcggtcaggccacatgtgagtaatgaagaattgagtgttgtgtactttaggctggtctccctcttcctggcccccttccccggccttaacttccttttggagtccctactgacttctgggtgtccaccatgggccctgttggaaaaatttcagctccatcccagaataaaaggaatgaaaacctggggaaaggagccaagaaggaaaagccacaaattcgcatctggccgaggcagagggagcagctccaagagcctgcagaaatgcactgtgactgctgtttgcagaggttcagctgccagaggctcggatgccctcctgggtcctgctcctgagaaatcagagcaggcaagagagaagacacatgttccccaccaaatttttcctgccgccaagtccttcaggtttctgcagaccatggggaagaacaagaactatggagtcaggcaagaggtagctggaattccaactccccaacccattagatggggccttgagtaagtgactcaacctctctaagcctcagtttctttgcctgttacatgaggggaacaacaggaccattatgaggacttatataacgtgtactatataaagcacttaacacagttcttgtacctagggctacattgtaacttttgtgggttttaggcattttggccttcgcggccatgagcccttcatcaaaaacaaaaattaaaaaatacaaaaatattttatggctgcatttgtataaagatgaacataataatattatgtagtaaagcatttttttttttgaaatggagtcttgctctgtggcccaggctggagtgcagtggcacgatcttggctcactgaaacctctgcccactgggttcaagcgattctcctgcctcagcctcctgagtagctgggattacaggcacctgccaccatgcctggctaatttttgtattttttgtagagacggggtttcaccatgttggccaggctgctctcgaactcctggcctcaagtgatctacccaccttggcttcccatacaggcttgagccaccgtgcccagccagtactaaagcatttcttaatctaaaaatattatatattgttttgtttctacaaagaaattaaaacatttccatgggcccccaaaagcactgtgggccctcggcactgtgcctaatggatgtcagccctgcttgtctcccagctcaggatctgcttttagggtagcccaaacaaagacacaggggcatgtctatgacgtgtgaggagccacagcaaagagacaaccgagagaagagtgtaatgagtgagggtggggggaaggaggagagaaatagctttcataaactcagcgtcctcccaatcctcttgcaatcacatggggttgctgttgtagccctccctgcaggatctgtcaggactgtgcttcccgtacgtcaggtctgccctctgcaccatcagccctctatctccactccctctgctcatacccaggcaggtaggtagtgtaaagcccaccttcctctataggcccctctcagtagttcctcttcacagacgggcatttatcctaccaggattctagtccctcttgccaaggagagatcccaggctttggggcaacactgccctagcctcctgagccccacatgtggaatatctggccatgccttcccacctacttttctcctcagggcaggcccacctccggggtacttttcaacgcagagagcctcagagattggacatgagagaaaaaggtgctctcctgcatgatattagcttttcttccatctgaagtcacaaggctgggtcatacagtcagtccctgggggcacatagctcttaggattcgctcctagctaccaggcaactggcagagactaaacagcttatgtttctaagagggagtggctagtgtttatcaaagactgatgtgtgggctccagcagcctctccagacagtggctgaggcctgtcctgagctctgggaaagcaggaagtccccggctgggctggggcttgctggctttgcaggagcactggcaggatctgaggaaagcgttcctcacagatgtctccttcagaggctggtggattccttaacagctaattagtgagaagtcgctaccatgatgggggctgacctaggccttcctccacctcctccttggggttgagaccccaggagagaccagcaatgctttactatggtcgtatttcctccccgacgtcaatgctttctttaggaatcatctcttcagtttaagccttttctcagaaaccagcttttctctgacaagtttgcagctcaaaaggaactggctcctcttactgttgaaatcgggcacatctggaagcagtaaacttttcagcaggctgagggggaagaaaagatgtcttgtaggggacagattcacctctgggactaattattctttatatttcacccgtcacgtttactatctttgtcagagcaaagagacaataagtgatctcattaaatcccagaaagatgcttctccccttcaaggagaacctctcaacaccctgtcctctgacaagggccatgtcactgaggttggcacaggggcctgggaatcagggatgggtggggcagaggcgcttccaaatgcttttcttcatttgaatatagtgtctgtgttttctattgctggaaatacccttgtgggtctgaaatcaaagtcttctctggccacattttccccagacgtaggctccctttggaaagacagaaatgagaggggatcggtcgtggggttaaaaaaaatcattttgggggaattctgaaccagctcttcttctcccttcttcctatcaaaaactcatcctgtggctggctgcgttggctcacacctgtaatcccagcactttcggaggctgacgcaagaggattgcttgtgctcaggagttcaagactagcctgggcaacatggtgaaaccctgtctctccaaaaaatacaaaaattagccagtagtctgaactgggaggctgaagtgggaggatggcttgagcctaggaggttgaggctgcagtgagctgagattgtaccactgcactccagactgggtgacagagtgagaccctgtctcaaaaacaaacaaatgaaacatcctggtaaaaagaccagagaagacactgagtcagattcttccagggctgggtgacagttgtatgaaacccctattaaccccagtgagtaaggcaccaagttcaagaggctgaagatgagacccagagccagcaaatgagacatggggttttattagaggcttccatacagggggacatcgggccggacaacataatcgagtggcctagtggcagtgggctgggcaggaaaactgcaatggcctccaaatctcatgcagtttgtatagcattttcacttaacaccctccccctaacagctttcacccagcagagttcatttagccccaaaactcagggccttaatcccctgtaccaccatgtcccataggatgggccagggactcagatgttctgcatagacaaggaatgaatctcctggttggctactcccagattccctagctcagaacacacattctggtgcatctgccatacagggtcattctgaggatatgctaaacttaatgctgacaggtgcgtttaccctacaatgaccctccacaaagccatcgctgtgataccagggttcaggagttgctgtcacttcctttcccaaccacataaatgagcagctcagacagggccccagcatccgattgattgtcttcccaatccacaccttttaacccttcaaacagatacactcaagtcaaggggatgagtgtagggtgagaaattctctccctctgcactcttgtcagatgttggcctgaggtggcccagaagggtctgaaccgcatcttctgaaggatgcctggtgtctttcaggtcttccttacttaaaatgtgcttgacaaaattagcatcacttgaaatctccttcaaaagtacacagtctcctaaccctttcctgccccacatcccaggcattttaacaagacctccaggtgatttgtatgaatgctgtagaatgagacgttgtgttctagatcagtagttctcagtaattggcttggctcagaatcactggcaagacttgttaaaatgttgactgcaggaccctgccccagagtttctgattccaaaggtctggcatggctgagaatgtacatttttaataagttcccatgtggtgcaggtggtgctgatccagggacaacaccaacatggttcccaagcctaattgcataacacttaaggaattgtgtttaaaaatacagattcctgggctccactcaagaaattcagattctaaggtcttataatctaataacagggtttttacaacaaagtacatttatatagcactttaaagtttacaaaatgcttttgtcagaggcttttgaaccagagcaactccattttgaataggagttgggtaaaatgaggctgagatctactcggctgcattcccagagagttaaggcattctaagtcacaggatgagataggaggtcagcacaagatataggtcatacagactttgttgataaaacaggctgcagtaaagaagccagttaaaacccaccaaaaccaagatggtgacaagagtgacctctggttgtcctcactgctacactcccaccagtgccatgacagtttacaaatgccatggcaacatcaggaggttaccctatatggtctaaagggaggcatgaataatccaccccttgtttagcatatcatcaagaaataaccataaaaatggttaaccagcagccctcagggctgctctccctgtggagtagccattcttttattcctttactttcctgataaacttgctttcactttgctctgtggacttacctcaaattctttcttgcgtgagatccaagaatcctctcttggggtctggatcaggactcctttccggtaatgaaatgagagagttccctgacccctttgcaggatgtgcaataggggtgtggctcatttattcggcccccccaaatactcaaatcccttaaggtagcgggagcctgcaggtgagcaggtgcaggagctggggtgagcgcttttgggctccagccccacagcagcgtctaggggtgttacaatgctgttttagccctgccatatggggatgacttaattgttaaacagctgagtgaagagtcagtatgacagcctttttggcttcctgcatccagtgcatcccgaattcttgtccagtgtccaggaagaatcaggtcacacagacttgaaggatggtgaatgcgggaattttattgagtgatagaggtggcactcagtgggatggggagctggggaggggatggaatgggaagatgatcttcccctggagtttaggcatcctgccgccaggatgcctcctctccaactgctcccagctgagctctcgacattcagatgctttgtctgttctcgccgtctctgctgtgctgctctgctgctcttctgcttgtggagcctggcatttgaggtttttaagggtacagaatgggggacgtagtgggccagggtggttttggaaaacacttgggcaggaggtcagggataactgttctcatttagggccatggtttccagcctttgccgggtaaccaccctcttctacccagtatttccctgcctcctgtctgtatcagtaacacttttataagcaatattccatttactctttggaatgaagaatcttcttacaaataaggaggaagctcaggttctgagaggttaagcaatttatctaatatttcttagtgagtaagccaagatttgaacccaagaattccaaagccacaacctaaacttttccatctcatcacagcctgttacaaaatcattgtaaagactgagtctatttcaagtatttttagtttcatgatcacatttgagataactgttcataggatttttcagaggcagttttatggttttgtggaaactggttaatgaacagataagactgttttgtacaaagcaacatctattcccatgctggtaatatccttgggtacttagaagcatgccaaatagattgaacgtgccttctctggtcttaactaccctttcaattaccttttttttttaaaacaggttaaaaaaaaaagtaaaaagacccaaccctttcttcaaaggtcaaactgatcaaattttgatttagctgagcctgaatcaatgagtttactgtgtgtgcagactcccagtccacatcactgccatactgcccaactaagctttttcagtcaaagaaaaggcatctgcttgcattgtaagtactagttgttgatgacaaaaaaaaaaaacattgtatgcctcaggccatatctacgaaaaaaaaaaagaaaaaactcttccctgaatctgtcctcagatcctttttaaatgcaagttgagacgagaggtttccaagctggctgggaccaagaacaatgccctgtagctgtgggtgtgggagtgggtgcggcttgtcatccggcagcttttgaagaggtgtcaaaaaaaggccattttgaaataagtgctccagttacctaaaagagggcagcgcctaggtcagaaatgtccagaggtctccttgaaaaaagaaaaagggagaaaacagccttcctagctgggaagcagagctgatattctcccatgcgtgaacccctttcccagaggtgtttctgggagcaccgaaatcaaattacaaaaccattttctgcctcacaattactcagtttttttttctttctttcttttttgaaatagggtctaactctgtcacccaggctggagtgcagtggcgtgatcttggctcaccgcagcctgcacctccagggctcaagcgatcctcccacctcagcctcctgagtagctgggaccacagaaacatgccattacacctggctactttttgtatttttggtagagatggggttttaccatgttggccaggctagtcttgaactccggggctcaagtgatccacttgccttggccccccagagtgctgggagtatgggcgtgagccaccatgcctggccttagttgaggttttaactggcaaaactttcttctttcaaagtccagtgctcgactgattttctcctttcctccctgtctggcagggatggcagtggggaagttgaggtgctgcagaagagtgagccgagggtgcctgtgtcttagatcacatgccataaccaggaaatatttttagaaatccagaaaaaaaaaatctcctgggcgaatgctgtcgattttgtgctgtttggggaaagtggctcatcagagtaaatgcctctctctctgatgccttaagtatcctccctgcctcagatgagcaggttattaaggtaatgttaccctttattgctgaaaagcagtgtaaatagacacccagactacagagattagctgctttcaaactgcagaaatgagacactttctcctacaatttccgttttcaccaaatagcataccctatttacttgggggaaatagtcgccttcttataatgaccacacccatttgctcagatggaagaagctggcaaagtaagtgctgttattatctgggcaaatctttgagagttttcttcctcatcctgtgttgttctgctgtgagcttactgccttcccttcattcagtcacatgcagaaggtactgccccttctgctccccacaagggtcaaggaactcccagtcctaggatagagggtgtctcttgactgatggggataggggtaggggtgagaatcatttcaggaccatctgatactgacagaggagacccagcctgctgcccttggagagctctcagctgatgaaggcacagccctgacatgaggaaatttacacacacacatgcacgcatagacacatacatatatacatttacacatgtacatatgtgcacatatatacacatacatttccaccaaatattatatattaatatattttttctgggaacacatagggaaaagtagcatttggtgaataacactgagactaagagacagcataattagtattcattgacccaaactatggagttagtgctggggaaaagagatcttaaaaggagggggtgtccctccatgtagagtgagtcagtgtgacctaggtatactccgagtgcttaatattagcctaggaaagaatagcagagactccgcctgctgcttcccgacagggatttctttataaccaaagcacaatagctttacccagcccactgtaacaggataaacaagtttgatgtaacttccaaatctattttctattgtaagttcgtttattgaataaaatagcaattcaacatgtttgcaaatcatggtgctgttagatgccaacgctggcagagattcatgtgtttactgtacagctcgcccagttaggctctgctactcagcagagcagcaatgtggaattccaaacagctgcaagtagtaagtggaaagcgatttttgctaatcatccaggaggttatgtggcatggtggaaactggttccagacaacaacttgcgtgtagagtcaggacttggaagcagcttctggatatttgctttttggactgatacaaagtaagagcgaagcggtgacgtgatcttgcacacttgcatttagtattctctaaatgtgaacctgaatttgttttacattagaaaaccccttttcaacagtttttgggcctggttcccagcatctgaagaaaatgcacaaaagcaaagatgtggtccgcttatgggggaaaatgggaaagctacctcctcatgcttctccaaaggacttaaacattcttctgaggatgtgtgtggttttttaaaatctatgttgaatgtagaattaacttacatccattcagccagagaaaagttgatcttggtttctcagtaaaagcacattttcaagatatcgatgtggaatcaggggctttggtggtggtctaccaagaagtatacctaatctgtgagtatccctgcccaagttggccactctaaaactcaagatttcctaggtctaccatcaccttttgccgtgcaatgatccccagccctgttcctccctgtcctggctagagcttagaatgggctttggaagcccaagctagaggttgcatttctctcccatcaagaatgggaaatgaagaccctctgctgctgctttttatctgcagctagagcactaagaacatggcctcaaagctggctgccaggtacacaagtagccaggatctctgctaggtcccttctgtcctggtctttggcatccgaggtagacctagcctgtgttccagccgcctagctgtttgctgccagctcagtttcccaggacttgggcctaatcccggtctcacgcctcacatggagctggctggttcccgttagcatttcagtctacccctaatggcgagcaccgttgctgccaagaactcatgaaactggattcccatttggccccttctgatcagactcttctggacaactttgcctgcttggaaacaggcggcagttatgccacgtcccttggacttgtctatggctgctcagggaagggctgtgtctggtccgtatgttctgattcatgatatcccctccccccagcctgtagtgcaattggcttcaatctggaattctaggtaatgctaaccccttttggaatagctccttatagctatgatctgtgctgaacgaaataatcttatcaagtgcagaggctttcagagaatgttatctacctttcaaagtaaagttctcaagaacattctagaagatcacatgttttgttttttctccacagcctagctcaaggaataggagatttgatagatttatgacaaggcctttttcaaatgcattgatctggctagctttggtcctcaaaagaatgttctgccctggagcaggccggtcttatcagacacagctacgcaaatgggttggttcttgcaaatggtccaactgaccatagagaaaaataattagccaagtctttagttatgcctaagagtgtactttttttttttaagataggctctcactcctgtcacccaggctggagtgcagtggcacaatctgggctcactgcagcctggacctcccgggctcaggtgattctcccacctcagcctccacaggtgcaggccaccatgctcagctaattttttgtaatctttttagtagagatggggttttgctatgttccccaggctggtcccgaactcctggactcaggcgacccacccgcctccacccgctaaagtgctggaattacaggcatgagccaccgtgtccggcctcagagtgtacttttactgaagctattttcagtgggcactgttggggtcacactgatgtgaggtgagagtgagccatgtgccagcttctgtccctggcccacagagtcaccttgatagctgtgcgctgccacagggactgctgcagcctcaggatggtctatgctgtggggagggcctgcaggactggggtctttctgacctggaatgaatatagagcataggtggacctatttcctgctgccagatttaagaagtttgccacagaaaatgaggcctgggcctttgtcaggaaatctgcaagcccagaaggttcagaagggcagaaaaataaacatgtacaagaatcacaaatgaaagccagcaagggactctgtgagccactgaatggagatggagatgaaagtgcagagtcttgtgcaaagcctgtgaagcaaatcatagagccggcacctcgagtgagcagagacattttcttacatcggaggctttgtcgtcgtctacactgatggctactgctccagtaatgggtggaggagagcactagtgggaactgacgtttactgggggccaggccatcctttaaatgtaggcattagacttcctgggtgacagacaaaccaaagagcagaaaatcatgcagcctgcaacaccattgaacaagcaaaggctgaaaacatcaataaattggttctgtacacagatagtatgtttgctataaatggtataactaactgggttcaaggtaggaagaagaacaggtggaagacaagtacagggaaataggtgatgaacaaaaaggactttgtggcactggagaagctcagtcaaggcatggacattcagtggatacttgttcctggtcatccagggtgtattggcaatgaagaagctgatagattagcaagaggagctaaacattctgaagactaagcaaagtgaatttattacttgggaaaagttgagccagtggcagttttgctacttttgcttactggtacggaaaacagactgcaggctggaccattgcagtggatgggcagatgtggctttcacactgaatcacggtggcacagtggcattctgtgatacattttgataaaaagtggttaaatatataataaattgaacatctctgagatttaagaattatgtgagatttcagcattatgcttactaggtttgacacttttcttgcttattttattgcaatctggtttaaaatgctacaggtttgatttttttttttttttgagacggagtcttgctctgttgcccaggctggaatgcagtggcacaatctctcagctcactgcaacctccgcctaccttggcctctcaagtagctgggactacagccatgcgccaccacgcctgactaatttttgtatttttagtagagatggggtttcactgtgttggccagactggtctcaaactcctgacctcaagtgatccacccacctcagcctcccaaagtgctgggattataggtgtgagccaccgcgcccggcccacagctttaattttgataagaaatcaaaaaaacattggttaaaagatgcaggtcagaagtctagaaatattctgaaagcatacatttatcttccagttcacagacttgagtctcctgcttttacaggtcacttgtgcctgtgggcacattagagacagatgcagcccagggcctgggcgggctgctcagcagagaagatgtgagctggtctcagcctcacgtgcctgcctgctgggcactgacataataggtgaagcctgcacacaggcgaccctggctgctaggccactctctaggaacagttacaacttgtaaagaccaagatgaatacataaatctttccaaaatttctttggctcttttgttgaaaactgtgcacacttaaaaaaaagtttgacatgatcatttatttagttttaaacctttttatcataaaataaaaacacacaggaagacagacacagacacagacacacacacacacatgctattttcgttgggacttctgcctagaagaaaatccttattgatctgtatgttatgaaggctagtggcattcaaaactgttagctgcattcagacaatttttatttattaatggaaccttaatttttaaaaacatcccttattattttttttttctttttctttcttttttttttttttttgagatggagtcttgctctgttgcccaggctggagtgcagtggcataattttggctcactgaaacctctgcctcccaggttcaagcgattctcctgcctcagcctccagagtagctgggattatagacgtgcgccaccacgtccagctaatttttgtacttttagtagcgggatttcaccatgttggccaggcaaactcctggcctcatgtgatccatccgcctcagcctcccatagtgctgggattacaggcgtgagccaccgcgcctggccaaaacctccctttttaaaaaaccaataataatctgttaatctaaatgcatacagaaacacaacttatgagttggccatttttttcttgctatggaaaattagataacaactactgaacaagctcacagatagtaacttggaaatatacttaaaacagaggtacatatgatcgtttactactatttttcttatttccaatagatagaatcactataaatgtcccacattaagatttgtgttcgttcatttctggtgtgtccaaaaggaataaaacagtattcccaaacatttaatattttaattgttttgttattttcaatgggttttagaaataaatcacttactctggcctcatccattagtacaaacttattactgcttcaaatcatcttttggctagattgtatatacaaataaatatgtaattcactgaaaatctactcagtacatgttgccaggcttagtcaagggagccctaaagcagaggtgtttgagacctctccattaagctatgaagacctttttgttagttacaaaactcctcttactgtaggtaaaataggtgaaatagtggctgatgttgagtcggtggtagaaggcccagatcctgctgtgagccactcctccagtctcaagggtctcctcagtatacctagactactatgaagcacagtttgaaaacatggcctattagatgaggtgtaatttcaaccttagtgtttcttgggtaccgaagtgggtcaccttagtagtagtaacccatgccaggcactgtggtggacacctgtaatcccagcactttgggaggctgaaatgggtgaatctcttgagtctaggagtttgagaccagcctgggtaacatggcaaaacctcatctctacaaaaaatacaaaattaaaaaaaatagtaataacccaagttttattgactcttcttaccgcatgctcaactaggaccttctatttgtttcaacaaagttctatccagacttcattgaggatgtctcacatgtccttatgaatggtgaccatgttattatagtcaacgcacagattcctctaggctcgtccctcttctttggcctcagccccatccaagtttgctgtccacaaaacctcttgagatgactctccattgccctagcttctggccaccacaatcagaatttcaacatccaagccaactaaatccagaggccaaagtttctaatccatgagggccagaacagcactatgtcctggcccatctgtctggcaacctgtgtcatgcgggtccctcaggaaagtaagaatgatactcttgcctcaggcctcactgagtccctcacaaagaccaatagtatagctttagctcacagccccttttctaccaggctcagacatcaaactgaggtgccaggtatggaacaaatcccactttggcctttcatttttacctccaacccgatggccactaaacctcctcccttctgtttctactccatatagcaaacctacaaactgactattcttgtccacccaccagtttaggtccattctctgacatgtttaaatctcaatttgggcttaaagtggaattaattcatcagatgacattattctaaacaagtttgatatcagctgccttgttttccttaggttgacaccattgacttctttatgccgtggctctgagcccagccctggggtgccatgagcttagatggagagatttgctcaggacatgagacagcttcagcatatgcaccaatatctttggcccttggaatgaatgtgttatccaaagggcagctactgtctttaatagatttcctggaaaattatggagaaaaacaaacaaacaaaccacaaaagctatttcctgatttttccagcaactctgactagttttgagtaggttgtttttattatttcttcctttggggaacgaattaaagttgtgtgtttatttctgcaacattgagaaacacaaaagaaagtctcccaaaaggatgatcctctttcccattgcagatatttgccaacaaccacatgaaaaggaaaaatatgcttgaagacaatgcattatgcaacagatttgccttataatattacttataattccaattctattttaaattcatttaaggtgtgactccccactcccctgcaccatccaaagtcatttaaagacctaggtgggctgggcatggtggctaatgcctgtaatcccagcactttgggaggccaaggtgggtggattgcttgaaccccggagtttgagactagcctgggcaacctggggacaaaccctgtctctataaaaatgataaaattagccaggtatggcatgcacctgtagtatcagctactcaggaggctaaggtggatgaattacttgagcccaagaggtcaaggcttctgctagccgagattgcgccactataatccagcctgggcaacagaacgagaccttgtctcaaaaaacaaacaaacaaacaaaaaaccaaaaaaacctagatgataaataaataatcatactgataacagcctctcatattaccagagagaacacgattctaataaaagccagtcatgaccacactcaacatctaggatggggaaaaactgttgtgttcttttcccattggctctccttttggtcatatgaagacagctttagggcatttggaaggcccgtcttgagaacttctcaaggctggttttagttagtggcacttagagtacaacatgtttagatttttccaagaggaccatctctaagcaatctttcgcctgccaatagcaacagcatctcataaccatgatgtgctactatgctcaaagaatgcttccgtcttcaaggtaacaaaagaatagaacaaaggcagttgaaggaactgagacatataaatgtattggtttcctacagctgcagtaacaaagtaccaaaaacttggtagcttaaaacaacagaaatttattctctcacagttctggagtcacacgtccaaaatcaaggtgctagcagagtttgttctttctggaggcactgaggggaaagctgttccgtgcttctctcctggcttctagtggctgcaggaaatccttggggttccttggtttgtagatatatcaccccaatctctgtcttcacattgtcttcttctccatgtgtcttcttcctcccctcttctcccctccctttccctcccctctcctcttctcccctcccttcctctcctttcctttcctctccttttcactcctcttcttctcttctcaagacacttgccattggatataggctgatcctaataaaacataatctcatctcaatatccttaattaattacctctgcagagatcctttttaaaaataaggggattcgagaccagcctgggcaacatggtgaaaccccatctctacaaaaaatacaaaaaattagccaggtgtggtggcgtgcacctatagtcccagctacccaggaggctgtggtgggagaatcacctgagcctaggaggttgaggctgcagtgagccatgattgtgccactgcactccagcctgggtgatagagtgagaccctgtctcaaacaaataagtaaataaataacatttaaaaataaatttaaaagtaaggacatattcacagattctgtatcttttttgggaaagggatggtggcaccattcaaccaccataacatgtaaaggtaagtcaagtaaatccaagtgaaaaaggcaacaaacatgtctatgatcctttaagaagagataaaatgactggaattatgaactggggatcaagatattgagttatatagtcttagttctgtcaatggtgactctgggatactgggcaagaccttctcctttgcaggcctggtttctgcatttataaaatgagaggatggattaaattagtttgaaagtatgttccagctctggtgttccatgattccacatgaacacccattctcctagttctcacatgtgcttatgtgcacacatgggtgcaagtcataccccaccctcttgcagatcaagccagccacctcccaaacccaaatgtgatttccacactgaatctataatctatgctttctcatgtggggcatctgggagctggcttccattgtgtcatgtttgacttggctggagaaataaatttggcagtgcttagaaatgccacacctttatattatgagtttttccacaatcttcttggtgtccaggacttgtgatcacttttctttcttattttccaattgcgtatttcagcctgtggtcttcagcctgcccaccgctttttctgccgcaggagcggcccctgtctcagatgattgtcctggcactggcagatgacctaagtaggtaataaacagataaagaagagagacttggaaattccatggcatcacttcttatggaacttttgatggtaaaatgaccacatgctggaaatcacactgcaactctactccagaaaatctgtgtggcatctaattttggtggattaactgagtcttactatcccatgcttcatgtgagggctgtgcaaaggaagggtatagtcatggaatcgtagaatgacagagctggagaaactgtacccttttttttctatgtacagtgtatatgcatttttctacttaggttccatgagggtacagagtgttgttcacagctctctcctcagcacctagcccagggtgtggcaggtagtaggaactcgtcaaatttctgattatgaatgaaaatgaatgcaaatcagatgcaaagaaatctgattcttagaagaattcagatctcatgcaaccttctcatttctgattcattttcagtagccagaaacgttagtaggctaacacttcagtttctctgctaaataactgatgaactaaaaaggactaaaaatatcaagagaattctcctataaggaggagctctgcactccttccactgtgggcattaaggatagcccttcaacttacctgctttgtaaatttaggcttttttaacattgggttttcttaaacttctgtctctgcctccccattctccccactgggcacctccccccccccccccccccccgccacgtgcgcgcgcacgaacacacacacacacacacacacacacacacacacacacacagtggcggggggcggggggtctcatctctctttgccgccagcctggcacctatggaaacaaacaaggtcttgtgcagccacctagtggtgtctcttcacccctgcagttccccatgacttctaaaggaaatatcagagggcactgggaggcactgagatactttgaagacaacccacttctcaaggcatctgggaccgcccccagaggtgagccagagggaaaacaggagagcgagctcagggcgtgcccggctccggccgctgcctcacttcctcgggggtcagcggccaaaggcagtgggcgtgaggccagacgaccctgcaccacccgaaggaagtgatgtcatggtctccttctccgagaagcctttgacacggagggcgggggcggggggataggaatgagtgccagggtgggacagacagcccttgttccgtgggaaacgtcaggctttgagagacttgtttcataaacatgccttgcctcagttttgaaccctccattcgagttcctttacagaattgtcccttgagaacgataaactgttgtgatcagaacagaaaagggtcagccaagcagtgatcagagaacaggggcaggcagaactcaacagccactgggcaatggggtttaaatgaagagccataacattgaacgaggctcctaggagctcctaaggactctggaacctttccacggggtcttcaaccttcacaggtcccggggtgctgagcccaagaaagagatggaagtcaaagaccagcacgatcagacacacacctttcttctcattccatacaccaccctgcagtaccaccgtgactgctaccatcccgcgagcaccttgcctttgaggatttgaccagttttcatccgagtagtaatgtatccgatgtccactggctccttcctttacccacggacagttctgtgtaagcctttctcatctgcctacaacgtctgcctataaattattaggtttctccatttaaaataaacggaactttccctcaagcctgcgatccatactcacccacacccacactcctcacgggtgtctccaaagagcagtttattctgaccactctgttctgaccccattcccatctggcttctgtcctaaccatgacggaaattgcacttttggaggttgctcacgactttctagttgccaaatccaaaggcttcattaataataacatgtcagttttgatattttatacagtcacagctcctggtgttcgaagatgtaacttaattttcctagaactgacctcaaatcattaactcaacctccaatgtctgtggtctttctaattcaagataaatccagccctttctgttttttatcttttgttttacagagatggaatcttgctctgtcacccaggcgggagtgcagtggcacgatcatagctcactgtagcctcctgggcacaaaggatcctcctgcctcagcctcccgagtagttgggattacagatgtatgccaccacacttggataatttttaaattttttttgtagagacaggagtctccctttgtttcccagactgctctcaaactcctcggctcaagcaatcctcccacctcagcctcccaagtgctggggactgcaggtgtgagccaccgcacctggtgcccattctgtttttattttgattttaaatttttattttcatctaacttgtttttgaaatgtaccatcagacccattctgatttttttttttttttgagacaggctcttgctctgtcacccatgctagagtacagtggcttgatctcagctcactgtaacctctgcctcctgggctcaaacaattatccctcctaagcctcccgagtagctgagactacaggcgcacaccacaaaacctggctaaatttttgtatttttagtagagacagggtttcggcatgttgcccaggctggtcttgaagtcctggactctagcaatccactcacctcagcctcccaaagtgctggggttaaaggtgtgagccaccacacccagccccattctgttttaaaacagaattgaaacatagtctttgaatagcgaatcagaagttccctccccttattccccgacattttttcagtctctgcagctgcagggggcatgtgtctgtggggcagggttcatgcatcatgttggtgtggggagaaaagcagcgtctggcccatcatgacattctgtctacaacagtttccactgattggtaactcttgcaacttggtctcattgtcctgagccagcactagtttctgatggccaagtttccactgtcacctccctttgcctacatccttatagtccagactgcagctcctttggatccttttggcttgtccagggcctcttctgcgtcccttttggtggccatagaaacttttcagatttttccccagcctcgccaagatgcaaggggtttctgtgtggccaccctggatcatggttgctctgttcttctgatgccattctggttgtggaaattctcccaggaactatgattctccctggtacattctgagaggagagacacatgtgtcctctgctatggagagtctctggtgatgtacgaatttctttgactatgactataatagaaaatgcattttacatcacggctgagcacacgtacacatcacacatgaaacaacaacttcaccaaacaacattgccattacctggcaacaaactctgggatttcctagtccattgtattctctttcttttaatgctggttttatcccgataaaccaattttatgatgcaagaggtctcagcccacagtttaaaaaatattgccttgatagtgggtttacttggttcagagggtgggctctgggctccataccaaaacttaggaagcagctacacacttgttttgctctttctcaaaatgcacagctttcagaatcaaagaaagtcctgcctctcaagctgttgtctctactatgggtttaaaataaatccattcagacattcaacagattttttcttctcagctttatctactttctgtctgagaacaatgtgtatggaatatgacagaatgataaagaaaagagtaatggttataaagaagcacaagggaaaaaaacctcagttaacattcccaaatacacctgtaatcccagcactttgggaggccgaggtaggtggatcatttgaagtcaggagttggagaccaacctggccagcatagtgaaaccccatttctactaaaaatacaaaaattagccgggcatggtaggagatacctgtaatcctggctacttgggaggccgaggcatgagaatcacttgaacccgggaggtggaggttgcagtgaactgagattgcaccagtgcactccagcctgggcaacagagcaagacttagtctcaaaaaaataaataaataaataaataaataaataaataaaaaataaaaaaccaagcattacatattctgttggtaatagtaatagtaactaattatgattcagtatgtattatgggccaggcatgatgcttagcatttcatgtttattatttcagttaatccttataccatccctatgatatggtacaaatagtatccccattttataaaaaggaagttaaggctaacctaaatttgactgtttctctgccctttacattcagagaccatttctcatgtctgttagtttttgttctagccctacctctataaaattagggatgaaaactagaccatctctctcagctcagaaagagtccagcaacctttcaaaggcaaagctgctttccactaagttggaaaagtgatggtcttgctgcacaggcctgcagcttgaactgcacccatccctcctgctgctcttagcctttctccatctagggctttctacggcctaaaactcaagatcatcttcttccaaccagaagggattaggagtccttccttcttattagcaacctgcagatcctcataggaaatgaccacggtaacttccctttatcttttctaaaacccacatctataaaagggagaaagtgtctcaagaatgcaaacaaaacataactataaacttgaattttctcctttgatttggtgagttccttctttatccagcaaatattaatatttattgaagatgtactaggcacatttctaggtgctactggagatcaggtgatgaacaagacagatcaaattcttccccttctgaaatttacactctataggggctggtttctggggagtgcagacactgactggaggttttcagctttcttttatgtcacacttcctagtaagaaatgtgtcttgcacagcaatgtagtatattccttctcccttctgccgccacacaatagaatcaaagttttgtagaacacttgctcttattaaatataaaaactaaaaacataaagttaatattgccttattaatacttgaatgcagccgggtgtggcgactcacatctgtaatcccagtactgtgggaggctaagtcaggcggattgcttgagccaaggagtttgacaccagcctgggcaacatagtgagaccctgtctctaaaaaaattaaacaaggttagccaggcttggtggcatgtgtctgtggtcccagctactcaggtggttgaggtaggaggagtgcttgaacctgggaggttaaggctgcggtgaggtatgatggtgctactgcactccagcctgggcgacagagtgagacctcatctcaaaaccaaaaaacaaaaaacttgaatgcagcataagaaaaatttcccaaataagcaatacaaaaacaagagtcaggcaagactgtatttaatgcactaggagtacttgtctgcttctaagtttattccagtccagaacatacaaggataattctcactgtgcatacattcatgcgcctgtttctctcctttgttttaattgactttaaaagttggaaatccttgttcatacaaataggtaattgtgaatggtgataataaagatgcattctttttgcctaggaatggagattcttctttaatcttaccctacaattatgattcatttaacgtcttgtgattagtctttcgtgcaaacgtagaactgagctgcaataattcattcacctcttttgggcaccaagtttaggtcaattattgattcagggttctgaaaagaaaatgagtctttcatttgaaaacttttatcttgtgtttataatttatcatctggaaaatcatgattgcatctggaaaatcactccaagtttgaaactgaggagtgaaatataacgatctccctaattttatttccatcatactgactttactaataataccattttcaatatgttgtaacaatatgaggaacaaataggtgctagggtgattgcttttaggtcttgcttgccataacaaaatgtctttggaatcctggatgtgttggacttgctgaattatattgttgttttctccctgaaattatacatttaagttcattttaaaaaatcaataacctccattaaatatactaattaaaaatggcaaatattgtctttgaaaatgagattgcttgccaaatgagattgctttccaactagaaaaatgtgactgtcatttctgagtttattcatcctgcttaatactttcccttacgtggttatccgtagataacaatgaatttcagtgagcttcagtgtgagagtatggttcattcaaatctcaccaaaacacatcaaaattttggctattgatgagctctctttaatacatttaacaaccttcatgatgttttccaatacttctatgagatttagcagacttacttcaagagatggcacatttctattgattctgatttctaaacacaactgtcatgaatagtttttacaaatattttaatggctttgctgctttctagccatatcagctggccctgtcactcataattccattattacattttattttatttttaaatataaattaaaataattgaatttattattttcttttagagatggagactccctatgttgtccaagctggagtgcagtgctattctcagacatgatcatagcatgctatatccttgaactcctggactcaagtgatcctccctcctcagttacccaagtagctgggactaaatgtgctgccatcatgcctggctctatttttccattttagtagatattgaccaacaaagcatttttccacttttgtaaatatatacaatccattgtgtgtgaggttaaatttaaacaacacaaacacccccacacactcacacgcatcttgttgttttgcatacatgagaggagtttaacaacttgcagtatctgtgctgttttcgggatggatctcaagctctatactggattttaaccacatgagaagcatggctctagaaggttctgcagtagcacagatttgactagaaatactactatcccaaagaattgtacatttcaatttattagctgatttggtattaaaatcatattcatcatagctatttgtattagagaataatttttatttttttattttgaaagattgattttttttaaagttgtttcattttgaattagcataggtacataatagttgtatatatttatggggtacatgtgatactttgatacaggtatgtaatgtgtaataatcacattagggcaattggagtatccatcatctcaagcacttatcatttctttatgttagggacattccaattctactcttttagttattttaaagtagacaataaattattgttagctatagtcaccctattgtgctaccatatactagatcttattcattttatctaactgtatttttgtacccattaaccatttccactttgtcaccctatccttgctatccttcccagtctccggtagccataattgtacccactaaactccctgagttcaatttttttttttttttgctcacatttatgagtgagaacatgagatatttgtctttctgcccctggcatactgcacttaacataatgtccctcagttctatctgtgttggtacaaatggcaggatttcattctttttaatggttgaataatattccattgtctgtatgtgccacattttttttatccattcattcgttgatggactcttaggttgattccatatcttggctattgtgaatagcacttcattaaacatgggagtgcagatatctctttgatatactgatttcctttcttttggatatatacccagcagtaggaccgtgggatcatatgatagtttcatttttcattttttgaggaacctccatagtgttttctatagtggttttaccaatttacatttccaccaagagcacacaagggtttccctttctccacatccttactagttttcattattgcccgtcttttggttaaatgccattttaattggggtgagataatatttcattgtagttttcatttgcatttctccaatgatttgatattgagcatttttcctgtacctgcttgccatttgtatgtcttcttttgagaaatgtctattcagatcttttacccatttttaaattggattatttgtttgtttgttttttcctattgagttgttggagctccttatatattgtggttaccctttgtcagatgggtagtttgcaaatatttcctcccattctgtggctcgtcacttcactttgttgattttttcctttgatgtgcagaagctttttagcctgatgtgatcccagttgtccatttttgcttcggttgtttgtgcttctgaggtcttactcaagaaatctttgcccagaccaatgctctggatagttagaagaataatttttcagcaactgtgtgagagccattttctcttttgtccaaccatatgtaactaagtctcgttaacagtttatagaacaggccaggcgcggtggctcatacctgtaatcatcgcactttgggaggccgagacgggtgaatcacttgaggtcaggagtccaaaccagcctcgccaacatggtgaaaccccctctgtactaaaaacacacaaaaaaattagccgggcatggtggtgggcacctgtaatcccagctacttgggaggctgaggcaggagaatctcttgaacctgggaggtggaggttgcagtgagccaagattgtgccactgcactccagcctgggccacagattgagtctccacctcaaaaaacaaaacaaaacaaaacaaacaaacaaaaaatagttaattgaacaacagagaaattgtgccagtaattgtttgtcctttgttttcttttaaaaatgtttgaagggcttgttaataagtccagcatgctgtgtttccaagtgtccttctagttttgaagttgtcattacaaataatacattggggtttgtcacttttgttggattttatgcactgaaaattttttttaaataatccatcttataaagctgtgaattctctttttctttttaaaagacatctcaaatgaagttgaagctaactaattagaatcaataattttctcaaccttgtcattatttacagttctaggttgaacttgggcatttctctaatttttccttcatcattcttttctaataaggagaaatcctgttaaagggaaattcatgctaatttaacaaaatatacatttgatgcaaacctgagacatatctcacttgacaatgttctttcagaaaaatgctttacaatgaattctgactaatgttaacataaaatataaacagctaattatctcataaagatgatgggcatattcatatcatatatgagaaaatcaaatgagatgtttgtttttagaaggtagaatgacttgtactagccaactgatattcatcgtagtcttttttttttttttcttttttttgagacagggtctcactccatcacccaggctggagtgcagtggtgcgatcttggctcactgcaattttcgcctcccaggttcaagcgattctcttgccttaacctcccaagtagctgggattacaggtgtgtaccaccatgtctggctaatatatatatatttttggtagagatgggatttcaccatgttggccaggttggtcttgaactcctggcctcaagtgatccacctgccttggcctctgtaaattttgggattacaggcgtgagccattgtgcttggcccatcatagtcttttattagctttcttaatcttgctcatagcaattggatgcagtatttcttacagtgttcacaattcctaataaaagtccagtgatgtgttctcatgttttctattttattctaattgtttattatactctatttcattttgttaaaaaataagtaaaaaaaaattaaatgtagctgtgacccattaagtttattttataacctactagggtattatgtcttccaaatagtctgaataatgctgacataaataataaatgtataaacaaatgagagaagttcagagagtggtaagtgctataggaaaatggaaaaagaataatgtgatagaagagagagtgactgggcagagattaattttgccagggattgaatttaccctagataggaagggttcttggaggagatgataatgagttgcactctgcatagtttagggtactgatatgagtctgttcttcagcattaatgagtagtttgaactatatcattttaattgtacttctgatttgcctgttgttttgtgtatatctggtgaatccccagctagactgcaacttcctgcaagagaagtcttttttccctttttataaaatctcccccaatactcagttttgtgctgtgtgtaaagttggtgctagacaaatgctagttcaatggtgattattgaaaatcacaataaaccagggtggacattcttataggtggagcagacaaaagcctatgccaggtggtcagggttgggtagatccttgaatccttcaaaatagctcgtgattgctccttgagtgtgaatcttcgtaatcagaaattcactcctttgtcttaaagcctttatcaatgaagtcttagcaaccatttatgcctctgttgaatgagtataattgtatggctgagtcacggctgaacttaaaaggaggattggcctggttaatccttcctaagcaccagttttgctgtctggagagttgctaccaggcactcaggtctgcctgtctggatgggaggccccagtggaatacttagattccactaactgagagagtcagagagaaaacacacccagtgcaggtgcctgattaatgacttatgattaaaataatagtatagagaggaactgaccattaattactcacatttacatactaattttggtatttttgctttcaaggaaatacaataccaaggcacaaattggttccctcctttaaacctcaattatcataattttgctctatttactctatttctagtttgcttctcaactccagggaggactctccttggctttgcttgtagtcagaactgaagcgtttcaagccaaggcatgtccggtcacgtcttgcctcagggctggctgctccggctccaagtcgggaagatccagaggccttacttctccaagacaagcagagatcctcaacgttcagacacttctgccggtgtgtgaagcattaaaggtgggggagaatctccctcttctccctctcctcccatctacactctccccaacccaacttttctcctggtgtttagactttgacgttggtttactccattgatcttatttctcatttccaaaaagaacttagtttcctaccatccattccttttactccaatatctggcatttgaaagatgttaatgctttttaacaagtggtattgggaaagttggatcaccatatgcaaaagattgaagctggacccttacctaacaccaaatacaaaaattaacttgaaatagatgaaacccctaatcataagaattaaaattataaaattttcagaggaaaatataggaaaaaacttcatgacattggtttcttggatatgacattaaaaataccagcaactggccaggcatgatggctcatgcctgtaatctcagcactttgagaggccaaggtgggaggatcacttgagctcagtagttcgagaccagcctgggcaccatagtgaggccttctctctactaaagataaaaacggccgggcatggtggctcatgcctgtaatcccagcactttgggagcccgaggcgggtggatcacgaggtcaggagttcgagaccagcctaaccaacatggtgaaaccccgtctctactaaaaatacaaaaattagccaggcgtggtggtgtgtgcctgtaatctcagctacttgagaggctgaggcaggagcattgcttgaacccaggaggcggaggttgtggtgagctgagatcgtgccattgcactccagcctgggcttaataagagcgaaactctgtctcaaaaaaaaagagataaaaacaattagctgggcatggtggcacattctgatagtcccagctacttgggaggctaaggcacaaggatcacttgagccctggagacggaggctgcagtgagctatgaatgtgccattgcattacagccttggtgacagagtgaggccctgtttcaaaaaacaaaataaaaacataaacaaaaaaccagcaacaaaagaaaaaatagttaaattagacttcaccaaaactaaaatgtctgtgcatcaagggacacaatcagcagagtgaaaagacaagccacaggatgagagaacgtatttgcaaatcatatatttgatgagggattaatatccagaatgtacaaagaactcctacaacttaacaagaaaacaaacaatacaattttaaaaatgggcataggacttgattagacagttctccagagaaggtatgtaaatgaccaataagcatatgaaaagatgatcaacatcactaatcattagggaaatgtaaattaaaactacaaggagatactacctcatactgattagaatggctagtataaaaacacatcaaaaaataacaagtgttggtgaggatatggagaaattgcgctgttgatgggaatgtaaaatggcacagcctctatggaaaatagtatggcaattcttcgtaaaattaaaaacagaattaccatatgattcagcaatttcacttctgggtatatactcaaaagaatcgaatgcagggtcttaaagagatgtttgtatatccgtgttcatggcagcattattcacaacagccaaaagaagaaagcaactcaagaatccatagatagataaatggaaaaaatgtgtgacatacatacaatggaatattatcagttttaaaaaggaaggaaattctgacgtgttggcttaaaaaatcacacattttttatacatttagaaaggagactttatttcttataaagggttacatcctgcagggtggccatctgacaggctgagaagtgtagcctctggttttttaaagccattcagccactcttatatcttttgattggagaatttagttcatttacattcagtgttataattgataagtaaggacttactcctgccattttgttatttgtttctggttgttttgtggtcttctcttccttctttccttcctgtcttccttttagtgaaggtgattttttctggtggttatgttttaatttcttgctttttattttttatgtatctgttgtatgtttttgatttgaggttaccatgaggcttgaaaattatatcttataacccattattttaaactgattacaacttaacactgagtgtgtaaacaaacaagcaagcaaagagaaaactaatgaaaactctacattttaactggcttaccccactttttaacttttttgttgtttctatttatatcttattgtattgtttatgtcttgaaaagttgtggtaactattatttttaattgcttcctcttttagtctttttactcaagatatgagtagtttacacaccacaattactgtgttaaaatattctgtgtttttctgtgtatgtactattaccagtgagttctgcaccttcagatgatttcttattgctcattaacgtccttttctttcagattgaagaactccctttggcatttcttgtacagggctggtgttgatgaaatccttcagcttttgtttgtctggaaaagtctttatttcttttatgtttgaaggatgtggctcgctgaatagactattctaagataatttttttttccttcagcactttaaacatgacatgccactctctcttggcctgtaaggtttcccctgaaaagtctgctgccagacgtattggtgctccattgtatggcattttttatattttttattttttatttttttatttttttttgagacatagtctcattctgttgcccaggctggagtgatgcaatctcagctcactgcaacctctgccaaccaggtttaagtgattctcttgcctcagcctcctgagtagctgggattacaggcacccactaccacacctggctaattttgtatttttagtagagacagggtttcactatgttggtcaggctagtctcagactcctgacctcaggtgatccacctgcctcagcctcccaaagtgttgggattacaggcgtgagccactgtgcccggccaggaacctttctttatccttgagccttgggagtttgattatttaatgtcttgaggtagtcttatttacgttaaatctgcttggtgttttataaccttcttctacttggatattgatatttctctaggtttgggaagttctctgttattatccctttgaataaactttctacccctatctctttctcaacctcctctttaaggccagtaactctcagatttgccttttgaggctattttctagatcttgtaggtgtacttcattttttaaaattattttttcttttgtctcctcccactgtgtattttcaaatagcctgccttcaagctcactaattctttcttctacttgatcaattctgctattaaaggattcagatgcattcttcagcatatcaattgtatttttcagctccagaatttcgggcttaattcttttcaattatttcatttgcttcattaaatttacctggtaggattctgaattccatctcatgttttcttgaatttcattgagtttcttcaaaagagctattttgaattctctgtctgaaaggtcactctgggattgatgccttatttagtttgtttggtgatgtcatgttttcctggatggtcttgatgcttgtgaatgtgtgtcagtgtctgggcattgaagagttaggtacttattgtagtcttcacagggtgggcttgtttgtattcatccttcttgggaaggctttccaggtattctaagggacttgggtgttgtcatttaggtttgggtcactgccatcatatctgcattagagggcacctcaagctcaggaatgctacggctcttgcagactcagaggtaccaccttagtggtcttgcataagatctgagagaatctttccccagctgctgctgtaggatgagggaggggtagcgtctgcaattcaagactgtcttctctacgcttttcagtgcctctttcagtgatatgaagttaaaacttggtactgcaatggcccacttgatctttggttcttattaaggtgttttttgttgatagttgttcattttgttgttcttgaagggaggacaattggtggaagcttctatttggcatcttgccccacctcccttagattttgataaattttaagttttcatactgccaaattgcttacccaactaaacattgtgtgtgagtgctatcacatagcacccatgccaggctgtaatgttatttattaattttttgccaacttaatgtgtgaaaattgtgtgttcttgttttttttttttttttttttttttttgagacggggtcttgctcagtcacccaggctggagtgcagtggcacgatctcggctcactgcaacctctgcctcccgggttcacgccattctcctgcctcagcctcccgagtagctgggactacagacacccgccacgatgcctggctaattttgtttttgtatttttagtagagacggggtttcaccacgttagccaggatggtcttgatctcctgacttcgtgatccacccaccttggcctcccaaagtgctgggattacaggcgtgagccaccatgttcttgttttactatgcatttcattgagctttttgcaatatatttttgtttcctacttttatttccctcctcctttttctagtgggttgtctataaatgtgtcttgctcatctataattgatttctaatgttttcttattgattgtattaactctatatataattttaaaattacactttgcaaatttcttgcaaatatcccagtctattgcttatctttaaattttggctattatggccaagcatggtggctcacacctgtaatcccagcactttgggaggctgaggcaggtgcatcacttgaggccaggagttcgagaccagcctggccaacaaggcaaaaccctgtctctactaaatagccaggtgtggtggctggtgcttgcctgtaatcccagccactcaggtggctaaggcacaagaattgcttgaatctgcagtgagctgagatcatgccactgtgcttagcctgggtgacacagtgagactgtctctaatacatacatatatatatatatatatatatatatatatatacacacacacataaattttggctatttttatttgatgtttctgattgcctgtgtttaaatctgcctttatctcctttgtgttcgccggtgaatttaaagtgcatatgtagacaggggttaagtgtaaatcacactgaacctatattaacaacagcatcttttagaaataatataggagctgttatcacatccctgtccctgagtttgacactacctgagttgagttcttattctgccactccctctgccaaacccttggatctagagttgacagataaaatacccagttaagtttgattttcagatacccaggatgtaaatttgaatttcagatataccattttttttttttttttttggtagagatggagtttcatcatgttggccaggctggtctcgaactcctggattcaagttatctactcacctcgacctcccaaagtgctgggattacaagcttcctgtaagtacttaaaaaaaataagtatatcccaaatattgcatgggtcatagtgatactaaaaagttacatattgttcacctgaaattatttacttatttttttgagacagagtccggctcagtcacccaggttggagtgcagtggtgcgatctgagctcactgcaacctctgccgcccgggttcaagcgattctcgtgcctcagcctcccaagtggctgggattacaggtgcaggccaccacacccggctaatttttgtatttttagtagagacggggtctcaccatgttggccaggctggtctcaaactcctggcctcaagtgatcctcctgctaccgctcctaaagtgctgagattacaggcgtgggccaccgcgcccagcctgaaattcaattttaattgagtatgctgtatttttatttgctaaatctggcactcctatttggggctagtttactaacacctgcttactgaacaccatccagtaccaggttttggggtgagtgggttggggggaagcagaaagaaaagatagctccagctcttggagagttcatactctggtttcctggagaattctaaaatcattaaaataatcctctcgaccattacaatgactgctagatgaaatttctgagagcacagcttccgagtttccctgctgcctagggcagagttatccaccttcaccttatcatagaaccacctgagacgcccctgccatggacagtctgatgcttttggtttggggagggatccagaagcccgaggttttaatgagagccacgtgattctgctgagataagtctggagaactctggcaagcctgtctcttggctcaggcttggaggcctccgagcagcaacatcgtcccaattataccccgttggagcatcttcagatcttccactcttttcacaacgcaatcaaaatcttcgtacccattttgcagtagtgatctctgtaagttgctttacaattcataaagtttattctatttgatcttcactctaatttacaaagaaaagcagggaagtctatttctgttttacagaggtgtacagggaggctcacaggggctaagttcacacagtaagccctcgaagctgccagggctgcaaagcccaccctctttccaccgcaccgaactacctcctttcgcctacaaaacgtaggtggggaccactggtgttggaatgacggcccacctcgagtttcaggtgacttccactctgcaattaacttgcaggcagccccagacctgcaatgaacacacgggtgggggagagatatgcacgccagggtcagtgggaaccaacagccgaggggtgagcggggctaggggccccgggccgccggcggggcaaacgcggttcagaaacgcaggccgcgctctggcccgccccctgcagcagcacggcctgctcgccatcgcccggagagcgccgcgggttcccgagtccgggcgcggagggcgcgcgggcacggcggcaggggcgtgctcggaggacgcgcgctgcgctgctcctccaaagggcagctccgggggaaagagggtggcgtcccggggaagcccgcagccgccgccgatgtcgctgggactcggaagtgccgaaagaggggtgttgggaactcgcggcgcgcgtgaacgttgccgtcgccgccgcccgggacagcccggaggttggtaactggtgaccatagggggtcctggggaggttagatgctgaattttctgcgtcagtttactctgttaaaaaaaaaatgcacaaaacgctttccgtttcctacccaagttcccgtgtgcgcgcccgagggcgggacagaggaagttcccggtcgggcgaagaagacaaaagcggcgggggccgcgcgcgcagtgcgcccgggcaaaggcggggatctaggcgccgggacaagtccgcgcacggccctgcccacgtcctctctccttggcttcgtccccagcttccggaactgctgcggggagttgcgaactctggtcctcttggcagtatcggcggtgcgcctgcctgcctgctgtgactccagggactctaaagttagagacttcctttgcgttctatcttcaggactcagttttcttcctctgttctgagtctaaccttcaggtggcaggtctttatgcggaaaaaccctcccgctaatcctcaccagaggtactttacgggtagcattggtgttaagaaatgtgctgctacctgtgtacattgctcttggatcagggttgtagggctagggcatttggcatcctcagaggtttgcattacgtgggagtgagacattgcttctctttctgtttttgttgttgtttgtgtttttgaggcggagtttcgctctggtcgcccaggctggagtgcaatggcacaatctcagctcactgcaacctcagcatcccggtttcaagcgattctccagccttgcctcctgagtagctgggattacaggcatgcgccaccacgcccacctaattttgtatttttagtagagacgagggtctcaccgtgttggccaggctggtctcgaattcctgacctcgggtgatctgcccacctcgacctcccaaagtgctgggattacaggcgtgagccaccgtgcctggcatctcattcattctcagagctaaggacctatttcaatgtgattaagtgctatgggaatgcaaggagaggagagggaaggcttcattgaagaggcggtagttcattgaaggagactttgaggaatgatttttttccccttccattcctcatgttccattttccctgtgatttttctccctcctttctcgttgccagtcagtccctaattgtgattgtttgataaggacagctctgacctgagagattcaattaatgttaatttaaggagactgtgtgcttattaggtgctttagatacattatttctaaaccttacagtaactgggaaagataagtgttgttatctcttttcacagtaggatagagaaagccttggaggggagccaaagccacaaactagtacatgtcagggccgggttttggactcctcttttggatcaacgcctgtgctttatctactgtttactttgccccctccttggaagtaggttagatggatgaacttagggtgaaagtcaattctttggagggagcagccgtttttgtgggtggccagatgttggtgggagctctgtaggtagcatcaggaacttgcgagcatgggccttacctgcaccccctgcttccagcttaggacctggcccagggggaatgttccctaaagcagtggtccccaacctttttggcaccaaggaccggtttcatggacaataagtttttcatggactgggggaagggggatggtgttgggataattcaagcacgttacatttattttatttatttgttttgagacaagagtctcgctgggtcacccaggctggagtgcagtggcacgatactggctcactgcaacctccacctctggggatcaagcaattctcgtgcctcagcctccggagtagcttacaggcatgcgacaccacatctggctaatttttgtatttttagtagagacaggatttcaccatgtcaaccaggctggtctcaaattcctgagctcgaactcctgagctcaagccatcctctccttggcctcccaaagtgctgggattacaggtgtgaatcaccatgccccacctgcattacatttattgtggactttatttctattattattacattgtaatatgaatacaactcaccatagagtagaatcagtgggacccctgagcttgtttttctgcaactaggcagtcccatctgggggggtgtgttggtagacattgacacccaaagtgtgtttgcttatgtccagcctacttcatagtctcattttggttgctgtcactgcagaagaccctgcttcacaaagataggatgttggaaatggaagcaggcttttcggtgcttttgtggcaatttcaggatactttgccttgactttaatccagaatgtatggatatttgaagttgtcttaaacatacttctagggcccggtcatttgctatctcaaacagttggtcctcttctagcatggacaaagtcaattcacctggcttattcacaaatggatctaggatccttcccagttcgggtgtcttttgtagttgggaagtaatgctcaaactcttttgaaagctgagataggtgatcatgcaccagctgggagagagaaggccctggcttagtctctttcaaaatctctgctaatgtttgaaacgtgtcagaaatcccagtgttcacttgtcgccgcaataattccagtttggttttgagtgcagccacttatctgccgacttgaacacagttctcccctgaagggacagatggagttcattgaggaggtaagcaagtaagcaagttttgtaaccccttctatgaaatgtgctgccagtggtgactacttttctagaagaaatctctggagtggccctcataactcaaactccggccagtgatctatctttagaaagccatcccacttctgtgtataaaagatgtgtgtgctctatgtccatctcacagagctgtgtgaacagatgtgagttaagggcatgtactttaatgtggttgataattttaatcacatcctgcaaaatgttcttaagttcaggtgacattttttggctagccaacacttctctatggatgtcacagtgcatagactcacattcagaagtgacctctttggcccgagtagtgaaaccagtcgtagcagtcgctctgcccaagcacatactacccaaaaggaccaattcggtttttctgataggtaatcattcaaagacttgaatagttgtgcagctgtggtgttggttagcaacaaaagtgcaagtgacatatcctcgtgcacctaacatcttcatgtatatcctcctgaaaactgtatcacaaaaaaacaagcattgttgccttgtcaacactggtagactagtcaacccagattgcgtaccgcagtgactcattaatcctctctaccaattgtgcctcaatatccgctgctatttcaattcgcctagtttactcttcaccaatagtaaagggcttcttagctttagcaatacggttagccactaagaatgatactctcattgcagacacatttgatgaaatggtagccttcaataattgcttctgttctttgtgcttatgttttttcttttgaaaaactccgaagccttgtcttttaatgcagggtgcttggtctccatgtggtgaagcagttttgaaggtttcatggcttcattggatagccagtggccacatattacacaaagtgggcttggagaatgtgagtcacctgttgcaatgaacctgtaatttgagtatgactcctggtattttcttttaaatgcagcttgctttttgttggcaatcttacagtcttctgtctcatcattgggtcttcccccttttcaaagaagcttaccagtgatgtttgttttttactcatttcggctagggttagcttgtgggcttaccaaaactgtgactgagacaaatgtgcagtgcaggaaacaggcacacctggaagtggtaaataatgggcgggccatgagtggactaaaataagtgtcggattctgactgaaagcctgcccacagatgcagctgtacgatggaagtacatcaactcacttgccactataaagcctgccaccaggcagcattaagctacttgttacttgacactcactgataggattttgatatgagtctgcaagcaattgatttattatggtctctgtgtagtcaaacctccctcttaatgctaatttgtatttgcagccactccccagtgctagcatcacttgtagtcccaactacttgggaggctgaggaggaaggatcacttgagcccaggaggtcaaggctgcagtgagctatgatcaggccactgcactctagcctgcatgacagagtgagaccctgtctcttaaaaaataataataaaatgaaaaaactaaaaaagctccaaatgtatgagtatatgtacttctttatcaatgcagtaagtaacaaaattcagtgcagtagcaagtaactcctgtaatttcaaagtagtgatgcccatgtaaatggtattttgtagtattttcaaaggctacacagtagtatgaaagtatctgacttttactggtgacattcgtcagagctgcttttactactatgatttttttttttttctgagacagcgtctcactatgtcacacaggatggagtgcagtggcatgatctcggctcactgcaaccttcgcctcccgagttcaagcaattctcatgcctcacccaccccagtagctgggattacagatgttcaccaccgtgcctggctaattttgtagttttagtagagacagggttttgccatgttggccaggctggtcttgaactcctggcttgaagtgatctgcccaccttggcctcccaaagtgctggaattacaggtgtgagccattacatctggctggaactgctcttactactgtgagtcgttgtccacatctataatccaatgaaatgctaattttcagccagaaattcatgaaaataaagatatttgagctcatgtccccctgaattctctctatggacaccttgggagtggagggctggggatcctgggttacatacaaccctacttagtggttgtttttcatctaagtacttgctggccactttagcgtgtcattttttttttttttttttttgagaaagggtcttcctgtgtttcccaggctggatcacagctcactgcagcctcaacttcccaggctcccacctcagcctgctgagcagctggggctactggcatgcaacaccattcctggctaatttttgtatttttagcagagaagggatttcgccatgtcgcccaggctggtctcaaactcctgggctcaagtcgtctgcccacctcagcctcccaaaatggtgggattacaggcatgagccaccacacccagcctgttagtgcattactgatagcagtttccttctccttcagttagttttcccctttttagcccgggttcacagttgtttctgtttgatgaaagcttttgagaggggattgctggattgtttatataatctacctgccctgctccttctgtgggtaatatggttggagaatattcctgaaatagtggatgtatgtcatatagtgtatacaccctacctttttatttttttatttttatttttatttttttttttgcgaatagaaatgaaccttagtggtagatgatgttattagtgtcagggaagaaaaatgaactactatcacatatcccacagacagaagctcttaagatgttatgaacgatttcatggtaatacatttgaaaattcagatgaaattgacaggtttttccaataaaatatattaccaaagacacaaaaactagaaaaaatgagtagtcctatatctaccaaaaacattgaatttgtagttaaaaacctttccatagcaaaattttcaggcccagatggctttactagtgaaacttccaaacatttaagaaaattaaagaggaaccactttccggttgcatttatgaggccagcacaatcttgttactaaaaattgataaggatattacaagaaaattataggccaaatgctcataaagacagacacataagtcttaaatatggtaagtcaaatctagcaatctataaaaaggataataaatcatgaccaagttggatttatttcaggaatgtaaactttggctaacactacgaaagtcaacaaatgcaatttaactccatatatgaagtaaaggagaaaaagtatttgatacaactcagcacccattcatgatgaaaaaaaaaaaagcctctttgcaagctggagcattgagagaaattagatttaaaataacagagggtaaggtattgctctgcaaatctatagattcgggccaatcccaatcaaaatcccggcaaattttttcttcaaaaataggtgataagcagattggaaatttatttggaaattctagacagtcttaagagcaaaactggaggacctaagctactagatcaatatgtagtcatgtcagtgtggtattgcataaagctacacagattatggaactgagtaaagaatccataaacaggcttatacatctgtggtcttttgatttatgacagaggcaacactgcagggcagtggagagaagatggtcttctcagtaaatgacactgggtcgattgactatccacatagacaaaatgaatctagatcatgtacctcatctcatatacaaaaattaatcaagataacaacatacacctaaatgtgaacgctaaaacaaagcacctggaagaaagcaaagtaaaatatctttatgacctagggacaaggtttcttgaataggccacaaaaagcactaattggtacagtgataagaatgaacaaattattgcctcacataacatggatgaatcttgtgacacaaagctgagcaaaaccaagatagatgtaaaagagtaaatgcaatgtgattccattgatgtaaagttcaaaaccagacaactaaataaaccatggtggtagaagttaggctagtggtcatctttgatggagttagtgactaggaaagggcagaaggggcttctgaggcattcttttgttttttggagacaggatctcgctctgtcacccaggcgggagtgcagtggtgtgatctcagctcactgcaacctccctgacctgggctcaagcgatcctgtcactgcagcccacctgagtagctgggactacaggcatgcaccactgtgcctggctaatttttttttttttttttttttttagagacagggtcttaccatgttgcccaggctggtcttgaacccctaggctcaagtagtctacccatctcctcctctcaaagtgctagaattacagatgtgagccactgcctctggcctggcgtgcagtttttatctcagtgacaattacttggtaattacataaggctttccacttcttgaaagccctaagggctgggcatgatggctcattcctgtaatcccagcactttgggaggctgaggagggaggatcacttgaggccaggagtttgagatcagcctggccaacatagcaagatcctgtctctaaacaagactaaaaaattagcagggggtggtgatgcgagcctgcaatcccagctactcctgaagctaaggcaggaggatctcttgagcccaggaatttgaggctgcaatgagctatgatcatgccatgcactgtagtctgggtgacagagtgagaccctgtttaagaaaaaaataaaaaataagaaaaaggaagccttaaggttttttcttcatttaagtgtattgtaataaagtttacttaaaatcttgtaaaaagttaggttcattctgatgctcccaggctggggagtgtaagatgtggtgggcacaagccttgctgattaaaaaggcttaaaataggttgagaattttcaggggaaagaatgcaatatcacatcagtagcttttttttgaattagggacttatataattgactcccttttgccaatctttaatggcagagatctggcttgagggaatttcatataaaaagacttagagttatgtttgattataagattgatatcagtgtggggggaaattagaaaagctaagggagtattaagtagaaatttttgttttcagatttaattttcttccaatttaagttttgaaagtttatgaccactggattaaaaaacttttcttccaatttaagttttaaaagtttatgaccattggattaaaaaacaatctgttttctataaatcctttcagttaggtactttcctcccataaggccatgaactaactgagggcagggatggcatatgagtttcctattaaacctgaactaaattaacacaaattcagtggcttcaaaaaacacacatttattaccttatggttctggatgtcagaagtccaaaatgggtcagcagggttcatttgttctgaaggttctagggaacaatctttttgttgtcgttgccttttccagcctctagatgactcttagattccttcatccaggagcccctcctccatcttccaagcacaccactctaacctctgcctccatcatcacctcacatttcctctctgtctctgacccttcagcttccctcctgtaaggaaccttgtgattactttgggcccacccagataatccaggctaatctctcaatcagaagatccttaatcatattggcaaaatcccttttgctgtgtaaggcaacatagtcacggttccagggttgaggacatggacacttctaggggacccatctttggtggaccccacagaggggatctattttgtcttcacaaagagcacacttcctggttgtcagtagaagttcattcgtatttgttgaatgaagacatgggtctaagatattatttgagtgcagtttctgaaagaaaagtgatggtcttgtcctcctctcactgacacaattggagctttgggttcagttttaggtaaatgtactatacagagtcaactgacaggcagaggatctggggacaggcatggtggctcatgtttgtaatcccagcactttgggaggtgtaggtgggaagatcacttgagtccaggagttcaagaccagcctgggcaacatagtgagacccgcccccatttaaaaaaaaaaatgggtgtagtggctcttgtctatagtcccagctactcgggaggctgagatggaaggattgcttgagcctgggaagttgaggctgcagtaagccaagattgtgccactgcattccagcctgaacaacagagagtgagaccttgtttcaaaaaggagcctggaaccaagtcattgaagtaatggttgaaggaatcatagatgttggtctggaagagggtttggatggagtagatggcattaattatctttaaacatttgaacgagtattattggaaagaataaaaaagcctttttaagcatactcaataatagtaatagcattaaaaacaacaaaaataagcatttcagagtttactatgcctaaggcactgttttatcattttataaattcacttaatcctcatatcaatcttctgaggttcgctattactgtgttttacagataaggaaattgaggctcagagaggttgtgcaccttgtcctaggtcacacaaccatgaagcagcaaagctggaattcaatctttggcattctgactccagagccacccctgaaaccatatcacactatgctgtctccatgcctttagttccagaaggtagaagaggactggtggcagaagaaatccacccctgtatttttttagaaatctgtattttttagaaatacggggtagatttcaaggaaaaacacaacaatcagaactgctagccaggcacagtggtgtgcacctgggaggctgaggcaggaggatcacttgagcccaggagttagagctgtttggagctgcaatgagctatgatcacgccactgcattccagcctgggtgacagagtgggaccctgtctcaaaacaaaaacaacaacaaaagcaagaactgcttaggaacagagtttctctgccttgtaatgttactggaaatggtcaagtaggctgttataaaaggaattcccaaactggctggagatgagaccaaaaggcaatagagactccactgattttgaaattctgatttgggaacatattttttttccattacatatataagaaggtagggaacaacctttgtgacattttatgtaataaagatccattgtgaaaggtagcttttcaactaattttccagattttattgattagtaactatttataatatacctggtgtgctagatgtgtgcccacccctttctaaggtacccttgctgctcctcccataaagaagtatggtctgttttctcctccttgaatccgggctggtctttggacttgctttgaccaataatgtgttctgtgaactctggagcctggtccttaagggatgttgcacctcttgcctctgttcttttggaaccctgaaaccccactgctgtgaaaaagccaagtctagcctaccagaggaggagccctggcctgggggagaagggaggtgacttgtgtgagctggcgccaaatgccagacatgtgcatgaggtcatcatggccccctccagccccagtggagttgtgtggtgacagaagtcacatgagtgacctcaggagggacatgaacagaactgtccagactgccatcccacaaaatccttaaaaagaataaatgttcattgttctaaggcatcacatgttgtgatggtttcttatgcagcaatacataactaatacataatatgttggtgcggatgtggaagtagtgggtatatattttaaactattctgtaattagacttttttccccactccagtgcacctcttccagtctatctagtcattcttctgtgttggtgaaacctttctgggtttggagaagtgtttcctcttagtattatgtgggttgaagaataagtctttgtaagactcttaaatggggactgggcacagtggcccacacctgtaattccagcagtttgggaggctgcggcgggaggatcactcgaggccaggagttcaagaccagcctgggcaacatggcaaaacccagtctctactaaaaacacaaaaattagtggggcagcacactccggcctgggggatagagcaagactctgtctcagaaaaaaaaaaaaaaaaaaaaaaaaaagactcaagtggggtttggagagaattgtgatatgggaatctggacttggtggttttcttggagaaaatcatgtaatttagagtctacaaaatgggattcagtttcatgaaaattggaccctggaaaaggcaaaagtctcataccactttttccgaatatgctagaatattgcactactatttcattttctttaaagccgttgtcatttcagtgggcatgtgcttctttcacttttattgcttgtggtttccagagtgctcatttgttcctgaatttagagctatttcaattttactcttatctctgcataactgctgactttcccctcttatttccaaggtaaatcggttaggtttagtttgcctttttcagtaaatcttttaaggaatgtatgtgagttagatatttcatgtgtattttgattacattttattgatttaaatttttttatcagagagtgtctaacgttatgcataacgtttaaaaattctattacatttagaccacttatattctagctttcctaatggattgatttcattatagattttggaaaaaatgagtccagtacactctgtaagaatagtgaggtggctgagggaaggctctggagttagacttactgggtatgaatctaagctttgctgcttaccagctgtgtgatttggggcgggtttacttatcctttctgggccttggtttcctcttgtgttaagtgaggttatcagaagcaccaacctcaaaggtttgttatgaagattaagtgagataatacttgtaaagtgccttttcagcataggaaatctgtaaatagtacttgttatagtacagctattactaaagcataagaaaactcagtagagggaaatcttcatttaggacattaagcagtgagtcagtagaagtgacgatggtgatgctggtatggagggattgttagcttaatgatgagagctgtcttgttaaagttctctggtgcatgtgagtattgggttatagcccatttagtgcttgatatcaagatttaaaagcagaaaaaatttaaaatggaagtgttggaatccattagttgcctgcatcagaagtaaagctaaagtatttttgaaatgatattggaagttgctgggggaaaagcatcttgcagccgttatgtttatgtatgtttcaggctttggcaaggtgtgctgtacttttcttccaagatcaaggaacaggatttctgcctgtatgacagtgggggttgggaattttggttctaatttttgctccattgctggcttctctgtccgtgggtagatcgctgcttcttcctgagcaggattctgattcctgaaagggacctaaaaacttagccctcctgagaggatccgagtagatggcatctttgaaagcaggtggagtgttaaattccaaagtaaatgcaaatgcaagtggctccagtatagaaaaagttctgtgagctgagagattcttgccattttacagctaagattttattctgtggccctcttgagttctataattcccagataaatatattttttgaaatattcaaccttggggtgtttgtacccaatttggaggtggagaaagctccctattcctccagtctgaattccttccctctgattccagggaaaactttgctatgatttcctttaacatctagtattaaatgcacgttctaccgctttgtcctcacttgcctcaaaattctcactcttttcaacaacatttagcttcaagatcctgttgtcttacagctttggagttgctgttttatcttcttcatcttcctcttttttccccctaccagcttctggactattttgatgccaaggacaactcaatttttccccatctgtgtggcttggttccagcactctctccactttcactaagggcctaaatcatcaacctccctgcctcttgggtctaccacagcatcaaggggctgctttgtagagcttcattcaaataattttatgtactggcttgcaagcctgaggtttctgcaggaaataaaatttaaacatgaaatcgtatgttttaagactccttaccacttggctcctgttctcccttccctgaaccatccacactttatcttctttacagttccgaccagtattcccacactggggaagtgttcttagacacatctcaccatcacacatccctacaaccctccttcactattacatatcaatagtgcaatctcatttgtgtagattaatcaggtagactgctacttaaacacaggctgtgtccctatagattggccgttttctatagaaatgatgctgtaagtggtgatgacttttctaggctatctcacagctacccacttagctgataatgttggtgcaggactgactgcatgaaaacagaaaagaaacatcacttacacatttgagtaagaacctccttgatttcagcctgattgctctgcctaaagagggacatgcttgtttagagtatgagaaatggaaacttggtaattttgtgagagagtttttgggaacctctaagggcctggacattttaaaaaggttccagttatattcccaaatatatagttttccttttcttttacattgtgtcataaatcccttaagacatatctactctgatttactttctggctgcacagctgaaataaacagggaaaacaaagtagggaaataattttcctaagataagtgggcgagtgttgaaggccgaaagaatgagggtcgtgatcaactcagtataccactggagactatatgagtaaacagcaaactgtttctcatgaaagcaggttgttggcaaactgacaaactgtgtctgcctcccagaaagaatgctggggggcagtcaccacccaggcacagtgtttcttgtgattaggcaaatctgaagcctgttagcaataacgtgaacctgtgatcaatcaagcagctgaccagtcattacctcctcctccctgctctttctgcccaataaaaacaaagggctgtagaagctcgaggttgctgcctttgctccctagaagcagggagctctcttcttcccctggccccttcctttaaaatagttacttttaagttttcatttctgccttcgtcctccttccttcagtctcctaatgactgtctcaagtagtaacagtagtgactgtcgtagtgacagtctcaaatagtaaccattgcagtcagctacaggcaagagttgaaaagagagtgtgtgaggaagaaagctctgttaaggaggatgggtgagtgtctgtgtggtggtggtgtttcgaggtggcattcgtgtaatggagaggtgaaaatgaaagtggaaagtactgcctgtcattcccttgggagtagcagagacgtaggtggtgaggaagaggcaccgggctgaaagcctgcgggtggtccccggggatagtttgcttgctgtccagggtggctttggattgggcgtcagaagaggaatgagacattaacgaaatccctggggatgccaacttcctgaaagaggtccagatgcacgtaggatgggcataccccaggaagttcagccagatttctttgattcagggagaaaatcagggtcagggcttaggtaggctcctgatgagtgaaattcactaactagtaactactaatgtttgttgagtgcttattcactgccaggccctgggctaagcattttacatttaaccccttcaacaaccctataagaaaacatctgggaggccgttatctacccgtttccttaaccaataaatgacacagcctgggactctccctgcaccagcccacccctcctccctgaaccccacaggtgggtttggtgccagaatgtatcactgtgctgtcaagtggagactatttggttcaattcctaaattttgggggtgaggggacagctagtttccctgcttagttacctggtgttttgccgctagttactatgtatctctgtgtatttgtctacaaaacatagagcattgttgaaactatgttattgtttcattgaaacaatgttattgtttccttataccactgagtagaagaaaatggagtttctgctggggccactgtctgtggagtttgcacattctcgctatgtctgcaggggttttctctgggtacttggtttcctcccacatcccacagctgtgcccattaggtgaattggtgtgtctaaatggtcccagtgtgtgaatgtaactgagtgtcctattaagtttttctgtgatggcatcaaatgcctgttgatgctcatctgtccaaggcagggggctctgaatctagtcccttttaaaggcctcataaagtggcttagccatcaaccccaaatttggaattcaaattcaacaaaagccagacattcctagaaatccctgcaattgcctcccgttttggggagcctttggggccactgttatctgctttcagtagggtctttaggctccttcagcctgaagtcgaggttccagagactagaccttgaaatagtacaggcacctgtgaaaatctcccctaccaggagatggctttgagggtacagttaatttacaacccagctgagccccagatgttgccagcccgttcacaagatggagcaacaattcaagacgagtcatcggaacaagtcatgccggcatcggaacaagtcatgccggcctgcactgcctcaccccatgccgcaacttgcttccccttcttaaacctttgcactttgcttggaaatttgaagtggttccattaaggcaagagtctagaccgtcttccccatggctagctttggtctgtaataaagtcactttctttctgccatacctctatcttgctaatttgttttgcaagtggtgagcagctgaacctgtgtttggtaacgagtgtgggggagtgagtatgagtgggttctgcgctgggatggcatcctgtccagggctggttcctgctttgcatcctgagctgctggaatgggctcagctaccagagaccctaaattggaacaagtggggtggaaaatgaatgaatgaatacaaattaataaaaatttgtaaagtctatgataatcatacaaatgcatgacaaaaaaaatgtagtatgaaagcgctcagtgagcccaccctaattgtaaatgttttgaactgcatggtggcaggaggtgctccttataatttttgctttgcaaacattttattccttggtttaaccgaccaccatcacaactgccatcacttgctgattcaccaaacttgggtaaataatgatcttacctgtgcttattaatctttaagtgtatgtgtatagctcttgtttatttcagtgtttactattagaagtgttttggtctttatttagatgtatgatgtttttgtgaccagaaatatgcagtaggaacttactttttgcttatatcaattagcctattgtaaaattagtagcattatacattgttttgtttaaagttacaatttccaagaccctactggtgatgttcagtaaggactcactgtacaatccagctaagagcagcactaagctgggtgcagtggctcacgcctgtaatcctagcactttgggaggccacggtgggcggatctcctgagcttaggagtttgagaccaacctgggcaacaacaacaataaaaaactagcctggcattgtggtgcatgcctgtaatcccagctactcaggaggctgaggcaggagaattgcttgagcctgggaagttgaggctgcagcgagctgagatcatgccactgcactcctgcttgggcaacagagcaagaccctgtctccaggaagaaaaaaaaaaaaaaagcagcaccaaaatgaaaaattattaaaccgaattttctagttccctgaggattaaatccttaatgcaggaggattgtctcagatagaatgtccctgaaaagcatctaatggcaggccttctaaaactttcattcagtctacaagatcatttgtgttcaaatttcagtcgcccaattaggagatcagctttttgctaatcagattcttcatgaggcaaagaggtcatccgatgtaataccaacatcttttgacaggcgagacattaaattataagccaagaagttaaaattaccttcccactaaagggaagactaccaaattcctgaaaagttccagaaaggagtcttgttattctaaagatgaaagtatttaaaaataaattgtgaatagaaatggataaagctagaagcagttctgaaaaatagtaaggaacttgagaaagtgttgttgaaatactagggcttaggcttgtgttttaaagcatgaatgattgcttctggatctcttaggttgcaggaaaagtccagaccaaactttctgggtgacttttaggtaacgaaatggggcactctgggtgcaagactgcttatttctgaaatcgtggtttatcaaggctgaagtttatttcccttcctgctctgtctcccagtggtctgaagaaaggagtttgtgtgtgcggcagattctaagccaggctctaagtctgagtaactgtacactggcattaatgggattggccatggcagagtggaggggcaggggcctgggtccaaagacttggctttgagccttggctcagttatttacttatttgtttactcacatatttagacaaaaattgtacatatttatggtgtacaatgtgatgtctagctatacattgtgagatgattaaatcaaggtaattaacatacccatcaccttacctgcttatcattttatggtgagaacatttaagatctactcttagcacttttcaagaatataatacattattgttaactataatcaccatgctgtataatagatcctcagaatttattcatcctgtccaacatcttttaaccaacatcttccccacttcccccgccccagcccctggcaaccacttctgtgagtttgactttttttaggtttcacatataagtgagatcatgcagtatttgcttttttgctctggctcagttatttctggctctgtgacctcatcacatttgtcatctataaaatgcctacctcccctgttccacttccacctacttcaccaggctgttgtgaaaacaaaatgagataatgtgtgaattctggggtttggcatgactgtcacatgttagaagtacttggtggggttggtgggaggtgctgcttaaaattttgctcttattttggcatccacaatgagacatacttgagaggtttaaataaagcagtaaaggccataaatgcgtttaaatttagtgaactctttgttacttggaacatttggaatcatttaatttgctgaattttaggacctaactttcctataccttctctattacttagagtatagtcatggctgccatgatggagagatctagaataggagaggcttaaacaacctagaaatgcatttctctttcctgtaacagtctagatctaagtagtctggggcactttggggcttgggggtggtacctggatttggggactgagaggcctctgtcttgtccatgtggctttcacctcttcatccacggaggctgttccaattctgttcaacaggaaagggagggaaagaaagagatggccacagccatgtcccttcactcacacccttttgaatggagctattcaggtgtccacacttagctacagtgtagtgttggtgtccagaggaaattttaattgatgtgtaagaagagagactgaattctgaaaaggggtagtgaggggcggtgggtaacaagcagtgtctgtcacagatgtctgtgattatgtcattaactgccctttaagaaatgtacagatgaggcctggcacagtggcttgtgcctataaacccagctactcaggaggctgaggtgggaggatcacttgaggccaggaaatcaagatcagcctgggaaacatagaccctgtctccaaaaatacataaataaagtgcatagatgcatggcagacagctgattttaagtttttattttattattgcttttagagaggggatctggctatgttgcccaggctggtctcgaactcctggcctcaagtgatcctcccatcttggcctcccaaagtgttaggattacaggcatgagccaccatgcctggcctatagtatgatacttgaaagggacaacaaggatggtgaacctgttgatttagaggtttgtatactgtttgtgcttttcagactttttgaagccatttattattcacagagcacctggtagtcccttcttgctacatcccaggcactgtgctaggggctggtgagtcagagatcatggtccctgctatctgagggtccactccacagaagagacaggcatattatgcaatgggtagagaactgtctgatgtatactctgatgggagactgtgggaactcctaggaaaagacctgacccctttgacaggcaggatgcacatgtgtggtgtatgtgtgcgtgtgtgtgtgtgtgtgtgtgtgtgttggatgcaggatggagtaagttcacagggaggaggaagcttgattggggttatgtctgtatcaccttgaatagtgatgggtctccgggagtgtgaactaactgaattgatgtttagatgctgttctctagtgtcatgttcatggcttaaagttttgtctctgtttctcagaaactctcagcgtaggcatcgggaaccttcgtgccaaggagccatgctgccccgatgggaactggcactttacctacttgcctcactaggcttccacttctattccttctatgaagtttacaaagtctccagaggtaaggccccaagcttttcagacctcctatcaaacaaggaaactcctgtcaaaaaaaggagcagaggtggaagattcaagaagatgatccaatagtgtcaagatgatgtgggccttgatttgcttccccatgtcttggatagtttgaatcagtgacctgagtccattgagttttctaccctaaacctaggtcttttaggtgatgctgtggcttgtcttctataattggtgggtttgattcaaaagctattgaaggccgtggaggggatttgcgttcagaattcaaagtaaactcttaaatttctctttcatcattactcctctgagacatattagatctgggttcgttttgtcttcttctgtcatttttagtgttgcctttgtctgagtgttggagataaatcatcatcaggtcacattccagcccaaaggaag

SEQ ID NO: 3964 - DNA, 411 bp, Homo Sapiens
ttaatattattggtactttaatataccataataaatctagtcataagacaccataactaactcttagtccatagtcacttgcattatatgataatccagtgctgaaatataaagaaatttctgaattaagtacccagaagtgccttccttctgtactcctccctctctttcaaatggctatcattgatcatataacacccccacctccttgtcttaatatatttatctctgtaaaactagctcaaccacagaagggacatctagaaacagcaatattgatttggtttggcctgtttgtttttaaggactttccagttgctgaattctgaacatccaatccgagtccttggaattctgcagacttctctggggtggagtggcctcaccggaggcttggttctgttttctctg

SEQ ID NO: 3965 - DNA, 425 bp, Homo Sapiens
ttttttttttttttaccaggccaaattttttaatttttttgtagagatggggtcttgccatgttccccagtctggtctccaactcctgggctcaagtgatctgccggcctctgccttctacagtgctgggattgcaggcatgagccaccacacctggcctccttatctttttaagtcccggcacaaaagtcgcttctgtccttcatgaagcctgcacactctggtgtggctcctgtcgcaatctggacctctctccagttctagagtgttgtctgcttttgtgttaattcctccgtcagcagtgggaggagaaccacgtcactcgtatcttgtctctctggtgcctagcagagtctgggcacaccgtggcactcaaacataccccctgaatgagtaagggccaaccttgaaatacctgggagctg

SEQ ID NO: 3966 - DNA, 455 bp, Homo Sapiens
  misc_feature (37)..(37): n is a, c, g, or t
  misc_feature (437)..(437): n is a, c, g, or t
ttttttttttttttttttctgagatggagtcttgctntgttgcccagactggagtgcagtggcacgatctcggctcactgcaacctccacctcccaggttcaagcaattctcctgagtagctgggactacaggcgcatgccgatctgtacccaatcttattagggtctgcagcattgttcactcaacacaaaaactggacatgagcattttttagttccattatgtgcctagtacagaggcgtattcagcaggtagttaaatatttggtgagaggaggtgaatcttgaaaatatataagttggccgggcgcggtggctcacgcctgtaatcccagcactttgggaggccgaggtgggcggatcatgaggtcaggagatcgagaccatcctggctaacacggtgaaaccccatctctactaaaaatacaaaaaattanctgggccgtggtggcagg

SEQ ID NO: 3967 - DNA, 305 bp, Homo Sapiens
ttttttttttttttttatctcccaaataaactttattttgaaaagaatatcacaatatagtcatgtaaatttaaatatggcacactgagcagtattgacgcaaattatatagtcatgtaaccatgtttcggtcaatgtacaatatatatatgatgggggccccacagattataatggagttgaaaaattcctgtcacctgctagggatgtcttgatcctgaccctgcataggcctaggctagtgtgtttgtcttggtttttgaccaaaaagtttaaaaattcaaaatttaaatagataaaagctt

SEQ ID NO: 3968 - DNA, 434 bp, Homo Sapiens
ttttagtatgactcatttctttttcttcattcctgtcgcacatcttacctcctcctcactttgtgagtcaaacttaccttcaagcaacttaggcaatctctgtgtgtcctgagaaaatgacaatgacaatagcaggattgggaaaccagaaaggcagaacttgccccactgactttattaagttcagttcatgttcagtataacagtttagagcttacagatgttgcgtcgtgaccattgacatttaccaccaacctatgaggttggcaaaacaagtaacatcatcatcatttcccacttagagctaaaaaacctaagatttcagaagattcagtggcacatccagcagcccataccaaacaacaggcggacctgggtgagatgctggttcctgactccaaaccttaactccttccctggactgaagcctctat

SEQ ID NO: 3969 - DNA, 1517 bp, Homo Sapiens
aggagggaagagtgtgcagacggaacttcagccgctgcctctgttctcagcgtcagtgccgccactgcccccgccagagcccaccggccagcatgtcctctgctcacttcaaccgaggccctgcctacgggctgtcagccgaggttaagaacaagctggcccagaagtatgaccaccagcgggagcaggagctgagagagtggatcgagggggtgacaggccgtcgcatcggcaacaacttcatggacggcctcaaagatggcatcattctttgcgaattcatcaataagctgcagccaggctccgtgaagaagatcaatgagtcaacccaaaattggcaccagctggagaacatcggcaacttcatcaaggccatcaccaagtatggggtgaagccccacgacatttttgaggccaacgacctgtttgagaacaccaaccatacacaggtgcagtccaccctcctggctttggccagcatggcgaagacgaaaggaaacaaggtgaacgtgggagtgaagtacgcagagaagcaggagcggaaattcgagccggggaagctaagagaagggcggaacatcattgggctgcagatgggcaccaacaagtttgccagccagcagggcatgacggcctatggcacccggcgccacctctacgaccccaagctgggcacagaccagcctctggaccaggcgaccatcagcctgcagatgggcaccaacaaaggagccagccaggctggcatgactgcgccagggaccaagcggcagatcttcgagccggggctgggcatggagcactgcgacacgctcaatgtcagcctgcagatgggcagcaacaagggcgcctcgcagcggggcatgacggtgtatgggctgccacgccaggtctacgaccccaagtactgtctgactcccgagtacccagagctgggtgagcccgcccacaaccaccacgcacacaactactacaattccgcctagggccacaaggccttccctgttttccccccaagggaggctgctgctgctcttggctggacccagccagggcccaagccgacccccctctccctgcatggcatcctccagcccctgtagaactcaacctctacagggttagagtttggagagagcagactggcggggggcccattggggggaaggggaccctccgctctgtagtgctacagggtccaacatagagccgggtgtccccaacagcgcccaaaggacgcactgagcaacgctattccagctgtccccccactccctcacaagtgggtacccccaggaccagaagctcccccagcaaagcccccagagcccaggctcggcctgcccccaccccattcccgcagtgggagcaaactgcatgcccagagacccagcggacacacgcggtttggtttgcagcgactggcatactatgtggatgtgacagtggcgtttgtaatgagagcactttcttttttttctatttcactggagcacaataaatggctgtaaaatctc

SEQ ID NO: 3970 - DNA, 1009 bp, Homo Sapiens
aatacatatatgtgtaggcgggacacatgtatgattttaaatgcacttttgaaatcttagagtagaaccactactctagtaatacttgtaataaaattaatatagttttaaacacttccataaagaattaggggtgcccagctccttgatttccccctagggataaagatatccatgtacaattccaggagcttcccgtgtaattcctcaaaaaagcactagtaaaactcttaggaggatattagataagagctcacttagcaatagccctttttccccacatattctggaaggttctacaaaagctattagatactcattcctggttctggaaaattaaataagccaattcttggtaggattttccaaatggcttaccacagaggatttatcctcttttgaaatatttcatcccataaagaatagaagctctgccttcatagcatttcaagcttctgtatttctgggacaaaaaatgtctaaacagaattagatctccaggtctcaaaagcacagagatatatcaagagaaatctggagttaaaccaaaacaaaaatctgtaaaatgtgtaaatgtcattctccttccctctcagaccttcttgcccttgtttgctgttacgtcttcttcatggaaaagcaagtccttcagcactgggctaccagcagatgtcccaaaatggtgtcaccctgaacctcggaatggagagaacaacatctccattacgttgtggcccctgcttgattgttgaaacgccaaggcttcccattcagtccccgttttaggagggcacccacagtaattctatggagggtgggggtcagaacggggggggctaagattggaccatgtagacgaatactaggtaagtcgtatacatagggcgaaaccaatgtggcaagaatctccgttcaagcagttgatggttggaccaactgtaagcgtcttctataagcggagaaacattttcctgtttttggtccctgtccacgccttgggttgggacct

SEQ ID NO: 3971 - DNA, 706 bp, Homo Sapiens
  misc_feature (275)..(275): n is a, c, g, or t
ctgtcggaagtgggccaccatatctggaaactacagtctatgctttgaagcgcaaaagggaataaacatttaaagactcccccggggacctggaggatggacttttccatggtggccggagcagcagcttacaatgaaaaatcaggtaggattacctcgctctcactctgtttcagaaagtcttgctcagatctttcctcagggagaaaggggaatacagaagaatgtctcccctacaagtgctcagagactggtgctctggagaaaactatagntggcaaattcccattaaccacaatgacttcaaaattttaaaaaataatgagcgtcagctgtgtgaagtcctccagaataagttggctgtatctctaccctggtctctccagttcaggaaggcaacagcaaatctctgcaagtgttcagaaaaatgctgactcctaggatagagttatcagtctggaaagatgacctcaccaacatgctgttgatgctgtggtgaatgcagccaatgaagatcttctgcatgggggaggcctggccctggcctggtaaaagctggtggatttgaaatccaagaagagagcaaacagtttgttgccagatatggtaaaagtgtcagctggtgagatagctgttcacgggagcaggggagggtttcctggcaaacagtattcatccatgtggtggactcggtggattggattgg

SEQ ID NO: 3972 - DNA, 509 bp, Homo Sapiens
gttcagagtcacccgtggctcctaaggaaaaaacagcatcatgaaaggcaaaaagtatttgaaacgtaattgtttcaattttccacgcccgttctcacatgccccctttagctttatttctgggaacatgtcactagacctcagctagcctgacaccgcaataacccgttaggctttgaggcttttcagtgaattcttgacatttaaatcttcttatagaattctttatgaagccttaactaattcttgtttttgcttcctcagaaactttttattgcatctgccatccttcattggatttttgttttggtttgttgttgccattctagcaatgagcttagtccttgtacatctgcattaaggtgccgatgcagaaggcaaattggaaacacgcgccagcggcagtggggctcaaagccgacctccatgcatcattctctagagttgaaaggattgacatttctcagtaactacccggcaaaatatatattttcataatgttgaatttg

SEQ ID NO: 3973 - DNA, 944 bp, Homo Sapiens
tatttatgtaatcactcacagcgttacattaccagtggcaaatacactgttaacacctactggatgaagaacttcattgtgactatttccaattgccatcatatctttttctaaaatttaaaatttaacttttaaatcctacatcttttctgaaaatatctatcttcaaagtgctccaatactaacactataagccctttcttttgctctaacatctaacacaaagggcacactgtcccattaattccacatgcactttacaaagcaacttcacacacaaatttttttaatccagaaactacataatgatcactttatattttgctacaaaattaatgaaggctgcatgcaggtgaaacattagtagacacggaattctagataactgttggttctcaagatctgatggcctgatgtggaaaattaatatgcttatttagcagaagtagctaaagtacatgcatcagtggctgggatcaattagaatataaattaggtgtttaaacatttaaacgagagcttaatttgagcttaatttgatgtctggcatgtcagagttatacacctttaagataacaatagcaaacagaacaaaatcaaacatctaaacaggcatgatttataaggtgggctgggcatagggctcaggacacaaaacgagctgggcagtgaacaaatctctcttgaaacaaagacagtagagcattaacaagctgtaaacacagcaaaaaaataacagagccatttccctgtattctcattttttttcagtttttgattcctcttaaggcaacaataaaacccgccaccaccagtattacaaaacccaaacattctttggttaccccatagatcccccttttgtttctaacctgggcttttgtcctccgaatggtgtttaaaccaagagcgttttggcgaaaaagacaatgttccttgatacc

SEQ ID NO: 3974 - DNA, 422 bp, Homo Sapiens
  misc_feature (92)..(92): n is a, c, g, or t
  misc_feature (149)..(149): n is a, c, g, or t
  misc_feature (287)..(287): n is a, c, g, or t
  misc_feature (327)..(327): n is a, c, g, or t
  misc_feature (382)..(382): n is a, c, g, or t
  misc_feature (422)..(422): n is a, c, g, or t
gtcggcttccactccttcaggcgtcggcagccactagtcgtggcgagaggggcggggtggccggggctggcgctccacttggcccccgctcncggcccgccccgccgccgcgccccccggatgagggtatatattcggagcgagcgcgngacgcgaatgagtggccgcgcgggaaggagctggagacggtcgtagctgcggtcgcgccgagaaaggtttacaggtacatacattacacccctatttctacaaagcttggctattagagcattatgaacattaatganctcaaactcacgttgtccaaagctgggcaagagcacctantacgtttctgggaatgagcttgaagaagcccaacaggtagaactttaaagcagancttccaggccaagaactttgaggagctgaacttctttttn

SEQ ID NO: 3975 - DNA, 996 bp, Homo Sapiens
ggccgtgtggcctgtgcagctggagatctctcagcaccttggttgggggcggggctgggcgggacatgggatggaggcggtgccggtggccagacagggtggaccttggggcctgcaggcaggagatgagttcggcggccacagtggcccccagcagcagcagcagcagcgggaggttcagcgggcgcgctcaccgcaccaggtggaaggtgagccagtacatgagcataggctgcgccgccgccaccgccatggtcaggtacatgcgcagctggttccgggccccacgcaccgggaccccctcagctgctgcgtctgccaagatcttcagccgcagcgtccggatcatgaacacaaagatggccacgcagcaccagcccagcaccaggtagtagccaatcttcccgaagagcaggcccatgaggaccccgccaatcatcccgacatatttgtagcccaagaaggccaccaggtcgatggtggtgaggtcggtgttgacagtgaccagatagaggctgagcaggatggccagcacctccagggtcagccaggccagggctgagctcgcttgcagccccaggaggtctggggagaacctatcctgggtccccaagcgcaagaccagccaccaaaacgtaggtgatgaaagccattgctggaatgtagaggtccggggcattgacgtcaaagcgggggggcaccggggtgttctggtgggtctgcactctcccagtcctgggtgtgtaggggcagaacagcaggcccagctttctgcccacatacctgggtgtcgccggcaagtatactgagcttgtgatgggatgagcggcgatgtcctatcacagctctgcctggcggcggctgtccctggcatgctgtggcccggtcgccggagctgtgggcgtgaagtggggatgttgccggtcgcggcctgcggcggcacttcaaacggggggcgccggggagtcactggcacgccggggccgtaattccccg

SEQ ID NO: 3976 - DNA, 474 bp, Homo Sapiens
tgagacagcgtgtcgctctgtcacccaggctggagtgcagtggtgcaatctcagctcactgcaagctctgcctcccgggttcacgccattctcctgccccagctgggactacagatgcctgccactacgcctggctaatttttttgtgtttttagtacagatggggtcaccgtgttagccaggatggtcttgatctcctgacctcgtgatccacctacgtcggcctcccaaagtgctgggattacaggcgtgagccaccgcacccagccaaaatgtaaactctttaccttgtaacttaaggtcctttatgatcttgcccctgcttacctcaccagaatcactgctaactactcccacactcaaattgtcagagcttaagttagatatcatagggaagagatgggagggattcatttggcagaagaatactgagtatattacaaaaagagaaagtataaagtaggaaaccgctaa

SEQ ID NO: 3977 - DNA, 993 bp, Homo Sapiens
gtaagtgaggcaaacatttactggaaatctgcatgattaaataacattaacaagttcataaacacaccccatatcagagtataaagcaagaggttgaaaaatatcccctaaccgaatgcaaattaggtatccctcaaaattgcacattctcctcctagtttgcttgcataatttaaaatatgtatatacagaatgatcttaaaatattgataactagtatggaattcacagccctgaagatatatatactctacatttttctaaagaacggacacccctcaggccctagtaatccattcatgtgattcaatgtcatgtacagacagtcctcagcttctgatttttggactttacaatggtgtgaaatggttgcaatttcaacataatgtacaatattcaataaattacatgatatattcaacactcgattataaaatagagtttgtgttagatgattctgcccaactgtgggcaattctaagtgttctgagtacatttagggtggacgaggctaagctgtggtgtccagctcaggggtattaaatgcatttgacttccaatgggtttactgggacataaccccatcataagtcaaagagcatctgtacttgacacttactagaagaaaaggtctttcctttatctctaattctagtcttctgctgaggtaactccaggaagctggttgtgccagagatcaatctcttaaaatagactaagcagattagcttcctagaggatctaaagttgccagacacaatctgggattgagtgcctcggctgtgagtacaccgtggaatgttcagataatgatgttcctttggtccttacgttcaagtcagaaatgtgtcctttggcctgaagaaccaactcgggcagtattgacaagaggaaacctgacatttcagatgttgcgagattataacacgggacacgggttggtcccgaagattggcgcgcccttgtgtaacctatataaaagggagacattaa

SEQ ID NO: 3978 - DNA, 241 bp, Homo Sapiens
  misc_feature (120)..(120): n is a, c, g, or t
  misc_feature (176)..(176): n is a, c, g, or t
gagaaaaggagccagaaaagccggcaaaaccacttacagctgaaaagctgcagaagaaagatcagcaactggagcctaaaaaaagtaccagccctaaaaaagctgcggagccactgtggntcttttaggacttgatggccctgctgtggcaccagtgaccaacgggaccacaacgntgccacccctgaacgatgatctggacatctttggaccgatgatttctaatcccttacctgcaact

SEQ ID NO: 3979 - DNA, 482 bp, Homo Sapiens
  misc_feature (407)..(407): n is a, c, g, or t
  misc_feature (449)..(449): n is a, c, g, or t
  misc_feature (468)..(468): n is a, c, g, or t
attcataggggagagatttgaacaagcagaattaagtgttagcaaaaatgctgcattgctttgattcatgtttaaagacctaaatttctatgcacaaggaataaagggcctacttaccaagtgtaaatcacaacataggctaccaaaatatttcttatttgctaggagaacaaagctgtcacggtgcatgatagttggacagagatggctaaaaaagaggcaaattcagatttggaaacagggtggcctcttcattatttattgccaagatctgaaaatcttcaacatcttataagacaacaatgaagtagcccctggaacagcatggagttgctgtgagtttgttcgttgcagacctttgtgttgggtcctggggtatctgagctttgttcccgtgcatggtgggntaatttgaaaccaagaggactggggataggtcctttgacagnccattctgtgacccctgtnttctgggtcactta

SEQ ID NO: 3980 - DNA, 5703 bp, Homo Sapiens
gcacatccctgcactagtggccgcaaccgagacgccgcgctccagcagctgctgccgcccagcccggccccgccgccgccccccagccctgcagccccgcagccccggccgcgcccagcccggcgaggacagcaccaggaggcggcccccagcgcggccacaaagacccccggcggcgtctctccgcggaccggtcctacttgaagtccatcatgtccttcggcagagacatggagctggagcacttcgacgagcgggataaggcgcagagatacagccgagggtcgcgggtgaacggcctgccgagcccgacgcacagcgcccactgcagcttctaccgcacccgcacgctgcagacgctcagctccgagaagaaggccaagaaagttcgtttctatcgaaacggagatcgatacttcaaagggattgtgtatgccatctccccagaccggttccgatcttttgaggccctgctggctgatttgacccgaactctgtcggataacgtgaatttgccccagggagtgagaacaatctacaccattgatgggctcaagaagatttccagcctggaccaactggtggaaggagagagttatgtatgtggctccatagagcccttcaagaaactggagtacaccaagaatgtgaaccccaactggtcggtgaacgtcaagaccacctcggcttctcgggcagtgtcttcactggccactgccaaaggaagcccttcagaggtgcgagagaataaggatttcattcggcccaagctggtcaccatcatcagaagtggcgtgaagccacggaaagctgtcaggattctgctgaacaagaaaacggctcattcctttgagcaggtcctcaccgatatcaccgatgccatcaagctggactcgggagtggtgaaacgcctgtacacgttggatgggaaacaggtgatgtgccttcaggacttttttggtgatgatgacatttttattgcatgtggaccggagaagttccgttaccaggatgatttcttgctagatgaaagtgaatgtcgagtggtaaagtccacttcttacaccaaaatagcttcatcatcccgcaggagcaccaccaagagcccaggaccgtccaggcgtagcaagtcccctgcctccaccagctcagttaatggaacccctggtagtcagctctctactccgcgctcaggcaagtcgccaagcccatcacccaccagcccaggaagcctgcggaagcagaggagctctcagcatggcggctcctctacgtcacttgcgtccaccaaagtctgcagctcgatggatgagaacgatggccctggagaagaagtgtcggaggaaggcttccagattccagctacaataacagaacgatataaagtcggaagaacaataggagatggaaattttgctgttgtcaaggaatgtgtagaaagatcgactgctagagagtacgctctgaaaattatcaagaaaagcaaatgtcgaggcaaagagcacatgatccagaatgaagtgtctattttaagaagagtgaagcatcccaatatcgttcttctgattgaggagatggatgtgccaactgaactgtatcttgtcatggaattagtaaaggggggagacctttttgatgccattacttccactaacaaatacaccgagagagacgccagtgggatgctgtacaacctagccagcgccatcaaatacctgcatagcctgaacatcgtccaccgtgatatcaagccagagaacctgctggtgtatgagcaccaagatggcagcaaatcactgaagctgggtgactttggactggccaccattgtagacggccccctgtacacagtctgtggcaccccaacatacgtggctccagaaatcattgcagagactggatacggcctcaaggtggacatctgggcagcaggtgtaatcacttatatcctgctgtgtggtttccctccattccgtggaagtggtgatgaccaggaggtgctttttgatcagattttgatggggcaggtggactttccttctccatactgggataatgtttccgattctgcaaaggagctcattaccatgatgctgttggtcgatgtagatcagcgattttctgctgttcaagtacttgagcatccctgggttaatgatgatggcctcccagaaaatgaacatcagctgtcagtagctggaaagataaagaagcatttcaacacaggccccaagccgaatagcacagcagctggagtttctgtcatagcactggaccacgggtttaccatcaagagatcagggtctttggactactaccagcaaccaggaatgtattggataagaccaccgctcttgataaggagaggcaggttttccgacgaagacgcaaccaggatgtgaggagccggtacaaggcgcagccagctcctcccgaactcaactcggaatcggaagactactccccaagctcctccgagactgttcgctcccctaactcgcccttttaataagacccttttactcaaagtcctagcttaaccctttgagactctgagatttttttcccccaaatttgtgtaaaacagtttcatctgatctatctagcgctcaatgcttgaatggcagaactgaaagtgttttcaggtatctttgtagcggtttccctttactgaataagatgacacgtggtgattgtgaagatggtaatttgctgctaatagagtcctcaaagggttaaggccaatttgcaatttttttttaaacttagaagcaatgaatgttttcatcagtcaagctaggatctgcagtatgtaatatagcacttgttaaccctctgagtgcatagaattttattgagaattcttgtttgggaatttttcaggcctttggatgtatacacacatgtttcttgattttactgcagatcaaggggtgttgttagatgctgaaatgtccagaaaagaaggacatttagaatgatatcttgtttgtccttttctgtgggtttagaacgtggcaggtttataacttagacacacgcacggttctttcttcttcacaatcctattcagaaacagattttttttttcattagagatatgactgtcagttgcagtgagttctgcatcccaagtggagggaattgggtttgtggcaaagagcttgacccaggaaatagatggtgccccccaaattgtctccacatgaagatgtactgatgacgccccagaaatgctgcttccatatcagctgctgctagcgccagcgcagactctcagggagtcaccacagcttgtcttgtgcttggtgagtgagggtctctctactcagtgtcagacatctacaggaaagaaacaactggtggaaaagagcaataaattgcccggtgctctgcagggctggaatttcaaacagaaagagggaataagatcctgtgatttttctcacctgcttttccacgcactgtggtcatcactgtgcaatctacatctagtatgaaatccacacataggagagctggggcacaaggggactggaggcagttgctttgcaagatggctgaggagaaagcacactgggaacacaatccagaatgttctaacaataagttttcagtgaataaaccactggcaagacatttccatgtgcacctttaggttacctatatagtctcctaggaagatcaggatgaaagacctagatgatacccctgaggataaaacctccatcccctaaaatgattttttttaaataccactgtctttagctgtccaggaggtcagagtgttttttctgtctttgggccaagtcctgtctgagacctgtattttcactcttgttaccaaatctatctccctagtgcagtgtctccaggcctgagtttcttctggaacagattccattttagaatggggattcacaggttctgtgcatcaccacagtgctcagagaggattctcctggggtgtcttagaggcaggtgcccaactcaaatgtattcccaaggtttgctgggctctgggatccacgagacaaccagagagggatatctcatgaaatttgcatctggtggctgaacagtacctatgttctctgttttgaatatactttaatacctgagagtcttaaaatttgtgaacaacgtttctatagtcctttattttcaaatgcacattgatcttcacttgctgcatttttactcttcaaccctgaaactatggtctacattaatatggatttttaaatcacatgtcattacttttgcaacaccatcaccaaaattttttgctcttttacatttaggttcatctctgtggtctgtgttgtcctgacatgtaaaaagcatatcgtttattgaggtttttttcccccccttttagagcatccggaagtgataacacgcaaaatcacaaagtagcataaatcagtaaattagttgagttgtttttgggggggaggtgggggtagggggcacagaacaccagaaagagtgttggtgtgtaggtagattccatattaatgaggaacactgaactagttggaaattactgctttctctagaaatataaagcaaagcactattccaaggctatggagtagctctacagcctggcctcaactctaaaagtgtgaagaatgcaatgggcagagacctacctgcagtggactgtcattttcctttctttctctgaattactgctttttctgtgggcattaactatattgctacagcatctagtgtactgagcctgcggtgcatggctcaggccttttcccatcgacgtctagggggactctggaccgtgtgaagctagggggtgtttctcagcacactgcagaagggcagctcagaagaatgcagggcccattcagcatggggatcccagcacatcactgtagaatttgagtgatctatgctgaataaacagtggaatgtgaccagtcaagtagaaatcttgagtaatcagatggaatgcaatctttctaacattaagctaccaagatcctgaatgtcagagatgtactcagagggttaacagacaagcacaaggcatgctgactacattggtgtatccagattgctttgcttttagccagtgctttctaatttttttctcgacattcttgggatagttcaagtttgaaataattaagtggtggtgttctttaaggaatttctataaccaaattgatcttatttttgatttcacttatcatagaacaaatatgtatcattatggcagtgtatctatgtaattatcaatttaatcatcaccaccggtgtttccatattttttcccaagtatttaatatagctctcttatggtggtggcctggtgatggggaccgtctttcttttactgacacatgaccaatcatatggtattttcaagggaattttaagattcatcttttcagtttgatagtagactagttaaggaagaactctttcattacttgcatcgtgtaaatcatctctgtagacatgtgttcatattaatgaacacattttttctcaacattgtagcagaaatcattttattcgtcatgatcaatgaatatgtgatttgctccagatcgttagaaggaaaagtaagatttcagtcatcaaaaatgtttttaccgtagccctcatctaacttacacgtggtgcatattaaaataagcagagaaaaaaaaatgtgaataaactactgaaaac

SEQ ID NO: 3981 - DNA, 418 bp, Homo Sapiens
gggcaaacgtaccctttgagcttttcaatcttttcttgaaatcactcagtcattacttcctagagcaaatgctgcttcaggacccagcccagtctaatagggagtggacttcagtgctagctctaagaaatattcagctactgcatctagctataggagcaatttaatagttcttccctctggggctctgttaaaactaatattcaagatcttgagactagcagaacattatatagctggaggtttgcacctcatagaggagacttcaagggatttggtcactcttattctgccagcacttttagaaaagtatgatacttcatttcctgggcatcaagtagggtagctggtcaaaacttgaaatcatcttgccaggggccaggcatctctggattgagcatggaagattgggctgctc

SEQ ID NO: 3982 - DNA, 892 bp, Homo Sapiens
ggtcccagagaggctggtgggtccctctcccaaaggaaggcagacagtctctgctttgccttggaccttggtgctgggggtggggaggcctgggggggacactccccactcccattccccttcctttgtcctaatcctggaattaagtacaggggtttataggttctatttcttcccaagagccctgcaaagaaccccagtttcctattggatgcccctacactgtgtgtttcagtggaatgtattttcatttaaaaacaactttgaatggggcactttttctttcctgttttaaaaattgaaaaattcttacagtacaaacaggactgtcagggtgggggtgtggtgctgtaagaggtcactcttgagtgcatttggcactgggatgggatggctggggtgggaagacccccatccccacccccaacttcttttctaatattcaaggagtgtccgtaggattcaacaacaccacaacttgaattgtatcatgggaggtgggagggagtggcttagaggtgtctgcctatgcttaaagccactgtggaagttcgtcttccctttctgtataatagagtgacaacaaaaaaaaaaaaacaaaaaaaaaaaggtggggccgtacaaaacgacacctcaggggggcccacaatacgacggaccgagttctctgtacaggaggcccaaatgcggcgcataaacaccagcacagcgccggacgaaaaacacgccggcgaaggaaaacgacattggaacacgggacgcaccaacacggggggcagatggccaacgcacggattagcaccaggtatgcacatccggtacggcaccgccagtcggcaaaaaggcacgcacatcatagcccagcacaatcaccaaaccgcccccagccacc

SEQ ID NO: 3983 - DNA, 630 bp, Homo Sapiens
  misc_feature (471)..(471): n is a, c, g, or t
caaccccattctaaaccgcatatttgttagaaaagtcacccagtcctgaacacagggtcttatacacaaatacatgtagcttgatttgcagatcagcctctgggatcgaccttacactggccccaattggaagttcaaaaacaaaaattaagttaggtagtcagacatctataaatactagtatccgcatgaatgaaaacaccctggctttggtatggctacagaaatccatctggaaattattcaaaaggacgtggttcagggaaaagggggtaggcagggcatggggggaggggaacacacaaaacccccaagcagaggtaaaatgaatattggaacacacccgcagcaaacactgcacatagacttgaggcagatgcctctaacacaacacatatacaggttcttggatcaaaatggtctggacccaacctttttaaaagtaattcacgtcgacgccgcccgcgaatntagtagttgtaagtggccccggaaattccggacacgtacccggcaggcgtcccagcttttccttataggagtcgatttagagcctggcgtaatcatgggtataacttgtttcctgtggtgaaattggtatccgttccatattcccacaatatcggatcg

SEQ ID NO: 3984 - DNA, 461 bp, Homo Sapiens
ttttttcataaaaagtttattgagcatccagtatgtgctaggcactctgctggatgctagtaatacaaagatgaagatgaaaacaacacaaaaacaaaccccacttccttacttacccctccccacccccaatttaaggcagatttggcttaagcctggcaagctggcccctcagggattcagcaccagggtatggcatgttctcatctcaccctaaccttcacctgtgcatctcaaggctgaccagcaggtactccttatccaagtcctgctgcctcttccaccttcttgagaaacttttcccctacatgcattatctcattatggatgaggcacctgggaagtttaggggagctgcgaaggcacacctgctcaaatgagcctggggaagtgccgagggacagggagctgatacaggcatgctgtggggttcagggcaaagggggcaaactagaaatgtc

SEQ ID NO: 3985 - DNA, 615 bp, Homo Sapiens
cgggcagtttaaaagagaggcgagtcaaacagatgatcggaatactaaggacaaaggaaggatgaaggactgaacaggcaagcaaccagaggaaaatcataaggaaaatcacacagcataggaagaatccactaaagtttcttctttggattactggacagtatgattaagtaaatgaaatccgcaccaaatggaagaatcatgtgagtactgacctcaatactatagtaactgtcaggcgtgggtgtcgaagttgataggtttctcatggacagttattgtaaattagcctttactgtggtacaaattctttataactgacttagtcatttgccgcttagcagtttcatatcactgaaatgaacacacatctggtggggcacaccagtgactttagattatgacactcacttcaaatgaactctatttaaaatggggtcctattttggacaacaggaacatcacgaatgtcacagtccagacagccttgaggtaaaacagtgtgctttggcttagaagggatccagtatattaattacatcttttattatgatcgtttatttctaagaatcatttctggctttctcaaaacaaactactactactgcgtccttc

SEQ ID NO: 3986 - DNA, 414 bp, Homo Sapiens
ggccagccctgcacccacctgtaccccttgcccacagccagaccacaacaccagattgtacctggatagctgggattggaagtgaggaataggtttctcaccccacagataacccaagacacaaatgtgcaattaaaaaatttattttagaccaccaaaacaaacaaaacaaaacagaaacaaataaaaaaaagaaaagaaaatagtgccaggtgtgggagctcactcctgtaatcccagcactttggaatgccgaggcgagtggatcacctgaggtcaggagtttgaaaccagcctggccagcatggtgaaacccatctctactaaaaatacaaaattaagcaggcgtggtggtgggcactgtaatcccagctacttgggaggctgaggcaggagaatggcgtgaacctggga

SEQ ID NO: 3987 - DNA, 4933 bp, Homo Sapiens
cagaaatgcaacaagtagtacccggggtctgcagagcgccccgcgccgcctgacttggccgggcgaagcccgcctgcagagacccgggccggcctccggacaaaggacggaggaggggctggacggcgctgcgaagtccgaaagaggccatttagcgactctggccaggctaaggggaatgcagaggagacacagagccggcgggccaagaggacgatccggccgctgcacgcagggcgggaggcgatggaggctgcccgcgccttgcgcctcctgctcgtggtgtgcggctgcctcgcgctcccgccgctggccgagcccgtgtgcccggagcgctgcgactgccagcatccccagcatctcctgtgcaccaacagggggctccgcgtagtgcccaagaccagctcgctgccgagcccccacgacgtgctcacctacagcctcggcggcaacttcataaccaacatcacggccttcgacttccaccgtctggggcagctcagacggctggacctgcagtacaaccagatccgctctctgcaccccaagaccttcgagaagctctcgcggctggaagagctgtacctggggaacaacctcttgcaggcgctcgccccgggcacgctggccccgctgcgcaagctgcgcatcctctacgccaacgggaacgagatcagccgcctaagccgcggctccttcgagggcctggagagtctagtcaagctgcggctggacgggaacgccctgggggcgctgccggacgcggtcttcgctcccttgggcaacctgctctacctacatctggagtccaaccggatccgctttctgggcaagaacgccttcgcccagctaggcaagctgcgcttcctcaacctctctgccaacgagctacagccctccctgcgccacgcggccaccttcgcaccgctgcgctccctctcctccctcatcctctcggccaacagcctgcagcacctcgggccgcgcatcttccagcacctgccacgtctcggcctgctctcgctcaggggcaaccagctcacgcacctcgcgcctgaggccttttggggcttggaggccctgcgcgagctgcgcctggagggtaatcggctgagccagctgccaactgcgctgctggagcctctgcacagcctggaggcgctggacctgagcggcaatgagctgtccgccctgcacccggccaccttcggccacctgggccggctgcgcgagctcagcctgcgcaacaacgcgctcagcgccctatccggggacatcttcgccgccagcccagccctttatcggctggatctagacggcaacggctggacctgcgactgccggctgcgaggcctgaagcgctggatgggcgactggcactcgcagggccggctcctcactgtcttcgtgcagtgtcgccaccccccggccctgcgaggcaaatacctggattacctggatgaccagcagctgcaaaatggatcctgcgcggatccctcgccctcagcttccctgaccgctgaccgcaggcggcagcccctacccacggccgcaggggaggagatgacgccacctgcaggtctcgcggaggagctgccgccgcagccgcagctccagcagcaggggcgatttctagctggggtggcctgggatggggccgccagggagctggtaggcaaccgcagcgctctaaggctgagtcggcggggcccgggcctccagcagcccagcccctccgtcgctgccgccgcgggcccggctccacagtccctagacctgcacaagaagccccagcggggccgtccgactcgggcagatcccgccctcgcggagcccaccccaacggcctctcctggctctgcgccatcgcccgccggcgacccctggcagcgcgcgacgaagcatcgtctgggcacggagcaccaggagcgtgccgcccagtccgacggtggggccgggctgccgccgctggtgtccgacccatgcgacttcaacaagttcattctgtgcaacctgacggtggaggcggtgggcgcagacagcgcctcggtgcgctgggccgtgcgcgagcaccgcagtccccggccgctgggcggcgcgcgcttccgcctgctctttgaccgctttggccagcagcccaagttccaccgcttcgtctacctgcctgagagcagcgactcggccacgctgcgcgagctgcgcggggacaccccctacctggtgtgcgtggagggcgtgcttgggggccgtgtctgccctgtggctccccgggaccactgcgcggggctggtcaccctaccggaggccgggagccggggcggcgtcgactaccagctgctgaccttggccctgctgacggtcaacgcgctgctggtgctcctggccttggcggcctgggcgtctcgctggctgcgtaggaaactgcgggctaggcggaagggcggggccccggtccacgttcggcacatgtactccacccgacggcccctgcgctccatgggcaccggcgtgtccgccgacttctcgggattccagtcgcaccggccacgcaccaccgtgtgcgcgctcagtgaggcggacctcatcgaattcccctgcgaccgcttcatggacagtgcgggcggcggcgcgggcggcagcctgagacgggaggaccgtctcctgcagcgatttgccgactaggtccagggcatatagagaccatctcattggccctaaggagccgcctctccgtgaggcccaccagcccacctcaggggaagtgccgttttgtgcacttgccagagaggccggtggggacagagggccaattcgggcaccatcccccaattcccaatactcgagaagtaaatggatggtacttggtggtcagagccagagtaggggacaaatggatggtgggatgctgaggtcggaggcttcgcttggaggctttgacacagctatgcgaatggcttttgtagcactgcaatgcagaagccaggctttgggggtagaaagggggtgcttgtgcccccaacatggccagaaatatttgggtgcatgctttttgtttgctcagtgtcaaacagagaagttttgtttctatttaaggaaggaacttattaccattacaaaggaggcttggccagggactccactggtttggtgatctctgccaagaagggggatgtaaacaggtggtaaagtttaacatacccgccaaggaactcgtttatgttggctgatagagcattcaggataccttaaagtttaataagagacgcatttttttttttcaaaaatgtgaaaagctctgacatttaacgaactgaccaatagactcaaggactgttttagttggactgggccattttattatgttccttttaatattaacagtacaagagcgcttgctgacttcgaggataactaagattacatactttctcaggagaaggctgcatgcaagacttctctgtcagggttgctcctgtggcttttttaattttatttttttaaacctatatatggaaaaggaaatttcaatgccagatttgataaaagaatgtgatgtatatgtagctgatgacccactggggaacaccagtgttccagttcacttaccacatctgtgacagtgtgtttagattggaataaatgtgatgcattacttcttatgtttttatcagtgacatggttgactgtgccctaattctcttgagttgcagttaagcaatgaaggttatttcctaatagggaagcaaaaggtgattgtcaattgatagtttaatgtttgaccacattagtgtctttatatgaaatagtagaggggaagaaattatagaaaacaaatgtgaaaaaaatacaccagtgggtatctgttctactaaaaccagaagattgttatgagtacttaaacctcactgtgaaataatgatatattttgcaattaatccctccccaactgagtgtcttactgtgttattaaatcttatcttttagttaatagttgcagtatttcttttaaatgtttttgttttaaacttaggggtaggatcctttatttgttcagttgtttccaactatttgggatactttcattccctgctatttatgaagtacatgtttatcactaagtgtagtggtttggtttacattaataattttatgtgtggtctaaaaatgcagtcactaagagaatgtacactgtggttatggtcacagtggttatggatttattggcagtggagtaccatggaggtcactgcaatggtgctaaggctgacagtggaatcttctgtttagggccttaagcccctgagggtcctggtgactcagggaatccatcacagccccgggtctttcaccccagttcactccttttatgtttggcctagattgacccatgcctgccctcttctcaacagctgagtagggaaccagccatctgaatgagctgatcgttgtttatgttcaaatgagtaaatgtccagaccacttaaaactacagctgcttttctggcagtctcgtctgcggggccaaaacttaataaaccacaggaaatagactgtcattcttagtttgctgccagggcttattttagattgagagcatactggtacatgagagcagtagtgttgtttgctcttattttcaaccagggagctatctggcaccttttgtgctcctggcttttttcaatcatagcactattgcatctcctagctatttcttttgcccagcagggtaatattgagtcccattgcaagtatggacaaggcctctggttctcctcaccacccaccttttcagccatagaacatcactgaaaatgcctaatgcctggatctgtgttctactttagtttcactgggaagtctttcagtgggagatgaataaatgttatacattgttatgtccagttatgtcaataaacccactaatagagat

SEQ ID NO: 3988 - DNA, 588 bp, Homo Sapiens
  misc_feature (5)..(5): n is a, c, g, or t
  misc_feature (9)..(10): n is a, c, g, or t
  misc_feature (12)..(12): n is a, c, g, or t
  misc_feature (20)..(20): n is a, c, g, or t
  misc_feature (56)..(56): n is a, c, g, or t
  misc_feature (60)..(61): n is a, c, g, or t
  misc_feature (130)..(130): n is a, c, g, or t
  misc_feature (147)..(147): n is a, c, g, or t
  misc_feature (150)..(150): n is a, c, g, or t
  misc_feature (184)..(184): n is a, c, g, or t
  misc_feature (187)..(187): n is a, c, g, or t
  misc_feature (194)..(194): n is a, c, g, or t
  misc_feature (200)..(200): n is a, c, g, or t
  misc_feature (245)..(245): n is a, c, g, or t
  misc_feature (259)..(259): n is a, c, g, or t
  misc_feature (263)..(263): n is a, c, g, or t
  misc_feature (266)..(266): n is a, c, g, or t
  misc_feature (268)..(268): n is a, c, g, or t
  misc_feature (279)..(279): n is a, c, g, or t
  misc_feature (287)..(287): n is a, c, g, or t
  misc_feature (289)..(289): n is a, c, g, or t
  misc_feature (311)..(311): n is a, c, g, or t
  misc_feature (317)..(317): n is a, c, g, or t
  misc_feature (324)..(324): n is a, c, g, or t
  misc_feature (327)..(327): n is a, c, g, or t
  misc_feature (329)..(330): n is a, c, g, or t
  misc_feature (334)..(334): n is a, c, g, or t
  misc_feature (344)..(344): n is a, c, g, or t
  misc_feature (356)..(356): n is a, c, g, or t
  misc_feature (365)..(365): n is a, c, g, or t
  misc_feature (371)..(371): n is a, c, g, or t
  misc_feature (374)..(374): n is a, c, g, or t
  misc_feature (380)..(380): n is a, c, g, or t
  misc_feature (389)..(390): n is a, c, g, or t
  misc_feature (392)..(392): n is a, c, g, or t
  misc_feature (395)..(395): n is a, c, g, or t
  misc_feature (403)..(403): n is a, c, g, or t
  misc_feature (413)..(413): n is a, c, g, or t
  misc_feature (418)..(419): n is a, c, g, or t
  misc_feature (424)..(424): n is a, c, g, or t
  misc_feature (429)..(429): n is a, c, g, or t
  misc_feature (433)..(433): n is a, c, g, or t
  misc_feature (444)..(444): n is a, c, g, or t
  misc_feature (447)..(448): n is a, c, g, or t
  misc_feature (454)..(454): n is a, c, g, or t
  misc_feature (457)..(457): n is a, c, g, or t
  misc_feature (460)..(460): n is a, c, g, or t
  misc_feature (462)..(462): n is a, c, g, or t
  misc_feature (465)..(465): n is a, c, g, or t
  misc_feature (467)..(467): n is a, c, g, or t
  misc_feature (474)..(475): n is a, c, g, or t
  misc_feature (478)..(478): n is a, c, g, or t
  misc_feature (482)..(482): n is a, c, g, or t
  misc_feature (484)..(484): n is a, c, g, or t
  misc_feature (490)..(490): n is a, c, g, or t
  misc_feature (493)..(494): n is a, c, g, or t
  misc_feature (497)..(497): n is a, c, g, or t
  misc_feature (501)..(501): n is a, c, g, or t
  misc_feature (506)..(506): n is a, c, g, or t
  misc_feature (513)..(513): n is a, c, g, or t
  misc_feature (533)..(534): n is a, c, g, or t
  misc_feature (536)..(536): n is a, c, g, or t
  misc_feature (539)..(542): n is a, c, g, or t
  misc_feature (544)..(544): n is a, c, g, or t
  misc_feature (550)..(550): n is a, c, g, or t
  misc_feature (554)..(554): n is a, c, g, or t
  misc_feature (556)..(556): n is a, c, g, or t
  misc_feature (560)..(560): n is a, c, g, or t
  misc_feature (563)..(564): n is a, c, g, or t
  misc_feature (569)..(569): n is a, c, g, or t
  misc_feature (571)..(572): n is a, c, g, or t
  misc_feature (576)..(576): n is a, c, g, or t
  misc_feature (580)..(580): n is a, c, g, or t
  misc_feature (583)..(585): n is a, c, g, or t
gcgantccnngngcaacggngcgaccctgcatgttgctcgaagtgcacccgtgtgnccgnntgcctgcgcatcaccaaagaagaagcgcactgtaccaaacaggaaaccagcaaaatgctggtgcgcggnctggcgcatgagatcangancccgctcggcggcattcgtggcgccgcgcagttnctngcccgtnagctgncggaggaacacggctccaacaatgttgcccgtctctggcgatgtncaacgtgcacgagngttnctngngcgacgtttgncaaactgntncgacggcccaaaaagccaaagngcgtgntatctanccntnngttncgcgacttanagaccctaaaanaatttgttnagaaanttnccattnaaaagttanntnaanatagccanggaactggancattnngtccnttganccanatttaagtccntanngaaccnttncgnanctngnggcaatnnttnaacnantagganttnntcnctgnacctnaatgaanccagtttttttttcccaatnnanaannnnantgcccnatanantaantanntggtntnnaatnttcnttnnntgg

SEQ ID NO: 3989 - DNA, 2977 bp, Homo Sapiens
tagcaagtttggcggctccaagccaggcgcgcctcaggatccaggctcatttgcttccacctagcttcggtgccccctgctaggcggggaccctcgagagcgatgccgatggatttgattttagttgtgtggttctgtgtgtgcactgccaggacagtggtgggctttgggatggaccctgaccttcagatggatatcgtcaccgagcttgaccttgtgaacaccacccttggagttgctcaggtgtctggaatgcacaatgccagcaaagcatttttatttcaagacatagaaagagagatccatgcagctcctcatgtgagtgagaaattaattcagctgttccagaacaagagtgaattcaccattttggccactgtacagcagaagccatccacttcaggagtgatactgtccattcgagaactggagcacagctattttgaactggagagcagtggcctgagggatgagattcggtatcactacatacacaatgggaagccaaggacagaggcacttccttaccgcatggcagatggacaatggcacaaggttgcactgtcagttagcgcctctcatctcctgctccatgtcgactgtaacaggatttatgagcgtgtgatagaccctccagataccaaccttcccccaggaatcaatttatggcttggccagcgcaaccaaaagcatggcttattcaaagggatcatccaagatgggaagatcatctttatgccgaatggatatataacacagtgtccaaatctaaatcacacttgcccaacctgcagtgatttcttaagcctggtgcaaggaataatggatttacaagagcttttggccaagatgactgcaaaactaaattatgcagagacaagacttagtcaattggaaaactgtcattgtgagaagacttgtcaagtgagtggactgctctatcgagatcaagactcttgggtagatggtgaccattgcaggaactgcacttgcaaaagtggtgccgtggaatgccgaaggatgtcctgtccccctctcaattgctccccagactccctcccagtacacattgctggccagtgctgtaaggtctgccgaccaaaatgtatctatggaggaaaagttcttgcagaaggccagcggattttaaccaagagctgtcgggaatgccgaggtggagttttagtaaaaattacagaaatgtgtcctcctttgaactgctcagaaaaggatcacattcttcctgagaatcagtgctgccgtgtctgtagaggtcataacttttgtgcagaaggacctaaatgtggtgaaaactcagagtgcaaaaactggaatacaaaagctacttgtgagtgcaagagtggttacatctctgtccagggagactctgcctactgtgaagatattgatgagtgtgcagctaagatgcattactgtcatgccaatactgtgtgtgtcaaccttcctgggttatatcgctgtgactgtgtcccaggatacattcgtgtggatgacttctcttgtacagaacacgatgaatgtggcagcggccagcacaactgtgatgagaatgccatctgcaccaacactgtccagggacacagctgcacctgcaaaccgggctacgtggggaacgggaccatctgcagagctttctgtgaagagggctgcagatacggtggaacgtgtgtggctcccaacaaatgtgtctgtccatctggattcacaggaagccactgcgagaaagatattgatgaatgttcagagggaatcattgagtgccacaaccattcccgctgcgttaacctgccagggtggtaccactgtgagtgcagaagcggtttccatgacgatgggacctattcactgtccggggagtcctgtattgacattgatgaatgtgccttaagaactcacacctgttggaacgattctgcctgcatcaacctggcagggggttttgactgtctctgcccctctgggccctcctgctctggtgactgtcctcatgaaggggggctgaagcacaatggccaggtgtggaccttgaaagaagacaggtgttctgtctgctcctgcaaggatggcaagatattctgccgacggacagcttgtgattgccagaatccaagtgctgacctattctgttgcccagaatgtgacaccagagtcacaagtcaatgtttagaccaaaatggtcacaagctgtatcgaagtggagacaattggacccatagctgtcagcagtgtcggtgtctggaaggagaggtagattgctggccactcacttgccccaacttgagctgtgagtatacagctatcttagaaggggaatgttgtccccgctgtgtcagtgacccctgcctagctgataacatcacctatgacatcagaaaaacttgcctggacagctatggtgtttcacggcttagtggctcagtgtggacgatggctggatctccctgcacaacctgtaaatgcaagaatggaagagtctgttgttctgtggattttgagtgtcttcaaaataattgaagtatttacagtggactcaacgcagaagaatggacgaaatgaccatccaacgtgattaaggataggaatcggtagtttggtttttttgtttgttttgtttttttaaccacagataattgccaaagtttccacctgaggacggtgtttcggaggttgccttttggacctaccactttgctcattcttgctaacctagtctaggtgacctacagtgccgtgcatttaagtcaatggttgttaaaagaagtttcccgtgttgtaaatcatgtttcccttatcagatcatttgcaaatacatttaaatgatctcatggtaaatggttgatgtattttttgggtttattttgtgtactaaccataatagagagagactcagctccttttatttattttgttgatttatggatcaaattctaaaataaagttgcctgttgtgactttt

SEQ ID NO: 3990 - DNA, 286 bp, Homo Sapiens
  misc_feature (36)..(36): n is a, c, g, or t
  misc_feature (51)..(51): n is a, c, g, or t
  misc_feature (132)..(132): n is a, c, g, or t
  misc_feature (139)..(139): n is a, c, g, or t
  misc_feature (189)..(189): n is a, c, g, or t
ggcgagcgggctggcgtgcggcgccgttgcgggcgngagcggctgcaacgncggtgcctgaggagcgatgccgagggaaatcatcaccctacagttgggccagtgcggcaatcagattgggttcgagttctngaaacanctgtgcgccgagcatggtatcagccccgagggcatcgtggaggagttcgncaccgagggcactgaccgcaaggacgtctttttctaccaggcagacgatgagcactacatcccccgggccgtgctgctggtacttggaaccccgggt

SEQ ID NO: 3991 - DNA, 365 bp, Homo Sapiens
  misc_feature (302)..(302): n is a, c, g, or t
  misc_feature (354)..(354): n is a, c, g, or t
agaagggacacaccagcacagtctggtaggctacagcagcaagtctctaaagaaaggctgagaacacccagaacaggagagttcaggtccaggatggccagcctgttccggtcctatctgccagcaatctggctgctgctgagccaactccttagagaaagcctagcagcagagctgaggggatgtggtccccgatttgggaaaacacttgctgtcatattgccccatgcctgaggaagacatttcaccaccaccccagggagggtggcttgctgggattttgggacgtccccaaagaaatnggtgttcaaccttcccaacaacaaagatgggacaagcctttgggtacggacnttcaggatttt

SEQ ID NO: 3992 - DNA, 1041 bp, Homo Sapiens
gagacatatatcataagttgggggcgtgtgaggcggggcatgaaggcgggctctacatgacttaacccttgcttggcatggccttaggtcctgtttacaatttggtatcttattgccacagtgtctgttctgtccatctcatgatccctattttgttcattcatgctcggcagctgtgtctaaaccataaagggatggggtataacaagttgcatctgacctcccaacccatcagggccaggaattgttttaagttttttctgagattccctcggccacgaggtggcatctgttcagtcggtggggttttaggatttttagtttacataactgatttgataatccaggcatttgttacagcgtatccaggtgagattatgactcaactatttagcacctccatctcaacatgtacttccccaacggtcatggcagaggaagagagggctggaaaattgagcactggcaatgacatattttgccccaaaactgaccccttcacatttcttttttcttttttgagacggagtcctgctctgtcatccaggctggagtgtagtggcccaatctcagttcactgcaaacctccacctcccgggttcaagcgattctcctgcctcagcctctgagtagctgggattatgagcacgccacacacccggactaatttttgtattttagtagagacgggtttcaccatgtggccaggctggtctcaattcttcactcagtaatcaacccacctcggctccaaaatgctgggattaccagtgtgagccacgcgccccggcctgtattccttcacattcttagccagagctgagcttgttgccagacctgtcttgaaggagcaaggagggtatttacattagcagtcaccagtggacaggtgaccgtggacttgtccttcggagcgtgtgccaatctcggatcggccggaacgcgtgtgtcactgtctatttgtcaaagcaagctacgttcgcgtaatttcgccggcagatcgagaggcaggttggagaacagagctgaagacaactaacg

SEQ ID NO: 3993 - DNA, 966 bp, Homo Sapiens
aatgaattaatgatagttggggttagaatacataaaaggaaattatactagaaactacaattttgaaaataaagccaatataacaggaacaaaatatacataacatgagaggaatgtttgatttttgacccataatgcattccttatctttacaattaacctaaatgtctgttagaacaaaactgtataccttggtctaacttcagcgctttcttttaaaaaagcaacaacactctagaacactttttcttttgctttgagatatttgagattcacacatttgttcaagtacacagattctgattcaatagcagatctacagatcttgttatctcttaatatcttgagtagcatgtacttctgagcaagtactatctgaaattctaaaactgctgattcttgaaataaaatttacttcaggttgtgggtttttcaataacttgagatgaaagtaaaattcacccactgcccccctcccccaggaacaaagagctcttcttaaaagtatagaaactcaagtctatctttctactctaaagaacatttcctactaacatttctggtaaggcaataaatgctccagaataatcttcatactacgcttgcaaagattacactgtttaatatcaataacaaaaaacaagcagcaaatcaacagagacaaacgaaagaataacgagacgcttcgaaatcttcagggcctaaaactatgcactaagaagcacacgtaaaccgggcactatcttccttcgcaacctgactgtaaaaatgtaatatacttatccagataactgtccgtgccttatttaacaactacaggcttaagtgaccttacgagcactgttacaaggcaactacgactcgccggagggtccattcttctaaacattaattcccacagaggtaattaataacacagagatgattatagcacttcggacactaagcacagtgcactctacctct

SEQ ID NO: 3994 - DNA, 544 bp, Homo Sapiens
  misc_feature (492)..(492): n is a, c, g, or t
atccttaattaaattaatccccccccccccggcaactcgctcggccgccgccatcttgcgagctcgtcgtactgaccgagcggggaggctgtcttgaggcggcaccgctcaccgacaccgaggcggactggcagccctgagcgtcgcagtcatgccggccggacccgtgcaggcggtgcccccgccgccgcccgtgcccacggagcccaaacagcccacagaagaagaagcatcttcaaaggaggattctgcaccttctaagccagttgtggggattatttaccctcctccagaggtcagaaatattgttgacaagactgccagctttgtggccagaaacgggcctgaatttgaagctaggatccgacagaacgagatcaacaaccccaagttcaactttctgaaccccaatgacccttaccatgcctactaccgccacaaggtcagcgagttcaaggaagggaaggctcaggagccgtccgccgccatccncaaggtcatgcagcagcagcagcagaccacccagcagcagctgccccagagg

SEQ ID NO: 3995 - DNA, 805 bp, Homo Sapiens
  misc_feature (7)..(7): n is a, c, g, or t
  misc_feature (29)..(29): n is a, c, g, or t
  misc_feature (90)..(90): n is a, c, g, or t
  misc_feature (117)..(117): n is a, c, g, or t
  misc_feature (634)..(634): n is a, c, g, or t
  misc_feature (654)..(654): n is a, c, g, or t
  misc_feature (692)..(692): n is a, c, g, or t
  misc_feature (713)..(713): n is a, c, g, or t
  misc_feature (725)..(725): n is a, c, g, or t
  misc_feature (767)..(767): n is a, c, g, or t
gaagtgncatggcaatgtctgcatatttngtaatgacacgccaggaatatgtttatccagaagccagagacagacaatacttactatttntccataaaggagccaaaaagtcacgtnttgacctagagaaatacaatcaactcaaggatgcaattgctcagaaatggaccttaagagactgagagacccattacaagtacatctgcctctccgacaattggtgaaaaagattgatctgcaaaaagcctctgaatcctggcagaaggaacacctgtttgcctttttaattaaagcattgcaggtggaagctgggagccatgtggggggtagagcgtttttacctttaattataaaacaaaaacagaaaggatctgagggaagaagggaatgttaaaacctgaggatcaggcattgtggaatataagctcaaagggcttagtgaatattgtcttaaccaagtatctcagtttctggatgaaaatgatgcagctatatagttggagagattcataaagagaaaacaatgctgggggtgttcgcctcttgcatcttctttggagagtcagcaaaagagtaacacaccagcaccccactcgactctatttggttttaatttaactgtccctattggggncataggagtaaataaatatnctagaaaagcaaattctcatgatatgctaaaatatcantagcatttattttaaattggncccagtctctgnagagttaccaggaatctttccttccaggatccctttactgancacctacctgtacctcttggctacactcattttttcca

SEQ ID NO: 3996 - DNA, 295 bp, Homo Sapiens
gtgggcctggtggccgcgcatcgtcgccctcgctcagtgagtgcagggacaggctgctgtgctctgtcgcgggtgccagcaggtgtcgcccctcggttcccagggcccgcgagcgccgccgggcggccttcacccagatgcacttggtgccagtcaggatctccttcctctctttgtgggacaaggggatctccgacaggttctcactgctgtcaggggaagagttgatccagctgcccaggctgtcctgagccggggcctcctgcgtcaccaggctgccgagctggatgggagg

SEQ ID NO: 3997 - DNA, 465 bp, Homo Sapiens
cctgagagccctgaagggacgggagaaaccagccgcccccacagcgcagaaatctttgagttcgctgcagctcgactcctcagacccctcggtcaccagtccccttgattggctagaggaggggatccactggcaatactcgcccccagacctaaaattggagcttaaggccaagggaagtgctttggaccctgcagcacaggcttttctcttagagcagcagctgtggggagtggagctgttgcccagtagccttcaatcccgtctgtactctaaccgggaacttggctcttcgccctctgggcttctaaacattcaacgcatagacaatttcagtgtggtatcctatttgctgaacccttcctacctggactgcttttctaggctagaagtcagctatcagaaacagtgatggaaatagcgaggtagtcggcttccagacacttaaccccagagagcagcttg

SEQ ID NO: 3998 - DNA, 2239 bp, Homo Sapiens
tagcgagggacgcgtaggtgtcttcataagatgccggggcagcggcgcgcgctttcccccaagatggcgtccatgcgggagagcgacacgggcctgtggctgcacaacaagctgggggccacggacgagctgtgggcgccgcccagcatcgcgtccctgctcacggccgcggtcatcgacaacatccgtctctgcttccatggcctctcgtcggcagtgaagctcaagttgctactcgggacgctgcacctcccgcgccgcacggtggacgagatgaggggcgccctaatggagatcatccagctcgccagcctcgactcggacccctgggtgctcatggtcgccgacatcttgaagtcctttccggacacaggctcgcttaacctggagctggaggagcagaatcccaacgttcaggatattttgggagaacttagagaaaaggtgggtgagtgtgaagcgtctgccatgctgccactggagtgccagtacttgaacaaaaacgccctgacgaccctcgcgggacccctcactcccccggtgaagcattttcagttaaagcggaaacccaagagcgccacgctgcgggcggagctgctgcagaagtccacggagaccgcccagcagttgaagcggagcgccggggtgcccttccacgccaagggccgggggctgctgcggaagatggacaccaccaccccactcaaaggcatcccgaagcaggcgcccttcagaagccccacggcgcccagcgtcttcagccccacagggaaccggacccccatcccgccttccaggacgctgctgcggaaggaacgaggtgtgaagctgctggacatctctgagctggatatggttggcgctggccgagaggcgaagcggagaaggaagactctcgatgcggaggtggtggagaagccggccaaggaggaaacggtggtggagaacgccaccccggactacgcagccggcctggtgtccacgcagaaacttgggtccctgaacgatgagcctgcgctgccctccacgagctaccttccctccacgcccagcgtggttcccgcctcctcctacatccccagctccgagacacccccagccccatcttcccgggaagccagccgcccaccagaggagcccagcgccccgagccccacgttgccagcgcagttcaagcagcgggcgcccatgtacaacagcggcctgagccctgccacacccacgcctgcggcgcccacctcgcctctgacacccaccacacctccggctgtcgcccctaccactcagacacccccggttgccatggtggccccgcagacccaggcccctgctcagcagcagcctaagaagaacctgtccctcacgagagagcagatgttcgctgcccaggagatgttcaagacggccaacaaagtcacgcggcccgagaaggccctcatcctgggcttcatggccggctcccgagagaacccgtgccaggagcagggggacgtgatccagatcaagctgagcgagcacacggaggacctgcccaaggcggacggccagggtagcacaaccatgctggtggacacagtgtttgagatgaactatgccacgggccagtggacgcgcttcaagaagtacaagcccatgaccaatgtgtcctagaaccacctgcctcacagctggccgtcacttgtgggggtccacgggacgatggctttgccagcttaaagtaaccggatggcggacacctggcccccgaggtcccccggccgccgccctgctgctgacccagcctgttttaagttctggatgcatttctctggggtatttggggcttatttttaaaattttaatatgggttcttttttgtgtgatttaagacactttttggactcaacgttacatttttgaatgtagtaagtaaattaaccaaaaaagttacaacttcctaattttagtgacagctctgcctgttagactcttactttttaaaatcttttctattttccctcgctggggcagtgccctcctacccccagggttgaggggaccaaggtggcacggtggtactgggggtgcggcagggacacccgaccacaccagagcgtgggagacggtgggcattgtcccctgcctgtgcctgcctgggagttttgtattcatcttttgtatagttgtggacatttaagacagtctttgggtacctattttcattgtaaaactatctgaaccattaaagtcgagcttttct

SEQ ID NO: 3999 - DNA, 483 bp, Homo Sapiens
  misc_feature (7)..(7): n is a, c, g, or t
  misc_feature (15)..(15): n is a, c, g, or t
  misc_feature (29)..(29): n is a, c, g, or t
  misc_feature (51)..(51): n is a, c, g, or t
  misc_feature (72)..(72): n is a, c, g, or t
  misc_feature (111)..(111): n is a, c, g, or t
  misc_feature (226)..(226): n is a, c, g, or t
  misc_feature (378)..(378): n is a, c, g, or t
  misc_feature (472)..(472): n is a, c, g, or t
tcagttngggttggngttttaaccttccnttaagcttcaacttcattcaangtacacgaacgcagcaaggtntaccagcataactatgtcacagggttaaatgagaggatncatataaagctccaagcaccttactgggcacatggcaagtagtcaacattttctagacacttgggattagactaggtttctcaggcagttaatctcaaataatgcctctgttttnctcttcatgaatattcctttcatacgtgagctacatagaactgggcttccccagcgttctctacagctaccgcacttggactccttcccatcagaactcagatatgtgaagcaattcatcacagtatatggggcagcagtcccgccaggagnctgacagatagccttcccctccttgagaactctgtggaagtgattccaaatgctcttggagacagtgactgtgtctccactttggtaattaatngcccttcccat

SEQ ID NO: 4000 - DNA, 292 bp, Homo Sapiens
ctggccctaaactctgggactggcgggcggtcaggcggcacagggggaatcccgggggcctaaggaggttgtctcagtttttgtcagcatctccaccccgaggtggtttgaactttgagccttttgtagtcctgatgaataatttcattttcctcaagtttatgacactcggaacgtcaaggactggaggtttgttgcaattttgagacctgtcggcactgtgcagagatcagagtactatgagacagagattaaaattgctttcagaggaaagacagatgacaggcatatt

SEQ ID NO: 4001 - DNA, 274 bp, Homo Sapiens
  misc_feature (228)..(228): n is a, c, g, or t
  misc_feature (247)..(247): n is a, c, g, or t
  misc_feature (252)..(252): n is a, c, g, or t
  misc_feature (257)..(257): n is a, c, g, or t
gggtgggtaggccgatcgggcgttggtccccggcctcccgatccgacggaatttggaaatcccggggctattcatacattgagcttttaggagcggaggagaaaagccaccaccctgacgatcccggctctcgctccaccttcactcaggtggcccggcagcggaagtgacgaacgcggaagtggtttttctgttgccgaggggacgggcctggcagatgccaacatngcagcggttggggcttgtntgttncaccncggcgtcccgggccaat

SEQ ID NO: 4002 - DNA, 491 bp, Homo Sapiens
agagctgtgctttgtgttgcatgcctgttgtcctagatacctgggaggctgaggtgggaggattgcttgaggccaagagttcgaggctgcagtaggctataactgcagctgtgaaaagccactgacctccagtctgggcaacaaagcaagaccctatctcttaaaaaacaaacaaacaaacaaaagaccgaaaaaaaaaaaaaaaccaactttttttgtcttttggagaatggcaaatagaaatcaatttctgggctgggcgtggaatacgttttaataaagtaaaagttactgttaataattaggcacgtaactcctggaccctgaaacaattacgctgtcttctgtaaaacaggaaaatatcaggcatcacaggagaagtatgatcccatttctattttttttaaatgtctgtgaacgtgtgtaatcacagaaaaactctggaaggttgtcagaaaaacgttaacatacccctgggggtatgaaaaaag

SEQ ID NO: 4003 - DNA, 369 bp, Homo Sapiens
ttttttttttttttttttttttttttttttttttttttttttttcccatgctcccactggtttatttcaaccccaaatattttccaacagaagtagaaaacagggcatattaaacaaacaacaaaccaaccaaccaacaaaactaaaagtgatactgacacagttcaggtgataagcaggaaaatgggattatcagacaccggctctttggcacacactgcgaagtcagcccctctgcccagtctggaaaagcaacggcgtaagtcaatgtgatgaagaggtccagcctctcgtcgggaacttggccgcaaaatgggtaatgcttttctgtaggatgtggattgtagctggtgttgcaatggtgttttg

SEQ ID NO: 4004 - DNA, 526 bp, Homo Sapiens
  misc_feature (473)..(473): n is a, c, g, or t
  misc_feature (483)..(483): n is a, c, g, or t
  misc_feature (498)..(498): n is a, c, g, or t
actgagaaagggacagggctgtcaattaaatctgctccaaagaatttgtattgaagattggcctaagacctgcaaactccatctataactagaaaatacgaaaaaggaaaattaaaaaaaaaagttgcctgagttaagtcatctttccttgtagcaaatggctttgtccaaatcctttctgcatggaatagcttaaggaaaacaaactccgctttctgatgaacaagatatttttgtacacatttatttcttgttaataacctgaggtcagaccactcatttgctgaagccataactgaccttcaccaaataaatgttgtaaagaacctaggggagggttggggagagactgagagggaggaaaatccaaggtgttcatggagctatagcaacacaggcaggagcaagttgttggaaactggatgcttttcctgcatcccaaatatggacttttaaaaggctagtattttatngatggttcgntttattatggattanaaaggtatttaggtttaaatgaggacct

SEQ ID NO: 4005 - DNA, 298 bp, Homo Sapiens
  misc_feature (72)..(72): n is a, c, g, or t
  misc_feature (76)..(76): n is a, c, g, or t
  misc_feature (78)..(78): n is a, c, g, or t
gaagaatccgctatcggctgtctgcacaaccggaatcatgtcgagtttggcggtgagagacccggcaatggntcgntnactgctttccgtgttcgtggggaacattccatatgaggcaactgaggagcagttaaaggacattttctcggaggttggttctgttgtcagtttccggctggtatacgatagagagacgggaaaacccaagggctatggcttctgcgaataccaagaccaggagaccgcgcttagtgccatgcggaacctcaatgggcgggagttcagtgggagagcgctt

SEQ ID NO: 4006 - DNA, 2091 bp, Homo Sapiens
gaaggggacagaaggcagttcacctctgctcccgacagcctgggaacccgcaagagccccagcatttgaagtctggtcttgtgaaaccccaccctcctctggctgtgtgattgaatgggatgccctcgaggtacacctcacctgagagggttttgggcagatcagcagtaaggtgttaaattttagaagcctgaaaactccagaagagaaaggccaaccaactcaaacttgaagacatgaaatccccaaggagaaccactttgtgcctcatgtttattgtgatttattcttccaaagctgcactgaactggaattacgagtctactattcatcctttgagtcttcatgaacatgaaccagctggtgaagaggcactgaggcaaaaacgagccgttgccacaaaaagtcctacggctgaagaatacactgttaatattgagatcagttttgaaaatgcatccttcctggatcctatcaaagcctacttgaacagcctcagttttccaattcatgggaataacactgaccaaattactgacattttgagcataaatgtgacaacagtctgcagacctgctggaaatgaaatctggtgctcctgcgagacaggttatgggtggcctcgggaaaggtgtcttcacaatctcatttgtcaagagcgtgacgtcttcctcccagggcaccattgcagttgccttaaagaactgcctcccaatggacctttttgcctgcttcaggaagatgttaccctgaacatgagagtcagactaaatgtaggctttcaagaagacctcatgaacacttcctccgccctctataggtcctacaagaccgacttggaaacagcgttccggaagggttacggaattttaccaggcttcaagggcgtgactgtgacagggttcaagtctggaagtgtggttgtgacatatgaagtcaagactacaccaccatcacttgagttaatacataaagccaatgaacaagttgtacagagcctcaatcagacctacaaaatggactacaactcctttcaagcagttactatcaatgaaagcaatttctttgtcacaccagaaatcatctttgaaggggacacagtcagtctggtgtgtgaaaaggaagttttgtcctccaatgtgtcttggcgctatgaagaacagcagttggaaatccagaacagcagcagattctcgatttacaccgcacttttcaacaacatgacttcggtgtccaagctcaccatccacaacatcactccaggtgatgcaggtgaatatgtttgcaaactgatattagacatttttgaatatgagtgcaagaagaaaatagatgttatgcccatccaaattttggcaaatgaagaaatgaaggtgatgtgcgacaacaatcctgtatctttgaactgctgcagtcagggtaatgttaattggagcaaagtagaatggaagcaggaaggaaaaataaatattccaggaacccctgagacagacatagattctagctgcagcagatacaccctcaaggctgatggaacccagtgcccaagcgggtcgtctggaacaacagtcatctacacttgtgagttcatcagtgcctatggagccagaggcagtgcaaacataaaagtgacattcatctctgtggccaatctaacaataaccccggacccaatttctgtttctgagggacaaaacttttctataaaatgcatcagtgatgtgagtaactatgatgaggtttattggaacacttctgctggaattaaaatataccaaagattttataccacgaggaggtatcttgatggagcagaatcagtactgacagtcaagacctcgaccagggagtggaatggaacctatcactgcatatttagatataagaattcatacagtattgcaaccaaagacgtcattgttcacccgctgcctctaaagctgaacatcatgattgatcctttggaagctactgtttcatgcagtggttcccatcacatcaagtgctgcatagaggaggatggagactacaaagttactttccatatgggttcctcatcccttcctgctgtaaaaaaaaaaaaaaaaaaaa

SEQ ID NO: 4007 - DNA, 735 bp, Homo Sapiens
gtacgagtggtgccatggtgatgcactctccctccccccgaggtaaatgagaagagtggccaagtgagtgttctgtttctgctgtgccaaaaagtggggggtatgtgccatcaccaggttggactatgccaggtgtatctgcgtctaagagacccttgaggccatgctccccaatgctctggtggagtaacaactgggctatcccccgtcagggcggcaccctggtcaccatgccaaacctcagtatactccctccccgtccttccctgtctgaacgctaggatcttgctcctgaagctccaggatgcctgcacttaccactgagaagctgctgggggatgttggactagatggaaatgaagaaggcatgggtgggactgatgggctcagtggggagcatgggccatggcacactgagccagacatgtcatgtcgtgagccccagattcgtggccatcaggtaggcaggagcaccccgcagatccaagatgatcaggcagcccttttgggctgtcctctgtggcacggggtctgcagagctccttcttgaggttgcggaaacagtcgtcataccttgtttgattttcctggcgggccaatcactagggatctgggagctcaccaaaaacaagagcttacattttaattgtgttgcacaccttaccccataatgtctttagtaccccaaagatcttgggaaatgcctgggggttgaaaccggagttgcaaccgtaa

SEQ ID NO: 4008 - DNA, 229 bp, Homo Sapiens
  misc_feature (92)..(92): n is a, c, g, or t
  misc_feature (217)..(217): n is a, c, g, or t
  misc_feature (223)..(223): n is a, c, g, or t
gagatttttaaacctttaatcttgtgttggtaggattaactgacatcaaagtgattgattatatagtcttaaaattctagcaagtgtttgtnattgctaacactggtctagagaggtaattaatattactgaatgcctcccatgtataaacctatcaagacaggttgggcaatatggtgagcagttccccaatggacagtgcagcttatgttatagnagcagncaatta

SEQ ID NO: 4009 - DNA, 420 bp, Homo Sapiens
gtctgtttaatatctttaataattatatcatttctaaagctttccacaaaagggtattacagttttttaacttattgcaaacatatcttaaaaaaaaaaagtcagccttaatactgaaactataacatgaattttaaattatggacacataccataaaacacaatgaagaacattttatttaaataaaaagagaatatttcgctaagcaataaacccaacatatttcttttctctccatatctacatccaatggtgatattttataggctagtttctaaacagatgcaaatttttacaaagcgatgaaagccacgttttgctcaggaatactacggttcacataccatataggttgttttacagcagatactagtttgccaagcttcagatggcaaaatgctaagttgtgaattgagtat

SEQ ID NO: 4010 - DNA, 424 bp, Homo Sapiens
cttgtcaacaaagctctgtgtgttctcagaagggaccgttcccatgattcctaacaggaatatttgcttcatttctccattttaggggaggttatttccatttccattgaatttttttacgaagacaccattggttttctcagatgaaacttctcttactgaaaacccagcacctaacttggctgtgttttcctggagagcaggcgtgtttcacgtgccagaaagcacatcttctgtgttaggcacaagcatgctgtgccattgtttttacctggtctcaagacaactggtctgctggtttctaaacttggttgttcattagactctcctggagtatttgttaaaatacagattcacattcagtagagctggggtaaggcctaggaatctgcattttcaacaaccattgcaacacggtctctca

SEQ ID NO: 4011 - DNA, 1984 bp, Homo Sapiens
cccgagagcgcccattcacccccctcacccacctccccgcgttcccacttccccgcactctgacccggccggacgcccctcccctatcttgccgcccgccccctccagggggctctgctcccaccccagggagcccatccgacctctgcttgacttcccgccgcttccttcaggggcctcggctcatcgggtgcccctccccaaacttccaacccgtttgctccaggagttcctgccccatccccgagggcgcccaaatagccacactgtgtcctcctgtagtcgccgccccctgacctagcgcgacccagcgcccccgcccatgtccccccactcacctcccccggggggcgtggtgagtcgcggtctgttctcacggacggtccccgtccagcctgcgcttcgccggggccctcatctgctttcccgccaccctatcactcccttgccgtccaccctcggtcctcatggtcccagagccgggcccaaccgccaatagcaccccggcctggggggcagggccgccgtcggccccggggggcagcggctgggtggcggccgcgctgtgcgtggtcatcgcgctgacggcggcggccaactcgctgctgatcgcgctcatctgcactcagcccgcgctgcgcaacacgtccaacttcttcctggtgtcgctcttcacgtctgacctgatggtggggctggtggtgatgccgccggccatgctgaacgcgctgtacgggcgctgggtgctggcgcgcggcctctgcctgctctggaccgccttcgacgtgatgtgctgcagcgcctccatcctcaacctctgcctcatcagcctggaccgctacctgctcatcctctcgccgctgcgctacaagctgcgcatgacgcccctgcgtgccctggccctagtcctgggcgcctggagcctcgccgctctcgcctccttcctgcccctgctgctgggctggcacgagctgggccacgcacggccacccgtccctggccagtgccgcctgctggccagcctgccttttgtccttgtggcgtcgggcctcaccttcttcctgccctcgggtgccatatgcttcacctactgcaggatcctgctagctgcccgcaagcaggccgtgcaggtggcctccctcaccaccggcatggccagtcaggcctcggagacgctgcaggtgcccaggaccccacgcccaggggtggagtctgctgacagcaggcgtctagccacgaagcacagcaggaaggccctgaaggccagcctgacgctgggcatcctgctgggcatgttctttgtgacctggttgcccttctttgtggccaacatagtccaggccgtgtgcgactgcatctccccaggcctcttcgatgtcctcacatggctgggttactgtaacagcaccatgaaccccatcatctacccactcttcatgcgggacttcaagcgggcgctgggcaggttcctgccatgtccacgctgtccccgggagcgccaggccagcctggcctcgccatcactgcgcacctctcacagcggcccccggcccggccttagcctacagcaggtgctgccgctgcccctgccgccggactcagattcggactcagacgcaggctcaggcggctcctcgggcctgcggctcacggcccagctgctgcttcctggcgaggccacccaggaccccccgctgcccaccagggccgctgccgccgtcaatttcttcaacatcgaccccgcggagcccgagctgcggccgcatccacttggcatccccacgaactgacccgggcttggggctggccaatggggagctggattgagcagaacccagaccctgagtccttgggccagctcttggctaagaccaggaggctgcaagtctcctagaagccctctgagctccagaggggtgcgcagagctgaccccctgctgccatctccaggccccttacctgcagggatcatagctgactcaga

SEQ ID NO: 4012 - DNA, 467 bp, Homo Sapiens
  misc_feature (255)..(255): n is a, c, g, or t
  misc_feature (386)..(386): n is a, c, g, or t
taactagaaatagaaatttattcagcctgatatagatcatttatgaaaaactaacagcaaacatcatcctcaatggtaaaaggctgaaggatttttctctaaggttaggaacaaggcaaatgcctgctcttgccactctattcagcatagtgctgggagttctagacagagcagttaggcaaggaaaagaaatctaaggcatccaaattggaaaggaggaagtaaaattatctctgtttgccaatgatatgattntatatgtatgaacagaaaaccctaaagattccaccaagggccaggtacggtggctcacgcctttaatcccagcactttgggaggccgaggtgggaggattgcttgaggccaggagttcaagactagcctgngcaacatagtgagaccccatctctacaaaataaaaaaatagccggggcatggtgctgtgtgcctatagtcctagctactca

SEQ ID NO: 4013 - DNA, 4149 bp, Homo Sapiens
caggactggagggcttgaggaatgtggtggtccctctcttcgttgtttctgcccactgaggttgtgctttctcagggatatgcactctgcacttccattcctgcagtgaaattaactcgagcttggcagctcgagaggagaatgtggccactttccgaggctcagagtatctgtgctacgacctgtctcagaacccgatccagagcagcagtgatgaaatcaccctctcctttaagacctggcagcgtaacggcctcatcctgcacacgggcaagtcggctgactatgtcaacctggctctgaaggatggtgcggtctccttggtcattaacctggggtccggggcctttgaggccattgtggagccagtgaatggaaaattcaacgacaacgcctggcatgatgtcaaagtgacacgcaacctccggcaggtgacaatctctgtggatggcattcttaccacgacgggctacactcaagaggactataccatgctgggctcggacgacttcttctatgtaggaggaagcccaagtaccgctgacttgcctggctcccctgtcagcaacaacttcatgggctgccttaaagaggttgtttataagaataatgacatccgtctggagctgtctcgcctggcccggattgcggacaccaagatgaaaatctatggcgaagttgtgtttaagtgtgagaatgtggccacactggaccccatcaactttgagaccccagaggcttacatcagcttgcccaagtggaacactaaacgtatgggctccatctcctttgacttccgcaccacagagcccaatggcctgatcctcttcactcatggaaagccccaagagaggaaggatgctcggagccagaagaatacaaaagtagacttctttgccgtggaactcctcgatggcaacctgtacttgctgcttgacatgggctctggcaccatcaaagtgaaagccactcagaagaaagccaatgatggggaatggtaccatgtggacattcagcgagatggcagatcaggtactatatcagtgaacagcaggcgcacgccattcaccgccagtggggagagcgagatcctggacctggaaggagacatgtacctgggagggctgccggagaaccgtgctggccttattctccccaccgagctgtggactgccatgctcaactatggctacgtgggctgcatccgcgacctattcattgatgggcgcagcaagaacattcgacagctggcagagatgcagaatgctgcgggtgtcaagtcctcctgttcacggatgagtgccaagcagtgtgacagctacccctgcaagaataatgctgtgtgcaaggacggctggaaccgcttcatctgcgactgcaccggcaccggatactggggaagaacctgcgaaagggaggcatccatcctgagctatgatggtagcatgtacatgaagatcatcatgcccatggtcatgcatactgaggcagaggatgtgtccttccgcttcatgtcccagcgagcttatgggctgctggtggctacgacctccagggactctgccgacaccctgcgtctggagctggatggggggcgtgtcaagctcatggttaacttagactgtatcaggataaactgtaactccagcaaaggaccagagaccttgtatgcagggcagaagctcaatgacaacgagtggcacaccgttcgggtggtgcggagaggaaaaagccttaagttaaccgtggatgatgatgtggctgagggtacaatggtgggagaccatacccgtttggagttccacaacattgaaacgggaatcatgactgagaaacgctacatctccgttgtcccctccagctttattggccatctgcagagcctcatgtttaatggccttctctacattgacttgtgcaaaaatggtgacattgattattgtgagctgaaggctcgttttggactgaggaacatcatcgctgaccctgtcacctttaagaccaagagcagctacctgagccttgccactcttcaggcttacacctccatgcacctcttcttccagttcaagaccacctcaccagatggcttcattctcttcaatagtggtgatggcaatgacttcattgcagtcgagcttgtcaaggggtatatacactacgtttttgacctcggaaacggtcccaatgtgatcaaaggcaacagtgaccgccccctgaatgacaaccagtggcacaatgtcgtcatcactcgggacaatagtaacactcatagcctgaaagtggacaccaaagtggtcactcaggttatcaatggtgccaaaaatctggatttgaaaggtgatctctatatggctggtctggcccaaggcatgtacagcaacctcccaaagctcgtggcctctcgagatggctttcagggctgtctagcatcagtggacttgaatggacgcctgccagacctcatcaatgatgctcttcatcggagcggacagatcaagcgtggctgtgaaggacccagtaccacctgccaggaagattcatgtgccaaccagggggtctgcatgcaacaatgggagggcttcacctgtgattgttctatgacctcttattctggaaaccagtgcaatgatcctggcgctacgtacatctttgggaaaagtggtgggcttatcctctacacctggccagccaatgacaggcccagcacgcggtctgaccgccttgccgtgggcttcagcaccactgtgaaggatggcatcttggtccgcatcgacagtgctccaggacttggtgacttcctccagcttcacatagaacaggggaaaattggagttgtcttcaacattggcacagttgacatctccatcaaagaggagagaacccctgtaaatgacggcaaataccatgtggtacgcttcaccaggaacggcggcaacgccaccctgcaggtggacaactggccagtgaatgaacattatcctacaggccggcagttaaccatcttcaacactcaggcgcaaatagccattggtggaaaggacaaaggacgcctcttccaaggccaactctctgggctctattatgatggtttgaaagtactgaacatggcggctgagaacaaccccaatattaaaatcaatggaagtgttcggctggttggagaagtcccatcaattttgggaacaacacagacgacctccatgccaccagaaatgtctactactgtcatggaaaccactactacaatggcgactaccacaacccgtaagaatcgctctacagccagcattcagccaacatcagatgatcttgtttcatctgctgaatgttcaagtgatgatgaagactttgttgaatgtgagccgagtacagcaaaccccacggagccgggaatcagacgggttccgggggcctcagaggtgatccgggagtcgagcagcacaacagggatggtcgtcggcattgtggctgctgccgccctctgcatcttgatcctcctgtacgccatgtacaagtacaggaacagggacgaggggtcctatcaagtggacgagacgcggaactacatcagcaactccgcccagagcaacggcacgctcatgaaggagaagcagcagagctcgaagagcggccacaagaaacagaaaaacaaggacagggagtattacgtgtaaacatgcgaacactgctcacacgcgagttttcacagttatttctatccacgcctatgaatctttggacggtgagatctcacagatgtcagaactgctggaactatgaaatggggtatataaccacgactctggtggggaaaaccgttttttaaaggacacacacacacacagcgatgcatctctctctaaagctcagccacggctgcggcaaggtcccagcggtcgctgggagacagaaggttttgtgccctgctgtatcataaagcacacacttagcgctctggagccggacggtggctccaccacttccgcaggcctagaaacttccttctccggaggaccttttactaaaaggtagaagacttcatggcttacttgttccataactccaagtgagtctgtaatgtttgtgaagcttgactgtaaccatgttttttctgtttaattatgtaaaaaacaaaactacaacaac

SEQ ID NO: 4014 - DNA, 550 bp, Homo Sapiens
ttttttttttacaaaaacaaataaggatttttatttgcagtactttccactcttcctttaaaaacttgccatttgcttatcagttcctctggggctgacccactcaaacaagacaaaggataaagaacaaaagatagtcctccgaggttacaggcttggaagggcagagaggagctacgaaccttggaagaaaaacaaggtgctcaggaattcatcgcctaacatttcacttccccacccaccccttagtgctcccactttggcagtgatctctctttggctttaaagagaaagggggaaatgggccttgttttgcaggtgtgcaacaacacagctctggcatctcaagcagcaggggagaactctaagacagaagaatttcttcatgaaaatcacggtatgttatcacatactgtctccatggcccatacaaggactccttaaggttctctctaacatacaacatatcccccacaactcagtagagaggttttcttcccactggaatagaaatcctttgcctcatttattacagtctaaaaatccacac

SEQ ID NO: 4015 - DNA, 594 bp, Homo Sapiens
ccacccccactgtccaggcctttaaccctttgctcccctcaggccttccctaacgctccaagcaccgctggagcctttaatgggtgagggaacttgggtaagaggaagatcacccccttcctgtcccctttctaggccccctcaagtgcaggtgacccttaattggtgagatcttcagcctcagccgccgacctttcccttttgtccagttttggagttcccgttttttccttgtttgctttccgagtgtaaggtctggccggtgagaaagatttcccccaaccttgattaatcagccccctcccccaacttacttcccttaggacgggtagggctgagggacctcctctcctggaaagtgcttactttgcctggggaaggggctagacactgtcccagggaaagtaatagaaggtggaagaaatcaataaaatcagaccaaacaagtcgcctttcgagggcctccaccgatttatggatgagagggggtggaggtggaaggcaggcccaagtccattctttggacacccaaactcagcccccttaaagagtggaaacaaaacaagctgcactttgcagaggtggtaaatgaaa

SEQ ID NO: 4016 - DNA, 374 bp, Homo Sapiens
tttttttgttataaagcaacagataaccgagggagtggattatcacaagtgtgaaacaacttggtacctcctttctccctcactccacctgatggcttcccactccgctgccactaatacctttctagattcctctactgcgtgctgggatggaaagagtgcggcctttggagtcagatagcaagtgggtttcattctagaccttccactttctagctgggtaacactgagtacaacacttcccttctctaaaaggtactgagaaggctagataaggttctgtatactcataacctacagatgtgtcatttctccaggcacagatcctgggaacacatggaggggatgggggcggtaacatacacagcttcctg

SEQ ID NO: 4017 - DNA, 186 bp, Homo Sapiens
tttttttttttttttttcctggccaaactcccaaaagccaaacatgtcacggaatgactgatattgccattgactgaaaaaaacctttatctctcagcaagcagaaatcgggacatctggattctagacccaatttggacgtgacctaggctgggctgattttggggaattcctctcatctctctg

SEQ ID NO: 4018 - DNA, 192 bp, Homo Sapiens
tctcaccccaaccacatacacacctgtaaacaatggagcagtccagtctccagccctacctagaggagcgatttgttctctgatttccataacacagaaaaaataaaaaaagaaaaaaaaatccaaaacgaaaagtaaaaccactttaaacaattaggagttttgttcggttatttggcgaaggctgtgtgc

SEQ ID NO: 4019 - DNA, 6802 bp, Homo Sapiens
attccaatatatgcaaatgttcataaaactaagaagaatgatgacccttcaaaggattaccatgttccatcttctgatcagaatatctgcatagaactttccaattctggtagtgttcagacatctagcccaccgcagttggagactgttagaaaaaatcttgaagacagtgatgcaagtgtggaaagaagccagtatcctcaatcagatgataagctgtctcctcctaaacgcgacttccccactgcagaggaaccacacctgaatttgggttctttgaatgattctttatttggtagtgacaatattaaaatagaatcattgattacaaagaagactgtggatcacacagttgaagaacaacaaacagaaaaagttaaattgatcacagaaaatctcagtaagctccctaatgcagactctgaatgcctttcttttgttggctgttcaacatcaggaacaaattctggaaatggaacaaatggtttattagaaggatcaccaccatccccattctttaagtttcaaggagaaatgattgtaaatgacttgtatgttccatcatcaccaatcctagcacctgtgagaagtcgtagcaagttggtttcaagaccatctcgatcttttctgctaagacatcgacctgtaccagagattccagggtcaacaaaaggagtttctgggagctatttccgtgaaagaagaaatgttgctacctcaactgaaaaatctgtggcatggcaaaattcaaatgaggagaattcatcttccatctttccttatggagagacctttctcttccagagactagaaaattccaagaagcgatctataaagaatgaatttttgacccagggagaagcactcaaaggggaagcagctactgcaacaaactcttttatcatcaaatcaagcatatacgataacagaaaggagaaaataagcgaggacaaggtggaagatatttggatacctcgagaggacaaaaacaattttttgatagacactgcttctgaatcagaatactcaacagtagaagaatgctttcagagtttaagaagaaaaaattcaaaggcatctaaatctaggactcaaaaagccttgattttggactccgttaataggcacagttatccgttaagctcaacaagtggaaatgctgattcatcagccgtttcttcacaggcaatatctccctatgcctgcttttatggagcatctgcaaagaaggttaaatcaggatggctggataaactctctcctcaaggaaaacgcatgtttcaaaagagatgggtgaaatttgatggccttagcatttcttactacaataatgagaaggagatgtattcgaaaggaataattcccctttctgctatatcaacagtacgagttcaaggagacaacaaatttgaagttgttacaacacaaagaacttttgtttttagagtagaaaaagaagaggagagaaatgactggatcagcatactattaaatgcactgaaatcacaatcccttacctcgcagtctcaagctgttgttacacctgagaaatgtggatatcttgaattgagaggctataaggcaaaaatttttactgtgttaagtggaaacagtgtgtggctttgcaaaaacgaacaggattttaagagtggacttggtattaccataattcctatgaatgtagcaaatgtaaagcaagtggaccgaactgtgaaacaatcttttgaaataatcactccctacaggagtttcagctttacagccgagactgaaaaggagaaacaagactggattgaagctgtgcagcaatcaatagcagaaactctctctgattatgaagtagctgagaagatttggttcaatgaatccaacaggagctgtgcagattgtaaagccccagatcctgactgggcatccatcaatctctgtgttgtcatctgtaagaagtgtgcaggacagcatagatctttaggaccaaaagattccaaggttagaagtctaaaaatggatgctagcatttggagcaatgaactcatcgagctttttattgtcattggaaacaaaagagcaaatgacttttgggctggtaatcttcaaaaggatgaagaattacatatggactcaccagtagaaaagagaaaaaactttattactcagaaatataaagaaggaaaattcagaaaaactcttttggcatctctcaccaaagaagaattaaataaggctctatgtgctgctgtagtgaaaccggatgttctagaaacaatggctttgctgttcagtggagcagatgtcatgtgtgccaccggagaccccgtgcatagcaccccctatctgctagccaagaaagctgggcaaagtctgcaaatggaatttctctaccataacaaattctcagatttccctcaacatgatattcattccgagggtgtattaagtcaagagtcttcccagtccacattcctctgtgactttttatatcaagctccttctgctgcttctaaactctcttcagagaaaaaactgcttgaagagacaaataaaaaatggtgtgttttggaaggaggcttcttgagttactatgaaaatgataagtctaccacacctaatggcaccattaatatcaatgaagttatctgcctggctatacacaaagaggacttctatttaaatactgggcccatctttatctttgagatctacttaccctccgaacgtgtgtttttatttggagctgaaacatctcaagctcaaagaaaatggacagaggcaatagccaagcattttgttcccttatttgctgaaaacttaacagaagctgactatgatttgattggtcaactcttctacaaagactgccatgccctggatcagtggagaaaaggctggtttgctatggacaaatccagcttgcatttttgccttcaaatgcaagaagttcagggagatagaatgcacttaagaagactgcaagagctaacaatcagcacaatggttcaaaatggggaaaaactggatgttttactcttggtagaaaaagggagaacattatacatccatgggcataccaagttggatttcacagtctggcatactgcaattgaaaaagcagcaggtacagatggtaatgctttacaagatcagcagctcagcaaaaatgacgttcccattatagtgaacagctgtatagcatttgttacacagtatggtttaggatgcaaatatatctatcaaaagaatggtgatcctttgcatataagtgaactcctggagagtttcaaaaaggatgcaagaagctttaaattgagggctggaaaacatcagcttgaagatgtgacggctgtgttgaaaagttttctctctgacattgatgatgcactgcttactaaggagctctacccatattggatctctgctttagatacgcaagatgacaaggaaagaattaaaaaatatggagcatttatacgttctcttccaggggtcaaccgagcaacactagcagctatcattgaacacctgtatagggttcagaaatgctcagaaatcaatcacatgaatgcccataatttggccttggtcttttcatcctgtttgtttcaaacgaagggacaaactagtgaagaagtgaatgtaattgaggacctaattaataattatgtagaaatatttgaggttaaagaagatcaagtcaaacaaatggacatagaaaatagctttattaccaagtggaaagacacccaagtttcccaggctggagatttgttaattgaagtatatgtagaaaggaaggaacccgactgtagtattataattcggatatctcctgtgatggaagcagaagaattaactaatgatatattagcgataaaaaatattattcctacaaaaggtgatatttgggccacatttgaagtcattgaaaatgaagagctagagcgtcctcttcactacaaggaaaatgtactggagcaggtgcttcggtggagttcattagctgaacctggctctgcttacctggtggtgaagagattcttaaccgctgacacaattaaacactgcagtgaccggagtacactgggaagcatcaaagaaggaatcttgaaaatcaaagaagaaccatccaaaatactatctggaaataagtttcaagaccggtattttgttttacgagatgggtttctctttctttacaaggatgtgaagagtagtaaacatgacaagatgttttctctcagttccatgaagttttatcgtggagtgaaaaagaaaatgaagcctccaacaagctggggattgaccgcatattctgagaaacatcactggcacctgtgttgtgatagttcacaaactcagacggagtggatgaccagtatctttattgcccagcatgaatatgatatatggccaccagctggaaaggaacgaaaacgttcaataaccaaaaatcccaaaattggaggtttgcctctgattcctatacagcatgaggggaatgcaaccttggcccggaaaaatattgagagtgcaagagcagaacttgaaaggctgcggctcagtgaaaagtgtgataaagagtccgtggactctagcttaaaggagagagcttccatggtggcccactgcctggagcacaaggacgataaacttcgaaatcgaccccgaaaacatcggagtttcaactgcctggaggacacagagcctgaagccccacttgggcaaccaaaaggccataaaggcctaaagacattgaggaagactgaggacaggaatagcaaagctactttggactctgatcataagttaccatcaagggtaattgaagaacttaatgtggttctacaacggtcaagaacccttccaaaagaattacaggatgagcagattttgaagtaggaaataaaatgaattgctccccagattatttttttaatattgtatgcaatctttatgtgtaactccaaaactgaactataagataattcataagaatttgcctattgataggcaaatttgtctatgcttaggcatttaaggagcatttaaaaatatgtatatatgtgactgaatgtaagattaactttattttggtctgaacaaaccttgtaaagttccattgtattaacgtgtgtaagaagacattgggttacttaggtggtcagtccttttaaagtagttgtctgttaagtggtataatttatgagcagaaatctcaaactgtactgtattgtataaaatgctgtgtttaaatgaagcctaagaaactatctgtaacatattttgcactttgagaaaccttgtatattaaattaccatatgtttttaggtttacagaagttctaccttagggaaaagaaagggaagtaaattgaaaaaggggggagaatttattgtagtggctgcctaaaaaccactggagtttttaaaagaagcaaggagttaaatgtcctgcaaaacaaggaagtgagctaagattcattctagttcactaatgaccagaacttgtcaatgagaaaccacttgttaagaaaaagtccagtgtttatttctcaagagtaatattcggccaacagatgtaaataatagcactagccactcttattaatatttatagtgttagaaaaccagccacattacagattcactacgtttgagctcattgttggtggctgctaagaggaaacttacactgcattggagaggttgtgtacacaggacctggcctggatgctgattgcactgtcattgtatgcaagcattttgtcttttttcagaatttctgactatacttttggtacgaacaaaattcatcaccacagggtcctgttgttttgtttgatttttagatttttttaaattattattaaggttgtaatgtttttctccgagttgtcagaaataactggaagaatacaatatatggccattatggagccaggggctagttggtggtttactatacatttgggggctacctggtcacatttaatctaggtttttttttctttttttaagtaaaggtgtggtctcttccctgtacttatgaataaggacaaagccctatttttgtttccacataaagatcagctactgaattggtgaatttcctgacagacaatgctatctaaccatagttcacgttaggggaagcatttttccatcagtttctttaaaattggattgtctggtgagttttgatattaaacattatgtagctaagtttttttttttagcatttcttttttatttttcaatctatattcacaggcccatacttcagtcagtccaatcatagtacagtgatgtggtggtagatgctatgaatttcttcattgtaaaatacggatcatttgtattttggggtgataaaatagttcaccatgggtatgagatatttattctttaaatcaaagtaaattagaatttttaaaaagcacaaaactgcaggacagtttatgaaataggtggcactattagggaatcttcctttaaagcaagaaatcatgttatttagaaagaaaaactaatcttaaacatactatttctaataaatatttatatttttatgaaataaagaggtatgtggaaattaatatttggtgatgttggacagtggaaaagtatctagagtttttacctgccttatctgaattcttcttgaaacttgagcttaaactctaatagctgtttccctttctattctgaacaactgtctccatttttcaagtgtgagagataagggctaatgatgacatctcatttattttgagtaaacattaaaattgttttacaagtctacttg

SEQ ID NO: 4020 - DNA, 407 bp, Homo Sapiens
cacgagggcggtagccatcgcggaggcggcggctgcagcgggtgggactggcttgggcgcgggcgcgagctacgggtctgcagcggaccgggaccgggacccggacccggaccgcgccgggcggaggctgcgggttctctctggccatctgctgggccggccccgggaggctctgagtaccaatgagtgcaaagcgcggagagccgcgtcggcggccacggtagcgcccacggccactcccgccgcgcaggagtcgggcaccatcccaaagaagcggcaagaagttatgaaatggaatggatggggataaaatgattctaaattcatcttcaataagaagggccaaattgaattgactgggaaaaggtaccctcttagtggcatgggtttaccaacatttaaagaat

SEQ ID NO: 4021 - DNA, 628 bp, Homo Sapiens
cacgcgcgctcctgctcttaggaagcctgggaaggaccggtgtgctaggagatgatcggggaaagcatagtcccctgtctgtggcaccagacactcccgactgtgcgctgactctccccgcccagccagcagccttttccagagaggctgtggtccatagcctctgttcgttttcactgcaggaccaggcacgaaagttaaaacaaaatgaagattttttctgaatctcataaaacagtgttgtagtggatcactgcccttatatggcagaatcttgcaggcagcatgtcgagtttgatatgctggtgaagaatagaacccaaggaatcattcctttggcccccatatctaaatcattgtggacttgctcagtagaatcttccatggaatattgtagaataatgtatgatatatttcctttcaaaaagctggtgaattttattgtgagtgactctggagcacatgttttaaattcttggactcaagaagaccaaaatttacaggagctaatggcagcattagccgctgttgggcctcctaatcctcgggcagatccagagtgctgcagtattctgcatggccttgttgcagcagtggaaactctctgcaaaattactgaatacaacat

SEQ ID NO: 4022 - DNA, 452 bp, Homo Sapiens
  misc_feature (64)..(64): n is a, c, g, or t
  misc_feature (68)..(68): n is a, c, g, or t
  misc_feature (418)..(418): n is a, c, g, or t
gtctccagtggttaaaaagaaaaaagaaacaaggaacatgtttaatatcttaaaaaacagcacntaancctgcaaaaatgtgaattatttgataaatacttaaaaaacatgttaatcatgtttagatttgaaaatgtggcatcaatgtgaagcagtgcattcaaccctctgtatcaggagacagcggtgctgcctgcccaagactgcagagagcagagacacagctgcatctctcagcactctccccggcccccaagaagagattccaatcacagcatattcatttaaaaagcattctaatatagtaattagactcatcaaatacaaactttttttcccctttaaactatactctaaatttggccaaactaagtacttgatataaaaatcctggcaaagagcaggggtccctgcgggnttggtggtgggcaaacccagacattctctcgccc

SEQ ID NO: 4023 - DNA, 256 bp, Homo Sapiens
ccgccctcaggcacagcatccccacgggcctccacgccaacctgtccgagggccgccccgtgggtccggcccgccgtggcgcctcatcgctgctcggcccggaaggcttcttccttggcaagatgggattccgggaggcggtggcggccggagacgtggatttgcctcaggtgcggagccgcagctacaggaggatgctcgcgaggacccccagagctccgcccggagggtactgtgaggccgttaggagctggcg

SEQ ID NO: 4024 - DNA, 1814 bp, Homo Sapiens
gcagagctcgagaggcggctgccgggctgcggggcgccttgactctccctccaccctgcctcctcgggctccactcgtctgcccctggactcccgtctcctcctgtcctccggcttcccagagctccctccttatggcagcagcttcccgcgtctccggcgcagcttctcagcggacgaccctctcgctccggggctgagcccagtccctggatgttgctgaaactctcgagatcatgcgcgggtttggctgctgcttccccgccgggtgccactgccaccgccgccgcctctgctgccgccgtccgcgggatgctcagtagcccgctgcccggcccccgcgatcctgtgttcctcggaagccgtttgctgctgcagagttgcacgaactagtcatggtgctgtgggagtccccgcggcagtgcagcagctggacactttgcgagggcttttgctggctgctgctgctgcccgtcatgctactcatcgtagcccgcccggtgaagctcgctgctttccctacctccttaagtgactgccaaacgcccaccggctggaattgctctggttatgatgacagagaaaatgatctcttcctctgtgacaccaacacctgtaaatttgatggggaatgtttaagaattggagacactgtgacttgcgtctgtcagttcaagtgcaacaatgactatgtgcctgtgtgtggctccaatggggagagctaccagaatgagtgttacctgcgacaggctgcatgcaaacagcagagtgagatacttgtggtgtcagaaggatcatgtgccacagatgcaggatcaggatctggagatggagtccatgaaggctctggagaaactagtcaaaaggagacatccacctgtgatatttgccagtttggtgcagaatgtgacgaagatgccgaggatgtctggtgtgtgtgtaatattgactgttctcaaaccaacttcaatcccctctgcgcttctgatgggaaatcttatgataatgcatgccaaatcaaagaagcatcgtgtcagaaacaggagaaaattgaagtcatgtctttgggtcgatgtcaagataacacaactacaactactaagtctgaagatgggcattatgcaagaacagattatgcagagaatgctaacaaattagaagaaagtgccagagaacaccacataccttgtccggaacattacaatggcttctgcatgcatgggaagtgtgagcattctatcaatatgcaggagccatcttgcaggtgtgatgctggttatactggacaacactgtgaaaaaaaggactacagtgttctatacgttgttcccggtcctgtacgatttcagtatgtcttaatcgcagctgtgattggaacaattcagattgctgtcatctgtgtggtggtcctctgcatcacaaggaaatgccccagaagcaacagaattcacagacagaagcaaaatacagggcactacagttcagacaatacaacaagagcgtccacgaggttaatctaaagggagcatgtttcacagtggctggactaccgagagcttggactacacaatacagtattatagacaaaagaataagacaagagatctacacatgttgccttgcatttgtggtaatctacaccaatgaaaacatgtactacagctatatttgattatgtatggatatatttgaaatagtatacattgtcttgatgttttttctgtaatgtaaataaactatttatatcacacaatatagttttttctttcccatgtatttgttatatataataaatactcagtgatgagaaaaaaa

SEQ ID NO: 4025 - DNA, 1465 bp, Homo Sapiens
ggcacgagggcccctacatagcatcgtggagtggtcatactggtgacagttgtccaggaatcagtgcgaatgttgtatgcttcaacggaagaaaggtgggctgtaccatcaaatccccccaccacataaatatggtcattcagcagggctactcctgcaccagaacgcttggtggccattggtgtaacattagtccaatgtcctgtatgagggtcgtatttctcaactgaatttaagatattcaagccgtcatatcctcctagacagtagatcactccactggacactacgagtccggcaccttcccgggctgtctgcatatctcccagcatgctccactggtcaatgtttggatcatagcgctccatactggtgtgacgcctgcttccatcaaagcctccagagacatagatcatatctaggcgagcccttgtcctgggtccctgcatctgactccgaagttcaggcctcagatgaaacttctttgcttcatcaaccagatccctgcattgtaaactacagcggatgaaaggctcagcatctattacatctgtgatatacctgggggttagtaggggcatccgcacatactgtagcaggttaggcaaggattcttcccgctctttcttggcatgcttcacccagttgatgacagcctcaaagactggctcttcagaatccacctgaatttcgtcgcacttgattagcttttccacctctccttgactcagaagaatgaactcttcatgctgtaccacttcaggaaaatgcttctggctaaaaacctcagctgcttgcatcaggtcaacacaattgtgggtttcagcaaaatccctaatacccaggcaattagaagggtccaactgactttctaagaactcacagcaggcttgtttcacacctttcaactgaagcagacaggctgcaggaagcagttcttgtacattctccactgtcacatgtactgtttctgtgtacacaaagtccaataaaatttccatggtagaggcagtcaaaccttggatgtcaacataaggtttccccttctctgagagctcactagtgaacatggcacagaagtaatcactacaggcagccagcacaatccgatgggcagggaagtctttctgctctactctcaatgtcacatcacagagggtattgctcttcctgagggagttcattgaattgaggatggatttagcatgagtatttgtcattatgtctttgggggccataatgcctcccataaagcagtgcggagaaagaaacaaaatgggtccttggattctgcaactccgctcccgaacccacacagccgcaccgggcccgtccccagcctgtggggatggagtgcggcgcggggctagcaggcggctcgggaggagccgaagcgccgcccagacccggaggcttctggaggctctggagccgttccgggtctggcccctgcggccgcaagctt

SEQ ID NO: 4026 - DNA, 542 bp, Homo Sapiens
cctgtagaggttgtggggaacaaaaaagagaggagaagagagggagggagagaaataggtaaatagagaaggtaggaagggagagggatggaggcaagggaggcaagaaagcaagcaagtgagccttgctaacttagaaaaatatcagtggcctttaactgacagggaatagtgcaaagttaagcttgggcccctataaaacatgggatactgatttaaaaaacaaaacaaaacaaaaccaaaaaaccaaaacaaaccaaaacaaaaaaaaaagagaaacaccacagttcgtatgagggaagcttagccggtgaggagggcttattaccatagcacacaagaggcggcctggctaataagataaccggtccagcccaagccaaagtagcagacttatggcaattcaattccaaaaagtgggttggtaggttggtgtaacggagacagagtctggcttggtcacccagacggcagggcagaggtacgatctcagctcacggcaatctccatctcccaggttcaagcaattctccggccacaac

SEQ ID NO: 4027 - DNA, 626 bp, Homo Sapiens
ctcgctggttgctcagagctgggcagcagcgtaggtttagaatcaaaagacagcacagaccaccggggctgaggactctgtttttcttgtgggctgagttgttaataagtatggccgggtgcagtggctcacgcctgtaatcccagctctttgggaggccgaggtgggtggatcacgtgaggtcaggagttccggaccagcctaaccaacatgacaaaaccccgtctctactaaaaatacaaaaagaaacaaattagctgggtgtggtggtgcacacctgtggtcccagctactcgagaggctgaggcacgagaatcaattgaacccaggaggtggaggttgcagtgagttgagattgtgccgctgcactccagcctgggtaacagagcgaggcttggtctcagaacaaacaaacaaaaaaggtagtgtgacttctacatcgcataccattgtcttggttcatacaaagcgtctttctgaagaactgatggttttgctttggctcagtgaagtaaacatatggcctacctttaagaagttaagatagtcatttaactatgcttaattaggtttacttggggaaaagtaaaattacaaaacaattccttgcattcctcaccgttcct

SEQ ID NO: 4028 - DNA, 499 bp, Homo Sapiens
actttgtgtgttgtgttttattaacaccaaaatgtgccacatcatggtttagaagaggtggagggtgcaggcaggaggctccgaaggcccaggcagggccgccagcctctggcctctccatggactccagctggagagcctgtccgctcagcaacaccccaggcagcaccaagaataacatgcccacaagaacatcatggccaagagacgcacaggcgcatcccgcttccaggcacctttcccacctggccagaagtccctgctgtcatcccgacttgcacggtggttttggtaaccagtgggctgtgcaggagtgaaagtggggtcactttccttcctttcccagctgctggagtcggaactgctgcctttgtttggcggccttgtttcttaaatcagttccctcttaggatttattacactaaaaaaaaaattagtttttgaaaagaaataggagaatacagaaacatgaatttcacgaggctatcatctaacagtg

SEQ ID NO: 4029 - DNA, 3013 bp, Homo Sapiens
caacgagttgtagccgcggagagcaggcgtcgatgctggcgcccaaagcctccagcctgagagtcgcctcactcgtgtgacgacagagtttcactcctgttacccaggctggaggacagtgatgtgatctcgggtcaccacaacctccgcctcccggattcaggcgattctcatgcctcagcctcccgagtagctcagattacaggcatgtgccaccacgcccggctaattttgtattttcagtcgagacggggtttccccatgttggtcaggctggtcttgaattcccgacctcaggtgatctgttcgcctcggcctcccaaagtgctgggattacaggcgtgaaccactgcacccggcgaggcattttttactgtctacagaaacttattgtaattcatttttcctcactccagtagtaagaattataccaaattgaaaagatatgaatgagtatcctaaaaaaagaaaaaggaagactctacacccttctcgttattcagattcctctggaataagcagaattgcagatggattcaatggaattttctctgatcattgttacagtgtctgttctatgagacagccagatttaaaatattttgacaacaaagatgatgattctgataccgagacgtcaaatgacttgccaaaatttgcagatggaatcaaggccagaaacagaaatcagaactacctggttcccagtcctgtacttagaattctagaccacactgccttttctacagaaaaatctgctgatattgtaatttgtgatgaagagtgtgactcacctgaatcagtcaaccagcaaacccaagaggagagtcctatagaagttcacactgctgaagatgttccaattgctgtagaagtgcatgcgatttctgaggattatgatatagagacagaaaacaattcctctgagagtctccaagaccaaactgatgaagaaccgccagctaaactttgtaaaattcttgacaagagccaagctttgaatgtgactgcccagcagaaatggcctttactgagagctaatagcagtggcctctataaatgtgaactttgtgagtttaacagcaaatatttttctgacttaaagcagcatatgatcctgaagcataaacgtactgattcaaatgtgtgtcgagtatgcaaggaaagtttctctaccaatatgcttctgatagaacatgccaaactgcatgaagaggatccctacatttgtaaatactgtgattataagacagtaatttttgagaacctcagccagcacattgcagacacccattttagtgatcacctctattggtgtgaacagtgtgatgtacagttctcctcaagcagtgaactctacctacatttccaggagcacagctgtgatgaacagtacttgtgtcagttctgtgaacatgaaactaatgatccagaagacttgcatagccatgtggtaaatgagcatgcatgtaaattaatagagttaagtgataagtataacaatggtgaacatggacaatatagcctcttaagcaaaattacctttgacaaatgtaaaaacttctttgtatgtcaagtatgtggttttcggagtagacttcacacaaatgttaacaggcatgttgctattgaacatacaaaaatttttcctcatgtttgtgatgactgtgggaaaggcttttcaagtatgctagaatattgcaagcatttaaattcacatttatctgaagggatttatttatgtcaatattgtgaatattcaacaggacaaattgaagatcttaaaattcatctagatttcaagcattcagctgacttgcctcataaatgtagtgactgcttgatgaggtttggaaatgaaagggaattaataagtcaccttccagtccatgagacaacttgattattctctttaacttacagaatgttagtttaaaataataaattcatcctttttttggagatgattaaatggatgattgtaaacacaacttatgaaatctgcctttaacaagtaacttttttaaattataaaattttattggcattgctccattttctgtatataaatatatctttaatgtggtattttcaattgcgtgatagtttgtagtttcaaccactcttggtgactgtcatcctgtttcttccatattctctgatttcatgaattgaaaagaaacaaatgtattgaagaagtgagctacagttttccttccttaaccatgggtgctagtaactttttaaaactcaagacaagattagttttttatgtgtgaagtcattaaattattacacgaccagaactaaaatgcaatatacagttaagtccacggatactcccattaatgagaaataacactaggaagccactattacaggaagaaaagatttggttttcatggcagtctgtttttttaaaaaaaaatttttgagccactatctattgttgaatattttaagatgggatgagggaggaactaataagggcttacacaataaaaaataactatatcataactcattcataacttgatgtttcattttctgttgaggaaccataaattcattcacagacttaatatttttttcttagagatggtctcgttctgttgtccaggatggagtgcagtggttgatcatagctcccgggccgtagtctcccaggctcgagcaatcctcccacttcaccctcctgcatagctaggactacaggcatgtggcaccatgcccgctaagtttttaaatttcttgtagagatgagatctcgctatgttgcccaggccagtctcaaactcctggactcaagcaatcctcccaccttggccttccaaatcactgggattataggcatgagccattatgcctgactcttgcccaaatttctgatgtcaaattgttcattgacagaaaacccactgaagtatttaaagttaggaagatctgggagataggggttgctggcatgaaaatgtataacttacaacatttattaataaaatgataaattagc

SEQ ID NO: 4030 - DNA, 2690 bp, Homo Sapiens
ggccctcgggccaagattcggcacgaggcgaacggagcagctgctgcagcagggcccatggcggacacccagtacatcctgcccaatgacatcggcgtgtctagcctggactgccgtgaggccttccgcctgctgtcacccacagagcgcctctatgcctaccacctgtcccgtgccgcctggtacggaggcctggctgtgctgcttcagacctcccctgaggccccctacatctatgctctgctcagccgcctcttccgcgcccaggaccccgaccagctgcgccaacatgccctggctgaaggccttaccgaggaggagtatcaggcgttcctggtctatgccgcgggtgtttactccaacatgggcaactacaagtcctttggtgacaccaagtttgttcccaacttgcccaaggaaaagctggaacgggtgatcctagggagtgaggctgctcagcagcacccagaagaagtcaggggcctctggcatacctgcggggagcttatgttctctctggagccaaggcttcgacacctcggactggggaaggagggaatcaccacctatttctctgggaattgtaccatggaagatgccaaattggcccaggactttctggactcacagaacctcagtgcctacaacacccggctcttcaaagaggtcgatggagaagggaagccctactacgaggtgcggctggcttctgtgcttggctcagagccttccctggactctgaggtgacttccaagctgaagagctatgaattccggggaagccctttccaggtgacccggggggactacgcgcccatcctccagaaggtggtggagcagctggagaaagccaaggcctatgcagccaacagccaccaggggcagatgctggcccagtatatagagagcttcacccagggctccatcgaggcccacaagaggggctcccgcttctggatccaggacaaaggccccatcgtggagagttacatcgggttcatcgagagctaccgcgacccctttggttcccgaggagaatttgaaggtttcgtagctgtggtgaacaaggccatgagtgccaagtttgagcggctggtggcgagcgcagagcagctgctgaaggagctgccctggcccccaacctttgagaaggacaagttcctcacccctgacttcacctccctggatgttctcaccttcgctggctccggcatccctgccggcatcaacatccccaactacgatgatctgaggcagacggaaggctttaagaacgtgtcgctggggaatgtgctggctgtggcctacgccacgcagcgggagaagcttacctttctggaggaggatgacaaggacctgtacatcctctggaaggggccctccttcgatgtgcaggtgggcctgcacgagctgctgggccatggcagtggcaagctcttcgtacaggacgaaaaaggagcattcaactttgaccaggaaacagtgatcaacccagagacgggcgagcagattcagagctggtatcggagcggggagacctgggatagcaagttcagcaccatcgcctccagctacgaagagtgccgggctgagagcgtgggtctctacctctgtctccacccgcaagtgctggagatctttggctttgagggggctgatgcggaggacgtgatctacgtgaactggctcaacatggttcgggccgggctgctcgctctggagttctacacacctgaggccttcaactggcgacaggcccatatgcaggcccggtttgtgatcctgagagtcttgctggaggctggcgagggactcgttaccatcactcccaccacaggctccgatgggcgcccagatgcccgggtccgcctcgaccgcagcaagatccggtctgtgggcaagcctgctctagagcgcttcctgcggagacttcaggtgctgaagtccacaggggatgtggccggagggcgggccctgtacgaggggtatgcaacggtcactgatgcgccccccgagtgcttcctcaccctcagggacacggtgctgctgcgtaaggaatctcggaagctcattgttcagcccaacactcaccttgaaggctcagacgtgcagcttctggaatacgaggcgtcagctgctggcctcatccgatccttctctgagcgtttcccagaggatggacccgagttggaggagatcctcacacagctggccacagccgatgcccgattctggaagggccccagtgaggccccatctggccaagcttgaggaagatgtgtggccttgcccccaattccatcagaccaaggctgcaagtggccctccattcgtgtgtgtatttaggggctggggagggggaggggcaggagcttggaccttggtactacctcagctgagggtggtgacacaaccccttccatttgtcagcactttccagcctgccaattgcttcccctctgtgatctcatttcatctgcactgccatacgtggagtgagcaagacagggcttaccatcctgtctaccagatgaggaaatggcagttctgagaagtcactggtctagatcccgcaggtggcacgtgacagctagggttcaaaacgttctcaccaaatccaatgctcctcacatattaattttataaccagacaaataaatattagagacaaccaccaaaaaaaaaaaaaa

SEQ ID NO: 4031 - DNA, 350 bp, Homo Sapiens
gatttgctctgccagcagctgtcggtgccgcgctcgacaccgagtcctagctaggcgctcacagaatacgcgctccctccctcccccttctctgtcccccgcctctcgctcaccccggcccactccagcggcgactttgagggattccctctctggcggcctctgcagcagcacagccggcctcattcggggcactgcgagtatggatctccaaggaagaggggtccccagcatcgacagacttcgagttctcctgatgttgttccatacaatggctcaaatcatggcagaacaagaagtggaaaatctctcaggcctttccactaaccctgaaaaagatatatttgtgg

SEQ ID NO: 4032 - DNA, 284 bp, Homo Sapiens
cttgtctacctttctctgggcaaccctggcaggaccttcttgccacccattttccctttagactcagagccggtgacgccacctgtctttctccagcagcttccccaccttggtgtcctaaggctgcttctcacggtcactgattccacagctcaccaagcttgtctacccatctccaaaagcaatcccagggtctatggatttgatgctggggatcctgaacagaacaggcagtggtctttggggggcattaggggccttctccttgcctcccttagctggtc

SEQ ID NO: 4033 - DNA, 470 bp, Homo Sapiens
cttttaggaatactcagggtggaacctactatacaaaaccatcacactttgtaaataaaaagtatcagatacttgacttctttatccaccaacaaaaaaataaattattttcttgttttgtaaaagacctacaatgggaaaaagaattatatctcataattgtacaggaaacaaaacccacatcggtttcttgaattcaatttggcagttagaaatggttgggcaagatgaaaaacttatccagtgaactcaactttaaatattatattaatggctctgaacaacaacaacaacaacaaaatagcctgattacaaatccacacatttgtacagcacggttggagaaatttaaaattacacacagcacatatattatctatagaaacccccatacacctatggggacccctacagaaagtcactaagggctcgctatgggatttggtccataacttaacttttgaaagctc

SEQ ID NO: 4034 - DNA, 771 bp, Homo Sapiens
cggctagtaggaggccggggttaatcggacgaggacgtccggaggtgctgtgtggggcaccgggcggggccgcgggaaccggcgccccacggagctgctgctgtcagaccaaccccgggcccccatcatcactgcgccgcgctttcaggcgccgagaactaccgttcccggcatgccatgaaattggcctcggcgctgaggcggggtccggccctccacccgctcccgccgcgcgcgaatcgcggtcgcgagccatggaggaggaggcatcgtccccggggctgggctgcagcaagccgcacctggagaagctgaccctgggcatcacgcgcatcctagaatcttccccaggtgtgactgaggtgaccatcatagaaaagcctcctgctgaacgtcatatgatttcttcctgggaacaaaagaataactgtgtgatgcctgaagatgtgaagaacttttacctgatgaccaatggcttccacatgacatggagtgtgaagctggatgagcacatcattccactgggaagcatggcaattaacagcatctcaaaactgactcagctcacccagtcttccatgtattcacttcctaatgcacccactctggcagacctggaggacgatacacatgaagccagtgatgatcagccagagaagcctcactttgactctcgcagtgtgatatttgagctggattcatgcaatggcagtgggaaaggttgccttgtctacaaaagtgggaaacaggcatagcgaagacctggatctg

SEQ ID NO: 4035 - DNA, 816 bp, Homo Sapiens
  misc_feature (619)..(619): n is a, c, g, or t
  misc_feature (649)..(649): n is a, c, g, or t
  misc_feature (694)..(694): n is a, c, g, or t
  misc_feature (722)..(722): n is a, c, g, or t
  misc_feature (734)..(734): n is a, c, g, or t
  misc_feature (779)..(779): n is a, c, g, or t
  misc_feature (784)..(784): n is a, c, g, or t
caaagtgctcagcataagggagccagcgcacagacagccaggaagggagcgagcccagccagcccagccagcccagccagcccggagtcatttgattgcccgcctcagaacgatggatctgcatctcttcgactactcagagccagggaacttctcggacatcagctggccatgcaacagcagcgactgcatcgtggtggacacggtgatgtgtcccaacatgcccaacaaaagcgtcctgctctacacgctctccttcatttacattttcatcttcgtcatcggcatgattgccaactccgtggtggtctgggtgaatatccaggccaagaccacaggctatgacacgcactgctacatcttgaacctggccattgccgacctgtgggttgtcctcaccatcccagtctgggtggtcagtctcgtgcagcacaaccagtggcccatggggaagctcacgtgcaaagtcacacacctcatcttctccatcaacctctttcggcagcattttcttcctcacgtgcatgagcgtggaccgtaacctctccatcacctacttcaacaacaacccccagcagcaggaagaagatggtacgccgtgttgtctgatcctggtgtngctgctggcttctggtgtctctgctgacantactacctgaagacgtcagtctggtccaacaatgagactactgcngtcttctaacccgagaaagatcaagganttgcttattggnatgagttgtctcgttgtcttgggctttcgttcccttttcattatngcggnttcaattctgtggcaaagaatttgggtcaatt

SEQ ID NO: 4036 - DNA, 118 bp, Homo Sapiens
tcgactctaagaggatccgcctgcagccaaaggtatagtccctgactttataatggctgctcctggcgagcgactgagtcgtccgtgaggaaaaagaggcgaaggcttttccgaagat

SEQ ID NO: 4037 - DNA, 480 bp, Homo Sapiens
ccgtcaccctctgcacttagttggtagaagtcaaattaagtttcatatcttcatgatattttacttattgcttaatgtagggaataagcgaattccttagagaagaactgggcaccaagttaaaatggaattacaaaatcctacgctgctgtaatccacttatacggggtacattggacctgctagagtgatggaatctttattactttttacaacaaattgtccttgaaaaactttttatttgctcccaaaaaggcttatttccatactaagtctaatattaagacaaaattgcttaaagcattatggatattcttctaaatgtaaatatgtttggtgaggatgttgaagctcaaagctaaatagaagctgaaaacggttgatttctccatttcaagagacttaacaagggagaacacacaaacacaaacattattctcctcacactattagaatcttaatgctcaaaaacaatacctg

SEQ ID NO: 4038 - DNA, 348 bp, Homo Sapiens
gcgagtgtacgcgttgcctggcgaagaggggagcctgacgactcggaaatttgaataccacagtagcatggagtgtgacctcatggagactgacatcttggagtcgttggaagatctaggttacaagggcccattgttggaagatggagcgctctctcaggcagtctctgctggagccagttcccccgagtttaccaaactctgtgcttggctggtgtctgaattaagagtgctctgtaaactagcaggaaaacgtgcaagcaactaacagtccgagtgaagctgaagaattccagcttgaggtgagtgggctactaggggagatgaactgcccgtatctttcactga

SEQ ID NO: 4039 - DNA, 338 bp, Homo Sapiens
ttcattaatttgcatttattttcgggaagtaatgtagataaagaggaggagggagactgccttacatttcaacaagtaatttgtgatcttcacatcagacaaatcaaatttacaaattactttcccacctactggacgaagcggccaaagccaaaattgatacacaggcgcgcgggctctccgcagatttcggagaacgaaggtgcactaaaaactcactagacaaaacaagggtgttgaaagagagaagccgacagaggagttggaactgggtttggggcctgggtttgtttgtttttccctaatgctgtacttttacggattttgttttgttttgt

SEQ ID NO: 4040 - DNA, 428 bp, Homo Sapiens
tgcatatataaattgattatatttgtaagagtattttacatgtaaaacacccccaaaagattaatgggtatatgctttttaataatgtgtttatttccagcagtgtttatggtactaaggccaactttcttaaaatttgaagggaaaataaatattaaaatctaccaacaaaattgagaactcactccagtcccaggctaactccagtgatggggagaacgggcagtgtgggcagctaggttgattctactgccaacctaaaagcttacagtacttgcatgatttccagaagaccatggcagactgtgtgcagactgatgaatggagaacccacagtcatcgagaatcggcatcaaaataacgtctcagtgatgacaatttaccttcttcccttgatcttcaactcataaccaaacaattttcagaca

SEQ ID NO: 4041 - DNA, 581 bp, Homo Sapiens
ttattttaaattcctttaatgaaacctcaccctcaaacttgatacatcagaagatttgcttggactaaaagtggaatttccatcttaaccacatggctccgaggttctgctctcaggatgaattgggctccatgtcattttgtttgtcactttcttctcggaccagcgcagtggcttcaccacagtgggcactgtggttggattccgtaccttggaacctttgagcatgatggcccctgctcctgggattccctccgcttcttctctctccgatgaggttgtgtactaatgtcagctgtacacgttgtcttttcagcatgttacctcctctcagaagcctgcccccacgctgtgcaatggtcgctgtgcagatctctgttacggcgtcattgcctgcattctacttagctctcgtctgtctcccctccagactgtgcccccagggcttccaggtctagcctcatttctaatagtttgttgccacgatgtcacgaattagagccctgtctgttagcccacagggctccagcctcaccctctcccacagctcccgtggccctcctagcagccttcagagcttc

SEQ ID NO: 4042 - DNA, 343 bp, Homo Sapiens
cggccgcctacccaacggacgcctctgcccaggttctctgccgggaagcttcgtccttccgggccccagcgcagccggaggctggggagctgctgcctggaagggtcagataccgcctgttaggcggagggtgggaaagacactctcctgcttcaggagctatcgcagacaaccggagggcggcttatcgcagagtcccagagccagccagcaaggcaaggtcgcgggtgcacctttcactcccagaagcttgggtctgggactgcaccacgcaacgtttgcccattttgagggctttaggtgtttcatatttcagttaatagaatttcgacctcgtgccgaa

SEQ ID NO: 4043 - DNA, 388 bp, Homo Sapiens
gcaaacatatgatcattttaattacagatgattgaaatacagtgcaacagatgagacaaatacaatactgtaccagtttttaaaaacctgaaccataacggcttcgcattctagtacacttacttacttaaaacaaaaattgcttagataacaaaactatacttcaagttgttttagaaacagttctgcgctaggaacatacaaaggaaaatgacccgttgtgcttctttaaaatcgaatgagagtctcctctagggtcctgctgacagagcccccccagcctccgccaggtgaggtgcacagggcccactccaggcaccagctccccccaacttggcttctctggtttgtcgaaggcatcatccagtccacactatgtttaacagtc

SEQ ID NO: 4044 - DNA, 462 bp, Homo Sapiens
  misc_feature (411)..(411): n is a, c, g, or t
ttttttacaggaacagccacaatgtttactggtgagaaagtcagtagggtgacagtaacttctgtatctttaggagggtaacaaggcttccacttccaaattcaagaaaggctctctcatctcccgtaggtcccatgtggtgcggcacccaagcattctcagaagcaccctttcaaagagaaatgtagcaccaaaaaatagtatgtaacataaaagtccagtgacggtgaggacatcaaacatgatgaaaatcctcagtgcacgtttccatgctgtattgcggggaggagacttctgcactaaaaaggatgctggggcctgaggaagcagggcctccatctcttccgtatctatttcctcagaactgtgagagtcagtgtcctctgcctccatttgatacatccttagctntgcactcagcagttccacattcttgcaaggtcctccagcctttctatgact

SEQ ID NO: 4045 - DNA, 274 bp, Homo Sapiens
aaaggatggctgtttatatgaagtagcctaccaggctgaagcagggtggtttagccaaagatgtaggaaaataaaccactcaaagagctcactttctttccttgttccttccttgctacaattcacgttctcagaagatgatcctattcttcaaattgcaattgataattctagaaatattttatatacacgatctgagaaaggagtaatacaggtgtatgatttgggacaagatggacaaggaatgagcagagttgcctctgtgtcacagaag

SEQ ID NO: 4046 - DNA, 726 bp, Homo Sapiens
acatcggctaggtgcgaggcccggggttaacaggtgatgcatgaaaaaagacaggtgcagcctttgagaagtgcgtatttgagctgcctgcaaagggaagaaaactggcaaaggagagccaggggttgctgaaagaatttgaagctgttctcacagaaagacagaatatctactgcagtctgtttcttcctcgcagcaagcggctggagatagagaagagcttactggtgcgagcgtccgtcgaccccgtcgccgctgacctagagatggcagccggtctcaccgacatatttcagcatgatacatactgtggtgatgtctggaacaccaacaaacgccagaatggcagactcatgtggctctatctcaaatactgggaactcgttgtcgaactgaagaagtttaagagagtagaggaagccatactagaaaagtaagacaagagtgaaatcaaactgcttttagtgactcgaggccaggcagtcatgcgccttctgggtctccggcgtcttccgttcccgtgctgcccgtgtcattggccacaccgtcacccttcagcagcgacctccactcccgccacgtctgagcagaagtgcaccgaagcctcagagacagagggtctcctcccgatgctctgccgctgttggggatatggtttcttgaagcatttttaggctgcagtattgtattaagcagaacagtataacctcgtattttagctccagg

SEQ ID NO: 4047 - DNA, 5656 bp, Homo Sapiens
gctttgtttgatggtgatccacatttatccacagagaatcctgccttggttcctgatgctttgctagcctcagacacttgtctggatataagcgaagctgcctttgaccacagtttcagcgatgcctcaggtctcaacacatccacgggaacaatagatgacatgagtaaactgacattatccgaaggccatccggaaacgccagttgatggggacctagggaagcaagatatctgctcatctgaagcctcgtggggtgattttgaatatgatgtaatgggccagaatatcgatgaagatttactgagagagcctgaacacttcctgtatggtggtgaccctcctttggaggaagattctctgaagcagtcgctggcaccgtacacacctccctttgatttgtcttatctcacagaacctgcccagagtgctgaaacaatagaggaagctgggtctccagaggatgaatctctgggatgcagagcagcagagatagtgctttctgcacttcctgatcgaagaagtgagggaaaccaggctgagaccaaaaacagactgcctggatcccagctggctgtgctgcatattcgtgaagaccctgagtccgtttatttgccggtaggagcaggctccaacattttgtctccatcaaacgttgactgggaagtagaaacagataattctgatttaccagcaggtggagacataggaccaccaaatggtgccagcaaggaaataccagaattggaagaagaaaaaacaattcctaccaaagagcctgagcagataaaatcagaatacaaggaagaaagatgcacagagaagaatgaagatcgtcatgcactacacatggattacatacttgtaaaccgtgaagaaaattcacactcaaagccagagacctgtgaagaaagagaaagcatagctgaattagaattgtatgtaggttccaaagaaacagggctgcagggaactcagttagcaagcttcccagacacatgtcagccagcctccttaaatgaaagaaaaggtctctctgcagagaaaatgtcttctaaaggcgatacgagatcatcttttgaaagccctgcacaagaccagagttggatgttcttgggccatagtgaggttggtgatccatcactggatgccagggactcagggcctgggtggtctggcaagactgtggagccgttctctgaactcggcttgggtgagggtccccagctgcagattctggaagaaatgaagcctctagaatctttagcactagaggaagcctctggtccagtcagccaatcacagaagagtaagagccgaggcagggctggcccggatgcagttacccatgacagtgaatgggaaatgctttcaccacagcctgttcagaaaaacatgatctctgacacggaaatggaggaggagacagagttccttgagctcggaaccaggatatcaagaccaaatggactactgtcagaggatgtaggaatggacatcccctttgaagagggcgtgctgagtcccagtgctgcagacatgaggcctgaacctcctaattctctggatcttaatgacactcatcctcggagaatcaagctcacagccccaaatatcaatctttctctggaccaaagtgaaggatctattctctctgatgataacttggacagtccagatgaaattgacatcaatgtggatgaacttgatacccccgatgaagcagattcttttgagtacactggccatgaagatcccacagccaacaaagattctggccaagagtcagagtctattccagaatatacggccgaagaggaacgggaggacaaccggctttggaggacagtggtcattggagaacaagagcagcgcattgacatgaaggtcatcgagccctacaggagagtcatttctcacggaggatactatggggacggtctaaatgccatcattgtgtttgccgcctgttttctgccagacagcagtcgggcggattaccactatgtcatggaaaatcttttcctatatgtaataagtactttagagttgatggtagctgaagactatatgattgtgtacttgaatggtgcaaccccaagaaggaggatgccagggctaggctggatgaagaaatgctaccagatgattgacagacggttgaggaagaatttgaaatcattcatcattgttcatccatcttggttcatcagaacaatccttgctgtgacacgaccttttataagttcaaaattcagcagtaaaattaaatatgtcaatagcttatcagaactcagtgggctgatcccaatggattgcatccacattccagagagcatcatcaaactggatgaagaactgagggaagcatcagaggcagctaaaactagctgcctttacaatgatccagaaatgtcttctatggagaaggatattgacttgaagctgaaagaaaagccttagttggccatgctggaagaagaggatgcttttctggttcatggttctgttgaaacatatctacctgaaagagacagggctgatgttacctttttccactttgcactacctggtgccattctaaatttctaaggggaaaaatagaaagtttgtttactcttaagatattttatgaaattgtgtgtactttcctattttgccaattatgtgcctcaaagattttagttgagccttagcaagaaagtaggaccttccatttcaatacttcattaacacggtgtagtgatactttgtcccttagactggtgtttaccagtaagatacctttaatccactgttaagtatgagtggatttgtttccatagattagctggatttccttttggtgattgcattaggtttaaagtacacaggtctcaactctccccaggaaagtttcccctgtttgactccacctttaaaatcctaagcctgactaggacagccacaaaccacacaaggtgtaaaaccatcatcagctaagtgcccgttttgttcttgtttaccagaatctcctttaacttctcaaagggaagccgggctttctaatccacgtcaactttattttagttgtcaaattgggcattatattttatgtaaattggtcttttaacatcattttcctgatgaatgttggtgaccaccacattgtgaaatttaagaatccgtgttgcatgtttggtagctctctgagtttcaggccataaactcagctccagaggttaccttttaagtgccaagaactcaagtgcaaggtggcctactcaaaaatcatttggtagcattcagttattcatgaattcctctctcgcatgcattataaaaagtgatctgctttaaaacaccgtaatctgatcataggcttaaaattaaatatgagtattactttcatgtacaaaatatttcctttatagtcttcatatgccctttaaaatgccaacaagatttcaagtctgtaggcctctagtgaggtggggtggcaaaccacagctaagtctcgctcaccactgcaagctaagaatggtttttacattttgggttggaaaaattttttttgaatatttcatgacacatgaaaattattcaaatgttagtgccgataaataaagtggtactgaaacacagccacacaaacttgtttttgtactgtctacagctactttcacactacagccgcagagctgagcagttcagcagaccgtatgtcccacaatgcctaaaacattgactatgtttacagaaaaagtttgctgacccctgctctagcaaacgcatcctttcctactccaccccaatttgtatttagatagtttctctaacagaacggacaaatgaggctgcaaactaatttatttttgtcaaaaatcaatgttttgacatccacagacagtgaaataaaagaaatggcttgctgaaaaacatgaggagtcctagccacaaaatcactgcttaggttgcaattgccaaaatgaagccttcttagaagcacttctttagtatatacaggtgttggctgaagtccgtgcctcactctgggaaccattcttagtctccagtgtctcctattacaaagaagctggcagaaataaaaatgaaggggtgagagcggttccaccctagtctcatggtggaaaattcattggggagagctgtccaggatatttggagtcctgggtagaaggagcttgtaactactttaaagtcgacatctttgcacaggtgattgagtttctctgacctcattgcttcacctctgtctcctcccgtccttccgcacgtgcccacacacacgcagttcagccctctttcctccataagcctccatcgttttctcttttctcctcttgatcctttcaagcgagtatcttgttgaattgtatgttctgttggatctcctccttcataacatctggcttgttggacagaaaaaccctacagcccaccccctcccacagcccacctccacttttgaaagcccaaattacacctctcccagaacacagtgttgacgtaaatacagttacccaatattcctgtttgttcacctatttgctactttcactcagtagcatcccattttgtaaaatgaattccatggtcaccctgtcacaggaagtaatgaaaaatccagtgttcagtgtagtggtgcaaacctgagggcatagagctgttcatagagggctcttgttatagccaaacagacacagcaacaatctcaccatttatatatatatttttaacttgtccagctcatctatggaaaactactcaggtggtatgctgtttgaagcctcatcttcctacatgaaaattatgggcatttgtcccaatgattttgtttcagctgttctgtaggctgcataaccactctgatatttaggtatctgctattttattatcttaaaagacaaattaatttaattgcatgtgctagggaaaagctaccatgtacattcaccccaagtaaatagaatcctagatgaatcctagaaaaataatccctaagcagataggtagacagaggtaaacattcacatgatttagctctctagctcttgcactctgaacattcttgctttggttctgacttctgggaactgctttgcatttctcctatagatctgtagttaagggaaccaaggggtcattggggcaaaagcattgtttctcaaagctccttgattaagagaaagaacagaaatttgcacagaagatagtgtcaaggagtgagaaagtttgtttgagggcagtagctcagtgtggaagaaaatcctgaagtttctgttgaagccatacaatgttctatggggttactctctaagacattctctgaggtgtgtgaggaagtcactactcctagcctttgttaagatgtaattttaaatattcagttatggtactatgtttgcaactctcgtcttatcacaatgcctcagtagtttgttcccttagaaacatttagatgtgcacaaattaatcttttatatatctaaaggtttttctatcatgcattggattgctcagaataaagtgtctgttagacttcgttttggtaaataaattctccataatgtagattaataatataaaagtctttaatgacacaatatatctatatagcctcactgtataattcagaaataaaaattgattctgc

SEQ ID NO: 4048 - DNA, 662 bp, Homo Sapiens
  misc_feature (503)..(503): n is a, c, g, or t
  misc_feature (556)..(556): n is a, c, g, or t
  misc_feature (568)..(568): n is a, c, g, or t
  misc_feature (578)..(578): n is a, c, g, or t
  misc_feature (598)..(598): n is a, c, g, or t
  misc_feature (603)..(604): n is a, c, g, or t
  misc_feature (633)..(633): n is a, c, g, or t
  misc_feature (637)..(637): n is a, c, g, or t
gatcccttgatggagtggctgggatgtggagtgagataccaatagaacacgtctggacacagatatgccacaattgccttccgaggagaggaagccggggagccacacagcttttgttttgctgggtgaggtgtgcaagcacttagagcattcagaacagcaggaggggagactttattgatttttgcagcatccgccgtgggctggcttgggctgtgggcagcggacacggagttggccttgcagagccggctgatggggggagtgggccaaatgtgttcaggaaggaggtggctgctgggtcgctcagtaggtgatggatgtcttcagactcgactcaactgtcttcttcaggatggtgtggcagctggagccagcgctggagccagacacagagcaggaatccaaaacagggtccttcccagagcccagaatgatgttggagccttcagtcacaatgctggtgcagcaggacccaaggctgcctttcccactaccgagtncacaagtgcttcccaagccttcaccaacttcttcagacattgacagcgcttgncttccacccgangaaataagtngacctggcttggcgcacttncccannacattctggacttcttgcccttcaacaanctgnggtaagtggcaatctcacatccagg

SEQ ID NO: 4049 - DNA, 1094 bp, Homo Sapiens
acagaaagttgacttaatatagatatctataaaaagcaactgcgtgggggtggttatatgtagaacagaactcaacaagtaaccaaaaatacaggatgactctgacatgttggcgaaatagcttatggctggacttgagtttggaagttctgtatgtttgagggcatccgatgtcagagtccaaccggatcctaaccccagctcttgtcactaatctgtaaacaataatttcaagtagtatttagcaacttttaaactattaagaaattgaagcatcgatcattgtcctgtgcagacccaaactttgaaagagtcttccttaggtctaagcagataaaggcacttcatagtatgtttctaacattaacaatttttgatttaacaaaaaaaaagttaatataaatagactggtgttagctattatttggttttgttacattttgaacatacgaacaagtcatcaattttaagactagatttgtgtgatttgttaagaagtagaattatggctgggcgcagattgctcatgcctgtaattcccagcacatttgggaggccaagacgggcggatcatgaggatcaggagattgaagaccactccatggaataacatggtgaaaccccgatctctactaaaaattacaaaaaaattatgccgggcgtgagatggatgtgcgcatgtagtcccagctagtcgggaggctgcaggcccggcagaaatgaccgtgaacccggggaaggactagtgccttgcctgtgagacagaagatcgacacctatatgcaagatccggggcttggagagacagcagcgaagactccgggtgatcaaaacaacaaaaagaggaacacagtagcacgctgacaatagagatcgcctttacctccatcgtacagcacaactaagccacccattttacgcagcgaaatggcaacgcaaaggggaccagacatggaaatgtaaccccggtagatagaggaacaagaagggcgaactaacacagcgcggggcaaactatcataagcaaccaggatgagcgaatagaaaaaaaatcaacgaaagtgcgacaaggaaaagacaagaaggaaggaaac

SEQ ID NO: 4050 - DNA, 346 bp, Homo Sapiens
  misc_feature (3)..(3): n is a, c, g, or t
  misc_feature (262)..(262): n is a, c, g, or t
  misc_feature (319)..(319): n is a, c, g, or t
  misc_feature (332)..(332): n is a, c, g, or t
cantctccacatcactcattatgaccccttcttttataatgcttatatcttttcattaaagattacatttaaggttttataaatattgtctgttcctgaagaggaacaccactgttccaccttcattctcccttctaataactgtatatgaaggaaattctgataatgtaactgggaagcagtaattcatttcattccataccggggtcattactgtattactgtttcacttttgtccacatcatatggctatggtatggcnggaacaaaggtctttaggtactatggcccctctttctatttctggaaggggaggganaatatatattttnccttgggatattcc

SEQ ID NO: 4051 - DNA, 392 bp, Homo Sapiens
attcggcacaggctgtgtgtgctttttttcttcacatctgtggtgtcaacatgtttgaaagagaaatagctctgtggcttcaagtgtttctcaaaatgtatcacagggtacctctagccggctatcacagtaagacagtttgtgtctataatggtgcatacctcaaacctactcattgaaaatcttggatggtttcccttccacattagtacagcacaagttgggtcctcatggacaaagggggctctcagtttagtagctattcctttttggcagattacactgcagtgtggctgagggttcagttgcagtaaatggcaaagggtagggagcagcatgacatgtagttcttggaaataatcccctccaaagctgtatcaaagacatgcagt

SEQ ID NO: 4052 - DNA, 343 bp, Homo Sapiens
aggaggccaggctgcagaggtgcaggccacagacatttctacctgggggtaactgtgggcttcccagagcccccccacccagggagccccccaactggggccgtgcagcagagccacatggggggccctcactgggaggagtctgagctctgctccctgcctcctcccagatggaggccaaggcacaagaaccaggccctgcccactcctgccatggggccctgggcactccgtgactcagtttccccttctgtcacagggacagggtgttgcccacgactccctagtttctgtgaggggcttcatggcacagggcgtggccatgcccccatcggagacccct

SEQ ID NO: 4053 - DNA, 551 bp, Homo Sapiens
tctgttttaaattcctacctcaaatacgaaataatttatttagggttatgttacatacggagtgaaacaatacagaaaagcaaagggctaataatgacaggatttgaggagtgggtgggaggaaatagaatcacagcgggacacagggaggactcgaaagtattggttatgttctatttcctagtgtgtaattcttttattgttctttgtatcttacatatttattatagactgtatataagaaatgttttagttttaaaaaatcccacctctttggagcccaatgagagacacagcttctggcaggcactgatgaaatggaagtcacacctgccccccggaggcaaagcctttcactagttgggcctcctgcagatgttcctcagttctgtgctggtctccccagagctgcaggacagctggctgcacccagccctgggcatccttaggcttcctggctcctggcagattgctcctgtacggactgccacagagctctgatgttgccctgaccaaagccagtggccccctgcctctgaatcagctccagg

SEQ ID NO: 4054 - DNA, 698 bp, Homo Sapiens
cttaatcgcccctcatgcttcacaggttgactagtatctgtgggtacctccccgcccaggttattcactcacaagccaccgggccttcaggacatctcaagattcagtcttgacaatataatagcaaaagctggactaaagcccaaatggattgtctgtggcaatgcagaagctgatagcattaacagcagggtgttacagcataattgttaattcgcacatctattaggatccttaaatattcattacttaatgttaaattaacattctgtgtagggaggggaggcttattcaattcttctgacctcagaactggcagaaggtcagatgtgactacagaactctaggtgaaaaatcaggtagggttcaaattaagtagaactgcccttgccggaatagtgatcttcaaaaaacccttgcttttaggggagggaagcggggaaggaaaggaatgagggaggaaatattcctttctagcattcattttgcttagctcactccattgtgagtttgaccattttggagtcaaatgagcagacttccaaggagttgaccagtttgtgactagtctggtcacctttccagttacaggatcatattaactgtgtaaatgaattcatgggtagatgatttgtgcagatctgaatttaagaacatttcctttttctgtgggaatcacaagagtttatccactaaaa

SEQ ID NO: 4055 - DNA, 378 bp, Homo Sapiens
gcgcgccgcttagggactcggatagctagcggccgggagaaatacagtggaaaatgcaaaacaacgaaattataaagcctgccaaatacttctcagaattggaaaagagcatcctgctggctttagtagaaaagtataaatatgtgctggaatgtaagaaaagtgatgcgcgaactattgcccttaagcagcgtacctggcaggcgctggcccacgaatacaactctcagcccagcgtgtccctgcgggatttcaaacagctgaagaagtgctgggagaacatcaaggctcggaccaaaaaaattatggcccatgaaaggagagagaaagtgaaacggagcgtcagccctctcctgagtacccacgtcctagggaagg

SEQ ID NO: 4056 - DNA, 523 bp, Homo Sapiens
ggacacgttacgaagaaatatcacataggtaagtgtaagaaaactgaacagcctgccacattaaaatgatggagaacaaagaaaatctggcccagtttttctagaaatctcctccttaaggtgtgagatgagagcccctagtggaattaagtcctatttctctctacatccttgctgcaatgaagtttacagcaggttcccttatagagagcccactctcctaagcagatggagttacaaatgaaaacccatagccacacacacacacacacacacacaaaaggagaaataagagcagcaagatcatccaagaatactacatgtgctgccagaataattcctttaaaagtcaaatccaggaagcacagatcaacatctcacaaaaaactttagcagtgggaggcccctgaggaacttttcttctcttcccacaatggtatcccattctctcttcgtgctccactgatgggccagccacacaccctacataccttggcttctcctctaaaagtgctaataatct

SEQ ID NO: 4057 - DNA, 350 bp, Homo Sapiens
  misc_feature (269)..(269): n is a, c, g, or t
aaggtggagtttcactccagtctgtgtgacagagcaagactccatctcaaaaaataaataaatagaaagagagagagaggaaaaaaaaagaaaagaacacttctttatttgagggactttcccaacaccaggtgcttggggatttcttagagatcaccaaccgactccctcactgtgaaattaaaccaagtactggaaacgtaactaaacagcgaaccatgtagcttcacctgactcagtgctgggggcctctaccatctactgtgctntgtgtcatgatgctttttcttgaagtgggtgtggggaagtaccaggggactggcagaagcccaggccctctctacttttac

SEQ ID NO: 4058 - DNA, 677 bp, Homo Sapiens
catcacagctattaacaaataactttggggtgctcttttgattttagtcagttcattatattgggggacagagggctgctggaatgtaggaaactggatggaatgcagaaatataaataagaccaacgttccacaaaccaaagtgtcaatattgcctccccagaaaagttgtgtcctaaaagcacctgtttttcgcttttttttggaatcatatataccagaaacattactgagacctaaactaccgcacaccaaagaggatagaaaatacctcaatatttatattaaaataaagtgtttaaccacaaaaaagcagtaataaaatagtttcctaatttacaatttgcatccaaaggatgaataacaactcactaataaataatattcatataaatattttgtatgtcgaaaatagttttttaaaaggcaatggtctcaagaaacctctcgaaaaatctggtggtgaaaaacctgattgtgcccccctccccccactaaatacataatgagtttggttttaataaaacgaatgccttttgctgcaaaacggtgtgctttggcgttttggaaatgcaatccgggaagggggaaagattaagggaggtggaaaaggcatgattgctgctcaatttttttccctcacctcctcttggatgcaaaaaaatacctgccaggat

SEQ ID NO: 4059 - DNA, 539 bp, Homo Sapiens
caatcttgaaatatatccaggccgcggcagcctttccaaactcccgggcttcccacagaatgcgctcgaatgacactggaaagatttcaaaaatccaggcctccccctgttttaattcctttcttcccccaacagatgttgcaggcctggtgaggaagcccatcgtgtgtgactctcacgccactgacggggtttcgtggtgcggccaaattcctctatggccatccccagcatcagtccttccagattgaggaagccccttccaggaatgagctccatatttaaaggagtggaggagatgaacacctctccaccttggagccaagaggttaagctttcaggaggccccagggctgggcaggaaggattgaagctgtccctctgcccatccctcagagctgtttctctggactttaattgaaggtcgtgatcctcaaaccttcattttaatgactagttgcaacctcttctcttgttcagaccttgacccagcttctcaaccagccagagccactggtttggatttcatcttctatata

SEQ ID NO: 4060 - DNA, 449 bp, Homo Sapiens
tttttttttttttttttgttttatttcttatggttttgtctaaaaaacttttaaagcatacattttagagtcaggaggagaagctttagcctattttagaaacaggaaataagaaagcgtttggaagcagggcctcaggctgttggttgagctttgtgctcccagccccttgggtgtggtgtgcacgcttgtgtggggcctgcctttgaagcgattgtggggctggccattcttggcttaggatagttcctgtagtcctgatttagtgtgcagtgtacacagagtgaagccgcagctgactggaatgctggggctctggggtgtcgtggttattgagctgaaagtaaaccagaaaagctctttgtttctaccgcactgtcagtctgcagtgtcccagccagggcttttcagatctcagtgtcggagggctctcctggggcctcgtgccg

SEQ ID NO: 4061 - DNA, 295 bp, Homo Sapiens
  misc_feature (208)..(208): n is a, c, g, or t
  misc_feature (258)..(258): n is a, c, g, or t
tttttttttttttttttttttttttttttttttttttttggaccccatcaaataactttattcacacaaacgtcccttaatttacaaagcctcagtcattcatacccattaggggatccacagggttcaaggaacttaaatttaatgttttataccaacccaagtaaaccaagtccaaaaaattttcatataaagtggttcaccacgngggccctaaattaccagcttctgtgcaaaaaaaggaaaggaagaaaaatngatttattaactagttttggaaactaactttgggcct

SEQ ID NO: 4062 - DNA, 279 bp, Homo Sapiens
cgctctagaggatccgccatcttcgtcacatcaggaagtaagtcactagcaggagggcctaaatcgtctgagccctcctggctcttacgatgctcacttgttttcacaatgcagcaaaatgaaatgccttagaaaaagagtaacattccagaaaacggtgtaatttatgtttcttccttaattgccccatctgtggaggatttctttgctgaacaccacatcaaagggatcttctgcatttaaaatagaagaggcatcatgctgatgggagaagatgcg

SEQ ID NO: 4063 - DNA, 500 bp, Homo Sapiens
cctgcgaaaagattggaggcctctcattcccagccagtttaatactccgaccctccttttccagagtctgtcatgccctcctgggcagccccttctccaagtgtcagctgtcctgacctggccagtcctcatctatcagtgaccagacatatggtgcaagcaggtctccagcaaaactttcctcaactccagcacagccagtgtcttgcactcgattttcaatttcaccttgtggagcttggccatggaacaaaagacaggaacaagtgatgctattactaaatggaaggagtgttggaagagttaattgatgaaattaactcctcttcctcctccaacagtgcaggagcaagtatctgcttagtgtgatcatacatacacgcttctcttcacaagcttatacctctgggactcagagagtgaaactcagaaagcaaggtccacacgtgccaccgccaccctttaaggcaggtctcacaacaacctctctcatgcatcct

SEQ ID NO: 4064 - DNA, 3655 bp, Homo Sapiens
cttcagatagattatatctggagtgaaggatcctgccacctacgtatctggcatagtattctgtgtagtgggatgagcagagaacaaaaacaaaataatccagtgagaaaagcccgtaaataaaccttcagaccagagatctattctccagcttattttaagctcaacttaaaaagaagaactgttctctgattcttttcgccttcaatacacttaatgatttaactccaccctccttcaaaagaaacagcatttcctacttttatactgtctatatgattgatttgcacagctcatctggccagaagagctgagacatccgttcccctacaagaaactctccccgggtggaacaagatggattatcaagtgtcaagtccaatctatgacatcaattattatacatcggagccctgccaaaaaatcaatgtgaagcaaatcgcagcccgcctcctgcctccgctctactcactggtgttcatctttggttttgtgggcaacatgctggtcatcctcatcctgataaactgcaaaaggctgaagagcatgactgacatctacctgctcaacctggccatctctgacctgtttttccttcttactgtccccttctgggctcactatgctgccgcccagtgggactttggaaatacaatgtgtcaactcttgacagggctctattttataggcttcttctctggaatcttcttcatcatcctcctgacaatcgataggtacctggctgtcgtccatgctgtgtttgctttaaaagccaggacggtcacctttggggtggtgacaagtgtgatcacttgggtggtggctgtgtttgcgtctctcccaggaatcatctttaccagatctcaaaaagaaggtcttcattacacctgcagctctcattttccatacagtcagtatcaattctggaagaatttccagacattaaagatagtcatcttggggctggtcctgccgctgcttgtcatggtcatctgctactcgggaatcctaaaaactctgcttcggtgtcgaaatgagaagaagaggcacagggctgtgaggcttatcttcaccatcatgattgtttattttctcttctgggctccctacaacattgtccttctcctgaacaccttccaggaattctttggcctgaataattgcagtagctctaacaggttggaccaagctatgcaggtgacagagactcttgggatgacgcactgctgcatcaaccccatcatctatgcctttgtcggggagaagttcagaaactacctcttagtcttcttccaaaagcacattgccaaacgcttctgcaaatgctgttctattttccagcaagaggctcccgagcgagcaagctcagtttacacccgatccactggggagcaggaaatatctgtgggcttgtgacacggactcaagtgggctggtgacccagtcagagttgtgcacatggcttagttttcatacacagcctgggctgggggtggggtgggagaggtcttttttaaaaggaagttactgttatagagggtctaagattcatccatttatttggcatctgtttaaagtagattagatcttttaagcccatcaattatagaaagccaaatcaaaatatgttgatgaaaaatagcaacctttttatctccccttcacatgcatcaagttattgacaaactctcccttcactccgaaagttccttatgtatatttaaaagaaagcctcagagaattgctgattcttgagtttagtgatctgaacagaaataccaaaattatttcagaaatgtacaactttttacctagtacaaggcaacatataggttgtaaatgtgtttaaaacaggtctttgtcttgctatggggagaaaagacatgaatatgattagtaaagaaatgacacttttcatgtgtgatttcccctccaaggtatggttaataagtttcactgacttagaaccaggcgagagacttgtggcctgggagagctggggaagcttcttaaatgagaaggaatttgagttggatcatctattgctggcaaagacagaagcctcactgcaagcactgcatgggcaagcttggctgtagaaggagacagagctggttgggaagacatggggaggaaggacaaggctagatcatgaagaaccttgacggcattgctccgtctaagtcatgagctgagcagggagatcctggttggtgttgcagaaggtttactctgtggccaaaggagggtcaggaaggatgagcatttagggcaaggagaccaccaacagccctcaggtcagggtgaggatggcctctgctaagctcaaggcgtgaggatgggaaggagggaggtattcgtaaggatgggaaggagggaggtattcgtgcagcatatgaggatgcagagtcagcagaactggggtggatttggtttggaagtgagggtcagagaggagtcagagagaatccctagtcttcaagcagattggagaaacccttgaaaagacatcaagcacagaaggaggaggaggaggtttaggtcaagaagaagatggattggtgtaaaaggatgggtctggtttgcagagcttgaacacagtctcacccagactccaggctgtctttcactgaatgcttctgacttcatagatttccttcccatcccagctgaaatactgaggggtctccaggaggagactagatttatgaatacacgaggtatgaggtctaggaacatacttcagctcacacatgagatctaggtgaggattgattacctagtagtcatttcatgggttgttgggaggattctatgaggcaaccacaggcagcatttagcacatactacacattcaataagcatcaaactcttagttactcattcagggatagcactgagcaaagcattgagcaaaggggtcccatataggtgagggaagcctgaaaaactaagatgctgcctgcccagtgcacacaagtgtaggtatcattttctgcatttaaccgtcaataggcaaaggggggaagggacatattcatttggaaataagctgccttgagccttaaaacccacaaaagtacaatttaccagcctccgtatttcagactgaatgggggtggggggggcgccttaggtacttattccagatgccttctccagacaaaccagaagcaacagaaaaaatcgtctctccctccctttgaaatgaatataccccttagtgtttgggtatattcatttcaaagggagagagagaggtttttttctgttctttctcatatgattgtgcacatacttgagactgttttgaatttgggggatggctaaaaccatcatagtacaggtaaggtgagggaatagtaagtggtgagaactactcagggaatgaaggtgtcagaataataagaggtgctactgactttctcagcctctgaatatgaacggtgagcattgtggctgtcagcaggaagcaacgaagggaaatgtctttccttttgctcttaagttgtggagagtgcaacagtagcataggaccctaccctctgggccaagtcaaagacattctgacatcttagtatttgcatattcttatgtatgtgaaagttacaaattgcttgaaagaaaatatgcatctaataaaaaacaccttcta

SEQ ID NO: 4065 - DNA, 644 bp, Homo Sapiens
  misc_feature (458)..(458): n is a, c, g, or t
  misc_feature (488)..(488): n is a, c, g, or t
  misc_feature (516)..(516): n is a, c, g, or t
  misc_feature (522)..(522): n is a, c, g, or t
  misc_feature (549)..(549): n is a, c, g, or t
  misc_feature (570)..(570): n is a, c, g, or t
  misc_feature (592)..(592): n is a, c, g, or t
  misc_feature (623)..(623): n is a, c, g, or t
  misc_feature (636)..(636): n is a, c, g, or t
ccttttcgtctagttgatataattttatgtaatctctttggcagtttagtcaggacaatgaaacttgcataacagtggccagctctcccatcaacatttagaagaaaacttacctagatagtttgtgcctttgtgaatcaacacaggacatttataagccaataaatcccattttgaggatgccaggagtttagtttctggtcagccactaagtgtttctgggtagttttacttcaaacgtttaaaaagaaaattttttaatactcagatacattgtaagtaacccaagagcaaatttctatcgtcacaatttcggggaatcactgttttcatttccctccagggacagctgttccatcattgcaactattcaaatacagagggaatgaggttcccctggtgaactaaaaagcaaatctaacagagacaaagcgttaactggccgtaatgtaaaaggncttcaaatcaaataaagctaatccaaggtncaccaaccccagaatggctttaaatacngattgnaatggtgggaatatttgccgaaactgncctgggaaaccttccgggccngggaacttaacccgggttccgnactccggctaaagggcccgcctaaggttatncccggaagggccnattaatcg

SEQ ID NO: 4066 - DNA, 1446 bp, Homo Sapiens
gaacacgagtcttttggctattagtctaatgcattttcctccacattatattgcactgctctgaggcttgcttatatttttcatacctggatttccagggtggtgacgtgggggagggaagtattcaattcagaaccaccgtgaaccaagatctctggaaacaaactctgtactatttctccttcatctcctattttcataactagtgccaagctcaggactaactgcatagactccctttcaaaagaccaatagatattctcagtgacagttgaacacattagtttacaatcacacagaatttgaacagaacttaaagttgacagttaatgccgatctataattaacaaaaatgtcaacttgtggatatgctgatgattttatccagttttcaaaatatgattcctacagttcaggatatcacttattagattgtagacaaggaaaatgtacattgggacattatgtacttaagagtttttccttaagttttgcagaggaagtggttgaaaattgagctaacactagatttcgaggttactaaagaattccagttttccagtctcccacttcaattaccaggtaactataaggcaaaaatatcccaatgctgtgaacttaaggcaatattcatttcctttctacactacttggcatggtaaccatgacaaacttttattttctctttctgatttcctaatgaaatctcattatttgcaaagctttaaaatgactagatgaaggaaaaacattgttatgacccatgaccctcggagcccaaacagcaccatgaagagcatcattaaaactaagagaaagtggctatcagaaaatgaaacagctttaaaggggttccttttaagtcttgttttctattcagaatgttctgtgttttttctcaagtgtgggaatgacatttatcttagcaggttactcaactacactggatgatgtcactctaaccagtgtacggcactgacccaagtcctggggggctccttggaccaatggactattttacaaacctgggaggtgggagggatggtatatttttgataatcagacattccaatgtaatgttttccttagaggtcacacccttccccccattaatgtcatcgtgagatacatcaagtgtgttcttttctattttcgtataataaatgggctttgcttatcaacatcacaatggcaaagaagaaatatactgtacaaaactgcaggaagataaaacatgaaaactttctatgaaaaaaaaaaaacacccttgagtttcctgtcgtcttcttttgaaactgtagtgcatatgttaaaacatgtatatcatttacagtattgagtcgtgtgccactgctgtacctgatgtatccaatctggattaaacaaattatgtgccacaaaaaaaaaaaaaaaaaaaaaaaaaaaaaaaaaaaaaaaaaaaaaaaa

SEQ ID NO: 4067 - DNA, 2072 bp, Homo Sapiens
cggaaacgatcccaccccagtggcagtggtgctaagaaagaaaaggcaactcaaccagaaacaactgaagaagtcacagatctaaagaggcaagcagttgaagagatgatggatagaattaaaaagggagttcatcttagacccgttaatcagacagccagaccgaagacaaagccagaatcttcgaaaggctgcgaaagtgcagtggatgaactaaaaggaatactggcctcccagtagcattggatgcaggaaaaaatacattgacggtgaaaaacaagccgaaccagttgtagttttagatcctgtttctacacatgaaccccaaaccaaagaccaggttgctgaaaaagatccaactcaacacaaggaggatgaaggcgaaattcaaccagaaaacaaagaagacagcattgaaaacgtgagagagacagacagctccaactgctgatccataaaccagaagcctgatatgtttggaagtccttttcaataagcacatgattagtgttgttatattggcaagggctgtagacattctgctctggtcactgtattcagaatacaggttcttttctggtgtcacttttgtaagtagcaactataaacataagtaagctgtttagcaaaacacacattcctagtaggttttggttttttgatctttataaagatgaggtttttttcctagttactgtattaagtatgacttcttttagaaggttacaaaaaaattcagatgttgatacctttttaggaaatgtgcataccactcatcaaatggaatgctgaaagtttgaggtgcttgtatataatcggataaacaaaactgatcaacccaatgtgattttaaaagcccccaaagaagcttctgttttgggtctgatcctcttgatggagaaactgcagcagcatggaaattgttgggtactgtggcatacaagttattttctacagtagactgagataaactgaaaactcaggagctggcatcaaactcgtagtcccatagtcagtgttaattacacacattgttaactattggatgaaaaatacatgctattgattgtgtccaaagcctcccgaggacctccgtggggatgctctggtagcctgaatacagaactgaggtgaaagtccaaaccttgaattttacagtagtaagttggtaaaccatgtgctctgtgctatgagttaattatgttttcccaaatactaatgtggcacaagtaccatattttatcagagttcttatgtacagtatggtgaagataagtgacaagcacacatttttcttgcttcactgctgttctatattacacaggtttgttgttgttttttttaaaaaagaaattaagcagtagttagtctctaaaaatacaatgtttcaggctaccacagtgaataaatagaaatgtaatcagggattaaaaaaaaaacttatgcagcttttcaaagttgattgtttcaaaattggtgtttatttaaaataagtggtaatgtacttgaatgcactttttatgacaatgattcagtaatggtaattttactattaaagaaagtgaaaggtttagttttgttagcatggctcagcatgtagctgtcaggtgtttttcacctaagggcaaaagaaaatgatagtaataattgcagtagttgtattgtattgtatttttgcacgtgtggtaagcataggcttgaagaggtgggtaggcaggtacatgtacttcctaaatttggagataattatctttctgtaagttcgttatgcttgactgtttccatgttctcccaataatgattttatagttacttatcactttactcatggagaattaaaacgtaatgtttttcaactgtatctttctttaactggataatactgctatatgatatgcttactacagactgcattaattcacgaaacgaattctgttatgctgtaatttgaactctcctcaccacaacttattaaaaaggcaccaatagtttcccaaaaaaaaaaaaaaaaaaaaaaaaaaaaaaaaaaaaaaaaaaaaaaaaaaaaaaaaagaaaaaaaaaaaaaaaaaaa

SEQ ID NO: 4068 - DNA, 557 bp, Homo Sapiens
  misc_feature (6)..(6): n is a, c, g, or t
  misc_feature (161)..(161): n is a, c, g, or t
  misc_feature (417)..(417): n is a, c, g, or t
  misc_feature (488)..(488): n is a, c, g, or t
  misc_feature (526)..(526): n is a, c, g, or t
gtgacnatgatcttggctcactgcaacctccgcctcctgggttcaaatgattgtcctgcctcagcctcccaagtagctgggattacaggggtcctccaccatgcccagctaatttttgtatttttagtagagatgggttttcaccatgttggccaggctgncgttggactcctgacctcaggtgatctgcctgcctcggcctttcacagtgctgggattacaggcatgagcaccatgcccagccaagaaattgatttcattggtccagggtggataccactatattttaaaactcctcagctgattgtaactagcagccattgttgagaacctatagcatcacactacatgaatgcttgttataaatggagaatctcaaatcctatcccagtcctactgaatcagaatccgtatttnaataagatcccaagatgctctgggctttgtatgcacagtataattggagaagcactgtctagactaattanatatctaccagtggccacagagtctactaggactgtanttctcaaaatgtgattccaggaccagtggct

SEQ ID NO: 4069 - DNA, 437 bp, Homo Sapiens
tttttttttttttttttaactggcagaaggtattccaacatccattactcttcatactggccaaaaccaaaagtcattgaaaagagtgagtaaaacaaaacaaaacaaatcaggcagggcaaaaggtctccacactggtgaactgtattgtagactgaatgaaaagacagcctagcgcacatacaaaacatatcggatactgcagtggaagaactgtgttttgaatggatgactcctctgatacttgctttcaatcctgtgagaggaactataattcaaactttcatgatttttagtagaaagaaatgtatgggaaaagtgcagctaggaagattatacccagaaacaacacacatactgctcccatccagcaatgtgaagccatttccttttctttccttgcaggaatatatacatcccagctgctcctcgtgccg

SEQ ID NO: 4070 - DNA, 379 bp, Homo Sapiens
gagtccctgggctgcagccgctgctacacatactcacaacgctgccgccgcgctccgtgggcaactcctactactgctgggctgggctgggctgggctgggctgcgccggagctcgcctgcacagatcagctccggagaggggaaaaccacgctcctcggaccaagcctcgggagctaagccagatctgccagtgagcctcaggctttaggaactgaagagtgtttctgaaagatctatccagcactccgatggccagcaacaacaccgccagcatagcacaagccaggaagctggtagagcagcttaagatggaagacaatatcgacaggataaaggtgtccaaggcagctgcagatttgatggcctactgtgaagca

SEQ ID NO: 4071 - DNA, 272 bp, Homo Sapiens
tttttttttttttttttttttttcctccaaaaagttgtttttgttttttttaaataatgggaaaatgccacgcgaaggtttgaaccaaaggcccctccaggggccgggctggggagggaaaggggagacccaaaagggggggtccgggtccccaaagcctgcggcccctgttttggcccaggagggggtgaggagggacctccgttgtgtcgaggggctccaggcccaaaaaagttaagttcagttccgaaaaaggcggttctttatggagg

SEQ ID NO: 4072 - DNA, 657 bp, Homo Sapiens
  misc_feature (288)..(288): n is a, c, g, or t
gaaaggcaggcaaaagccccagacaggccaaaaccttcatccttcatgcacccaacctgtaccaaacaccagcatggcctggctgtgagtgcacagcagatggaggtttgctgggcagagacactgggctggcctagacactgcctttggtgataccctaaaccaaaggggccagtcccacagtaagaaggagaccactactactcctgctgccctcctccccccaccttgcctagtttacaagacaggaggaaagagagaaagcaaaaaagttagaaaacaaaacanaacagaagtaagataaatagccagaagaccttggcgacaccacccggccctggtagttaaaaaaaagtaacaataataataatatcaacccctgacctaaactatttgtgttatctgtaaattccagacattgtatgaaaaagcattgcaaaactttctgctctgttagctgatgcgtgtagcccccagtcacgttccccgcttgcttgagatatcatgaccctttcacgtggaccccttagagttgtaagcctttaaaaaggccaagaaattcttttttcagggatctcagctattaaagatgcaagtctgccaatgcttctggccaaataaacctttccttctttaaaaaaaaaaaaaaaaaaaaat

SEQ ID NO: 4073 - DNA, 488 bp, Homo Sapiens
tttttttttttttttttttgacttttaaaaataatttaataaaatcaagtgagaacagtgttttttttttttttctatgtatagtcagttaggactttggcaaatataaagcacaaccaatatactgatgtaggggggaaaataatttaaaaaattaatttagtaaaatgcctggagcagtaagtaacaattattaacaatactacaatgaagctgtctgtactttcatttaacaacacacttaaggcaaatgttgaattaatataaaaataatatgtggtaaactgatacttgacatgatacaataaaaattaattttcacgttgaagacctagttatgacaacatctctacatgccttctaaatacctaatttctcagttgtgcagagcatagctcactatggcctaataagatgtcaatcagaatatccagaatatttcttaatatagagcaatacatttcccctaccacatcaggcaaaataat

SEQ ID NO: 4074 - DNA, 367 bp, Homo Sapiens
gctggtgtgacagatgcctctagttattagatactcttaagagttttcttaggggtctaacttgagagcggaagacagttaatttctttctcacatccttcattcctcagcatacagggaattccttgaagatttcttttgataactggctgtgtcattctgacgtcaagatgagactggacgacctctgggcctccaagttgtatgagtccggaccggggaggcagagaagggtcaatagacccgagaggccgtaccgtcagtgatgcccttgttcccgtgggagcccttcggttccacgcggttcccaccacgcgcccgccaaccctagcccgaggcctcactttgcaggccttccccgaaagcg

SEQ ID NO: 4075 - DNA, 362 bp, Homo Sapiens
ttttattttgtaaatattatctgatgtttggagcttgagtatacagactgtaaatatagttcttgtatttgtactaattctgattcttttgctgtatagccttagatgtgcaatgcagacactatctaactgtgtgtggtaaccttgcgtcacggagctgttagtgaacgaggtaaaaataataaaggtacagccagtgcaaaaaaaaaaaataaaaaaaaaaactcgagggggggcccggtacccaattcgccctatagtgagtcgtattacaattcactggccgtcgttttacaacgtcgtgactgggaaaaccctggcgttacccaacttaatcgccttgcagcacatccccctttcgc

SEQ ID NO: 4076 - DNA, 3079 bp, Homo Sapiens
gaagtgagtagtgggggtgccagaccaggtgcgtctgccgctggattgtgataggaagcagagtgttcgtgtgaaagatggatactatgatgctgaatgtgcggaatctgtttgagcagcttgtgcgccgggtggagattctcagtgaaggaaatgaagtccaatttatccagttggcgaaggactttgaggatttccgtaaaaagtggcagaggactgaccatgagctggggaaatacaaggatcttttgatgaaagcagagactgagcgaagtgctctggatgttaagctgaagcatgcacgtaatcaggtggatgtagagatcaaacggagacagagagctgaggctgactgcgaaaagctggaacgacagattcagctgattcgagagatgctcatgtgtgacacatctggcagcattcaactaagcgaggagcaaaaatcagctctggcttttctcaacagaggccaaccatccagcagcaatgctgggaacaaaagactatcaaccattgatgaatctggttccattttatcacatatcagctttgacaagactgatgaatcactggattgggactcttctttggtgaagactttcaaactgaagaagagagaaaagaggcgctctactagccgacagtttgttgatggtccccctggacctgtaaagaaaactcgttccattggctctgcagtagaccaggggaatgaatccatagttgcaaaaactacagtgactgttcccaatgatggcgggcccatcgaagctgtgtccactattgagactgtgccatattggaccaggagccgaaggaaaacaggtactttacaaccttggaacagtgactccaccctgaacagcaggcagctggagccaagaactgagacagacagtgtgggcacgccacagagtaatggagggatgcgcctgcatgactttgtttctaagacggttattaaacctgaatcctgtgttccatgtggaaagcggataaaatttggcaaattatctctgaagtgtcgagactgtcgtgtggtctctcatccagaatgtcgggaccgctgtccccttccctgcattcctaccctgataggaacacctgtcaagattggagagggaatgctggcagactttgtgtcccagacttctccaatgatcccctccattgttgtgcattgtgtaaatgagattgagcaaagaggtctgactgagacaggcctgtataggatctctggctgtgaccgcacagtaaaagagctgaaagagaaattcctcagagtgaaaactgtacccctcctcagcaaagtggatgatatccatgctatctgtagccttctaaaagactttcttcgaaacctcaaagaacctcttctgacctttcgccttaacagagcctttatggaagcagcagaaatcacagatgaagacaacagcatagctgccatgtaccaagctgttggtgaactgccccaggccaacagggacacattagctttcctcatgatccacttgcagagagtggctcagagtccacatactaaaatggatgttgccaatctggctaaagtctttggccctacaatagtggcccatgctgtgcccaatccagacccagtgacaatgttacaggacatcaagcgtcaacccaaggtggttgagcgcctgctttccttgcctctggagtattggagtcagttcatgatggtggagcaagagaacattgaccccctacatgtcattgaaaactcaaatgccttttcaacaccacagacaccagatattaaagtgagtttactgggacctgtgaccactcctgaacatcagcttctcaagactccttcatctagttccctgtcacagagagtccgttccaccctcaccaagaacactcctagatttgggagcaaaagcaagtctgccactaacctaggacgacaaggcaacttttttgcttctccaatgctcaagtgaagtcacatctgcctgttacttcccagcattgactgactataagaaaggacacatctgtactctgctctgcagcctcctgtactcattactacttttagcattctccaggcttttactcaagtttaattgtgcatgagggttttattaaaactatatatatctccccttccttctcctcaagtcacataatatcagcactttgtgctggtcattgttgggagcttttagatgagacatctttccaggggtagaagggttagtatggaattggttgtgattctttttggggaagggggttattgttcctttggcttaaagccaaatgctgctcatagaatgatctttctctagtttcatttagaactgatttccgtgagacaatgacagaaaccctacctatctgataagattagcttgtctcagggtgggaagtgggagggcagggcaaagaaaggattagaccagaggatttaggatgcctccttctaagaaccagaagttctcattccccattatgaactgagctataatatggagctttcataaaaatgggatgcattgaggacagaactagtgatgggagtatgcgtagctttgatttggatgattaggtctttaatagtgttgagtggcacaaccttgtaaatgtgaaagtacaactcgtatttatctctgatgtgccgctggctgaactttgggttcatttggggtcaaagccagtttttcttttaaaattgaattcattctgatgcttggcccccatacccccaaccttgtccagtggagcccaacttctaaaggtcaatatatcatcctttggcatcccaactaacaataaagagtaggctataagggaagattgtcaatattttgtggtaagaaaagctacagtcattttttctttgcactttggatgctgaaatttttcccatggaacatagccacatctagatagatgtgagctttttcttctgttaaaattattcttaatgtctgtaaaaacgattttcttctgtagaatgtttgacttcgtattgacccttatctgtaaaacacctatttgggataatatttggaaaaaagtaaatagctttttcaaaatg

SEQ ID NO: 4077 - DNA, 345 bp, Homo Sapiens
ttcatagtcgaggctcggtgttaatcggccgaggggagctcatacctggtatagggccgaggattggctgttccggggctagggagcgctttctcccgggaaccgcggctgtgagcccaagtggcccggaccagtttggggctgcgtgcggcctgcctcaagcaaccaggtacgtaggtcggcggcccagctcggcgctgcggtgggagccggagggcgacagtcagagccggggtgccagcgggacgcgaccgccagatccacttaggaccccgtcgttctgcgaagcggccacgtctgagtcccggggcctcctcgtgctgcagatgtcgccttaggacctcg

SEQ ID NO: 4078 - DNA, 476 bp, Homo Sapiens
tgtttgttttttttggttttttttttcactgtctatgttgcccaggctggccttgaacttctgggctcaagcagtcctcccacctcagtctcccaagtagccgggactccatggccagtccttctcaaccgttaactcccacagtcacagggacggaactgtgataaccttgcttcaggcaaggcccagtctttccccagcctctgtgagtgccacgcacagggccagctgtgaggctcggaggactcctgcgtgtcctccctggtggaagcctccagttctgaggctgagcctctgaatttataaccaaagagccactgagcgctgtccttccttcccatgctaacatacttcagcgtcctttcctaagatactgacaaaatgtaacaaccatgcacagctaatctcggaacccaacaaatccaggtacacagctggccagcctccatcagcgctggagatgccctcactgcacg

SEQ ID NO: 4079 - DNA, 535 bp, Homo Sapiens
cggcggaacggctgtggtttctgctggttgtaggtccttggctggtcgggcctccggtgttctgcttctccccgctgagctgctgcctggtgaagaggaagccatggcgctccgagtcaccaggaactcgaaaattaatgctgaaaataaggcgaagatcaacatggcaggcgcaaagcgcgttcctacggcccctgctgcaacctccaagcccggactgaggccaagaacagctcttggggacattggtaacaaagtcagtgaacaactgcaggccaaaatgcctatgaagaaggaagcaaaaccttcagctactggaaaagtcattgataaaaaactaccaaaacctcttgaaaaggtacctatgctggtgccagtgccagtgtctgagccagtgccagagccagaacctgagccagaacctgagcctgttaaagaagaaaaactttcgcctgagcctattttggttgatactgcctctccaagcccaatggaaacatctggatgtgcccctgcagaagaagacctgtgtcag

SEQ ID NO: 4080 - DNA, 629 bp, Homo Sapiens
  misc_feature (12)..(12): n is a, c, g, or t
  misc_feature (597)..(597): n is a, c, g, or t
tgtggcagatantttttattatggggaaagataactgggaataaagctatcatgcagatatttgcagagataaaagtaatgcagatactgagtggagttttgatcaaactatgcttgaaagccactctaccactagttacacaaaccaataatttcccttcgcagtggaagtcagcttgagttttttcaggtgtttttgtgggtttcaccagatacagcaaagaaattaaaattactgttaatggatgtcaaaaccagtcagaagtatcctaagttatataatttgtcaaacaaccatatacatatattttgtattatatttatccttttgttcttcctttggtaggaaaattgtctcattaattcttatacgaaaggacttaaaattagcaaactttttttgcaaacacatggattccattcttggacttgaggacaacttgacgaacaggctggggaggccttgagtggtctggagccagcttgaagcggagcagagttaatgccactgccactttacactcaattatggcaaaatgctgcccaatgcagttccttaatccagctgagaatggtatgaaggcatagggatgtatnttttcagaattttccctggagaatctcagggg

SEQ ID NO: 4081 - DNA, 600 bp, Homo Sapiens
atatagtatgtgttttatttgtgtggcttctcgcacgtaactacttatgatgcaaacatgttgagcatcaacaatgtattgattctcatgatggatgttattacagtaaattagcatgccattactttttatctatgtatcttcttgatatttgtatcatttctagtttcttagtattacacatagaggtgcttctcagcttggagatgtaagcacccgataaaaatatgttattattcttacaacagctactaaacttactgatctgcaaattagcacatatacatcaaatttttgatgttataggacaaacaatatatctgaaatctgaagagagataaggacgtgcagggaaataaacaggagcagatgataatcttttctgggacagaggctgccaaatgccatttaagttagcacacgattaaagtagacatattcattggatggtttcaatttgagtgtgatagagaagttattgtttaaattctcagagtgtatacagttgaggaattcctcctgctattgaagcctttttcttcagtactggggatacatcacaaaatgctccagcctctaccctttgggatggtgctgtct

SEQ ID NO: 4082 - DNA, 527 bp, Homo Sapiens
  misc_feature (20)..(20): n is a, c, g, or t
  misc_feature (391)..(391): n is a, c, g, or t
  misc_feature (422)..(422): n is a, c, g, or t
  misc_feature (438)..(438): n is a, c, g, or t
  misc_feature (472)..(472): n is a, c, g, or t
  misc_feature (477)..(477): n is a, c, g, or t
  misc_feature (483)..(483): n is a, c, g, or t
  misc_feature (506)..(506): n is a, c, g, or t
  misc_feature (523)..(523): n is a, c, g, or t
tctcctgcgcatcgagatcnctacctgcacccgcccagcaccctcgtactcacctggtctcctgcgcattgcagatgccacatgcacccacccagcaaccttgtcctcacctggtctctggctgtccagagttgcttcctgttgacgacagctctcctcagaagaaagccagcttccctctacaagtgctctgggaaaaggagagcaggttgaagtaacatttcctgtactgagacttgcaccctgtgatctctcactcatcccaaattctgcatgtggatgtctttcttctgagaacacccgatgtgtgtggatcggaagctcagtgggcttattcgtatttaacctggcaaacctggaagtggaagctgctttgtattacaaggatttncagagcctcagcatcctgctgggccggattngtgtgccctgaggaancgcactgcgattgcaaaaagggtggctgtgcttnctggnccttcnctcttttggcggggaagaattgncgttgttggagatcaanccgg

SEQ ID NO: 4083 - DNA, 481 bp, Homo Sapiens
ttttctctttgtcattcagatcttctttctttgttccacttggttcgacactaccatctgcagaattaaaaaatttcttaatctgtcaccgcttttcagaatgtcataccattagtctctgcaaatgtccctccccgaaaagttacaacacacatgattaactgaatggcatgcggtgtcccccaccccagggctgtgagcatgcgtgactaataaactgctatttcatctgtccagtgtcggtgtcctacgttcagccatcccatatccctagggcaggaatcttctagggttataaacagaactttaatcaacctctccttggttattttactggttccatgatacagctttttccgtgcaaaagatctgaacagaaacttcacagaggatacaagagtggcaaagaagaacacgatattcagcattcttagccattacggaagtgcaaattaaaaccacaatgagatcccactagact

SEQ ID NO: 4084 - DNA, 518 bp, Homo Sapiens
ttttttttttttttttttttttttttttttttttgctgagccaaagggaccatttttattaaattccagcaagactactgtacatgtttcatgcaaattaaatatgtgtcttcactgcccctgggaggggagcactttcactgtcagctccttcattggtgtgtcaaggggggagtgtcaaggggagctctcaatgtattccgtatggggggcagttgggatcatgactcggggtaaaggggaaacagtaggtagctgagggtccctgggaccttgagtcttcaaaggttcagggactgcaggaccttggtcctttgctggtactggcaccagaggatcttgatccttcaaaggcactgggactataggaacttgattcttcaaaggttcagggactatacaaccttgattctttggaggctgtaggactgtggggccttgatccttaactagtactgggagaatggggtcttgattcttcacggactcggggaccacaggaccttgattctttacag

SEQ ID NO: 4085 - DNA, 52985 bp, Homo Sapiens
  misc_feature (4415)..(4415): n is a, c, g, or t
  misc_feature (18280)..(18280): n is a, c, g, or t
  misc_feature (18349)..(18349): n is a, c, g, or t
  misc_feature (18370)..(18370): n is a, c, g, or t
  misc_feature (22021)..(22021): n is a, c, g, or t
  misc_feature (33420)..(33420): n is a, c, g, or t
  misc_feature (47538)..(47538): n is a, c, g, or t
  misc_feature (51685)..(51685): n is a, c, g, or t
gttgggatgtgtggtctgtgggatcctcaaaggcaaagagaaactgggagtcacagtgcaggggaatacagaaggcatccttgaggtccagaaccatgaaccattctgcttcctctggtatttgagagagcaggatataggggttgggtacaactggatatagaggaattactgccttattaatgcgtctaagatcttgcagtagtctccactgactgttctgtttttgtactcctagaattggggtgttgcagggactgctgcattttttttttttttttttttttttactaagacttgagcttttaaatgtctaacaatatcctgtaatcctttatgaacttcaggccttaagggatattgcgtttgatagggaaaagtggtggggtcttttagcctgatttggattgggcgggcatttttgcccttctgcattgtccttccaatgcccagacttcagtgttgattccctccttaagcagggggacaacaaaagggtaacttgtttcccatattcacgtagataatagctccagctttggctaatatgtctctccctaataaggatatgggactttcaggcataacaagaaaggcatgtgaaaagagcaaagtctcccaattacaattgaggaggtgggagaaatacctggttacaggctgtcccaggattcctcacgatggtaatggactttgaggacagccgaccagggcaggagattaacactgagagggccgcaccagtatccaagaggaagtcaatttcctgtccctcaatagttaaatgtacctggggctcagtgagggtgatgacataagccggtgcttgttccaggcaccctcagtcctgttgttggatcggctggttgggggactctggcctagagcacctttgtcctctggggcagtgtgccttccagtgattgcctcagcatagtggacatgggcgagggggaagcttgtttctcactggacaatcttttttaaagtgtccttgcaaaccacactgataacaagccctaccagctgattggcctgctctattttctgtcctctctgaaccaccagggtttgtttgtctgagggccatgactaaggctgtgccctttctctgatttcactttttcttctcagcctgttcctcttggtcccttttatagaacactgaggttgccatgtttaataatgcctccagattttgttcagggcctagggctttcttttggagctttctcctgatatctgtgactgattgggaaataaacttatcttttaggataaattgaccctcgagggagtcaggtgacaggggagtgtattttcttaaggcctcctgtagatgctcaaggaagacagaaggattttcttcctttccttgagttatggtggacatcattgaataattcatgggctttttcctaaattctccttagtccttctagaacacaggtcaacagatgtttgcgacaccaagtccccatgatctgagtctaggtcccagtggggatccatactggggatggcttgctgaccggtagggaatttgtccctttcttcagctgtcattctatcatttacttgactaaaataccaggtatctccaaactctcgggttgcagctaaagccacattcttttcattaaaggcccagggtttgatctcatagcatgacatctctccaagtggggtcaaaggtttgccctagaccctgtaggacatctatatacctatcaagatcatctgaaaacttccccaggtataccttaatctgctttaaatcagagagggagaaggggacatgtacctggattgggccaaattcccctccccctacagtttgaatgggacataactgatagcctgggggtttttgtggtcctttggagatttctttgcttgtttccttctgggcagagaagattagaggaggcttatcattaataggaaggggagctatagggaggctaggataatgggggtaagctgagaggtcctcctgtggaatgaaaattgcaagctttgcatagttgtggattctccttcaatgaaaagaaagcttggacataaggtatttcactccatttgccttccctcttacagaaaaggtcaagctgcaggatagtattgtaatttacactcccctcaggtggccatttttccccatcagagagagaatattggggccaggccatagtgcagaaaaaaatgagtcacctctttatcagggtttgcgggtcaaattggtcccagtggcttaggatgcatttcaaggatgagcctgttgatgcctgagtgtttcccatctgaaagaaaaaaccgcccatggttttggtttgtttctgcccatgcccccccacccctggcctgcccaagaatctgcaatggtccctggaccctgctgatcagaatagttgtactcactgatgcagtagcagaaacactagttttcctcctaaaccacaaggaggactgaggaaggtcggatttagtggcccttaccgacacattcttgaaaacctgcacccttgccttccctcttagaccgcaaagaggaccaagaaaaatcaggtttagtggcccttaacaacacattcttgaaaacctattagagtcctaagcattttctcctgttagtattgggaccttacccctttcctataaagatgatattccccaaaaatggagtggagggccataccctgagggagggaagagatctccagggttggaagagtaatgccttttgtccttacttctcatcatatggataggaaggatataatttctgaagctccccatatagcctttgttaggcctgcttgtctgaggagggatcctaaaaggatagttgaactcccccacgcgacggggctttgggcaaaaattatgtctaattggtgagcctgggtgcctaaagaagggaacagagtcatgaaatttatactagacatcattcttataggagaaactagaaaagcaccagaaacagggagtgctttctaaaagcgggactagtctcggagaagagaggcaggaggaagtttgtctgacaggcattaggacccaggaggcaagggtcaggatagataggatagatgggcaagtgttgcttgggcaatgtaactttgagagttccactcatggctacatggtcaaccaacattttgttgggaccttggagctgaatggctttcctttctgtcaacccttgggtcagcccagatgtacaggaaaggtggaagctggttccaggtaaaccaacgctcccaactccgaagagtcagggtttgttagagagccctttcccagaaagcctgacacccatgtctttagtccggtggccacgctagtcacttttaactggctgacaggtgcctggtgtttagtccctgaatcctaaggaaaaataggacagaatagctagcgaaaggggtccaatggtactcactgcttgacgatagtcccttcttggtcaccaagaagtgtctggaattggttccttctggtggattcttggtcttgctgacctcaagaatgaagtcgtggacctttgtggtgagtgttacagctcttaaaggtgccacggacccaaagattgagcagcagcaagatttattgtgaagagtgaaagaacaaagcttccacagcatggaaggagacccaagtgggttgctgctgctggctggggtggccagcttttattcccatattggtccccacctatgtcctgttgattggtccattttacagtgtgctgattgccagattagagtgctgattggtccattttacaaacgtctagctagccacagagagctgattggtgcatttttacagagtgctgattggcacattttacaaacttctaggtaaccacagaatgctgattggtgcattttaaaatcctagctatagagcactgattggtacattttacaatcctcttgtaagacagaaaagttctccaagtccccaccccatccagagtccagctggtttcacctttcagtagcaaccctgagtgaaaagaacaaagctggaggcatcacattaccttacttcaaaatatattacagggatgtattaacaaaaatagcatggtactggtataaaaatagacacatagaccaatggaacagaatagagaacccagaaataaagccacatatttatagccaacgaatctttaacaaagctgacaaggacttatattggggaatggaaaccctcttcaataaatagtgctgggaaaattgggtagtcacatgcagaagaatgaaaccagacccctatctctcaccatatacaaaaaccaaatcaaaatggactaaagacttaaattcaaaatttgaaactatgaaaataccagaagaaaacctagggaaaactctcctggacattggtctaggcacagnatttatgactaagacctcaaaagcacaggccataaacacaaaaatagacaaatgggactctattaaactaaaaggcttctgcaaagcaaaagaaaccatcaacagagtaaagaaacaacctgttgaatgggagaaaatatttgctaagtattaatccaacaggggactaatatccagaatatacaaggaactcaaacaactgaacaggaacaaaatcccaaataatcccattaaaaagtagacaaaggacatgcatagacattttgaaaagaagacatataaatggataacagcatatgaaaaaatgctcaatgtcacttatcatcagagaaatacaaatcaaagccacaatgatataattatcttatcccagctggaatggctactattataaagacaaaaaataacaatgttgacgaggatgcagagaaaatggaactcttttttattttatttttggagacaaggtctcactctgttgcccaggttggagtgcagtgtcacgatcatggctcagtggagccttcacctcctgggctcaagtgatcctcccacttcagcctcctgaagagccgagaccacaggcatgcaccaccacatctggctaattttttttttttttttgtagatacaagcagggtctccctatgttggtccaggatggtctcaaactcctgaactccagcaatcctccctcctcggcctcccataatgctgggattacaggcatgtgtcaccacatctggccgaaaagggaactcttatacactgttggtgggaatgtaaactagcacagttattatggaaaacaaccgtatagagagttctctaaaaactaaaaacagaattactatgtgatcctgcaatcccagtattggatagctacccaaaggaaaaggaatcaatatattaaaggaatacctccattcttgtttattattgcactattcttaaaagagaagatatagaatcaacctaagcattcatcaacggatgaacagataaagaaaatgtagtatatatacacaatgaaatactattcggccattaaaaagaatgaaattggccaggcatggtggctcatgactgtaatcctaacacttggagaaactgaggaggaaggattgcttgagcccaagagtttgagaccagcctgggcaacatagtgagaccttgtctcataaattttaattaaaaaaaaaagaaaccctgtcattggcagcatcgtggatggatctggatatatcttaagtgaactaagccaggcacaacaagacaaatatatattctcacttatatgtggaaactaaaatattttattttatggcagtagagagatagataacagagactgggaggggtgagtagggagctggggtgggtgggtgaagagaactgggttaaagggtacaaacatacagatagaataaactcaatgtctgatagctgagtagggtgactatatttaagaataatgtattgatcttgggtgatggatacctaaatgccattacttgaacaatacacattatatacatgcaacaaaatttctcatgtcctccatgaatttgtacaaaaatacctgtaaaaatcaaattaaactaaaatccttgactgataatcccattatctctgtcacttctgtatctgttcctattgaatgatttttctgcttcttttgggtcacattttcctgcttcttcctatgcttagtaattcttttattagatgtgggcatttaaaatatttttttactgagtgtcagattgatagaatttctttaaaaagtgatggttcctctggtgggtagttaaattaacttatagatcaagttgatcatgtcaaggcttgttcctttagcttagtattgaggtttacaatagcctttattatctagggctggtttagctccactatggagtgactctctgggtctctactgaatgttctgagttttccatgaagactccaattttgctgggtggagctaaacatttccccatcctgtgtgaattcttggaggttctcaggtatgtcatataccctgttgtatcctgctccctcttgcgcagaggctcgccaacacagcttttgttgctattagtagtttgtctctatttgcttgtattttgatgttttgagggaaatcctgtcacctggtttttcagtgagtgcacttggatggtctggttttttccatacagttgctctgtgtttttcatttttatttatttatttattttaattaattaattattgctattttgtgagacattcaagtcttgctctgttgccaggctggagtgcagtggcatgattttggctcactgcaacctccacctcctgggttcaagtgattctcccacctcagcctactgagtagctgggactacaggtatgtgccaccatgcccagctaatttttgtatttttagtagagacagggtttcaccgtgttggccagaatggtctcgatctcttgacctcgtgatccacctgccttggcctcccaaagtgctcagattacaggcgtgagccaccatgcccagccttatttttatttatttttaacaaacgggggtctcactatgttgtccaggctagtcttgaactcctgggctcaagtgatgctcctgcctcagcctcctgatgtgctgggattacaggcataagccatcacacccagcttactctgtgttttcatgtgaagattttgaaagattcaaaaacaatgcagccaacaacctaaccatcatcttcccagtctggtagaagttttaagggccagcatttaccatgctctctttcccttgtctctccaatagtagaagcatgtatcaaaaggtagccctccttagtctgtgtccctggagttattacaatgagtagagcttgtttgttgacctccaatggatatgtatcacgagaaagatataaattttgttattttaagccattaaggttttgggatttttccattagcacagcataatctaatctctcttgagagatagtgttagctttctacccaagccaattcatttttttgacctcaagtaaccaccattaagttaagagaaaggggtggggaaagtacgaggtctaggaagaaaataaataaggcaaagaaataaagcactttgagaactgtgtctaggaaataacagatagcttattaagtcttgggggaactgtattaccaaagaaagtatacactgcccacccctcccccaacaattatacactgtgaatggtactctcataaaattgtttaatttcgtattgctatgcctaaattacccactacagtgaatgtctaaccagggcctctcagaaactgagagagggtgaggccacttatattttctcaaatgaagaaattcccaaataacattataaaaactgtggttactttcaaagtttatcttgctaaatgaatgtatttaatcccttaatagaattcattataattatatagatgccaagtcttattacaatgctatagttttccatcttcttccatagcttgatactaaagaatgtcatgttcaactgattcttctcaattccttggtttctggtcttgattgttgaagggtggggaagccagggaatagtggtcctaacacactgaatgccttaatggcagaattcactgccataaattctacagcagacatttggggtttcagattttttttgcctttcagtttttggtcacccgatgtctgataccaaatgtgatatttagcaatcttgtagtcgttcaaaagaacagaaaacccaaatagaactcgtttttcaaatatccattatcacctttctcaaccagcctagtatttgcttgatgagctcatgatcaaaatgatggcagggaatcactttggttactatatggaagatttatttaaggcaagaatgaattcagaggaccagttaagctcccttctggttcactgctattgcaacagtccagatataagacaatgttgcagtagtgtacatggaaaaaagtagtcggatggtggatacacttttgaggctattttgctgatggactgtatatgggaggaatcaagtattgttaccgaaacaccaggggtttggtctaggtcctgctgctcggtgcacagaaagccaatcactgagatgacaagtattgccaaggaagaaggctttaatcaggtgctgcagccaaggagatgggagtgcagtctcaaatccatctccttgactgaccaaaaccaagggtttatatagcaggaaagaaatgtaacaatatgtaagaaaacaggaacatgggaggggcaaggaagcaatcatggtgactgaggggcccagcatctagtgcagtgatctggtttcagttcttttgatactttttatggcttcagttctttgatactttttgtgagaggcctgaaggtcctttcctgaggaaggaactcggataaaacaagtaagtttccagctttaactgcaaaagggtcaacttctataatcccagcactttgggaggctgaggcaggcaggtcacctgaagttgggagttcaagaccagcctggccaacatgatgaaaccctgtatctactaaaaatacaaaacttagctgggcatggtggcgtgcctgtaattccagctacttgggaggctgcggcaggagaatcacttgaactcaggaggtggaggtcgcagtgagccgagatcgtgccactgcactccagtgagggcaataagagccaaactctgtctcaaaaacaaaaacaaaaacaaaaacaaaaacaactgtctataggactctttggctggtttcagtaggactcataaggttctgatttgagcaatggtgtagctgcttatgccattgattcagacagggaaaactggggaggagatttacggggaaaatgaggacttctgctttggctaggtcaaatttgagacgcctgataggctaccaactgcagttgtcaagtaagcagttggatataaatttggggttcccagacaggtcagagtggaagacacagatatttgggcagcttggaccactctgagtccttattatgatacctgacctggtatggagtagaagagaggaaccagccaatctaatttttggcacatggataaaagtcgatacctttcagtccatattggaatggagataacgatttatactccctagaaaagacacttaaactggatatggaattacttccgttatcacagtctatcactgtggcctcctgtgttattaccagataccttatacacagctagggtgtcccatacaacactgcttcttgcttggcacacagtcgcatagtattcaatcctgtgttaaatggcttagataataagtcacctgtagggattatagcaagcagggaccatcattttcacatagaatttcccaggactggcagggacttttaaagacccagaaatctttctgggcagtgcctccaaagtgtggcccctgaggtgttactgctgctctggtgaccgggggtagttgaccctatttcaatgtcaatcagaacaatatacattcctttataaacttgttttttttttgagagagagtctcactctgtcacctaggatggagtgcagtggtgcaatctcagctcactgcaacctccgcctccctcctgtgttcaagcgattctcctgcctcagcctcctaccgagtagttggaattacaggtgtgtgtcaccatgcccagctaatttttgtattatttagtagagacaggtttttgccatgttggtcaggctggtctcgaactcctgacctcaagagcctcctgggcctctaaaagtgctggaattacaggtttgagccacctcgccccgcctatactgaacatttacataatattttgtttgactaggtttctgccattaagaagatgcaaaaccctgagggagtgtacctcttcactttgcatatgggaaaactgaggctcagagaagtgaaatgactgagacctccaggtgccacctccctttcagctgctcctgccctgctccaagcaaggatgtgccaagtcaagagaagacagaggacaattaatgttatctgaggatctcggagcctcatccctgagctatgatggtctttccctccttagttgggagccccatcacgttcctccgaagctctagttgtgtgataaggagggtggaatctgagacagagaacgatggccctccaaggagggagttcggggtgaggaaaacagcaaaaccatgtgctagacaagatcttcaactgcagggctctggaggcaactgggaagttttgaaagtgcagattgaagctcagggccgctgtgggtggcgcaggaactgcagaagacaagataggattagggagggccagcaggttgccagaggcccttttccacctgctgggcttagaggggcgggactctgcccgctccctcacttggttgggtttaaatgaccactccccgccctagctgtgcctttgagtgtgtggcaagggattgcagacgggagactgcttgtcaattcagggaagtcagcctctttctgccacttaattcgcccatcagtagagatccgactttcccacggttcactgtcacccccattgcacaggtggggaatccaaggcacagaggcgtctgggccagagtcccgggactatccactcattccggggttgtagggcagcatgtgtcaggagcttgggctcgagcgtgcggggcactaattgcgagtgcagtggccacaggctcccgggcaaagtggtcaggagcccattcccgccacctccgtccgcgcgccccgccctgtcctccagcaagttggtgcacgcgcgtcctcccacagggcgcgggatgggggcggggcctccgtgttgttgtttctctggggccccgcccctcaggggggcgcggaccacgcggccggagggcccgcctcccctccccctccccgcccagcccgcccgcctctttgtatccaacatccgggtttccccgctggctcggctccgtggccgccgctcaggatccattttggactcggttcagctcccctcccccccacccctccccccgttcatggcccctccggactcggcccctgcgcccggggcccgggcccagccccgccgcgctatgcctgagtcgggcgcgccccggcccccgcgtcgccccggagcccgggccgcagcctgcgccgcccgcagcggccctgagcccggccccgccgaccggcccttggagcccgaacgctgctcggggacgaaggcgcaggaagcgcgcagggaacgagaccgaaggaaggagcgggaaggagagcgcagccgccgcctggccctgcgcgccccgggagcgccgtgcggccctgcccgcgggctccgggtgtgcgcggggcggcgccgcggaacatgacggcgccctgggtggccctcgccctcctctggggatcgctgtgcgccggtaagaactgggcgcggcgtggggacgccgagagggcgcgcggggctggcctctggcgccgcgcggtgtttaccaacaaagggcgggcccggggccttgtcgccgcaccacctgtattcagccctcacctccgggggcgtgggctgggggcgcggtgggcgcccggctcgccgaacttgggggcacgatcttgtctgtgtagtcatctgcgggattctggttcctagaggcgcccctgcgatgggggccgggacgcggagcctcagggtcggagttcgggctacgcgggcgcgtggaacccagggaaagagtgaggaaaacctgagcctggggaaggcggccaagaggggtgggcagatctcattgggggtggcaggattgtaggtgcagcagcagcagcagcatgcggggagggttgcatgtccctcagagtcactaagtgtagcgaagcgaagggggcggcttcacgcagcccaaagtcccctgcatctcttgccaccagtctgcgtcgcgttaccggcccggcgggctgttggtgctggctcccacctgctccctctttccctgccgttggccccgggatgcggagtgtggtcgcttcgcgggaccgctttgtttgggcacttgggaggggagggggtgggtaagatggaaaacccaacaggtccctcttccttcgggcctccaggaggcacgtggcggggtgggtgaccagcgctcagctcgcccgcggctgcgggcgtgtggctggaggtgttcggccagcgcaagagagtttgggggtaagtgggcgcgggcgtaaacaagcggagttccgcctggaaagcttgtttctcctacggtccaagcaccgatttccctctctcagtggtgccggggtgcgcctaaccccggcgggcgcgccgggacgtcccctggccagtcctgggaaacgtggggagctgggcattgaagctctggcgagaaggtcggggcggctggtacccggccgccgggtcctgcgcgtctttgttcccagcccccattacacatgcagcgcgggtcccccgccgccctcggtggcacccgcctggagtctgggaaaccctcgaggggcggggccgggcgtgcaggggcggggccggagtccccacgctgctgcgggggtggggatttgggatttgcgtcccattcccaccctggttctaccttctcctgtgcgtcgtcgtgaggcttagtttacaccgaaagcgagtgagttctgtagggtagtagcgcgcgcgcgcgcagcctgagtccggaaaccgaagggcaaagaccagctggcacctgagtaccgtatggaagagggcgttgcagctctcctggagccgctttttggaggcgaagtggtggtcgtgttggactttctgcttttttttgccccgctcccttgggatgccttttccccaagaaggagtgctcgaaagtgaaaggggaggcattggtctgctagagggagggcggcagcaagctgacttgataggcagaccgcagcccacctgactgcctccagacccgctgggtgcctgatccctggaagtgctggggctcttccaagcccaggcctttaggagagcttcctcccaagacaggacagcttgagacctgggatttggggatcacaccagtctcacacctccctccttaggcagggcagggcggcatcagacccctggaaggactgtatgtcctttctttttcctctgcttcagtcacctagcttgggcagtgctgagcagtgtaccctgccagggggcagtcagagtcacactgtaaggacctgtattcctgccctgggaggaaggtgggggtcactgggtatttcttgtagtcacatcaaccagtccctgacctgtggagaactgtgaaaagagctgccccaggcccagtttggagcagacctgaccgtcctgttgctttggcttcagggatgccctttaatttcaagctcctggcttgctgtttggaataacccccatactgtgcagcacacaatgcctgctagaaggaacatctagaagagtgctgtgtgacagaaatagtgtatgaactatggatagatataaaacaacgttttctagtagtcgtgttaataaaaggaagaagaaacagctgtgtcttagctggggctgccataacaaaatactgtagactggtggcttaaacagcagaaatttatattgtcaaagttctggaagctctaagtctgagcccagggtgcagggtgctggcatggttgggttctggtgaggaccctcttcctggcttgcagacatctgccttcttactgcattctcaaatgacaggggtggggtggggcaagggggtgttttcctctttttgtaagactgtgaatcctgtcctcattacctgatggccccaccctcatgacttaatctaaccctcactacctcccaaaggtcccgtctccaaataccattacactgggggtcagaacttcattgtatgaattttggggggacacattctttccatgagatggaatgaacttcaatagtatattttactggcctggcacagtggctcatgccggtaatcccagcactttgggaggctgaggtgggaggatcacgaggtcaagagatcgagaccatcctggccaacgtggtgaaatgcgtctctactgaaaatacaaaaattagctgggtgtggtggcacacgcctgtagtcccagctgcgccagaggctgaggcaggggaatcgcatgaacccgggaggtagaggttgcagtgagccgagatcatgtcactgcactgcagcctggtgacagagtgaggctccgtctcaaaaaaaaaagtatatttcactgaatttgatatatacaaagtaatttcagcctgagatcagtattaaaacgagacattttgcattccatttttgtactgtcatcaaaatccagtgtgtgccttacagaacatcctcaactctaactttccacatttccagtgctctgcagaacatttggttagtggctaccatattagacaatggaatctcagaagggaaggtagaatttatggtgtaataaatgtcacatggtgcttgtcacaagatcagtcagtggttagttggttctttaataattcttcaagtcttttgtggtctgtgcttggccgagtgtccttgggaaacaagccatttggctcttgcatttcagtggacatcctggacactcaatgctgtatcctacaagaactcctgacacctgtctctgtactctgtacttggggttcagatcaaagggcttatgggggtggggtaaacagtattctaagtgaagtgaccagagctcttggagagggacctgcctcctgtctatcccatcaggaagtgcaggccctgattactctgataggctgacccaaagaagtttcttggccacttccttgggggagggcggagggagtgagctcatgaagtgaagtgactttcatccctcaggcctagtgtagcggtagctgccaaggacatgggctacagagccatgggccgtgggtgcccctcccagagaagagtgttttctgctacctgtccttgtatctgctgggcactcgaggctctgccctgtctgggtgggctgccttttgggaggaatgggtatcctccctagctcttaggggccctttcaaggcagatgatgtgagaaacctgcccatctttccaggccctatagctgggtaaaaacataagatctaaaccctatggcctcccatcacttgggtgggcctctactgtgtactactctgtgggtctttctgggcatcaagaatctccagaagcacctggacctctgctggcacttcacctaaggaactcctgttataaggagccaatgaagagcccacattctatacagtggtcctccatgtcatagacccctctgagaatctgatgaaagctgtggacccttcctccaggaaaatgtaaatcggtatatgtgtgcatgtgtgtgtacattgtatgcacccactctgttttgtacagatactgggaacctactgccccctgattagactccttgaagtcctggctgccctgcacatatccactgtagtagtcttaaggggcagcttgttctgcgggggaggggtgctttttccaccttggtacctcacttactttgccttttgtgatcctgccggatgttcagattctagccctggtctctctttccagaaagctgtcctcttgagtgccagcctatgcattcagcccctctgcttgggagctcagggtagtgcaaatgagaaccaaggagtatcggttcaggagtttagatccattcacggatactgacctgtcaccatggattgggatctggagggttgaggactgggtctggataatatttttgctagtgactgtagatagactctagatagtcctgaggcagggtcctggttgcatgggcctcactgtagaacagggtttctcaaccttgacactattacattttgggcctgatgatactctgttgtgtatgggtagtggtgggttgagctgttctgtgcattgtaggatatttagcagtatccccgcctctacccacaaattccagtagatcctctttaatcatgtcaacccaaaatgtttccagatcttgctaaatgtccctggcagaggtgagagccaaatcatttcagattggggaccactgatttaggatgttctcacgctttcaaagaggtctacagttgtaagaagtaggggtaacggcttttgagtgcatatccatccccccactctggatgcagggttggaggtgaggttctcctcaaagcctaggagattcctgcttagtgaaatctgctcagcacgtgagagtttggttcaaaattagtggttctggtgtacagcttaccaccgaggagaatcctggcgtccttgagttttcccagaagtggttcaggtttcagggaggcggaggctgtgggtggctgggcagcctgcctgcccgcacccgcccactcgcctctgaccgttgccttaaggctggcactcagcctcttcctcccgtacacgcagaaatgccaggaagtgcctgttgctggggactctctgcctgcccagcagcccctctctgctcacctgggggcctcaggagctaaggctagccctgtctgccaagcggagcactggggttgtagcaggccgtgggcatgccccttcccctgagtggacctgccatgtggcgctccggggagccgcagaggctgtgggcctggagcccccaggccggggacaccagggcaggtgggcagcctctccccaaaggtatgggtgcaagtctctccctcagggtgtggtggccagatgggaatctgagggcagggccaggcttcctgctgtggacctggggaggtgtgggcagcgctgccttagacaggcagccgacactggaggccctggtggagcggttggtatctgtggaggcttgtctattgggcttggcaggctggcagccccctgtggctgcccccatgtttattttctactcctcccctggcctgcttcaagcttggctagggaacgcttctgtgggactctgtctgtctcatcttgaactcagtgagacacagtttgctgcactgggaagtgattacaaactggactcttagggtggaggaagcatttttcaaagacccagtttccaagtgctccacatcactggtatgtgaagtgcttgctgaggttcagacttcctagttccatctgtttttggggtctttacaaaggggactttatttccttctcagaattctttctcttccttccctccggttctatcactaattctgtgttccaaaacagacacccacccccttgttctgggctttcttttttggtctctcattctctaccagacttacgggtccatcccagccctagaggtgcctattccttgtggtcctgggggtactgctactgaatgcccaggttttctggtggtggaaatgctgctgccttcttctgactctattacattgctcagtgatgtctctgactaagacagtggtaggtactggaaatcaatggataaagcaggctgggattgttcaagggtcagccatgtctcttcccggcccaggaccaataatggcttcccgccttcggacagccccatgctttcccctggttattctaggcttgctgtacacatgcatgtgcctttttcagattctttctgggactggcagctccaactgggtgttttcattcatggacgcatgacctctggaagcgggtgtggaaaggaagcctgtcccactgggccaaatgtgaggccctcttcccaggggaaatgttgtctggatgggtctgacctgctggacaatgggcctnctccctggccagtttctgggctggagctgaggtgttttgtgaggcaagctcatgctctttgcatgtgtncctctgccgactatttcagtnccactctgacaaccaaggaggctaaaattagttctggagaaggaaaaggaaggctggttggaaacccaagcccttggctggagaatggaggaggctgcttcccaggtttgtgcctgagcatttcggaggatgggatgagaccagctgttatccgtccatctgaggagaaggaggggtccctgtggcctcccagacttgaaccaattaaaacaggaaactaacttggaagctgactctctcgagtgttgatgccaggatattttttccttctggcttgtgcagtggcgcacagtgttttcaggtatgaggacaatgccttttaatgaatgtccagtgccattgacaaccctcctccccctcccctccaactggattatgtgtccgttgatttagaaagcatgcatgagttttcccagcctgggctggcaaccatggtttaagaactcttattttatgcactttttgggaatttccttctcactgaggtttgatattgggttagaggggagtcctgtggcccagggctcacacaagaggtcccgcttctctgtgtagtgagggcatagtgaatcaaggctcatctgctctgggccttagaaaccagaggagcagaagggttagagagatgaattctggtttcttttcccacctggctggctccttctgtgaaccttctggctgagggtgagacctacagggctgtgtgggagtagaaggagggccagggcaatgtagtcctatctcccctgccctgaaacctcgcatccaaacctcccatcactgagaggttagccaccctggggtatagttgggggagtagaagtcacttcccccataactaattttcccatttaaaaaaaatttattactttttaaacaagtaatatacctacattatattgcagaaatttagatgttacagataatactagggtctccttttatcacttctgttccccatccgaggccccctccaaaggtaatccttttaagattgagatgtattcttccagacatttttacttgtgcatctatagaaatacttatagaaatagagaggcttttggccgggcgtggtggctcatgcctgtaatcccagcactttgggaggccaaggtgggcggatcacctgaggtcaggagttcaagaccagcctgaccaacatggagaaaccccgtctctactaaaaatacaaaaaattagcccggcgtggtggtgggtccctgtagtcccagctactcaagaggctgaggcaggagaatggcgtgaacccgggaggcggagcttgcagtgagccaagatagcaccactgcactccagcctgggcaacagagcgagactccatctcaaaataaataaataaataaacaaacaaataaataaataaataaataggcttttttccacctaaaatggtattcaagcatttaattgaagtataaaacatatacagaagaatgtacaagtaattaccataagtaacagctaagaagcattttcacaaattgaatacactggtttagtcagcatccaagtcaagaatcagaaattttccagccccccatccccagcaagccctgttttgttccatttcagtctctgcccacacccactaaggttaactactattctaacttctaacagcataaaatagtttcatctgtttctgtgcttcatatgaatagaaccttacagaataaactgctttgtgtccatcttttcctcaccatgtttgtgactttaagctatgttggatgtcatggctttttaaactcggagatttgctttggcaaactttctgatacatatggatctactttgatctttttaataactacgtaatattctaaagtttaaatatagactacattttacctagtttcttactgatggactttgtgattgtatagaatgtatgcagactgtttctcaagagtagatgagaaaataacatctggatcataagcacgtatgttatcggttttaatagatactgaaaaatggttataccattttatttatttattccttgaggctacccaagtgatggcagtgagggtagaagctgggtgatatggcagttggctctctgcagtaatctgtgaacatccttcctacctccacaccccaacccctgctgaaatgctaggttacagagtttagaaatagcctggtttcatgaagggtgcgcggacatgggaagggctcacttccactggcttaatgtatgaggagacctggagataacctctcgtgcctgtgtctcctaccttgtgcctgagtctcctgggtactgtgctgatgagggaggtagcactggactagccaggatgtgctggtctgggtttgggatggaagtgcatatgtatgttcacttaccaggctctatgctgcgtgcagactctgaagagactaaggcacttgttgaaggtcgctgaagagctctgggtaacagcactactggcaagcccactgcatttgacaaaatctgagtgtgacaaattctgatttcatatgtcgtgataatgacgttgggggtattggagaaacctgtagaaaaactattttagagtctggtgagaagcttttcatgacagaaggagctctggtgagtttctgttcctggctgagtgtatgccttgttccctgtataagtctctgccacagttggcagaagacttagggaagatagtttgggatgacttgttcaccaaagctgttgcttcccagtcttgttcttcagcttgctgcctactctttactgttatgttgggattctttatgtaagtccacttgtcaggccctgctaatggatttagatgacactcaagtttgtggaactgtttctagtacaaatgatactccaatcagctttcccacattatacatatgatgtgcgctgtttgtgtcttagtctgctcaggttgccataatggaataccatagattgggtggcttaaacaactgaaatttcttttcttacaattctggggactggaagttaaagatgaaggtgctgtcaggattcgtttccagtgattcttctctcttgggttggcatatggtagccttcttgctatgtactttttgctgtgtgtatccactccaggtgtctcttcttataaagataccagtcctgttggactggaggcccacctttatcacctcatttagccttaattacctccttaaagtccttatctgtaaatatattaatggcaaaacctgcaattacttttgcaccaacccaatagtcacattggaggttagggcctcaacctatgaattttggtgggactcagttcagtctatgactgtctgaaacaataaagtttggttgaaagtgaattctgttttcctcttgagtgacattttggaatggaagttaattttttcagggctttgccctggtgtctctgttgttcttgcttaatactgcccatggacaatcttgtctacactggtgggcttaatttccgtgtatgtgtgcaggttcccttgcctttgggcatgttatgatcctgaaaatatgtctaaaagctgggtgaaaagtagattggagatgtactttcctgataatcaggaccaaatatctttctaaaggtaactggacaaactacaaaaaataaaacttctctggttgaaggcatngtatatctaagaagatactgaagaactaccaggccagtatctgcatgagaacaaaggcctagggtgatgattttggtattttgagtctgtttttagtcataggggcaactgagaggctgcatttgatagctttgtggggctaggaagacaggaattggagttctaagcaaagggtgggcagagtcaatcacttatttgggattgagatcccaaagatatagaagttagggggaccaaaatgtagacaaaccctaaagttagattgaaatattctgggctgctgggttgggtggtgcacacctgtaatcccagcctacttaggagactgaggcggggaggatcagttgagcccaggagttcaagaccagcctggacaatataggaagaccccatctccaaaacagaaaatattttctgggattaatggtacctttagacatgttaattctttctagaggatttatgtcatcctaggcctcgaattatctctataattttgcaaatacaatgactggctggtaattttaagtaaacagccagcagaaacatcacagttgaaaccaacctggatgacctccaggttggagttgccatatacatatttaaaaatagaagtgttcgggctgggcgcagtggctcatgcctgtaatcccagcactttgggaggccgaggtgggtggatcacgaggacaggagttcaagaccaacctggccaacatggtgaaaccctgtctctactaaaaatacaaaaaaattagctgggtgtggtggcaggcacctgtaatcccagctacttggggggctgaggcagggaattgcttgaatctgggaggcagaggttgcagtgagctgaaatcgcaccactgccctccagcctgggtgacagaatgagattccatctccaaaaaaaaaaaaaaaaaaatagcagtgttcactgtggtcaaggaaatgagagtgggaatttcagcagatagctgaaaactataaacccaaggaaaaatctcttaaagaattgttttacgtaataacagaaattaataaatccatgaatgcttttatcaggggattaggtgaaactgtatagagcattagtgaattggatgatagatcagaaggagatataaactgaagcatggacaggcagaaagatggataataacagaataaagagaaacgcatagaggatgaaatgagaaggtctaagagtcatgaaatcacagccacagaagtaaaggagagagaatgaggcagaaaagttaatagctgagaactttctaaaattaattaaagacatcaagccacagattcaagaagtcctgtgaatcccaggtaagacaataaatttgaaaaatccacatctatttccatcacagtaaaaattccagaaaacaaagacagaatgttgaaagcagctagagaaaaaaggcattactatcaaaagagctgtagttatactgacagctaacttctcaatagaaacagtggaagccagaagataatagaatgatagctttaagtgctgaaagaaatagttgtcagcctaaaattctgtatcaagtgaagctgttgttccagaatgaaggcatcatcatgttaagtgaaataagccagacatggaaggacaaataaccacattatctcacttatatgtggaatctaaaaaggttgatctcatagaaatagagcgtagaatagtggttaccagaggctaaggaggtaggtaggaggtcagatggggagagggtggtcaaagggtacaaaattacatttaaaggaaaaaattctggtctgttgcaccgtagggtgcttgtagttagcaagaatgtatggtatatttcaaaatagccagaagagaggattttgaatgttcctaccacaaagaaatgataaatggtaatggatttgttaattaccctgatttgatcattacgcagtgtatatatgtatcaaaacgtattctaccccataaatatgtacagttattacgtgtcaatttttaaaccaaaacttcttttttttttttttttgagatggagtctggctctatcacccaggctggagtgcagtggggccattttggctcactgcaacctccgcctcccgggttcaagtgattgtcctgcctcagcctcctgagtagctgggactacaggcacacgccaccaagcctggctaatttttgtattttttagtagagacagagtttcaccatgttggtcaggctggtcttgaactcctgaccttgtgatccacctccctcagcctcccaaagtgctgggattataggcatgagccaccacgcccggcctacaaaacttcttaaaaaagaatgaacatgtcaaggaatgtgttcttcaggcagaaggaaaataaatccagatggaatgtcagagatgaagagaggaatgaagagcaatgaaaataataaatattcgggcatttatggtgagaatgtgttactgagttggaaataccacaaaagaaaatgcttggcaacaatgctatctgtgagagtggagtgaaaatcaatttaaattgttctaaagattcttacaatgtccaggaagagagtggaactaccaaataatactaaatttggataaggcatgctatcatctctagggtaaccaaaggatagattataattttcaagctaaaaaagacacaaatgggctgggtgcggtggctcacgcctgtaatccaaacacttcgggaggctgaggtgggcggataacctgaggtgggttgttcaagaccagcctgaccaacatggagaaaccccatctctcctaaaaatacaaaattagccaggcatggtggcgcatgcctgtaatcccaggagggaggctgaggcaggagaatcactcgaacatgggaggcggaagtttcggtgagctgagattgccccattgcactcccgcctgggcaacaagagcgaaactctgtctcaaaaaaaaaaaaaaggcagacaaatgggttgagtgcagtggctcatgcctgtaatcccagcactttggtggttcaagtggggaggatcactggagcccagagtttgagaccatcttaggcaacgtagtgagaccccatctctaccgaaaataaaaaaaattagccgagtgtggtggcattgcacctgtaagtccgagctacttgggaggctgaagtgggaggattgtttgagctcaggagtttgaggctgcagtgagctgtgattgagtcactgtactccagcctaggtcacagagcaagaccctgtgtccaaaaaaaaaaaggagacatggaataatagagaattcttcagttgagaagaaagcaatgagagacaaggggacatagaccaaatgagataaatatagctaatatttctaataaatatatgatgttaaaattattattatttttaagacagggtcttgctctgtcacccagggtggagtgcagcggtgcaatctcagctcactgcaaccactgcccctctaggcttaagtgatcttcccacctcagcctttgaagtagctaggaccacaggtgcaaaccaccacaactggctaattttttgtatttttggaagagatggggtctcaccatgttgcccaggcttgtctcgaactcctgagttcaagcagtctgcccatgtcagcctcccaaagtgctgggattatgggcatgagccaccatgcgggcctgatgtaagaattcttaataaataagtaaggatggacctgaatacttactaaaagctctgaggccatgggtggagttggcttaatctagggtgatctgatggggctgttttgggaattagttggattccccctgagaaatatcttctgttttctctctggagggggcaggcttggatatcaacatcctggaagtcaagggggttgagaactaggggtgcctgtatttggtatattgttctgtattcctcctgtttcagtgtgatacctgtgtcctcagatttgcctgctcctctttgtcgaagaggctctctgttcattttctttagaaaataaacataatctccgctgggttggagaggggcaaccatgatgagtggtggtgggatctgaggatctgactgtaccttactaaccaactcttctgtctttagactcatttttaccccattctttcaaagacatctggtgccacaaattcctgagttttgaagggttctgtgggggaagtcacattgcttttctactttatccagagccaacttaggagtctgtgtgatcagttaccatgtgtgtaagtgctttccagccttgaaatgtcatttctgtagttctctcctgttctctttgttcttacaggtttatgcattaaactactttattgcagttttagtgggactacaagagggagcaaaaaggaaatgtttgtgtataatccttggcctttacctggaagctctccttccagtgttttccaggaatgatggggcctggaaaaaggcatgtatttcagagctgtgggaggatggtgccagggccttgtttacaaagtccaagtgggaagtgacttgaggtcacctggcttggttccttgtttctaggcgggacttctgaaggcagatggagctcctcctgtcaccttggaaggtgctcctgtatttacatttctggcatttgtagtgaacaaaacagtggaaaatcctcatgcaaaatacatagaaatgctggaaaaagtataataaacacccttttaaaatgcatatacattgctgcatgtataagaagtaagggaaaaacaagaaggagctggaaactagagctgtatgccttcactgactgaaactgctgattcctgggggactttgcctgtctttataatttagagatgtgggtttaagtagcagtgtggacaataggagagaagatgtggaattgagactgaggccttggcatggcttcagactcctgtggtgttataccttcagtaaaaatgtgggccagaagaaacatgtctttgttgacaaagagactaaataatgaaattgtctgagactgggtagggttggggttggggtagtttccccgataatttataaccataggcctatgctcatgtgagctgggcatttataccatccggttctctggtaaactaagttgagaaattaaagtggttccaaatagttaatgtcctagggagattggcagaaggcagaaatataagttaccttggaaaggttgccccttcgaacttggcctcaaagtagtccaacagaaaaggccccactgaacataagctcagtattcaaaattctaaaaccacatgaggaaacagtaccatgaataaagtcagaaataacaaatgtcagaagcagacttccaagaagttaaattacagaatcctaagagagattgggaagtaggccaaagtacagaagtatcaaaattgaccaggaagtttttttttaatagaacttctagaaatgaaaaaatagaataattgaatttataaattgagtagaagaactaaacaacagattagacatagctaaagagagaattcgtgaattggaagttgatcttcaggaattacctgtaatggtgtttagacacagaattggaaattaggaaaggagggttaagagactgggcagaataagaaggtctaatatgcttataatagggatttcagaatcatagaatttggagatgcaatattcaagttgataatagccaagaatttgtcagaattgaccaaaaacacaaatcattagactaaaggcatagtgaaccccaaatagtataaatttaaatatatacttagacacataccttgtagtgaaactgccaagagagaaagcagccagaaagaaaaaaacagaatatctgcaaagttaaattaatagcagacttttcagcaacagtagtggaagctagaaaatagtggaataatattttcagagagctgaggtaaaataacaatctaaaattttatgttcatctaaattgccattcaggaagaaagaccaaacattttgagaaaagcaacaaaggctcctctgccaagagatctctactgaaatattttttttcagtaaggacagtgatctcagaaagaaaggcagagatgcagggagagatgactgtatggatgcttaccaaatatagacacaaataatgtctgatttgggagctgggtagtaagaacagtgacactaaatacggaacacaagccatatgttaaattagatgtacattggaagagtcattagagtttaaaatatttaagttcccatgagggatggtagagatgttgatttaggcttttagtataagtgtacccattaaagtttataggcctagcttacaacggaataggaatgagatgtataactttaaaagtggctaaaataggaaattttaagagataatccaaatagaggtaacggtagaaaagaaacaaatttaaacatacccagtaatcatatatataaacatacccagaaatcatcaatgtaatgagaccgaactctaattaaaagatggtgttagattgaattagggggagggaagagagaaagattttttgtttaagttagaaaaggtaattttctctaatactaacacacgaaatgtcatatagctatgttaacatcagataaaatggactttttggccaagagcattcattacaaatgaagagggttactatatagtaagaaaaattttattaccaagaatatataaaataatttctgtaactccaaggaaaagtcatcccgtagaaaaatgagaaaagataccaaccaacagttctcagaaggaaatgttcataatcacaagaagatgatcagtctcacaagtaatcagggaaatgcagatccaaattgtgtaccatttcacactcaccaggtgaaccccaggtgggggctgtcatctgttgggaacttggattggcacatccactttggagaacagtttaacagtatttagtcagttgatgatctttagactctatgacctagccaagaaacgcccacacatgagtgcacacacacacgcacacacacaaatgtaaaaaagaattcatgatggcatggctgagatcaacaaacataaataacctgagtccagtaggtgagtggatacttaaagttatgtgaggttataagcttctgaaataaatgcacttcagggctgcaggagaggcagcagtatataaagaacatgcactctagagacaggctgcctggggtttgaagcctgattttgacacttaataagtaacttgggtaggttacttaatctctttgtgcctcagtttttataaaatgaggacctgcacaggtttatcgtgaggattaaataagttactctttgcagaatgcttagaataggacctgggatgtagtgtgagctgtgtaagtgttaaattaatgcatatcaacctggatggcttacaaatatatggatgaaggacaaaaagcatatgtattagagattgtatttggttgctagaaatagtcaagagttattctcttgggtaaaagaaatgcaaagacacaatgttggaatattttgggtttttttctcccctattgtacatgccgctccacagtgtgcatacacgtgtgtgcatgtgtcagtgtctttatctgttatacactccagccttccttcctggccccatctgtctcttcaggttccctccatctctacaccccagctgcccttaatctggtgctggggaggtggtggagatgctgctttgtggagctgggggctgtggaatcataacatggataagtcactgctcttggccctccttcgctcttatggagggacctgctagggctataaaggcagctgagcagactcagggctgcctttcgaggggtgctgtctgtggggagagctgcctttcctctctgggcagatgtgaaggctggacaccagagggagaacactggccctcctgagatgttcttgcttgtcttcctcttgggcatggaggcttctggcagggtgtgcctcattgtgctggcagaagcagacctagatagatgtagtggtgagtggcactccttctcacctggtgagtggcattccttctcaccactacagtgcccacaagggtggggctgggcacctgctccctggggtaggtggctgccaaggggcctccaggagccaactgaccagtggttctgctggctgctggggtcacacttcctctaggagacactggctggactggggacacccaattgcagaactcagggactccaggggaggtgggcatggacactccacctctgaaccatctcctcttctttctctccccattgcactttgagcccctcacagatgggaccttggtgagatttctcccttttctcctcagggcatagtgggtatgtccaaggcctactggactgagctgcttcataggagaaacgaacctcccattatttgacctcccagtgcgtggcttcgagcatccaaactagccggcttaggttctgctaccaggaatgtgggttcagagtgcagtctgcatgtactgtgtgtgtgtatgtgcatgtactgtgtgtttgtgtgagggtcgggggtggtgtatgtgggagtggtcctgccaggagggatggtttggggagcactgggtactttctctctactggcattaggccccttggagcatagggactgccccttggggacactgccacttttatttcagcttcctttggaggccagcagttggtttggctgtgactcagggatgcagcaagccccttgtcctggtgtctgggggccatgctcacttacctcagggctatgaagcagcaggcctaagggggtaccataagcacccgcatcttgggagcatggcttctcctcctgccaggttaggcgagtgggctgggggtcaaggggagcctcctgtgcatggatgccctggcttcctgggtgtgggtgggaatctgtatctattaaaaggcagaggtggcctgtggttggagtattgccagaggctataaatagctgagtgtgtgaagaaggagattctggggaagagagaggaatgggggaggcccctgggtctccaggtggcagcagagccctgtggtgagggaggggcatgggctctgaacataaagctcttgtaggcatggtgtgacttgatgggctgggagtcatacaggggacttgtgttatgagggattgtcataggcagtaggggatggttgtggctgtaatatagccaatgtgccaggcagtgttctaaccactcttaaagtgcattaactcaattagttcctacaactaccctagctgtgaagtattggagtaggacttgaattctggcccgctcacggctgccatttttcgctgggttgcctgtaggaggatctggtcagatgggggtcaggtgacatctttttgaaatggagtctggctcttgttgcccaggctggagtgcaatggcacgacctcagctcactgcaacctccgcctcctgggttcaagtgattctcctgcctcagcctcctgagtagctgggattacaggtgtccgccgccatgcctggctcatttttgtatttttagtagagaccaggtttcaccacattggccaggctggtctcgaactcctgacctcaggtgatctgcccgtctcagcctcccaaagtgctggcattacaggcgtgagccaccgtgcctggcccagctgacatcttgaacccttgggtcctctgagatttggaactcccagcctcttcacttgggtactgcccatggtagtggcaagtgggtggtccctgacttatcagtggcctggagagaggaggttactctgttggcctcccttgtttgggctcctgcctcagcacagaggcttgttgcttgtctgaatggagatggaaactctttgaggacctagggcttgggctgcaggctgaggccatccttgttgtcccctcctttcgacatgttgctctagccatgatacctatacccttctgtccttctgtctgtccacccatccatctatgatgtgtttggaatgattctgccacttaggacggcaagggtcctgcctttgtcggctttccagtcttgtggggaaggcctgacatttagaaagtagttgtcgagtacatgtgtaatgttttatttctcatacaagtgttcattgtgttatttcctcttgagattatttttggttatattattggtacactttttggatgtctgaaataatcctttaagcaacaacaggccattagtcaagggtggttaagttaggtggcaggggaagcacaagggccagtggaaatagagagtttgcctggtctcaggggagagggaagaccgaaatcagaggaaggtgggtaaccttacggccagaggtggtaacttacgacttacgctaagcctagaagccaaacacattcaagggtgtgacattatggtgtggctgcagtgaggggaggaaggtaggggagtgcccagcttccctgtctgcagtgcagcttcatggctggccccacaagtctcaggtctccacggacccccactagaactgctgccgtggatgcagtggggcccagcctggggagaggaggccctgtggcctctgggcagggtgcttcgaataacccagtaattgggtgctgctgcaggcagacagggacaatgtaggtgcaagcctcagtgcctggccccggtgtgcttgttcagcctttggtctactacccccaccccaccctctcaggttctccctctaaaccttaaagccacatgcttgatgaagggcctggctggggaagccagtgtgtacccttgtaagcctctctgtggaccctgaggcccttcctttagaagaggctgagtcccagctgactgactggtcaggaggccatgcattttcctttcacaggtgtcagagcctaggccacctggtgcaggatgaccagagctgtggctgggcactgccattctgattgggtgacatttcggacccttaggtgctacctggatccttgagattcgttgcttgctcctgcccctggaagaagcatcctgtcacttcagggagttgcagaaaggggttgggtttgacaggagaatggccgctccagtggtggggggcttctttcacctgacagccagtcagtatccttctctctggggtataccctgggaaatcaagctctttcctcatgaaggccaacagtaggggtggagatgagcgtgaggatgtccttaggctacgctagtgttcagggtactttgccctcccccagggtcagggcagggttcgtgttctttcctactccagtcagcctttcaggctgatggcgaagtagggctcttggctgatggtgggctggctgtctggtgggattgaatctgacccctccctccttcntgggatgggaatagtggtaggagaagaccagccaggagtggtgccaggtcactggcctatgtgggccccaaaagtgtggataggatggctggatgcttggtgcaactatcctctcgggtgtctgtgtggggttctggcagtgaggttgtaaatgccaccacctgcctccattgtgggcggcctataatggggtgctggcagagctctcagacagaaccgaacctcctttggcatctccatactctttcctatgtcagggctatgtggttcctgcgggtagtgggagtagactggggctgggactggaggttgttttgtaggggatggtgaggaagatggatttggggaatgtttgaaatcaagtttgaaggaaattgtttgaatgggcaggtgggggttgaattggttgtccacctggatggcacttcctgcaccaggtggaagggggtccagaagtgatggggagtgccctggggtcatcaggaccctacccaggagaatgatctgtgattgcaggttaagccaccagctagcgctcctctgcctgaggcatgtattccccttggtgactctgggaggcttaccctgtacacgcaggcctcattccttaaggtctccagccctgccgagcaccaggtgtggttgctgggtgtagaaaggacacttacagggtcctttccattccgtatgggcagggagttgtggaggacccactggcatggtctccctggggaactgttgtgagaagggggcttgggggcagagacaggagcagcaggaagccactcccctttgtagttttcccaggtggtccttgagatctttatcacaatcacctgagacagacaggggtgattaaaagcacatattctgcccccattcccattgggatgggtctggattgggcctggaaatacgtatttgaatgaacactgctcccctttcccacacctgcaacatacagtgattccgatgtgcactggggttttaagggggcctcttcatcggtttctgctgcagcagggaagtagcccccacccccacgcaggagcctcaggtgttggtgccctttctgtgcatctggactctgtctgtctggctgtttatccatccttctgtggcattaggtttcctgcctcctccctttggcttaggcctaggggcagctgtgatgggctgcagaatgaggtgggggctggtgccagctggcacacgtaaattaagaggtgtgggacggatgggtggcctacttccaggggtgagtgcaggaggttggtgaccccaacccaccacccggcctccctccctcagggtggcctggcacccaggactgggattaggggttggggtggtggtcccaggggcatgctcagtggttctcttttctctggggcacaggctctgggcgtggggaggctgagacacgggagtgcatctactacaacgccaactgggagctggagcgcaccaaccagagcggcctggagcgctgcgaaggcgagcaggacaagcggctgcactgctacgcctcctgggccaacagctctggcaccatcgagctcgtgaagaagggctgctggctagatgacttcaactgctacgataggtaccccaagacttgccctcctttcctcttggacccacctgcgcttatactgcccactgggccatttgggtctcaggatgtctgagtgggagataaaggaccaagaaggggctcttgagatggtagccatggccccacgcccttccacaccctatttgtcctaccttagccctgaggaggggtctcagtgtcaacccctggctgttcttccttggctttgggtctcctgtaggggaggtgagttcacaccgtccccctggtgttgcccatgaggtgctctgtctgtgaggaggggttggcagggcaggcctgggggagtcttgcatcccccaggtgaggggtatatggaaaattctgtgcctccaggcaggagtgtgtggccactgaggagaacccccaggtgtacttctgctgctgtgaaggcaacttctgcaacgagcgcttcactcatttgccagaggctgggggcccggaaggtaagggggcagtgtggaagtggggccttgagtcagccgacctgggcttctttggcttggagcgcttggctcctcagttgggtggggtgtggctacagggccctgtattctggctctggaagtgtgagggtgggcagactgtttgacacagggctctgtgtgtcccccagtcacgtacgagccacccccgacagcccccaccctgctcacggtgctggcctactcactgctgcccatcgggggcctttccctcatcgtcctgctggccttttggatgtaccggcatcgcaagcccccctacggtcatgtggacatccatgaggtgagacagtgctggcttggggcagggcaggatagaggtggggaggacaggccagacctttttaacccttgctctcccccaggaccctgggcctccaccaccatcccctctggtgggcctgaagccactgcagctgctggagatcaaggctcgggggcgctttggctgtgtctggaaggcccagctcatgaatgactttgtagctgtcaagatcttcccactccaggtgagtgtttgaggggctccatccaggtcctctgcctccactgtagcttgaactggaggctctcctgacctggggcaatccaaaccccaaataatattgtggtatgagagaaaagtgagccttactgggcctagttactcatgttacacttggctggtctgtagatttcatgcaactatggaattttatcataggactagggtagggctttgcaaaaccttgatttgccccggttaccagggtttggttttggacattgggttctttccagcggccctggacaccaggtctggctctgcctcatttgtggggtgatacggggtcactcacaccccatgcatggaccttagtggccccatttgtaaatcgaagtgctagccttaagtgatctcagggatcactgtgggcctcatgctctggggcctagcttaatacaggtcttctcctggtccccttacaaatgctgaagctgggaggctggggggtggggattgggctgggaggcttgagggtggggaatggggaatggttgttctgctgtagggcaatgtgactgcagcaggggtaagccagccacttgtccccccaacccctcgcccccggcctcaggacaagcagtcgtggcagagtgaacgggagatcttcagcacacctggcatgaagcacgagaacctgctacagttcattgctgccgagaagcgaggctccaacctcgaagtagagctgtggctcatcacggccttccatgacaaggtgagccacacccatcagaatggactctgagaggagatggaatgtcccctgggtggctctccataatatgatgaccccttccctgtggaggtgtccaccatgaagtacgtctgccccggtagcactatccactatggggttactcctgccataggtgtggacattggttcccctatgataggaacctctcaccctgggataagtttttatgataagagtagtgactccatgattcccacccctagccctccctgcctcctggcctcatccatcttccatatcgattgtagtagccttccaggagagcagcctagccatgggcccactgagacttctctgccagggctgggctgggtcctgtcctgtacccagaatctgtgctcaagttctgtgccgtcttctctcagggctccctcacggattacctcaaggggaacatcatcacatggaacgaactgtgtcatgtagcagagacgatgtcacgaggcctctcatacctgcatgaggatgtgccctggtgccgtggcgagggccacaagccgtctattgcccacaggtacctgggtcagcaggtgcctttcctgcacttgacctggagctgtgggaagggttggtgggcgagagcagtgtctggagatgtctcaacttcctaaacatacttactctgcttgctgtgtgtccgaggcagctgggcacaaaacctggccttcccactgtgtcctggggatggcatggcctcccaagctggttttgggtgccctctaatggccacatgaagtgctgactccattactttggttggagagttggctcagtacttctcaaattttctagtttaggatccctttatactcttaaaatgactttggtgtaagtggattatgactattgatatttgctgtatttgagcacacccacacatcccattcgctgtcagagtgaggacatcacatctcatgtagcctcgggaaaactctatgctcctaagagaatgagccttataaaagcaaataaatgaaaataattttgactttatagattcccttggaacagtcttagagatcttctggggtcctcgaaccaccctttaagaaactctggatgagctcatcactgtcatgcttactaaatggcaggcagtgctctaaacacttgagaagtatcaattcatttgaccttcattaccgcccattgagacaagtactgtatttctcagctctgtcttgcagatggaggaacagtagtacagagaagttgaatgacttagccaaggtcttgtagctagttgagtctggttctgtgactgtgagggaggggaatgaacctcaaattccagcgttcaaagctgaagggtccctgatggtaataacagtaatgacatagaaggtagactgtatgaaattgccgtttttataggtcaaaaggttgaatgttgtctctgctatatggctcaacttaataggaatacctagtaagtatgccaggtgtggccctaaacatttgcacttaccactcagtcgaatcctcacaaggctgagacaggcactggggaaactgagtaccacaagtagctttgcttagttagaggtggagctgggtgcatgcaatagcacccttgctccagccggccttcatggtgagcttgagaccctaaggggtctctgcaggatcctaggaaagctaatattaaattcctattctcattcacattccaaatgctgtaaattcttctcagaaaacttgcatcccaggccagtgtgcctgtccacaacccctctgagaatatatgggctggcctttgatagtgtggggactgggacagggtctgcccagccattagggtaggtgttgctttgccaaccctgggggaagccttccatctgaagtgcactgagggattctcacacccatgtcggcgcctgcagctgcctgcttgtgctgcttcacctctgcaccccaggtagggtgggatggcctggtctggggcctgactctagggcacagactctagtatcttgggaaccaaggtgggagttggatcatgatgttaagctttatctctgcccacttgtttccacagggactttaaaagtaagaatgtattgctgaagagcgacctcacagccgtgctggctgactttggcttggctgttcgatttgagccagggaaacctccaggggacacccacggacaggtaacaggcctcacagggcaggaagagagggacagacccagggtagatactttgccctttttgtgctcagctggggaggtgcagggatgagggtgactgcatgcgttcagagctgtctgagaacttagagcaatgctcttgtttgaccagtggagaaaccaagaccaggaaggcagtgtagtttagcttccgtaggacagtcagctgggaaatgtagagattccccactggggttttgaccactagtccttgcaatcttagtctttctctcacttttttagttttaattcctaagaccaaacaaagaaatgtactaaggatccaaacaaagaacctggaaaaagtaactaaaaattaaacttaggaaatcattcctaaaacaatcactgttattattttttaagtgttctccttccctctttgtttttggtcttaatctcagtcagatacatatcatctgtagttccttgtattaatttggtaacaattccattttagattactattatctccaggatatagtatttaaaaattattatccaagtataattgatgctgtgacctcttgtaactgtggtgaatgtggtgaatcgaggttggctatcattgataacctgtctgaattgctctgtcttgcccgccatctggtgcacagaggctgtaactcccatgtcccagctgtgtgtgtatggccagtcactgtaaatcctgccctcctctgtcctcacataggtaggcacgagacggtacatggctcctgaggtgctcgagggagccatcaacttccagagagatgccttcctgcgcattgacatgtatgccatggggttggtgctgtgggagcttgtgtctcgctgcaaggctgcagacggtaagtaggatggcagccctgggcatcctagattgagtgatagggagcagtgggaccttagagtgatcctgccaggctctctctttctcctaggacccgtggatgagtacatgctgccctttgaggaagagattggccagcacccttcgttggaggagctgcaggaggtggtggtgcacaagaagatgaggcccaccattaaagatcactggttgaaacacccggtaaggggcctggttcaggcaactttgcaggggggtggagaagggaaaacccttcatgtgtagcaggtaagctgaaatcaagggggaatgggcaaatagaaagtctgcgacgttccctggactttagggatgtgttccaggggttatggggagtgaggtaggatgatgtccttctcctgatccccactttgactgaactgctacattttgggcacttgtatggtttgggcttccaataagattttgtttgaatatcagcgcttcaaggcaagtagtcgtgtctatcctagtaggggccttggtgtctcctttcccctcctgtgtatgtagaggttcaatgaacctttcctagggctgtggagtgaggccagtaagctcagaaagatgactgccatgaaggcaggcatgctgattcctgaagtttcccccaggcctctgctggtggacctgctgctgtggttggggctggtgggctctgcctgatccttgggaatatcaagtttactgtcccccaaagcttttcctcactgaagggtcctaacaaaggtgtctttcctgtctgccctatgctgcttagggcctggcccagctttgtgtgaccatcgaggattgctgggaccatgatgcagaggctcgcttgtccgcgggctgtgtggaggagcgggtgtccctgattcggaggtcggtcaatggcactacctcggactgtctcgtttccctggtgacctctgtcaccaatgtggacctgccccctaaagagtcaagcatctaagcccaggacatgagtgtctgtccagactcagtggatctgaagaaaaaaggaaaaaaagttgtgttttgttttggaaatcccataaaaccaacaaacacataaaatgcagctgctattttaccttgactttttattattattattataattattataattattattattaatattattttttgggattggatcagtttttaccagcatattgctctactgtatcacaaacagcggacacgtcagcaggcgttgaggtgctgagctgtggatgcagaaccagcgccatgctgaagagcctcagccacctcctgtcctttgggattcgtttttcccgctttctctttgtttgtcgtctcagaatctgtgacacaaagaaacccatctcctgtcttaggaaacctaatgctgcaaactctacctagaggaacctttgaagactgttacataagaacataccttcctcagaagaggagtttcctctgccctctgcccttctcccctgcctccctccctcccctccttttattttgttttagtgagcttaagaaacagcagatgtgtctttcacggatctaacgggtgttgtcctgatcgagaaaaaaactgggatgagaatggtttggactggagttggaaggggaggacggtactgggggtagggtttggaacagagctacactggactcgggcacattcggagcagcatcctttagtatggaggctacttctcaggtaaccaggaatcgaggggaaggaccttgtggaggccgagcattaacagcaagagcggggtttggagaaagtctgagattgggtgcagccctgacttacctgctggccctgaccagtttcttttcactaacttggccttgggcataggatgaaacattttttctgccctaattttaaaattaggtgagggtagaatcatcacaggttaggaatacattcttcataagacacgatgctgtaaatacccttaatggacgaaaagttgaaatacttttgtttcctcttggagcagttcagggaaatgcccaccggggattgtcctgcacagatagggcaagaggatttcctgggtggagtctgccaaggcctgcctcgctggggaccccagagtcctgcacctctggttccgccccaggtggtgacattactgtccccgttctgtggctcgtggacaagactttctccagaccccttaaagtggtacatattctaaaaaactgtttttctattatgccataaccttgctctagtcagtgaatgttcctaatgctgctgtttcaacatttgaattctttttaatttatgaaacatgctaaattttttttttcaaacaacacacacatccacatatacacatgcttcgctatgtggcttccaaggtttaaattttgaaaagtaaaagaattaaaacttcacgaccacagatcacctcaaaccagaaatacctcagaattttctacttatgtaaggtttattatatattttgttagttgtgttgtcttgtagtaagtatattttaatgtaagttggcttttgtgacaaggaagtttaaaagaaatagagaaaaagaaaaaagtttgcatcttctagggagtgctaccatttttgtttgataacgcccccttgtaaataattgtcatcaactgtaggttggctgtctgggccaagtctgggcatttatcagtcttgtttgtgaaggcttttccttctggtttctttagatcattttatttaaaaacagtgcatctcttcatcgtgagggtaggcaaggcgggggccgtggggagaggttgacctgggtgagaactgaagaggccgcctcctcttgggttgtttggagcttcacatgtaattcacatgtaacatgtaacttgatcggtcagtgttcagaatgacaagtaaccccgcttaaacttggtagaaggatggcccttagacctgaatggggtgattttacttgggatttaacttcttcagcaaattaacagcaacgttggaagagatctgtggcgcctctgtgaagcacaccgtgactcaggccagtcttttagtgcagcgtgtctgggagtgaagggttttgcccttgctggtcttggagtccacagtgtgaggggcactgcacatgcctgggcatctacctagtgtgctatgttcagtgtctggggcttactgccccggggtcctttcctctgggtgttggggcacagggtgctatgggaggcccatttgcttccctctcggagctcagtttttgcttcatgggtcaaaatgtgggctggccaagtggttacaggaacagggtttcggtaagctaagttgtcttttttttttttttttttttttttaatggtttgattttgtgctgtggtatttttcttcccttagaataatttttaatggcaaaacaggccttacagcagttgcttttctttaccatttatttctttaagaagctttaaaatatttattgaaaagtgccatatctaatttctttagctttcgcctcaggcagtgcaggcatctttacttttcatcctcagaagaaacaaacgactaacaaatgtagcaaatttactgcaggaatagttaggtcatgatactacctgaacactaaaccccagcctctttgtttggttttagttcctctgggtggtttttcttttgtgtgctggcttgattcttgtgagaagttttgacctggccaagggagggttgagccatggttctggtgtgggactttgcggtcaagacacagtacagacaggtcaggcctgcgtgccttttctctgggtggcctccccgttaggcccaccgtacgctcagccactatagtgtccctgtggggccttgccatcagattgtgtgtcaggagatggtacctttttggtgtggctggggaggagtgtggtccatgccagttctttgggcttcaggccactcttcccctcatgctgtggtgtaaagtgcacccatcaggtggtatatctggttctgatggcaagaagaaggtgggggatctccttatagggcatgggtctaggagcacagatgggccttttgccccgggtaaatgtttgtctgtttgctgtcatgtgttctttgaggagtgagccatctcgagccctgctttgaatttactgggtcatagagcctctgcctgtgctcttttccataatgacttcatgtgacatgcacttttggtgggctcagataattggtttctttttgtttttgacctcaggctctgtggcagactggggaaaatggggcctggcatcattttccctgtcaatgggaggggctgttccatgcagggtgggaggggaccaagttagcagagagtagccaaggatccttgcttcttcctttctagtgtgctgtcatccaagcaggctcctggctgtagggatgggccttggggaagaatcttctttgaaagcatctatgataactgagaagtcatccctagttggagaaatccagtaatgagcagaaggaggaagcaagtgaggacagaggccattgtattacagtgtcacgcagagggccctcaatgatggggcattggggaaggctgtagacatagtcatcagaacatcctggcctggcataagctgggttttctcctgggaccattggtcctcagcaggagttctttgcatgagttgctcaggggcaagggctgcaagtgggctgttcttaggagaaagtgacacctggcagtgagggaagatggtgagcattattagcctttgttgtccagcatggccttcttgtcctgtctgctctggagaggagcctgtgggaccagtcctgcctggggagggcatacccacacgtgccagctgattctgactctgaatacatcatgtccggacttgggggtgtttctgcagaaaaaggaggttgtttttcagccttgaacatcttcaggaggatagagactcttgctcacatattcttagcaaagggaagggtctctcatctccaggccacagagatagttcttccattgccctaagaggctaggctaaccctcttgacataacttagacagcaaagcacttcatcctgtagttgggctctgtcacctttctcttcagttggccacattctcgtttcctccatcctgctatgctttgtgtgctcgggctgtgtgtggggttttttccctggtggaaggaagcccagctgtgtattgaatgtccttcatgtgttgtgtgtggctcagaaagcctgtcacttggcccctgtgctctgacccgtgagggtggggaggtggctgttccattaaagtgggagtattggatggccctcttgaaactagaattttgccttttttagtatgcagtataaagtttccagcatctacttggtaacacaaagatttgctggtttttaaaataatacagtaagcataagtatgtaagtttttagaattggtactagaagttggacagctagttattctcgagaactttatttcactagaaaaatatactaattggaaagcagtttccaggagttaactcagtttaattttcagtctcagttattttagcctgtggagtttttgatggcacacctttggagagatggccaggcctgattcccatttcaggggcatcagaccatacctttttaagaagctccgtgaatctagtcatctacccttcatcctgggcgaacagccaaaaagagaaggggacaaggtgtctttttctccttctcactggggtgacatgaattcttttagttaatggctgtttgcaaattctaaactaatgaaatacttagcagctaacatgttcaatctagtaatgatgagtttaaatctcaattgacagtaatgttttagataaacaggcccagtaattcagttgatgaactgtatatcttctcagtctagatttgtaaatgtttaatgaattcagggttataagcatagttctttaagtaagattccagatagttgatttgtaaccagtagtctacctatgaatgtatcccaaacctttagaagattggaaaagatttttgaaataatgatttagttttgtaggaaaaacacccccttgaaaattaattcggttgacccagtaacattttttaaaacaattggtggctccaaaaggcctgccaacaaagaaaagtccaaattatctagtgggacattttgaatgttttatgtttattttgggtccactgtaaactttggttcaaaaaagaatttgaatttaaagaatttaccattatttaaattattaccaagtttttacattttcatgatggtattttccaggtatgaatgaaacatgactttttgattgtggtacttcctgtatcccctgtagtgccaaaaccagtgatactttatttgctcctatggcagctcatagaggtaaccgaagtgatttttcctcagtaattgaaacacatattctctaaatgccaatgtgtggtgatgggccctgcactgccttcatttctctagggcagtgtctttggattgtctagggcctaggtaattctgagaactactgtaaaccaaccacagggcactaaagcaatgtacacaccactctttgtgtgtatggaaggggttatataaacctgggctatgctggacatctacagaagagtattacattcacttgcaaagtttacatttttgagctcacagttatgaaaaatatgacccacaagtttttcaggcaggtgaggatgggtcttcttgcaaatgcatgagttctgtcttgagtcctgggaacttctctgttggttgagtgtgggctcattccctgactctcctaatcatgtttgcgtcagaatgttagcattgtaaataaaagaataggttgtataatagatacacaacacttgaaactttactttaaaaaaatcgatagttctacatatatatttagttatatcacttgacagatttcttctacacagtgtggagattgttttataccacagattatttttataaagttagtgaatttgaatgattttgtaatcagagctaatgagctttacctttcaagagaaacgtacactggagcatgagtggtgtggaacttttacttagtgtttatatggattcttgtgatacactggcagactggagtcaatttgcgggtcttttttggcccaaactccacttgtggttgtgtaggacagtgatattcagctcagcttcttgtggattgggaggagagagggcctgcaatgtgttttacattggtgcttcctcctgagatttctgttgaacaaagggttctgaggtcaaaaattagtttgtaagcctttgccataggacatagtcatgtgagagtgtttggggggaacagaaattgtataggggtgccgattggggtgggatgggactcgaataagattcaggtacaaaaactttgaaatgagaatctggtggtttgagtaatccaccagactgaattatctaagatcacattatccaggttggggggcagaattacccagttaagtaattgttcagaaaagtggggagggtggcatgtggatgcagtgatccaattaaatggagagctgccaggcacattttgtcctctctggtcagtgagaatggttgggttggctcgctgcttcaatctgtggaatcagccaggagcccagntgaggaagctcagaaccccagtaacagcagagcatctttcagatagctccagagttttcctgcttttctgaggaagctcagcatcactgccacaatacggaaagtggtcttcattttagcctatttatttttaggcagagagtggatggttatttgtgtgggacttttggtggcgatatataatgaataattaagttaatttctggtatgcataatggccactcctgaggcccagctgaagacctgtcccccagaccctgcccgctggcttcaggctgctgcttctagacagaggtgcactggacgggatagttttatcaagagaatccctaatgtgtcattttaaaccagctgtgctttttattcattctggttgagcgtataggtttacactttaccctttttatacttggaataaatttagttccagcagatctagtagcactccagaaaccaaccccatctgttccccataaaaagaacattttctctgctctccagccacgtgtcttggaatgtaattctgttgtgcctttgtttttatcactctcttcgccccaaaagcaactgctgtaagcttttttctacttgtcttttctagtccccaacctctacctttttcctttttcccagccctaatttctggatgcacttctgtgatccaggtattttaagaaccagttacctcagacctcatgttgaacagtgtcgccatctgggtcctcttgatactgcagacttttaacgtacacatgcaggaaccctgctgagcgtgggcacttgttttaaagcaaaactcttcccaaggactgaagaaagggcttctggcaagctcgtcatggcattgtggtgggatgggtctagagtgtcatctgaatggtgcttcctgtgttcctctttgaattctgccattttcagtattcttgtgtgtctgaataggcaaagcgatttaattggctggtcttgcacgcaaattagttccaaagataagctctttgtaacacatttccagtcactaatgctcaaatgtagaacattcctttaaatggcaggataaaaaacccactatccaccatagtgcatttggggaagatgtctgtagcatatgttgctgtgaaattaggccttgtgggatatggctgtttgtcatttggatgtattttaaataaatatatatattttttaaagagccttttttaccagttcaaaaagtttaattaaccagcagtcaccgcatctgaatttttgtctctggggcatagatggcagaccaagattaaaagtggtaactcagctatacgagcatgggctaccttcctgggctctcctgcagtcctgtagacctgctgttccgcagaccatgggacacaaggtcagtgtgttcccagtgagggtcccaagtcagtcatcttaagtgtttgttctctgccccattcagtggactgttgacttcagtccctgcaagtgctttagcccgagtggggttttctcagagcactgccacgagttaagtgtgtgtttagccaaataatttctccgtaagggaaaaatgcagtcacccaaattttaccaccaatgacggagatgagagttgaaaagattaggcaacatctgagttttaacttgaaaagtgtccaagtcatcatgaaaggccgactgggagcaagtgattattagagattcttcaggagacctcatctgaaaatgttaagactgccagtgagggaaggaattgttaaaatgccagcggcttttttttcctctttttttctgtaattctgtaaaaatgcagagaaagttgagtggtacttcagaattgagggagagggttaccgcagcgtagaaatatatttctagatttcagttccacaccacaaatccacaacaatgccatttttcaactgtacaaaaatctgcttatgaactggacatgatcttaatggtagtgtcaaaggccaagtttttcacctgttaatatttttccacatttgtccttgaatctgaataactttatacagtactgtaaatttaacttacatcgagtttgttgtcaattcttatgaaaagagctttctgcatgtaacacatacggttaaagaacacagcaaaggaccaaatttgcaggaacagttttggaaccgacagaaaatgtcaccttttatttgccatcttatatatatctatcagttttaccagctacttctaaatttgtacattatttgtaagggaaagaaggaaaaccctaagacttgtctaacttagtggagaatgtgtgtgttgggcttaggatggatagctaagtcttattgagctgtgttacctaacttgtatataaaaattgtaattaaaagtttgggttcacctgtttctcacagtttaaaatgatgagtaattgccaactctggaaatgtgactagtatatgatttaaggctgtagaagcaaggaagctctttcaagtgctaaaactaaagacttctagtttttggctcaaataagtactgtttgtataccaggatatgtgagatgtaaatgtagtaggtcacttttcacccttgtagctataaaataaaaattttgtagaacagaaatagcttgtactactgaattaaccaaagttatactaaagtatcatgtttaaaaaaaaatatatatatatatacagagttaagcttgttgctgttaccctgtctggatttgaaaagtgtgctgatttatatatatatattacacacacacacacacacacacacacacacacacacatacacctaaaatggcctaaagcagacatccatgtaattacagttgcaaaatgaaaacattttggaaagaacattgtatcatagttcattcatttgcagtggatctttgttcctttttactgtggtaattttagaaatgagtgtcaagtttgaaattagatctgctaagttggggttttgctgcttgaactctgcactgggtcctcaaataaaccgatgtgaatgtagttttttccccctgtgtgaagaagcagttacaccccaacaataggaggaaaaatctagaactatttcaagttttatctttttgtatatgaaaataaaataataataaaacaatcttgtctttcttaattacgtggcaggggattggagtttcctttcatgaggattagacatgaaatgaaatggcgttcggctgcttagagggctgactcaagtcagttcctgtttggtatgtgtaacattaacagatgttaatggctgaatgcctagtctgccatggtcctgtggggctggagctaagcacaggtctccatttctgccattcagaagtccagggtctagttggggacattatgaatggggaccattctcctgaacgaactgttctgggattttgagtaagtttctgcaggttagcatattttccaaatgtccaagacactccccattccctcatcctctgccaccagtcctgtactttgcagacaaccctgagcaatattgttgtaagtggagcagagaagccttgaaaatagttgtattcaggactattgcagatgacaaactctgtcattcccaaacgttgctgagtactggagtcatttgcggagctattaaaaaatacaattatgggtccttatccccaacctggaattagcaaaccaggtctccagtttcagagatttggacttaatctcactaaaggaactcatggttccccaataataaaataatgatagtctttaatacctaacaaaacaggaaggccccagaaatcacctcactgctttctgcagtaacaagtttttttggtcgatgactctttcttgcctaagtggagaaacaccctttaaattcaccctttattatgagaattaagcaacggtttgaaacttgtggagaaagtttttgatgaccctttattcagggaccagttgcccaatatttggctgtttttgctctttcacgtttagaaagttcaccttttattagtgagtgcctttaatgaaggaaggagagcaaagggctgacatttttgatacaggatcttggagctgggaaagctgaaaggttggaccttaggagtcatctggtcaaactttccctatagcaaagggattctttgacccaagaaatttgacacagaagttggtttatnaaaccaggcttgtttgaatgagcaagtagaagagggccaagggaccatttcacttaccctcccatcccttcctttaagtctcaggtatccctatgggacacctagggaccttgattaaagtttacaaattactggcccaattccaattttacaggtgggcaaacaggcccagagggagttttcctaccctgaggcaggcaacccttccagtttttgacctcttgggacccaaagtggggttacacttgttcagaagtagaggatctggattaggaaaagccatctaatatttatctctctagtatttagcacagtgtctggcacttacaagggccttaagaaatacagtacctcagtgattgtgtatttagtaaattctggggaaagctgctgaagtagccttgaagcctacagataccagtgttgtctggttgtatttgttaggattcttggttgcaggtgacagaagccattagaccaaaaagggggtttcactgaaaggattctgggggaaatgactagccaagacttcagaaaggcaggatgtatgtgggcttcaggagcctgtgggagttggggtcataacattgcaggcctccacctgtgtcctggtatttcttccattattgctcagagcaagaccagatgcatctgctcctttgacttcttagcaggaaacaaggctgtagacagtgccagagcttttttttttttttttagacagagtcttgctctattgcccagattggagtgcagtggcacgatctcagctcactgcaacctccgtctcctgggttcaagcaattctgcctcagcctttcgagtagctgggattacaggcacgcgccaccacacctggttgatttttgtattgttagtagagacggggtttcaccatgttggccaggctggtctcaaattcctgacctcaggtgatcctccagtcttggcctcccgaagtgctgggattgcaggcatgagccactgcgcctgtgagttttacgtcacagctttgctacccagagagactactagatcgaaaatccctaggaaggactctggttgatgtagcttaaccagtcagggtccttcagaagaggtattcctggcaagggggtagcctcccatttgaggctgtcaaaataatgtgcacacttcagtaggttgttagaagtggcctcctggtcagtgaatcatcagtgggatcagatgaaagttattcctaccagttatctaagaaataggaaacttgaagtttctgctaagaactaagtccacacggaatgctagagatcatgct

SEQ ID NO: 4086 - DNA, 221 bp, Homo Sapiens
tttttttttttttttgacctcgagatactttaccgtcaattaacaataaccatgttaggctgcccaactcacagagtcaaaggacagacctctctccttgcgcgcctctgcgccaaaccgggtttcggcttgcttatcgtgggctctgaacggtcactgtgcggccagggaagtctccagcacagcctcgggaagacattcctattacatatttatcactt

SEQ ID NO: 4087 - DNA, 443 bp, Homo Sapiens
  misc_feature (419)..(419): n is a, c, g, or t
agacagcaaactcacctgcgcgggctggggggcctggctcctgaccttcgccgccctgccctccgccgctccgcctgagctccccggtttgcagaatggaggagggaagttgaaggagccacctcctctgtctacccacccgtccccttcacgcccttgacactaaggagtggggggccctggactgccccttcctcccccatcgcccgcccccagaacccctgatgctggttaggaaccgctcaccccaacatgtgtcttaaggcaggacgacttggaaaaaaaggcggcggacagttggccagagggatggagactggtggggacgccccgcctccctgtcccccgtttcacacactggacaccatcacctctttggaactgccagaccctgggggtcccagtgagcaaaggtctgntccttgtcctttgtctgtctgtga

SEQ ID NO: 4088 - DNA, 448 bp, Homo Sapiens
ttgaattgaatttaggtgacactatagaagagctatgacgtcgcatgcacgcgtacgtaagcttggatcctctagagcggccgcctactactactaaattcgcggccgcgtcgacgtgaacaccttacagctttcattttgctttaatgtttcaattcaagccggtgtaaaaataatttccaaggcatttctgtttattctttagtaatctcactactggctatgtcagcaatatctttttcaatctggttccttttgtatatgatgtcactgtgacctctttgaaatatagtgatggcttttacctactttgaaaagaattttcacatagagtcagaaaaaaaaaaaaagtcgacgcggccgcgaatttagtagtagtagtcgacccgggaattccggaccggtacctgcaggcgtaccagctttccctatagtgagtcgtattaga

SEQ ID NO: 4089 - DNA, 2590 bp, Homo Sapiens
tgccctgcgcggagagcggcgagcgcagccatgccccaggccgcctccggggcagcagcagcggcggccggggccgatgcgcgggccgggggcgccggggggccggcggcggcccgggcgggacgatgaagcggcagaacgtgcgcacgctggcgctcatcgtgtgcaccttcacctacctgctggtgggcgccgcggtcttcgacgcgctggagtcggagcccgagctgatcgagcggcagcggctggagctgcggcagcaggagctgcgggcgcgctacaacctcagccagggcggctacgaggagctggagcgcgtcgtgctgcgcctcaagccgcacaaggccggcgtgcagtggcgcttcgccggctccttctacttcgccatcaccgtcatcaccaccatcggctacgggcacgcggcacccagcacggatggcggcaaggtgttctgcatgttctacgcgctgctgggcatcccgctcacgctcgtcatgttccagagcctgggcgagcgcatcaacaccttggtgaggtacctgctgcaccgcgccaagaaggggctgggcatgcggcgcgccgacgtgtccatggccaacatggtgctcatcggcttcttctcgtgcatcagcacgctgtgcatcggcgccgccgccttctcccactacgagcactggaccttcttccaggcctactactactgcttcatcaccctcaccaccatcggcttcggcgactacgtggcgctgcagaaggaccaggccctgcagacgcagccgcagtacgtggccttcagcttcgtctacatccttacgggcctcacggtcatcggcgccttcctcaacctcgtggtgctgcgcttcatgaccatgaacgccgaggacgagaagcgcgacgccgagcaccgcgcgctgctcacgcgcaacgggcaggcgggcggcggcggagggggtggcagcgcgcacactacggacaccgcctcatccacggcggcagcgggcggcggcggcttccgcaacgtctacgcggaggtgctgcacttccagtccatgtgctcgtgcctgtggtacaagagccgcgagaagctgcagtactccatccccatgatcatcccgcgggacctctccacgtccgacacgtgcgtggagcagagccactcgtcgccgggagggggcggccgctacagcgacacgccctcgcgacgctgcctgtgcagcggggcgccacgctccgccatcagctcggtgtccacgggtctgcacagcctgtccaccttccgcggcctcatgaagcgcaggagctccgtgtgactgccccgagggacctggagcacctgggggcgcgggcgggggacccctgctgggaggccaggagactgcccctgctgccttctgcccagtgggaccccgcacaacatccctcaccactctcccccagcacccccatctccgactgtgcctgcttgcaccagccggcaggaggccgggctctgaggacccctggggcccccatcggagccctgcaaattccgagaaatgtgaaacttggtggggtcagggaggaaaggcagaagctgggagcctcccttccctttgaaaatctaagaagctcccagtcctcagagaccctgctggtaccacaccccaccttcggaggggacttcatgttccgtgtacgtttgcatctctatttatacctctgtcctgctaggtctcccaccttcccttggttccaaaagccagggtgtctatgtccaagtcacccctactcagccccactccccttcctcatccccagctgtgtctcccaacctcccttcgtgttgttttgcatggctttgcagttatggagaaagtggaaacccagcagtccctaaagctggtccccagaaagcaggacagaaagaaggagggacaggcaggcagcaggaggggcgagctgggaggcaggaggcagcggcctgtcagtctgcagaatggtcgcactggaggttcaagctaactggcctccagccacattctcatagcaggtaggacttcagccttccagacactgcccttagaatctggaacagaagacttcagactcaccataattgctgataattacccactcttaaatttgtcgagtgatttttagcctctgaaaactctatgctggccactgattcctttgagtctcacaaaaccctacttaggtcatcagggcaggagttctcactcccattttacagatgagaatactgaggcctggacaggtgaagtgaccagagagcaaaaggcaaaggggtgggggctgggtgcagtggctcacacctgtattcccaacacttttggaggctgaggttggaggattgcttgagcccaggaattcgagaccagcctaggtgacatagtgagaccccatctctacaaaaaataaaaaattaaccaggtgtggtggcacgtgcctgggagtcccagcgacttgggaggctgaggtgggaggattgtttgagcctgggaggtcgaggctgtagtgagccctgattgcaccactgtactccagcctgggtgacagggcaagaccctgtctcaaaaaaaaaaaaaaa

SEQ ID NO: 4090 - DNA, 398 bp, Homo Sapiens
  misc_feature (228)..(228): n is a, c, g, or t
  misc_feature (325)..(325): n is a, c, g, or t
atacatgtattatatacctataagacaattacaatctaaaacatatattcaatctgtagtatttactattgcagtcaagacttacactcttctatgaatgaatgtagtagaaaaaaaataaaaagctttaaaaaaagttgtttctaagtattattgctagaagaaatgaaaatatttgccaaacaaaacagtcaggaaactgaatactgacctgaaatagttaaaganacattttgcgttaaattttaagtttgaaagtcaaggattaaaagttatagcattttaaatttatattattttccaaatgttctggaggaaagttttnagtttgaacataatgcttactttctctttttcaaattatttggaaaaagctattcctattttcagccctttgt

SEQ ID NO: 4091 - DNA, 524 bp, Homo Sapiens
catgaacttataaaaatgtttaaaaacaaactcaacaaccctgattttaaagagaatgagcacacgccccacgacttccctctagaagcattttaagcatttagcttttcaaaaaacaatcatttctttttgatgaccatgacttcaaatgccctgcctgctgggccagttgtgactcatcaaatagcaactgatttcaataattcacccttagaatgggggtgcttgcaggagccctagtttataactggatgaaatgatacgcagccaagggcctttatttgagaaattaaatctaaacgcagacactaacagccatgtgtcttctgctcttaggagggtttactgtgaaagagccacacagagtgttcgacatgcctcttagcagccgaatgaccttcaaagttctttaaccttgtaactgcaaataggaaaatggtctcacatacgttagtctaccccctttcaatgtagatcaggtgttttttttttttttttttggacatctcagatgtgactcttgc

SEQ ID NO: 4092 - DNA, 436 bp, Homo Sapiens
tttgcatttaagcttttttatttttttaagaatcaagtgaatacaattttagagattgctaaatccagagaggtccagtgggaaaactggtagccattggatttgagttgtaaacacgtaacagctgaacttacgtatatgaacactgccataggaactgaggtctgtgaatccaaaaatgtaggcaaaacttcctgttgaacatttttctggggaaaccaccatagcttttatcaaatgcttaaaggtatggaacattctaaaaggaaggtgatattcaaacctaaaagtgtatcaacggtatccacatggagaagagggtcaaggatgggggaacaaagactggtaggtgggaaggtcaaaaagaaaatgggaaaaccagcaatgggaaaatttttttttttctttttttgagacagtcttgctatgttgctca

SEQ ID NO: 4093 - DNA, 244 bp, Homo Sapiens
tatgctattctggcttttaatgggtctcctctgacagtagaaagattcaaaccacagccaattccaagaacccttctaagaacagagacagagtcacttcaaaggatctgacttgctatacctaaatataattcatggtgcttttcctatgacacaccataatattttgtccaaaaatcttgcaacatgttattaactttgaagaaagaataaaagcagccactttagagactggagacactca

SEQ ID NO: 4094 - DNA, 514 bp, Homo Sapiens
tttttttttttttttttccgagatacaattcctttattatcattatcatgccccctagcacatgaagctgggcttccacctagatcagctaaggacaggggtatgtttacaatgagaacaatttctctatgcgcattaggttaagacctcttctctgtttctagaatactgtgatgactcacatccatgggccagctgcttccaggaatccatctggcctcaacaacattgggctgcctggaataacggctggcacttgcacagggcagggtatggggagcaggcctcaggtttataagcaggactgggcactgctgaaataggggaagggggcagccaacatgtagcaggttctcccaaggcatgtagaagttggtgggaaaatggggctggggtgtgtaacttgtccccttccaggaaggggaccaggcacctggtctcctgggcaagatcacaggcgatccaagagtcctccagggaagaacaagaactgcacagacgcacagcagagagg

SEQ ID NO: 4095 - DNA, 551 bp, Homo Sapiens
  misc_feature (401)..(401): n is a, c, g, or t
  misc_feature (445)..(445): n is a, c, g, or t
  misc_feature (476)..(476): n is a, c, g, or t
  misc_feature (505)..(505): n is a, c, g, or t
  misc_feature (535)..(535): n is a, c, g, or t
  misc_feature (543)..(543): n is a, c, g, or t
tccacatagcatggattctggagatgggtggctaatggtattggttcaacaactccacgaaggtaggggtcacgtcttggatccttttgccttaatctcagtgctcgttacttcatggtcccaagatggctgctgtatccccaagaatcatgtctgcgttcaaggaaggaggggtggaggaagaggaagggccaaactagctggacctgtcaccttctatcagaaagtaaaacctcgtcagaagtctgtttcctgctctctccctctgcatatcttcacttagatgcccttggcccgagccagctaccattgcacctctagctgcaaacaaagctaagacagcagggaacagaattgttcatggctgaatagaccaatcgtgttccatctactgaggactnggcacactgcctcctgcaataaaactggggatcccttaccaagngaggaatggcagaattgtgtaccagttaggntttgctgtgtaacaaacccttcccaaacntgggcaggtaggaacaaaccctgtattttnccacaatnctatgggg

SEQ ID NO: 4096 - DNA, 429 bp, Homo Sapiens
ttttttttttttttttttttttttttttttttttttttttttttttaaacggggaataccattgggtttattgatcaaacctggcttcgagggggacaaaaccatttttggttttccttggaagtaacaaaaacactgggtaacatgtgaagggcatggagactcacctgaatcccaccaaagtagtagctggacccaatagcctagcttattgttttgggagggccccctacccagaaccattaaacctgggtttggcccttacataggacaaactgggcttttccactcccgccagggtggccctacctccacctgtccttggaagctagtatgtaagtaagggaggagtcatcaagtttataaatgggtaggctgaggattgaggcaggaggggacttaatggctgagtccctggcttgttccaaa

SEQ ID NO: 4097 - DNA, 435 bp, Homo Sapiens
  misc_feature (348)..(348): n is a, c, g, or t
  misc_feature (415)..(415): n is a, c, g, or t
ccctgaggaggtgttacaagcagaggcgtgcagcaccacggaggatggggccgaacccctgctctgtccctcgggctatgagtgccacatcctgagcccaggtgacgtggccgaagtatccccaaccgtgggcagtgcgtcaagagcgccggcaagcagatgggcgaatcctacgacacaaactttacaaagaatatccagaaggtgactcaaagaatgtggcagaacctgggaaggggacaacagaggcactttcagtaaagcaacggcaagcagctaggttgcaagaacattcctctactttctgctaagccttgggaaacagttggggaaaagtagtcttgaccntcacagtttcacatttcagttcagcagagcaaggaccccagagattgtttaggaggacagggacacntgggccttcaaaacccattt

SEQ ID NO: 4098 - DNA, 365 bp, Homo Sapiens
ttttttttttttttttttttttttttttttttttttgcacgggtgataggcttttattacaaactgggggcgggaacggctggacaaaaaacggaaaaagaacatttgaaaccaggctcaaagctagggggttacacaacctccaataacacaaggggagtgcagcacttttaaacacacacacagacacacattacttactcataaacggcacaacctacggtacaaaaaaaagggcaaggtaggtaagggcacccaacaccctcctgcctgcagggggccacagggttaatgtgccttcctgcacccaggcttaaaaaggataaacaaggaaagggctgcccttggaaaaggcctgcggataa

SEQ ID NO: 4099 - DNA, 381 bp, Homo Sapiens
ggactaaaaccacatcaccaggccttcaatgacgtccaatgtctgccatcttatttccactccagctccgccccaggcatagttgcctttctttttattgaagccttctccttgccaagttaattaaagagaatgttttcttcatcaaattagaaattacatcctcagagctttccagtatttgtagttcttacaggccacatttattacaagtttatagactccaaacttctccactgaacagttaataaaaaggacacaggcttattgtaaaataattcatttagtgcctgccattctgattacactagaaatttagttctcctgctcagcgttctgttatgtgactgttcaatgcattacttaaaactgcaagattga

SEQ ID NO: 4100 - DNA, 400 bp, Homo Sapiens
  misc_feature (315)..(315): n is a, c, g, or t
tttttttttttttttttaaagggccgccacggactgcccggcccgccgatcgtttttattatcgagattattattaaaagggggcggggaccccaggacgcgggggaggggctggatacgcaggtatttttattaaacagattattcctgaaataataatacgcgcaagatggctgaaggtggctgtgatgagagtgttggggttgggatttttttcttcctgttttttcttttttgatctgaggataaagctctgaggcgacagcggctgcggagaccctgcccgaagcgccctcccctcccttgagaagccgngggcagacagacggaccttggaccgagcaacgggtgcgggcccgccccggacgcgtcgcctgggcagcagccggggaccgcgggc

SEQ ID NO: 4101 - DNA, 481 bp, Homo Sapiens
cggccgcctacatattttttagttccataaaaacttttatgcaaataaatttttttatgtgtaaaacataaactgtttgctttagatagatagcagccaacctttttaaaaaactcatttatgtgttagtatataatacaaaatgaggttgagtcatttatattttgggtaaaaagtggagcattttagattttaacttcagagtgtttgtgaggaactcttgatgtaccagcaagtatatttttggtgtttcatgttacgtagcttaactcttttatccatacatatatgtgtatatcaaagtccttcccttgatcctctcagcattagcactgtttggggagttgcctttactgttggcagaattccactttccctgaggccatttggaaatctacctagtagcctgtgggataaccttaactcttagaactttcttcaaaggatggtggtgagaatggggtatactgccaggccctgg

SEQ ID NO: 4102 - DNA, 3134 bp, Homo Sapiens
gagaaaaaatcaccacatggcaagaccctaggaaggcgatgaatcagcctctgaatcatatgaacctccaccctgccgtcagttccacaccagtgcctcagaggtccatggcagtatcccagccaaatctcgtgatgaatcaccaacaccagcagcagatggcccccagtaccctgagccagcagaaccaccccactcagaacccacccgcagggctcatgagtatgcccaatgcgctgaccactcagcagcagcagcagcagaaactgcggcttcagagaatccagatggagagagaaaggattcgaatgcgccaagaggagctcatgaggcaggaagctgccctctgtcgacagctccccatggaagctgagactcttgccccagttcaggctgctgtcaacccacccacgatgaccccagacatgagatccatcactaataatagctcagatcctttcctcaatggagggccatatcattcgagggagcagagcactgacagtggcctggggttagggtgctacagtgtccccacaactccggaggacttcctcagcaatgtggatgagatggatacaggagaaaacgcaggacaaacacccatgaacatcaatccccaacagacccgtttccctgatttccttgactgtcttccaggaacaaacgttgacttaggaactttggaatctgaagacctgatccccctcttcaatgatgtagagtctgctctgaacaaaagtgagccctttctaacctggctgtaatcactaccattgtaacttggatgtagccatgaccttacatttcctgggcctcttggaaaaagtgatggagcagagcaagtctgcaggtgcaccacttcccgcctccatgactcgtgctccctcctttttatgttgccagtttaatcattgcctggttttgattgagagtaacttaagttaaacataaataaatattctattttcattttctgcaagcctgcgttcttgtgacagattatacagaattgtgtctgcaggattgattatgcagaatacttttctctttcttctctgctgccccatggctaagctttatgggtgttaattgaaatttatacaccaattgattttaaaccataaaaagctgaccacaggcagttacttctgagggcatcttggtccaggaaatgtgcacaaaattcgacctgatttacagtttcaaaaactgtattgatgacagtagtaccaaatgctttaaaaactatttaacttgagctttaaaaatcattgtatggatagtaaaattctactgtatggaatacaatgtaattttgaatccatgctggctctgatggctcttattagtctgtatttataaaggcacacagtcctattgtagcttatctttcgttattttactgcagagcatctagacaacttagtccctccagcgtgaaagtagcagcagcagcattagtcacagttcttacactacagatcttgtgaaagagaccagtttggtactaattatgagcattttattcaaacaaaagtttttgaaatattacaactggggatttaaaaaattgcagcttagaatctgatggttttttttttttcttgatgttgtttgtttgtttttgagatcgagttttgctcttgttgtccaggctggaatgcaatggcacaatctcggctcactgcaacctctgccttctgggttcaagcgattctcctgccttagcctcccgagtagctgggattacaggcgcctgccaccacgtccggctaattttttgtattttgagtagagacggggtttcaccataatggtcaggctgttctcaaactcctgatctcaggtgatccacccatctcggccttccaaagtgctgggattactggcgtgagccaccgcacccggccttgatgtttattttataaagcactgtaattttgtagctgatgacaaaaggcagccaaatgtttttgataaatcagtggcaactgtatttttgtcttttgaaataactctgaaaacatcaggacaacatagatttcaacctgatagcacaccacacacagtgagctgttgctttttaaattctgaagccttgtcaggtttgcttcctagatttcaagtgtttaaaataattctatctatgaaactgaaggatgaagcagatctctgactgacatgtaaaaaaaaatgccctttgagggtgtatggtggagataaatgtttctgaattcagtaaaattgattcctaagtatattatcctaatcctgtttgctacagttggtataaaaaggcatgaaatatgtattcaatacctcttatgtaaccaaaaccatttttaattagcttttaaggactgagagagcatcatgttcaactggcatgcagtctgcctgcattgccaatgaagtcctcaactgtttaatattttgaactaatattatttataatctatgaatttaatcttttttgaaagactttaataatttgagtctctgagaggatactttcaatttccatgggggacttatttgttggggatcttaaataagattccttttgatctaccggaatatacatgtacagagtacattggatcatgttggaaagaaggcaagtgaaaaggtcagagatgaagtagcgaagttatggaatatcgtggaaaggatactagttgtgaaatggaaagagacaagttatagtaccccaaaagcaaaacaagcaggagatgcaagagatgccccaaaaggacaaagcaacaattttctgttgccacctttataccggaagactctgttgtagaagaaaagaaggctttggtgcaccttatgtgggaggaggaggggcagggcatgctgatgctgagcgtacaggcagacaagagcgtagcctgctgttgcctccatcactatgaaatgacttattttacctgaaggacccatggtttatgttcctctaattcctttcactctccctaagccctctgagagagatgaagatagatgattttattgctactaaattgaagggagcactatttctttttgtcttttgttagcaaaaaattgcaaaaagaattgtacattcttgctaaaaataaataaataaataaaaaaaaaaaaaaaaa

SEQ ID NO: 4103 - DNA, 211 bp, Homo Sapiens
ttttttttttttttttttttttttttttttttttagcaggggacgtgtttattgggggacccctctttctgggggtcgggctggctgggagggaaccctcacaatccccaggtcccagaacagacagatacaagaacttgaatccaaactgcttgcacataaatagaacgggggttggcaaaggaaaaaaaaacaacaacaaatgaacgtg

SEQ ID NO: 4104 - DNA, 562 bp, Homo Sapiens
tttttttttttttttttactggtttagttatctttatgataaaggtgtttcaaggcgtcagatgtttaaatttacaaatagcttctctagtcctgaagagtttcaagttaattgttaagcttataaatgtttagaccatctcagaaacatttagaccatcttaaatataggttcattttgttcctcaaccaaagatgactttgttctccggggaacatttgcctatgtctggagacatttggggtcatttaactgcagggagggtgcactggcatttagtaggtagaggccagagatgctgctaaacatcctgcaatgcacaggacagcccccacaacagaatttaactggccaaaaatggcaaaagtgccacaattgagaaaggctggtctaaacatatatggcatttgcctcagataggaaacgtgacagcactaagccacaaatccagtgacaaagccaagaatacagacagtctccacaagaaacacatatggttatatgaacagtcatttgggaactccctttttaagacagggagttagacatttgacatactgac

SEQ ID NO: 4105 - DNA, 370 bp, Homo Sapiens
ttttttttttttttttttttttttttttttttttttttttttaaagggggttttacaatttattttaaactaacaacattaaaattggcgggacgggccaaaaataaaaagaaatgtcatttaaaacactagagaatggggttcctggacaatcaaaactggaaacactgaaatagttttttggtgttattaaaaacatgttttctgatactatgagtaataatgtctgacacttgggggggctaatatgtaactgcaactttcagttaatgactccataggatctgcttaaactgggttagactgaattttcaggggggaaacaaagatcccttagccatcattccccacaattaagcaggggagcatt

SEQ ID NO: 4106 - DNA, 621 bp, Homo Sapiens
ttgaatttaggtgacactatagaagagctatgacgtcgcatgcacgcgtacgtaagcttggatcctctagagcggccgcctactactactaaattcgcggccgcgtcgactttttttttttttttttttatgttcatgcagtttcaacacattttattatatttctgtatgcattactctcaaaacatcacaagaaatgatcaaaccacttaaaaccttcaaataaaaaatctgaaacagtttatgcccacaattgtacatatttatagttaagaaacattctttataaatattgtttcctctgtagcaagttaataccataatttaattacaaatggataaatatggtaacgggtatttacagaaggaagggtgttattacggaaaaagctaacggcacgacgtttatttttcccccacaatctttcatacaggaactaacaaattgaacttgcaaaagcactaaaacatcacatgtaaacccagctaacagaaaaatacattcacaagcgttgttggtggtggtgtgtatgtgtgtgctatgggtcaatgtgctgaagaaacaaaagggagactttggcacggctcatttttttcagtcttttagttacatgaaagtta

SEQ ID NO: 4107 - DNA, 669 bp, Homo Sapiens
  misc_feature (587)..(587): n is a, c, g, or t
  misc_feature (615)..(615): n is a, c, g, or t
aagagcaacaccttgaaataggcactgttgtcaccagtaggtcaacaaactaaatgcctgcctttgaattgtgtacagcgcagagaaggactgttttccagcatggctgctcttggttggtgtacagacacagtcttaccattcacactctggtgaacagtgtcctctgttgggaatagtgatacttggatgtttctctgagccagaaaaaagaaaatgtaaggagagagagattgacttctttttaaatcttgcccaccagtgtcactgcctttcacccagcattcctgcattttagattaaagagcctggttttcacttgaagtttctctgccttagctgcacgttgcaattttctgagatattttaaaaattagtgatgccgggaccctgaccctagggattttgatctcattggtcttgagtgctccttgggcttcccagctgtttgtactgggcagccagggtcacttcttacccaggctgtctcgaatctagtggaatacagtaaaagtgttagctaaatttttggcttgcttgcagagtaagataaacccacaaacaaactgctttttcttgatgcctgngattgtacttttcagccaaggtactttntttttgaaaaaaaaaaaaaaaaacctgagggggggctcggaacccatttggcct

SEQ ID NO: 4108 - DNA, 452 bp, Homo Sapiens
gacaacacttgaattttactcagcctggagcgctcttcacatgtcttgtccagatccagttcggactcattcttcagccgtgcatcagtaaatgggggctaggttaaactgtggtgacaaacaacctccaaatttcagtggctcaaaaatcttcttcctcatttatttacatttcatcatgggtcaggtgagaggtagctctgtgctgtgtcatcctaacacaggaatccagacggaaggagggacaatcaataagatccccattgctatagaaaagagaaaaaagtatgcggaatagcactctgtttcttggagatttctcctgaaaaagtcacatgttatttcttctcacctccattggcaaaaaaaaagtcatgtggccatgtgaaaatgtaagtaggcgggatggaacagtcagaatgcattcataaaatatgaactgaaaatatctg

SEQ ID NO: 4109 - DNA, 572 bp, Homo Sapiens
  misc_feature (15)..(16): n is a, c, g, or t
  misc_feature (20)..(20): n is a, c, g, or t
  misc_feature (22)..(22): n is a, c, g, or t
  misc_feature (33)..(33): n is a, c, g, or t
  misc_feature (167)..(167): n is a, c, g, or t
  misc_feature (420)..(420): n is a, c, g, or t
  misc_feature (458)..(458): n is a, c, g, or t
  misc_feature (464)..(464): n is a, c, g, or t
  misc_feature (524)..(524): n is a, c, g, or t
  misc_feature (538)..(538): n is a, c, g, or t
  misc_feature (547)..(547): n is a, c, g, or t
  misc_feature (564)..(564): n is a, c, g, or t
gcgggcgaccgtggnncggnanccccggggaanacctgcccagtccggccgccgcccacgtcccggtctgtgtcccacgcctgcagctggaatggaggctctctggaccctttaggaggctgaggcaggagaatcgcttgaacccgggacgtggaggttgcggtgancaagatcgcaccattgcactccagcctgggcaataagagcgaaactctgtctcaaaataaataaaaaataaaagacagaaagcaaggggtgcctaaatctagacttggggtccacaccgggcagcggggttgcaacccagcaccctggtaggctccatttcttcccaagccccgagcagagggtcatgcgggccccacaggagaagcggccagggccccggaggggcaccaccttgttggacagcctcctgtncccaagcttttcagggcagggacttaaacgcaccgaantttcangctctgctggtcagttggcggctgttcccttccccagcccagccggccagcacatgtgtntggcttaaccgtanaaacaaggntccgggtttggaagttnacatccca

SEQ ID NO: 4110 - DNA, 333 bp, Homo Sapiens
ttttttttttttttttttttttgattgtatattttgtttaatacttgcattgtttctatagcgcaattatagcaatctttaaatttactttcattacaaatatttgtcaagttttgtttcagaaacatttttcctactctcttgcatcatgcacccagacacactacaaaaaactcattcataacacagtaagggcaaacattattcatgtaaacatctttcattaatttcccataatttaaaaaaatcatagaattatagatattgaataaggctcatagttttagttcaaattccacaagagaccaaagatgctcgttaaccgtgatgggg

SEQ ID NO: 4111 - DNA, 349 bp, Homo Sapiens
ctttctttctgatttttgctgaaatagcagtaacagtatgaggtgttatatctaaagtttccacatcaaagtttccaagaggagggacatagtctggggtgactgccaagtacttttccaggattatttgcaattctacaatgtgctttaaccgagtgagcaccttccccttcatctcaggtgatgtttcctggcagaaggcatttacaatctctcggaaccagttgagagtaagaaatatgagagaacacatgaatgaacgctctttagcagacatggactccaacttctctccaggctccaggtccagttaggaatataggacaatctagtagaccatcaatctctc

SEQ ID NO: 4112 - DNA, 533 bp, Homo Sapiens
ttgaatttaggtgacactatagaagagctatgacgtcgcatgcacgcgtacgtaagcttggatcctctagagcggccgcctactactactaaattcgcggccgcgtcgacttttttttgggagaggattgcctggcagtgtcccaattctaagtgacaaggagaaccctgaccctgtaagttctttaacaaaatggagataatttttatttttgatttgaagatactatgaaatagggagcaccgcaaaaacaaagttgcttaacattcttgaatctaaactgacatgacgggacgtttattaacggccgatctcagaggtggatttttgcctttgtagtggcattcatgcttcttgctattaaatggtcacagaactatcttagaagatttatggtcgacgcggccgcgaatttattagtagtagcgacccgggaattccggaccggtacctgcaggcgtaccagctttccctatagtgagtcgaattagagcttggcgtaatcatggtcatagctgtttcctgtgtgaaat

SEQ ID NO: 4113 - DNA, 464 bp, Homo Sapiens
tttttttttttttttttttttttttttttcctctcatttagtctcagagcctaaaaagaaatgcctccagtctctgttagccccgatgtttggaatgaaattaacaagattctaccttaaaagagaaaacttatgtgggcttttcaaattgtgaaaatttgttccctcttataaaatataatctttcccctgctgctggtttataaatatgggcatatagcccagagccattataaagaaaaaaacaaccaaccacaataaactaaggagcctcatctgatggctaaggttctcaggaaaaaatgagaagagcaccttgatcaggaaaggaaaaaaggatagaggataaaaacagtaacctttaacttctatgccctcactcagccagtaacttacggcaggtgttgctggcaaggccttagctgtatttcttcattaagttgaacatcctgtctgccaactcc

SEQ ID NO: 4114 - DNA, 465 bp, Homo Sapiens
gttttgttttttttgggttttttttttttttttggttttttttccccccccccataaaccttacggatctgagtagaaacagatttctcacaacttgcttctccggctcaatttcacagttcggcatacactcaggcactgtcaaaagcttgacaatgttccagggaaaatattaaccgtaaactttccaagaggaattaaaggagcaggcagaaatgtcaggacgtcctctcttttgaaagcacatcccaagtttgcgcacgtgtacgttttggagagaagcacatgcagcaagctcaaatgacatccagtatggtcccactttaccatgtcacggtggaaagggaaggggaaaaaaaggacatatcctctttggctaaaaggcacggaggtctctccctctccctctcaggcctgaccagttgaacactgcacactctgatgtataaatatttgcctctggct

SEQ ID NO: 4115 - DNA, 4233 bp, Homo Sapiens
ggacgaggtcttcttcaacagcgaggtggacgagaaagtgggcccgcgccgcccgccgcgaagctgaggccgccgcccgagggcagcgcgggggcctgcgccccggtgcccgccgccgccgccgtcgccgcggggcccgagcccgcccccgccggccccgccaagcccgccggccccgccgcgctggccgcccgcgccggccccggccccgggcccggccccggccccggccccggccctggcaagcccgccggccccggcgccgcgcaaactttgaatgggagcgccgcgctgctgaactcgcaccacgccgccgcacctgctgtcagcctggtcaacaacgggcccgccgcgctgctgccgctgcccaagcccgccgcccccgccgccgccccgcccccgccaccccccgcgcccgccactctggcccggccgcccggccaccccgccggacccccgaccgccgcgctcgccgtgccgccccccgccgccgcccagaacgggggcagcgccggggcagcccccgcccccgccccggccgccgggggccccgcgggggtcagcggccaacccgggcccggcgcggcggctgcggcgccggcgccgggggtcaaggccgagtcgcccaagagggtggtgcaggcggcgcccccggcggcgcagaccctggcggccagcggcccggccagcacggcggccagcatggtcatcgggccaactatgcaaggggcgctgcccagcccggccgccgtcccgccgcccgcccccgggacccccaccgggctgcccaaaggcgcggccggcgcagtgacccagagcctgtcccggacgcccacggccaccaccagcgggattcgggccaccctgacgcccaccgtgctggccccccgcttgccgcagccgcctcagaacccgaccaacatccagaacttccagctgcccccaggaatggtcctcgtccgaagtgagaatgggcagttgttaatgattcctcagcaggccttggcccagatgcaggcgcaggcccatgcccagcctcagaccaccatggcgcctcgccctgccacccccacaagtgcccctcccgtccagatctccaccgtacaggcacctggaacacctatcattgcacggcaggtgaccccaactaccataattaagcaagtgtctcaggcccagacaacggtgcagcccagtgcaaccctgcagcgctcgcccggcgtccagcctcagctcgttctgggtggcgctgcccagacggcttcacttgggacggcgacggctgttcagacggggactcctcagcgcacggtaccaggggcgaccaccacttcctcagctgccacggaaactatggaaaacgtgaagaaatgtaaaaatttcctatctacgttaataaaactggcttcatctggcaagcagtctacagagacagcagctaatgtgaaagagctcgtgcagaatttactggatggaaaaatagaagcagaagatttcacaagcaggttataccgagaacttaattcttcacctcaaccttaccttgtgcctttcctgaagaggagcttacccgccttgagacagctgacccccgactccgcggccttcatccagcagagccagcagcagccgccaccgcccacctcgcaggccaccactgcgctcacggccgtggtgctgagtagctcggtccagcgcacggccgggaagacggcggccaccgtgaccagtgccctccagccccctgtgctcagcctcacgcagcccacgcaggtcggcgtcggcaagcaggggcaacccacaccgctggtcatccagcagcctccgaagccaggagccctgatccggcccccgcaggtgacgttgacgcagacacccatggtcgccctgcggcagcctcacaaccggatcatgctcaccacgcctcagcagatccagctgaacccactgcagccagtccctgtggtgaaacccgccgtgttacctggaaccaaagccctttctgctgtctcggcacaagcagctgctgcacagaaaaataaactcaaggagcctgggggaggttcgtttcgggacgatgatgacattaatgatgttgcatcgatggctggagtaaacttgtcagaagaaagtgcaagaatattagccacgaactctgaattggtgggcacgctaacgcggtcctgtaaagatgaaaccttcctcctccaagcgcctttgcagagaagaatattagaaataggtaaaaaacatggtataacggaattacatccagatgtagtaagttatgtatcacatgccacgcaacaaaggctacagaatcttgtagagaaaatatcagaaacagctcagcagaagaacttttcttacaaggatgacgacagatatgagcaggcgagtgacgtccgggcacagctcaagttttttgaacagcttgatcaaatcgaaaagcagaggaaggatgagcaggagcgggagatcctgatgagggcagcaaagtctcggtcaagacaagaagatccagaacagttaaggctgaaacagaaggcaaaggagatgcagcaacaggaactggcacaaatgagacagcgggacgccaacctcacagcactagcagcgatcgggcccaggaaaaagaggaaagtggactgtccggggccgggctcaggagcagaggggtcgggccccggctcagtggtcccaggcagctcgggtgtcggaacccccagacagttcacgcgacaaagaatcacgcgggtcaacctcagggacctcatattttgtttagaaaatgaacgtgagacaagccattcactgctgctctacaaagcattccttaagtgacacaggaggacgcctggggactttttatatatttgcagattacgcctttttgtaacgagcaaatgggatattgtttaaaaaacagccacctctttacaatggaacagttttatattcctgtttctaaatcagctcttcagtgtgaaagaaaacacgtttctgtaacagagagaacacaaaggcctgtggatactcttaaaggacaattaaatcttaactcatcttgattgagtggccttcctgccaaacaagccatatataaagactgatggaatcgttagcaaataattagctgccctctgtcaactcatagcagtttctgcattatttgtgcattttggtttagttctacctaacttactatgtaggtgtatgtctacagccgatgacctcatttcgtttattttatttttgtaatagtcagttggcaaagcaaactgattttttagactatttatcttccttcccttcccctcccaccccgctctcctctctgccccctgccctcccctcccctcccttcccctccactccgctgagaatcctggaggaatacacaattcatcgttgcacccccacctcagagtgtaatcgcatttctgcttggtagaggccgagcccagcaaaggtggctccttctgaatgtgtggtcagcatctgtacaaatgcattttatttgctatagtttgtaaagctgtaaagttaaaagagatgaaaaccttttcagcataaatatattttacttgcactgtgttttttagctaaaagtgaaaacctagattaaataaaatcaaagttgagaagaatcatcaaaagactgtttctcggtgtgaatcaagtgttgaaaaatggttggtgtattttgtcagtaattgtacataacttttggcacatgacatagaaatggctatgtaaactataattattttgctaagagactgtatgcaagccttgggccgactttacagacgtccagagcaaagccccttctttgtacctatttttttattacaaatatactaattggttctttctattttcagaggttattgtatgaaattgtctattgatagtacttttatgactgtaaatactctggctttctccgtgtgaattctcacattagactttaattcgagcgcgtgtgaactgaacgctgatcagtattttttatcaacacctgagaactgttacaccttttattttgtcttttaggaaatccctgtctttccattttttcatgtaaattttgcacagttacttgttcatatgtaaatattttactttcagaaatgaagtttttaattgctattgttttatataggattgaaagaaaattaactcctttattaaaaacaaatttatctgtaaaaaaaaaaaaaaaaaaaa

SEQ ID NO: 4116 - DNA, 687 bp, Homo Sapiens
gccgaaagtgagagaaggctgatattgctagctggaatccaggcctgggtgctgcatggtggcgcccctccccgatgaccaccggctgcgtatctctcgggctattctctgaggagactgctctgtgctgtttggcccctgcctactcggaatggaacaaagcatcgaacaaaccaactgatagtcctgttgtgcctatcacctggttgcaagttgccagtcttaaggaaggaatcaattttcgtttcgcaataagagcactggcaaagacttacgtcttgttacaaaagaataaagagccgactgaatgggcatgccagaatatgtgcaagcaccaaggaggcctgttcataaaagatatcgaggatttagccggaagtgtcgaaatggatgaaaacaacggactttcgcttttagaactgaatcctcctaacccttgggacttacagcccagatctcctgaagagttggctattggagaagtacagatagcatatctcactcatgcctgcatggacctcaagtcaggagacgagagaatggtgttgaccctgtggtaaatcggtcctgctttgcccgtgaatggctggttgcaccatgagcctcatctgattggctggagaggctgttccaggtagacctcatttatactcagtcatctggattcagaccactgaagttacccaa

SEQ ID NO: 4117 - DNA, 310 bp, Homo Sapiens
cgccaagagcgcacagactttgaagcaggaaaagacagtctctagagcaacatggaaaggatccagtatttgttttcaggcaaaagcaagcctccaaaagccccttggttcttctctgtgtgtctcgccccttctgccttgtacaccagactgccggcaagcaagcggggaggtggcgaacagctgggatcctccagtgaaaagtttgctcagcgcgagagatgtcaagaggctgggattgtcgcctatcgggaggtggggagctctctcactcacacttcctgggaaatgaaggagaactaataggcag

SEQ ID NO: 4118 - DNA, 511 bp, Homo Sapiens
tttatagacagattggaacagacacaataaaactgaaatatcaaatgtctgttcttaaaaaggagtgaaaggagaactcaaggaaatatgattgggtcaaattaactatgatctctgcagtattcatttgcgatcattagaaagcatcaagcgttcatcaggaaatatttatgctacaacattatttatggagacagtgtctgtctcttgacttcaaggtacatgaatgggagattaaatactgtttaccaaaacaatcgagttttaggtgatattgatcacaggtcggctgcgtgaagaactgtatacttcgaaggtatattggcacatagagaatggtcaccaggaggtctgagccatgggtctgctttcctctttgcttcagttgtacatgaccaggctcatccactccatttctgtcaggtagagtccttttccatccttagagaggttgcggaaggtctttgccatggcttcaagccgcatcaggaagcagaccaggctggggaag

SEQ ID NO: 4119 - DNA, 3078 bp, Homo Sapiens
ggactctcaaaagccaagagtcaagtttttaaaaatcaagatccggtgctaccccctcgtcccaaaccaggacaccctctctacagtaaatacatgctgtctgtgcctcatggaattgccaatgaagatattgtctctcaaaaccccggagaactctcttgtaagcgtggggatgtacttgtgatgctgaagcagacggaaaataattacttggagtgccaaaagggagaagacactggcagagttcacctgtctcaaatgaagattatcactccacttgatgaacatcttagaagcagaccaaacgatccaagccacgctcagaagcctgttgacagtggtgctcctcatgctgtcgttcttcatgatttcccagcagagcaagttgatgatttgaacctcacttctggagaaattgtttatcttctggagaagatagatacagattggtacagagggaactgtagaaaccagattggcatatttcctgccaactatgtcaaagtgattattgatatcccagaaggaggaaatgggaaaagagaatgtgtttcatctcattgtgttaaaggctcaagatgtgttgctcggtttgaatatattggagagcagaaggatgagttgagtttctcagagggagaaattattattcttaaagagtatgtgaatgaggaatgggccagaggagaagttcgaggcagaactgggattttccccctgaactttgtggagcctgttgaggattatcccacctctggtgcaaatgttttaagcacaaaggtaccactgaaaaccaaaaaagaagattctggctcaaactctcaggttaacagtcttccggcagaatggtgtgaagctcttcacagttttacagcagagaccagtgatgacttatcattcaagaggggagaccggatccagattctggaacgtctggattctgactggtgcaggggcagactgcaggacagggaggggatcttcccagcagtgtttgtgaggccctgcccagctgaggcaaaaagtatgttggccatagtaccgaaggggaggaaggccaaagccttatatgatttccgaggggagaatgaagatgaactttccttcaaggctggagatataataacagagctggaatctgtagatgatgactggatgagtggagaacttatgggaaaatctggaatatttcccaaaaactacatacagtttctacagatcagctagaggagaagcttgtctgtgttccttggcacaagaactcacttgaactatcaccttgactatcagatatgtttttgcactattttttttaactgaaaaagaaatatctaagctgtacatggtacactagaattttctgaaagcagaaaacgttcagattttgtagttaattttcattacaatagaaacacgcacatggaaacccatgagctaggattctaccgaggaaaacatctagtgggattagcaaggtgaagggaaagcatctggtggcatggcagcatggggaggctcacacacagaagttgcacgtggacatctgttttaatcagcacaagtgaattaaccatgcttcttcattttttttactttagttaaaaaagaggacatttaatattctacatgctgtaactatcaggacatggttagcaatctcaatttcatttttgatattcaaattaattcttacagcttgagcatatcagccttattaccagagcaaatccttccttcagatgggatagtttactgactagttggagcatttgtaagcacatggtgaaatcagcccctgcccaccaaaataatctttatgttaccaagtgattcccatttgtctaaggatttgaagggggtctaaattggatgtatcttagtctaaagaaccaaaaccatccctgaaatgccttgctaatacaactaatccttccatatatgtgccatacttatttttttcctcagtgtatactttatgttaacagggttattacaaagcacattttctgaatctgcaatcattcctttgacaattactggacccaaaggaaaattcattttctttgcattattccagtaatatataaaaactgtgtcttgttatagtagtacattatgaatcacatataaaatcttacaatacagaacaactgttaagatggaaaacagtgccaaacctccacagctcatttctttgtaatataatcagaatgaaaaataatttaagaggacagaagactggtacttttttgttttattttttctctagcttatccctgcacaattattagagtgaatgaaaaaccactttcctgctttccattgttataaattctaagcttaagataaaagtggttctttacatgactgaatcaattacaatttatgggctagagccaaataggttgaagacaatcatccaaacagatcaatggaatagaatttcattggaaatgtaaaacactttcccaacaatggtcatgactttcttctgtttttgagaagagtttcatatgctggaccacattttagcttttattgttttttttttcccattgtccaaaaagttaagcaacaagtggccacacttttacgtgactacaacctggagttctgcaaagaaggtaatatttacttggtctttgactaaagttatctccccattctatggttacattttattttggactatggggacttctaatacgttttggtaaagaagagagtataaagaaaattcttgtcaaatttcactcaaaagtaatttcatgagaaatcaatgatttaaagcattatccaaattaaattatcatttgcagcaaactgtacaacagcaggaaggatatggaatggaacatgaggtatatatctttgcctttataattttaacatcttatattgaagattctgaaaacctatctttattagaggaaaatctcaatcttcagttttggccttctgtcaccagaatgataagtgcaatagttgtaaatctacttgacactgtaataaactgaactgaactttcaaaaaaaaaaaaaaaaaaaaaaaaaaaaaaaaaaaaaaaaaaaaaaaagg

SEQ ID NO: 4120 - DNA, 446 bp, Homo Sapiens
ccacagttaatcagtgatttcctcagatgtccacatgctcctacggggagttgctgagtcagcccagaccggaaggagtggcagagatcatttgccccaagaacggcagcgagcgagtaaatgttgccttggtttaccacccacgccgactgtgatcagcccctgttccaagaagaatgttggtgaaaagcacagaaaccagtgacgtttgtggctgtggaatttccatggagaaaagagagcatctgaacacctggaccatcttttgcacctggcagaccctctgcactcaccccagcgtgttctgtgaacttgagtgacaacgcgtgcttgcagggtgctttttggatgactggggaagaggtggggagaggggtggtggggggaagcatggacgagaacatggagcaaatgttttacaacctgaacctcagaactgtgatctc

SEQ ID NO: 4121 - DNA, 477 bp, Homo Sapiens
  misc_feature (399)..(399): n is a, c, g, or t
cggccgcgccggttttttcttgaattcttttcgaagatcaaaaaaggaatagaagcattcaggtaatagtacattcttcttggaagcctcaggatgcaggatttgcctgacatgaagctgcccatcagtacagagacagaaggaagtccctactccaatattcagttcattgctcactgactggttaaactgtcggagggcttggtccagctgcgacgccgaggacaggctttcgacgtctattttagtttcttctttgcagtcctccgtcagttccaactgatccggtctaactagcacttcgtgcaactgtcccaccttcttgttggccagatcaacgactttccagaacagcaggatcaactccttctcatccgagcctagcttgggcccggtggncccagcagtgatcccaaaaagcaccaccaagtaatccggagaggccgtcatgacgataggtggggaggggcctcgtgc

SEQ ID NO: 4122 - DNA, 434 bp, Homo Sapiens
tttttttttttttttttttttttttcaaatgcgagtaagtgtatttcatgagtatgttaggagtataaagcagcaagggattgtttcttaaaatctctatggaacccatgggggggtcagtataggatgggccggctgaagcatgttgctgatttgtaacagactgtgtgtgtatacttgaaattcagttttgccctcaacctttttcgactcttgctgaggtacaaaagtgaggttgttagatgacaaaatgtattttcataccccagtcagtgtgagtcatactggcagcgctcccctggcagtggagtgggtctcctgaggcttgtgatggaggcaagacggtacctccctgggcaaaaggtaaagtgtggtttcgcttaaccaaaggggtgtatcccctgcatggtggcattcaaccagctggggcattg

SEQ ID NO: 4123 - DNA, 483 bp, Homo Sapiens
tttttttttttttttctgtaactttaagagcatgaactcatcctaatgaggtttgacagcagctttgtcacacattagatgtttcctcagctgtaaactgggtcagaagcttggagtcactgtccaagctcggctgttcactggctgtgtgttcttggcatgttattcaacctctctgtgctttagtttcctcagctgtaaaatgggggtaataatagcatccatcttacagggttatagtgaagattaaatgagttaagatctgaaaaatgcttagaatagtatggggcatggaggaggcatccaattattgtagctgttgttattattattattatttccacccctccaggctgcctccacaggacagtgttgtgtacttctaggtcgtggtttgtagcacagatctaaacttaagagtatgtgcttatattaatacccagcatattgacccccagcctgtctaaactcagtctcacagct

SEQ ID NO: 4124 - DNA, 592 bp, Homo Sapiens
tttttttttttttctttcttgtgaaccacgtggaggtgggggcctttgcacaccccccagaggtgctgtcttttcagaacttttgttaaaccagcctttgctttcaaaagcccccagtgaagccccattccaccgtgcccaccacggggcaagtgtttcatggagttttaaacttctgctccgaatgaatcatacgaatacaaagtggtcaaatcgtctttccgaccactcgctcctttgtaaaccaaaccgaggcttccatgaggttgcgggtgatgcagatgctttgaaaatcacgtttctgtagcaactgctggctgcctgcgttttcttttcccttttggtttcaaatacgtttgtagccagggatgctcacaccttttctgctgtcttggccacatttctgcagcacttttgaaaaaacagccatgtgcatgaagaaaaagcaacatttccaacaagggtgagtgctgaaatcacagcagcgcgactgggccttctacccaaggccacgagtccgtgacctgatggagctggctccaggcttaacgatctccatttataaaggtgaagtctgacacaggttgagtgg

SEQ ID NO: 4125 - DNA, 392 bp, Homo Sapiens
  misc_feature (344)..(344): n is a, c, g, or t
  misc_feature (363)..(363): n is a, c, g, or t
tgtggtgaagctgtagagaaaaacaagcgtctcatcacggcagaccagagggaatatcagcaggaactcaaaaagaactataacaagctaaaagagaacctcaggccaatgatcgagcggaaaattccagaactgtacaagccaatattcagagttgagagtcaaaagagggactccttccacagatctagtttcaggaaatgtgaaacccagttgtcacagggcagctaagaaaagccatcttcattcgtggagactgtggccctgcaaccctggagaaggacttgctggtacttaaaaaatgggacatttgccacccaggactgactgtacactccctgatnagccagcactctggaagcnttcttgagggctcccaagcaccgggggta

SEQ ID NO: 4126 - DNA, 393 bp, Homo Sapiens
gcggaagcggaagtcggggggcgcgccagctcgtagcaggggagcgcccgcggcgtcgggtttgggctggaggtcgccatggggcgaggcagcggcaccttcgagcgtctcctagacaaggcgaccagccagctcctgttggagacagattgggagtccattttgcagatctgcgacctgatccgccaaggggacacacaagcaaaatatgctgtgaattccatcaagaagaaagtcaacgacaagaacccacacgtcgccttgtatgccctggagggcatggaatctgtggtaaagaactgtggccagacagttcatgatgaggtggccaacaagcagaccatggaggagcttaaggacctgctgaagagacaagtggaggtaaacgttccg

SEQ ID NO: 4127 - DNA, 2405 bp, Homo Sapiens
gggggaggtgggcaagcggcgaaatggcgccctccgggagtcttgcagttcccctggcagtcctggtgctgttgctttggggtgctccctggacgcacgggcggcggagcaacgttcgcgtcatcacggacgagaactggagagaactgctggaaggagactggatgatagaattttatgccccgtggtgccctgcttgtcaaaatcttcaaccggaatgggaaagttttgctgaatggggagaagatcttgaggttaatattgcgaaagtagatgtcacagagcagccaggactgagtggacggtttatcataactgctcttcctactatttatcattgtaaagatggtgaatttaggcgctatcagggtccaaggactaagaaggacttcataaactttataagtgataaagagtggaagagtattgagcccgtttcatcatggtttggtccaggttctgttctgatgagtagtatgtcagcactctttcagctatctatgtggatcaggacttgccataactactttattgaagaccttggattgccagtgtggggatcatatactgtttttgctttagcaactctgttttccggactgttattaggactctgtatgatatttgtggcagattgcctttgtccttcaaaaaggcgcagaccacagccgtacccatacccttcaaaaaaattattatcagaatctgcacaacctttgaaaaaagtggaggaggaacaagaggcggatgaagaagatgtttcagaagaagaagctgaaagtaaagaaggaacaaacaaagactttccacagaatgccataagacaacgctctctgggtccatcattggccacagataaatcctagttaaattttatagttatcttaatattatgattttgataaaaacagaagattgatcattttgtttggtttgaagtgaactgtgacttttttgaatattgcagggttcagtctagattgtcattaaattgaagagtctacattcagaacataaaagcactaggtatacaagtttgaaatatgatttaagcacagtatgatggtttaaatagttctctaatttttgaaaaatcgtgccaagcaataagatttatgtatatttgtttaataataacctatttcaagtctgagttttgaaaatttacatttcccaagtattgcattattgaggtatttaagaagattattttagagaaaaatatttctcatttgatataatttttctctgtttcactgtgtgaaaaaaagaagatatttcccataaatgggaagtttgcccattgtctcaagaaatgtgtatttcagtgacaatttcgtggtctttttagaggtatattccaaaatttccttgtatttttaggttatgcaactaataaaaactaccttacattaattaattacagttttctacacatggtaatacaggatatgctactgatttaggaagtttttaagttcatggtattctcttgattccaacaaagtttgattttctcttgtatttttcttacttactatgggttacattttttatttttcaaattggatgataatttcttggaaacattttttatgttttagtaaacagtattttcttgttgtttcaaactgaagtttactgagagatccatcaaattgaacaatctgttgtaatttaaaattttggccacttttttcagattttacatcattcttgctgaacttcaacttgaaattgtttttttttttttttctttttggatgtgaaggtgaacattcctgatttttgtctgatgtgaaaaagccttggtattttacattttgaaaattcaaagaagcttaatataaaagtttgcattctactcaggaaaaagcatcttcttgtatatgtcttaaatgtatttttgtcctcatatacagaaagttcttaattgattttacagtctgtaatgcttgatgttttaaaataataacacttttatattttttaaaagacaaacatcatattatcctgtgttctttcctgactggtaatattgtgtgggatttcacaggtaaaagtcagtaggatggaacattttagtgtatttttactccttaaagagctagaatacatagttttcaccttaaaagaagggggaaaatcataaatacaatgaatcaactgaccattacgtagtagacaatttctgtaatgtccccttctttctaggctctgttgctgtgtgaatccattagatttacagtatcgtaatatacaagttttctttaaagccctctcctttagaatttaaaatattgtaccattgaagagttcggatgtgtaacttgtgatgccttagaaaaatatcctaagcacaaaataaacctttctaaccacttcaaaaaaaaaaaaaaaaaaac

SEQ ID NO: 4128 - DNA, 377 bp, Homo Sapiens
ttttatgtactttctcatgtgagtttgagttcttctttgtggaaacttaagatgtggtgtaaatgattctttccacgtattgtcagcagcttgaatgaggcagtgacaattctgaggtggtttattgggagtccttctacatttctcttagataactctgcactctgggtggctattgtgtagccttactgccccagagtgcctgttagccaaatatttcccctctgataggaatattttctaagaatcagctgataacttgcgtgctggaccttgttatctgtgcccctgggagacacacgttttcttggttttgaaaacctgaaacacaggcaactttacattttggggaattagctgatgcctcctgaagcctg

SEQ ID NO: 4129 - DNA, 434 bp, Homo Sapiens
ttttttttttttttttttttattattatccttcagtctttattttaaataaggcccctgtcctttaccctcccaaagtacttttaaacattttccttctgcccaaaatcctttgcccggtcccctgtagctagtgtccaaacactggtcacagacctccactgagcccagttagagcgctgacctcccatctcaggacttcttggcccttgcccattgccatactctactggcagattttaaaactgctagaccatgtgccaattcacattgacttgtagccactaggaccctgtgtctttttctattgtgcttgttcatggccaggaatcaacgaactttggacagacaatcagtagactttgggtgtggccttggtgaaggcttcccactttggtgacttgcatgtgcccctctttgttgagggggttttga

SEQ ID NO: 4130 - DNA, 436 bp, Homo Sapiens
tacgaggggtgaaaccaaagcagaaatggaagccatttagtcaaaagcagataatcttattggaacaatcctatcagaaacatcaaatatcaagagaccatggctggattaagctagataataattttgaggtcaattttgataaagatccaatggtaatgcgcctccctattcgtagtcctattaaacgagactttttatcaagaattcagattgaatttaagcagtcttctcaccagagaagtttaagggccaggttgtactggcttcaggttgataatcagttaccaggtgcaatgttccctgttgtatttcatcctgttgcccctccaaaatctattgcgttagattcagagcccaagcctttcattgatgtgagtgtcatcacaagaattaatgagtacagtaaagtcttacagttcaagtattttatggt

SEQ ID NO: 4131 - DNA, 386 bp, Homo Sapiens
  misc_feature (160)..(160): n is a, c, g, or t
  misc_feature (310)..(310): n is a, c, g, or t
  misc_feature (386)..(386): n is a, c, g, or t
catggacctcccaggcctacaatgccctgacatcggtcgtgacatcatgcaagaacttcaaagtgcgcatcagatctgcagctgccctttccgtcccggggaagagagagcagtacgggtctgttgaccagtatgctcggatctggaatgcattggtcanccgcttttacagaagagtgaagacaccatagactttttggaattcaagtactgtgtcaagcctacggacccaaatctgccaaggcactgattcacctcttgaagcttggccaagtgcctcggacctccctttgtatgaaagaaacccttnaacttgagtgggaatatggtccagtcctatattctacagtttttaaaatcaggagcagagggagatgacactggan

SEQ ID NO: 4132 - DNA, 447 bp, Homo Sapiens
  misc_feature (408)..(408): n is a, c, g, or t
tttgattgaaaaaaatatgaaatttaattttagacatggcaagttcaattacatcacttcatatcacagtagaaaatataatttgttctaccatgggaaatagtataatggaatagatcacaatagtagtataataaaatagaatatccaagtgcaaaaacaattttcaagtaagtacacacactgtttgaaggtactttattaagatcaaagatttttcattacatttatttataaatccttcctagtcaaaataaaataataaaaatctgtatctttagaaagaacatagttttgtaagtctgagaaggttatgtttgtcagtttcaaattattacagtttagatacattcaatcattacacaataccaggaaggtcagccttaaagataccaagaacttccatanttgtcagtaaaataagggtaaaaaattaaattttacttt

SEQ ID NO: 4133 - DNA, 491 bp, Homo Sapiens
ttttgaggatataaaaaagaatactccaccccgtgcctcccccaaccacaaaacaccctggttattggttcctaagttatgttaaaatggaatttgctgctaaatatgcttcacttgataaatactgcatcttggaaggattaatactgtccatattgtaagggaatattagtttaaatatgttcttattcagaaataaaatgcatggctctataataacacattagtactgtagagataagaatgtgtcatcagccatggcccctaagtggccattgatgacatggcataagatcacagttttaacctcctttaatatcaaactctcctggctctctgaaatagaagcataggaattacagctaagaacaaacaacaaaagaaaaactcagttcaaatcctgactctgcttccagcttctggtacattaggcaagttgctaaacctctgggcttaggggataaagacactacctcacagggtggagtgag

SEQ ID NO: 4134 - DNA, 5231 bp, Homo Sapiens
cacgatttggtgcagccggggtttggtaccgagcggagaggagatgcacacggcactcgagtgtgaggaaaaatagaaatgaaggtacatatgcacacaaaattttgcctcatttgtttgctgacatttatttttcatcattgcaaccattgccatgaagaacatgaccatggccctgaagcgcttcacagacagcatcgtggaatgacagaattggagccaagcaaattttcaaagcaagctgctgaaaatgaaaaaaaatactatattgaaaaactttttgagcgttatggtgaaaatggaagattatccttttttggtttggagaaacttttaacaaacttgggccttggagagagaaaagtagttgagattaatcatgaggatcttggccacgatcatgtttctcatttagatattttggcagttcaagagggaaagcattttcactcacataaccaccagcattcccataatcatttaaattcagaaaatcaaactgtgaccagtgtatccacaaaaagaaaccataaatgtgatccagagaaagagacagttgaagtgtctgtaaaatctgatgataaacatatgcatgaccataatcaccgcctacgtcatcaccatcgtttgcatcatcatcttgatcataacaacactcaccattttcataatgattccattactcccagtgagcgtggggagcctagcaatgaaccttcaacagagaccaataaaacccaggaacaatctgatgttaaactaccgaaaggaaagaggaagaaaaaagggaggaaaagtaatgaaaattctgaggttattacaccaggttttccccctaaccatgatcagggtgaacagtatgagcataatcgggtccacaaacctgatcgtgtacataacccaggtcattctcatgtacatcttccagaacgtaatggtcatgatcctggtcgtggacaccaagatcttgatcctgataatgaaggtgaacttcgacatactagaaagagagaagcaccacatgttaaaaataatgcaataatttctttgagaaaagatctaaatgaagatgaccatcatcatgaatgtttgaacgtcactcagttattaaaatactatggtcatggtgccaactctcccatctcaactgatttatttacatacctttgccctgcattgttatatcaaatcgacagcagactttgtattgagcattttgacaaacttttagttgaagatataaataaggataaaaacctggttcctgaagatgaggcaaatataggggcatcagcctggatttgtggtatcatttctatcactgtcattagcctgctttccttgctaggcgtgatcttggttcctatcattaaccaaggatgcttcaaattccttcttacattccttgttgcattagctgtaggaacaatgagtggagacgcccttcttcatctactgccccattctcagggtggacatgatcacagtcaccaacatgcacatgggcatggacattctcatggacatgaatctaacaagtttttggaagaatatgatgctgtattgaaaggacttgttgctctaggaggcatttacttgctatttatcattgaacactgcattagaatgtttaagcactacaaacaacaaagaggaaaacagaaatggtttatgaaacagaacacagaagaatcaactattggaagaaagctttcagatcacaagttaaacaatacaccagattctgactggcttcaactcaagcctcttgccggaactgatgactcggttgtttctgaagatcgacttaatgaaactgaactgacagatttagaaggccaacaagaatcccctcctaaaaattacctttgtatagaagaggagaaaatcatagaccattctcacagtgatggattacataccattcatgagcatgatctccatgctgctgcacataaccaccacggcgagaacaaaactgtgctgaggaagcataatcaccagtggcaccacaagcattctcatcattcccatggcccctgtcattctggatccgatctgaaagaaacaggaatagctaatatagcctggatggtgatcatgggggatggcatccacaacttcagtgatgggctcgcaattggtgcagctttcagtgctggattgacaggaggaatcagtacttctatagccgtcttctgtcatgaactgccacatgaattaggagattttgcagttcttcttaaagcaggcatgactgtaaagcaagcaattgtatacaacctcctctctgccatgatggcttacataggcatgctcataggcacagctgttggtcagtatgccaataacatcacactttggatctttgcagtcactgcaggcatgttcctctatgtagccttggtggatatgcttccagaaatgttgcatggtgatggtgacaatgaagaacatggcttttgtcctgtggggcaattcatccttcagaatttaggattgctctttggatttgccattatgctggtgattgccctctatgaagataaaattgtgtttgacatccagttttgacctttcccagtaatcactgttgattacgagaatgttaccatgcagctttgcatctgttccttgtactgtatgcacattgctcaaaggaaagtcagtggcttgcactacttacaagtttcatagatttgagcctaaccacaagaggctggtgcttagtactgttttccctgcacgtaggggtcttttaaaaatataaagcttgtgataaagagaggagaatatgggactccatgaaccagtgttgatatgtttgattaagacttttcacaaaataatcatataaaacactagtctctttattagtagaaacttctgtggctatgcagaaatagagatcgaaccaaaaaaaatcatttaaactttaaaaatattttaaatggactttggggagacattttttgtgtgttttaagaatgaattgtagtgctctttaattcagctacatatattcatgtggtgatagggatcaacttgacacaactttgaaactgcataaagtagacataggaactagaggaaagctcaggctgcattagagtatgaatttagcattgggaaaagcccttattcttgaatctagagttactatttttgtatatatttgcatagtgtttaaacctgcagcctaaactactgaaatttgtgattgtatgtttgtgtgagcttcagtttaatgaaagattcataatggttctttgtattattataatacttggtgttggggtgttctttctgttttgttttttactttaattttgttttgatttttttttttttttttttggcgggggtaggtgagggtttggagcatgtggtctttttaaaaaattgtaaccctctagaaaatatcaaagaaatgaaccagacgtggtttaaatagttgattttcctattttaacagtaccaactagttaattgggaaatgtaagttctgaatgttcacattgctttaccagtttggcactggaaccaagagcacatgtcgtggctggctacaaggttgtaaagcagaaaatcgaagtttaccatgtctgtaatgtgtacatgaagtgtcaatttagaacagttactaggataaactccattattgccatggctgtcatggtacccaagtgacttggaagatgcatttaaattactcagctgaaatcacttgatcatcttgtgccaagatatgctgttggtgcctgatagggattagtcttttaggtgccctgttctcctaccataattgtgaatgatttgtgagaagtgcaagccatgtttatcctgaatttttacttaataatttgtattactagtcatatgcatgtagctttctgtttacatcctatgccacatggtcttcatttatgccaggtaaactgtatttgaactatgtgcagctagctttgttttaatctgcttggcaaccagtgtagctgctgtaacaatctatcttattgttcaaatatataagagccaaactcttttccattccatctaaaatgttttcatttagtactcttctttcctcctactctatgaacttcaaaacaaaaacaaaactttgagagcagcacatgcatccaggtatttatagattattgccagtgtcttttctgtatgctataagcaagggagcttaggtgttatttctttaatttatgcttgaatctgaaaaattatttctgacttactccatggcctccttataataagtagaagttttatatataattaattttcagcattgggcactgaattaggacagtcctcatctcattgcttggcccttcaagcaacctagctaaaaggtgctgatattttatttagtactgccaacttcaagtgatttagatatctatctatctagatttctgaaccaagatatatttatagttcacttttgggtttttatacccacggtaggattctgcattccagcattaaatctgcttcattttagaacctttataaaagcaatagctggaatatactcccagttttaaaataaatgcctgattgatttaaagcaagtaggttatgctgaagtatataaagaagttttatattctctcaaaaatggtattatctttctttatttgctagattcttacaaatcttttaagagggctgtaacagttgctgctagtattagggttccacatcattctaatgtatagtttcaagtcttaatagacaatctgaattccactacatttcttttggctccaacattccttttagcttgaccagtctaatttaaaatgtgtttgttggaggtcattaacgttacttgtacaatgctgtcactgtgtgacatccatatgaattttggtatatatcaatcaatcaatcaatcacattgcattcaatcaatcagctgtgattgattgattatgcttagaaatactatagtaactagatgcagtgtgaattttttccattaacaaacaaacaaacaagtcagtggcttaaatgtgattatggtcctgcaaggtgattcttgctaaaatatctaaacttttgttttgttttaactgaatcattttttaacttaaaaagctggaaaatatcaaatgctgtttttttttttcattgtcaacagtggtgtgtcattttatgtatgttcctaatgcttatggaactcctccaaaataaagttactcaaagag

SEQ ID NO: 4135 - DNA, 588 bp, Homo Sapiens
  misc_feature (569)..(569): n is a, c, g, or t
ggcacgaggctccacgcgcggcctggcggcggcggccactctaaccagcgcaaaatgtccctggaacaggaggaggaaacgcaacctgggcggctcctaggacgcagagacgccgtccccgccttcattgagcccaacgtgcgcttctggatcaccgagcgccaatcctttattcgacgatttcttcaatggacagaattattagatcctacaaatgtgttcatttcagttgaaagtatagaaaactcgaggcaactattgtgcacaaatgaagatgtttccagccctgcctcggcggaccaaaggatacaggaagcttggaagcggagtcttgcaacagtgcatcccgacagcagcaacctgatccccaagctttttcgacctgcagcgttcctgcctttcatggcgcccacggtatttttgtcaatgacgccactgaaagggatcaagtccgtgattttacctcaggttttcctctgtgcctacatggcagcgttcaacagcatcaatggaaacagaagttacacttgtaagccactagaaagatcattactaatggcgggagccgntgcttcttcaactttctta

SEQ ID NO: 4136 - DNA, 466 bp, Homo Sapiens
tttttttttttttttttacgacacatcttcctttatttaaaatagagttctatatgcttcacagaaacaagtgcaagaagtgcttgatttattatctttcccactttacaaaacaatacattttcagaaaatgcatacataaaaatataacatttaggcagataattatttacatctgaagacagatgaaagttacacgataatattaaaaagctttaaaataaatacttttatgacttgctgttggtaaagttaaacattttggtataaaggctatcactgagtttttaataaattctaaaacactattatttctaaataaaataagtctatacatattactataaaatgcatattttcacagactagaagttaatgaaacatctgaatatcattcatttctctttggagtttgaaattctcttcaccttccacatttaaattaaaactactaaaatccatctac

SEQ ID NO: 4137 - DNA, 542 bp, Homo Sapiens
tttttttccccttggccacggtacattttaggaagggtgaagataaagtgaaggttgtgaaatcaagcaggcgataacatgttaagggtcaaatgtctcagttcctgaattttgatggtgcaatacaaagcagaccgcttggtttgaaggcagctttgatcctgttataagatgatcaaaggctcaaaagatttttctggtcaccaccactaagtcaagggcacttttccttgtcactaggaaaggccctaagtatttacaaatttaaaataaaatagtttgtgagcttgaacaacagttaggaagcaaatagcacttcaatggccataataacctggatcctgggtagcctaaacaactcagttctacaacctaaattcacaggcagttcaggtgaacgttgggcaccattttctttccttcttggccactctgggccatcttttcacttctttttttccctcaatatcttctcttttctaaatgctcttattataaatgtgaaatatattttattttaaatgttttatttattaagattg

SEQ ID NO: 4138 - DNA, 561 bp, Homo Sapiens
taaacccgggtctcctgctgcacagagctgaactttgtatcagtgcctggaaaagcctggagaattgggccgtacttgaccctgattctcatcaggcacagatgaatcacaggcacctaagaatcggcacagaacttccatgaggcctcagtcagcattttttcacaaaatgagctgaggccattcaaggaggctagaaagagggaactgaatccagagaggaagagtctatagtcatcaagttgtatccatgccagcctccctccacagaggtggcagcagcgtggctcaatctgatccacctccatggcacccactgggtaggtgcttcataaagctttaccgagttaaatgtgaacaaggcctaccactttgccttgggcagctgcaccaaattagaatttccagatgtgactcatctcatattccaacagctggagtgggtcatcctttacccctgtggctccttcctacagctctcctgatctcacattgtaacattggaacctgtggttcttcctggatgatgagctcccccaaggaggggcattatcagatggg

SEQ ID NO: 4139 - DNA, 881 bp, Homo Sapiens
aaattttgtgcgtttggcgggtttcgctctcttcataagtattgatcattccgcagccctgcggaccggagcctggttagcagtcgctttctgatcccggaaaggaccctgagctgggaaatagcgagaggcggggatgttggggattttaaaacttatgtagatcaggcatgtagagctgctgaggagtttgtcaatatttactatgagacaatggataaaagaagacgggcactaaccaggctgtatctggacaaggccaccttaatatggaatggaaatgctgtttcagggctggatgccctaaataatttttttgacacattgccttctagtgagttccaggtcaatatgttagattgccaaccagttcatgagcaagcaactcagtcccaaactacagttcttgttgtgaccagtggaactgtgaagtttgatggaaacaaacaacatttcttcaaccagaacttcctgctgactgctcagtccactcccaacaatactgtgtggaagattgcaagtgattgcttccgttttcaagattggtctagtagttaaaggggcaaaagtccattctcatttggtccattagttccagcaattgaaatttatgtgaattattttgattgtagaagcactataatatgtgctgaaactaaatttctttaatattttctattcctgtcagcaccttttctagcagctgccagtttggagcattgccctctaagagctttaaaactatttttttacatgccttatatacattccactaatgacattcttataataatattaaacacatgatcttggtactaacatactcactgtgaacccagcctattgcaaaaataaaatctttttataatattaaaaaaaaa

SEQ ID NO: 4140 - DNA, 4077 bp, Homo Sapiens
gaattcccactctgctgcctgctccagcagacggacgcacagtaacatgggcaacttgaagagcgtggcccaggagcctgggccaccctgcggcctggggctggggctgggccttgggctgtgcggcaagcagggcccagccaccccggcccctgagcccagccgggccccagcatccctactcccaccagcgccagaacacagccccccgagctccccgctaacccagcccccagaggggcccaagttccctcgtgtgaagaactgggaggtggggagcatcacctatgacaccctcagcgcccaggcgcagcaggatgggccctgcaccccaagacgctgcctgggctccctggtatttccacggaaactacagggccggccctcccccggccccccggcccctgagcagctgctgagtcaggcccgggacttcatcaaccagtactacagctccattaagaggagcggctcccaggcccacgaacagcggcttcaagaggtggaagccgaggtggcagccacaggcacctaccagcttagggagagcgagctggtgttcggggctaagcaggcctggcgcaacgctccccgctgcgtgggccggatccagtgggggaagctgcaggtgttcgatgcccgggactgcaggtctgcacaggaaatgttcacctacatctgcaaccacatcaagtatgccaccaaccggggcaaccttcgctcggccatcacagtgttcccgcagcgctgccctggccgaggagacttccgaatctggaacagccagctggtgcgctacgcgggctaccggcagcaggacggctctgtgcggggggacccagccaacgtggagatcaccgagctctgcattcagcacggctggaccccaggaaacggtcgcttcgacgtgctgcccctgctgctgcaggccccagatgagcccccagaactcttccttctgccccccgagctggtccttgaggtgcccctggagcaccccacgctggagtggtttgcagccctgggcctgcgctggtacgccctcccggcagtgtccaacatgctgctggaaattgggggcctggagttccccgcagcccccttcagtggctggtacatgagcactgagatcggcacgaggaacctgtgtgaccctcaccgctacaacatcctggaggatgtggctgtctgcatggacctggatacccggaccacctcgtccctgtggaaagacaaggcagcagtggaaatcaacgtggccgtgctgcacagttaccagctagccaaagtcaccatcgtggaccaccacgccgccacggcctctttcatgaagcacctggagaatgagcagaaggccagggggggctgccctgcagactgggcctggatcgtgccccccatctcgggcagcctcactcctgttttccatcaggagatggtcaactatttcctgtccccggccttccgctaccagccagacccctggaaggggagtgccgccaagggcaccggcatcaccaggaagaagacctttaaagaagtggccaacgccgtgaagatctccgcctcgctcatgggcacggtgatggcgaagcgagtgaaggcgacaatcctgtatggctccgagaccggccgggcccagagctacgcacagcagctggggagactcttccggaaggcttttgatccccgggtcctgtgtatggatgagtatgacgtggtgtccctcgaacacgagacgctggtgctggtggtaaccagcacatttgggaatggggatcccccggagaatggagagagctttgcagctgccctgatggagatgtccggcccctacaacagctcccctcggccggaacagcacaagagttataagatccgcttcaacagcatctcctgctcagacccactggtgtcctcttggcggcggaagaggaaggagtccagtaacacagacagtgcaggggccctgggcaccctcaggttctgtgtgttcgggctcggctcccgggcatacccccacttctgcgcctttgctcgtgccgtggacacacggctggaggaactgggcggggagcggctgctgcagctgggccagggcgacgagctgtgcggccaggaggaggccttccgaggctgggcccaggctgccttccaggccgcctgtgagaccttctgtgtgggagaggatgccaaggccgccgcccgagacatcttcagccccaaacggagctggaagcgccagaggtaccggctgagcgcccaggccgagggcctgcagttgctgccaggtctgatccacgtgcacaggcggaagatgttccaggctacaatccgctcagtggaaaacctgcaaagcagcaagtccacgagggccaccatcctggtgcgcctggacaccggaggccaggaggggctgcagtaccagccgggggaccacataggtgtctgcccgcccaaccggcccggccttgtggaggcgctgctgagccgcgtggaggacccgccggcgcccactgagcccgtggcagtagagcagctggagaagggcagccctggtggccctccccccggctgggtgcgggacccccggctgcccccgtgcacgctgcgccaggctctcaccttcttcctggacatcacctccccacccagccctcagctcttgcggctgctcagcaccttggcagaagagcccagggaacagcaggagctggaggccctcagccaggatccccgacgctacgaggagtggaagtggttccgctgccccacgctgctggaggtgctggagcagttcccgtcggtggcgctgcctgccccactgctcctcacccagctgcctctgctccagccccggtactactcagtcagctcggcacccagcacccacccaggagagatccacctcactgtagctgtgctggcatacaggactcaggatgggctgggccccctgcactatggagtctgctccacgtggctaagccagctcaagcccggagaccctgtgccctgcttcatccggggggctccctccttccggctgccacccgatcccagcttgccctgcatcctggtgggtccaggcactggcattgcccccttccggggattctggcaggagcggctgcatgacattgagagcaaagggctgcagcccactcccatgactttggtgttcggctgccgatgctcccaacttgaccatctctaccgcgacgaggtgcagaacgcccagcagcgcggggtgtttggccgagtcctcaccgccttctcccgggaacctgacaaccccaagacctacgtgcaggacatcctgaggacggagctggctgcggaggtgcaccgcgtgctgtgcctcgagcggggccacatgtttgtctgcggcgatgttaccatggcaaccaacgtcctgcagaccgtgcagcgcatcctggcgacggagggcgacatggagctggacgaggccggcgacgtcatcggcgtgctgcgggatcagcaacgctaccacgaagacattttcgggctcacgctgcgcacccaggaggtgacaagccgcatacgcacccagagcttttccttgcaggagcgtcagttgcggggcgcagtgccctgggcgttcgaccctcccggctcagacaccaacagcccctgagagccgcctggctttcccttccagttccgggagagcggctgcccgactcaggtccgcccgaccaggatcagccccgctcctcccctcttgaggtggtgccttctcacatctgtccagaggctgcaaggattcagcattattcctccaggaaggagcaaaacgcctcttttccctctctaggcctgttgcctcgggcctgggtccgccttaatctggaaggcccctcccagcagcggtaccccagggcctactgccacccgcttcctgtttcttagtccgaatgttagattcctcttgcctctctcaggagtatcttacctgtaaagtctaatctctaaatcaagtatttattattgaagatttaccataagggactgtgccagatgttaggagaactactaaagtgcctaccccagctc

SEQ ID NO: 4141 - DNA, 541 bp, Homo Sapiens
tttttttttttttttttttttttttttttttttaagtaaacagattttattcaatctttcctagagtttataatgaacatttgttatttaatatggtagttatattacagttttaccttacgagcgatagaacatttggtgaataagattaacaaaccggaaatgatgataccctcgaagacactctctggaagcacaccagtcccactgactcatgttacaaatttaagttggcatccagctgatttgtagaatgtgttatcctgatgtttctgcaattataccacctgaagagggtccctgtcagtctctgataggataatatttatcttattctccaagtgagaatccagcatatctcgaaggtccagaagaaagctcgttcagtgttgctgtgttcacagaggatgacatttattccttgggaagcagcatccaaaatatcatgatgggacatctcacctgtgaggtaaaggttcgccttcacaccccggagaacgctgctcccagaaccagcacacagggccacgactttggactt

SEQ ID NO: 4142 - DNA, 419 bp, Homo Sapiens
gaagcatgattaggtgggtgttgataaatgattattagcaaataaattctatcttttcagtcactgaaaagtaagatttcattggtatgaaataatcactctggtactataaatgtcacatgaataaagtgaattttaaaatagaaattattaaagagatatgccctgtttacccttaaaaataaacagaatttcaaacctgaataagttaaatctgttagtaaaagcagagtcgatcaactattcttcacaatggtgagtgcttgatagctaaactttagaatgataccaaatctgttttcaaaactgtaatacaatatagaaatctgcttgcaaactatttgtctagcatttctgaataataatatatttaacatattattgcatttttctccccctaacaggtaaaatgctttgcc

SEQ ID NO: 4143 - DNA, 9046 bp, Homo Sapiens
ccttgtttgtgtgctaggctgggggggagagagggcgagagagagcgggcgagagtgggcaagcaggacgccgggctgagtgctaactgcgggacgcagagagtgcggaggggagtcgggtcggagagaggcggcaggggccagaacagtggcagggggcccggggcgcacgggctgaggcgacccccagccccctcccgtccgcacacacccccaccgcggtccagcagccgggccggcgtcgacgctaggggggaccattacataacccgcgccccggccgtcttctcccgccgccgcggcgcccgaactgagcccggggcgggcgctccagcactggccgccggcgtggggcgtagcagcggccgtattattatttcgcggaaaggaaggcgaaggaggggagcgccggcgcgaggaggggccgcctgcgcccgccgccggagcggggcctcctcggtgggctccgcgtcggcgcgggcgtgcgggcggcgctgctcggcccggccccctcggccctctggtccggccagctccgctcccggcgtccttgccgcgcctccgccggccgccgcgcgatgtgaggcggcggcgccagcctggctctcggctcgggcgagttctctgcggccattaggggccggtgcggcggcggcgcggagcgcggcggcaggaggagggttcggagggtgggggcgcaggcccgggagggggcaccgggaggaggtgagtgtctcttgtcgcctcctcctctccccccttttcgcccccgcctccttgtggcgatgagaaggaggaggacagcgccgaggaggaagaggttgatggcggcggcggagctccgagagacctcggctgggcaggggccggccgtggcgggccggggactgcgcctctagagccgcgagttctcgggaattcgccgcagcggaccggcctcggcgaatttgtgctcttgtgccctcctccgggcttgggccaggccggcccctcgcacttgcccttaccttttctatcgagtccgcatccctctccagccactgcgacccggcgaagagaaaaaggaacttcccccaccccctcgggtgccgtcggagccccccagcccacccctgggtgcggcgcggggaccccgggccgaagaagagatttcctgaggattctggttttcctcgcttgtatctccgaaagaattaaaaatggccgagaatgtggtggaaccggggccgccttcagccaagcggcctaaactctcatctccggccctctcggcgtccgccagcgatggcacagattttggctctctatttgacttggagcacgacttaccagatgaattaatcaactctacagaattgggactaaccaatggtggtgatattaatcagcttcagacaagtcttggcatggtacaagatgcagcttctaaacataaacagctgtcagaattgctgcgatctggtagttcccctaacctcaatatgggagttggtggcccaggtcaagtcatggccagccaggcccaacagagcagtcctggattaggtttgataaatagcatggtcaaaagcccaatgacacaggcaggcttgacttctcccaacatggggatgggcactagtggaccaaatcagggtcctacgcagtcaacaggtatgatgaacagtccagtaaatcagcctgccatgggaatgaacacagggacgaatgcgggcatgaatcctggaatgttggctgcaggcaatggacaagggataatgcctaatcaagtcatgaacggttcaattggagcaggccgagggcgacaggatatgcagtacccaaacccaggcatgggaagtgctggcaacttactgactgagcctcttcagcagggctctccccagatgggaggacaaacaggattgagaggcccccagcctcttaagatgggaatgatgaacaaccccaatccttatggttcaccatatactcagaatcctggacagcagattggagccagtggccttggtctccagattcagacaaaaactgtactatcaaataacttatctccatttgctatggacaaaaaggcagttcctggtggaggaatgcccaacatgggtcaacagccagccccgcaggtccagcagccaggtctggtgactccagttgcccaagggatgggttctggagcacatacagctgatccagagaagcgcaagctcatccagcagcagcttgttctccttttgcatgctcacaagtgccagcgccgggaacaggccaatggggaagtgaggcagtgcaaccttccccactgtcgcacaatgaagaatgtcctaaaccacatgacacactgccagtcaggcaagtcttgccaagtggcacactgtgcatcttctcgacaaatcatttcacactggaagaattgtacaagacatgattgtcctgtgtgtctccccctcaaaaatgctggtgataagagaaatcaacagccaattttgactggagcacccgttggacttggaaatcctagctctctaggggtgggtcaacagtctgcccccaacctaagcactgttagtcagattgatcccagctccatagaaagagcctatgcagctcttggactaccctatcaagtaaatcagatgccgacacaaccccaggtgcaagcaaagaaccagcagaatcagcagcctgggcagtctccccaaggcatgcggcccatgagcaacatgagtgctagtcctatgggagtaaatggaggtgtaggagttcaaacgccgagtcttctttctgactcaatgttgcattcagccataaattctcaaaacccaatgatgagtgaaaatgccagtgtgccctccctgggtcctatgccaacagcagctcaaccatccactactggaattcggaaacagtggcacgaagatattactcaggatcttcgaaatcatcttgttcacaaactcgtccaagccatatttcctacgccggatcctgctgctttaaaagacagacggatggaaaacctagttgcatatgctcggaaagttgaaggggacatgtatgaatctgcaaacaatcgagcggaatactaccaccttctagctgagaaaatctataagatccagaaagaactagaagaaaaacgaaggaccagactacagaagcagaacatgctaccaaatgctgcaggcatggttccagtttccatgaatccagggcctaacatgggacagccgcaaccaggaatgacttctaatggccctctacctgacccaagtatgatccgtggcagtgtgccaaaccagatgatgcctcgaataactccacaatctggtttgaatcaatttggccagatgagcatggcccagccccctattgtaccccggcaaacccctcctcttcagcaccatggacagttggctcaacctggagctctcaacccgcctatgggctatgggcctcgtatgcaacagccttccaaccagggccagttccttcctcagactcagttcccatcacagggaatgaatgtaacaaatatccctttggctccgtccagcggtcaagctccagtgtctcaagcacaaatgtctagttcttcctgcccggtgaactctcctataatgcctccagggtctcaggggagccacattcactgtccccagcttcctcaaccagctcttcatcagaattcaccctcgcctgtacctagtcgtacccccacccctcaccatactcccccaagcataggggctcagcagccaccagcaacaacaattccagcccctgttcctacaccaccagccatgccacctgggccacagtcccaggctctacatccccctccaaggcagacacctacaccaccaacaacacaacttccccaacaagtgcagccttcacttcctgctgcaccttctgctgaccagccccagcagcagcctcgctcacagcagagcacagcagcgtctgttcctaccccaaacgcaccgctgcttcctccgcagcctgcaactccactttcccagccagctgtaagcattgaaggacaggtatcaaatcctccatctactagtagcacagaagtgaattctcaggccattgctgagaagcagccttcccaggaagtgaagatggaggccaaaatggaagtggatcaaccagaaccagcagatacgcagccggaggatatttcagagtctaaagtggaagactgtaaaatggaatctaccgaaacagaagagagaagcactgagttaaaaactgaaataaaagaggaggaagaccagccaagtacttcagctacccagtcatctccggctccaggacagtcaaagaaaaagattttcaaaccagaagaactacgacaggcactgatgccaacattggaggcactttaccgtcaggatccagaatcccttccctttcgtcaacctgtggaccctcagcttttaggaatccctgattactttgatattgtgaagagccccatggatctttctaccattaagaggaagttagacactggacagtatcaggagccctggcagtatgtcgatgatatttggcttatgttcaataatgcctggttatataaccggaaaacatcacgggtatacaaatactgctccaagctctctgaggtctttgaacaagaaattgacccagtgatgcaaagccttggatactgttgtggcagaaagttggagttctctccacagacactgtgttgctacggcaaacagttgtgcacaatacctcgtgatgccacttattacagttaccagaacaggtatcatttctgtgagaagtgtttcaatgagatccaaggggagagcgtttctttgggggatgacccttcccagcctcaaactacaataaataaagaacaattttccaagagaaaaaatgacacactggatcctgaactgtttgttgaatgtacagagtgcggaagaaagatgcatcagatctgtgtccttcaccatgagatcatctggcctgctggattcgtctgtgatggctgtttaaagaaaagtgcacgaactaggaaagaaaataagttttctgctaaaaggttgccatctaccagacttggcacctttctagagaatcgtgtgaatgactttctgaggcgacagaatcaccctgagtcaggagaggtcactgttagagtagttcatgcttctgacaaaaccgtggaagtaaaaccaggcatgaaagcaaggtttgtggacagtggagagatggcagaatcctttccataccgaaccaaagccctctttgcctttgaagaaattgatggtgttgacctgtgcttctttggcatgcatgttcaagagtatggctctgactgccctccacccaaccagaggagagtatacatatcttacctcgatagtgttcatttcttccgtcctaaatgcttgaggactgcagtctatcatgaaatcctaattggatatttagaatatgtcaagaaattaggttacacaacagggcatatttgggcatgtccaccaagtgagggagatgattatatcttccattgccatcctcctgaccagaagatacccaagcccaagcgactgcaggaatggtacaaaaaaatgcttgacaaggctgtatcagagcgtattgtccatgactacaaggatatttttaaacaagctactgaagatagattaacaagtgcaaaggaattgccttatttcgagggtgatttctggcccaatgttctggaagaaagcattaaggaactggaacaggaggaagaagagagaaaacgagaggaaaacaccagcaatgaaagcacagatgtgaccaagggagacagcaaaaatgctaaaaagaagaataataagaaaaccagcaaaaataagagcagcctgagtaggggcaacaagaagaaacccgggatgcccaatgtatctaacgacctctcacagaaactatatgccaccatggagaagcataaagaggtcttctttgtgatccgcctcattgctggccctgctgccaactccctgcctcccattgttgatcctgatcctctcatcccctgcgatctgatggatggtcgggatgcgtttctcacgctggcaagggacaagcacctggagttctcttcactccgaagagcccagtggtccaccatgtgcatgctggtggagctgcacacgcagagccaggaccgctttgtctacacctgcaatgaatgcaagcaccatgtggagacacgctggcactgtactgtctgtgaggattatgacttgtgtatcacctgctataacactaaaaaccatgaccacaaaatggagaaactaggccttggcttagatgatgagagcaacaaccagcaggctgcagccacccagagcccaggcgattctcgccgcctgagtatccagcgctgcatccagtctctggtccatgcttgccagtgtcggaatgccaattgctcactgccatcctgccagaagatgaagcgggttgtgcagcataccaagggttgcaaacggaaaaccaatggcgggtgccccatctgcaagcagctcattgccctctgctgctaccatgccaagcactgccaggagaacaaatgcccggtgccgttctgcctaaacatcaagcagaagctccggcagcaacagctgcagcaccgactacagcaggcccaaatgcttcgcaggaggatggccagcatgcagcggactggtgtggttgggcagcaacagggcctcccttcccccactcctgccactccaacgacaccaactggccaacagccaaccaccccgcagacgccccagcccacttctcagcctcagcctacccctcccaatagcatgccaccctacttgcccaggactcaagctgctggccctgtgtcccagggtaaggcagcaggccaggtgacccctccaacccctcctcagactgctcagccaccccttccagggcccccacctacagcagtggaaatggcaatgcagattcagagagcagcggagacgcagcgccagatggcccacgtgcaaatttttcaaaggccaatccaacaccagatgcccccgatgactcccatggcccccatgggtatgaacccacctcccatgaccagaggtcccagtgggcatttggagccagggatgggaccgacagggatgcagcaacagccaccctggagccaaggaggattgcctcagccccagcaactacagtctgggatgccaaggccagccatgatgtcagtggcccagcatggtcaacctttgaacatggctccacaaccaggattgggccaggtaggtatcagcccactcaaaccaggcactgtgtctcaacaagccttacaaaaccttttgcggactctcaggtctcccagctctcccctgcagcagcaacaggtgcttagtatccttcacgccaacccccagctgttggctgcattcatcaagcagcgggctgccaagtatgccaactctaatccacaacccatccctgggcagcctggcatgccccaggggcagccagggctacagccacctaccatgccaggtcagcagggggtccactccaatccagccatgcagaacatgaatccaatgcaggcgggcgttcagagggctggcctgccccagcagcaaccacagcagcaactccagccacccatgggagggatgagcccccaggctcagcagatgaacatgaaccacaacaccatgccttcacaattccgagacatcttgagacgacagcaaatgatgcaacagcagcagcaacagggagcagggccaggaataggccctggaatggccaaccataaccagttccagcaaccccaaggagttggctacccaccacagccgcagcagcggatgcagcatcacatgcaacagatgcaacaaggaaatatgggacagataggccagcttccccaggccttgggagcagaggcaggtgccagtctacaggcctatcagcagcgactccttcagcaacagatggggtcccctgttcagcccaaccccatgagcccccagcagcatatgctcccaaatcaggcccagtccccacacctacaaggccagcagatccctaattctctctccaatcaagtgcgctctccccagcctgtcccttctccacggccacagtcccagcccccccactccagtccttccccaaggatgcagcctcagccttctccacaccacgtttccccacagacaagttccccacatcctggactggtagctgcccaggccaaccccatggaacaagggcattttgccagcccggaccagaattcaatgctttctcagcttgctagcaatccaggcatggcaaacctccatggtgcaagcgccacggacctgggactcagcaccgataactcagacttgaattcaaacctctcacagagtacactagacatacactagagacaccttgtattttgggagcaaaaaaattattttctcttaacaagactttttgtactgaaaacaatttttttgaatctttcgtagcctaaaagacaattttccttggaacacataagaactgtgcagtagccgtttgtggtttaaagcaaacatgcaagatgaacctgagggatgatagaatacaaagaatatatttttgttatgggctggttaccaccagcctttcttcccctttgtgtgtgtggttcaagtgtgcactgggaggaggctgaggcctgtgaagccaaacaatatgctcctgccttgcacctccaataggttttattattttttttaaattaatgaacatatgtaatattaatgaacatatgtaatattaatagttattatttactggtgcagatggttgacatttttccctattttcctcactttatggaagagttaaaacatttctaaaccagaggacaaaaggggttaatgttactttgaaattacattctatatatatataaatatatataaatatatattaaaataccagttttttttctctgggtgcaaagatgttcattcttttaaaaaatgtttaaaaaaaa

SEQ ID NO: 4144 - DNA, 2871 bp, Homo Sapiens
gatctcagataggagagacagtctgtaaatataacgaatgtggaagaaccttcattgaaagtttaaagctgaatatatctcaaagacctcatttggaaatggagccgtatggatgcagtatttgcgggaagtccttctgcatgaatttaaggtttggacatcagagagctcttacaaaggacaatccttatgaatataatgaatatggggaaatcttctgtgacaattcagctttcattatccatcagggagcttacacaagaaagattctccgtgaatataaagtgagtgacaaaacctgggaaaagtcagctctcttaaaacatcaaatagtacacatggggggaaagtcttatgattacaatgaaaatgggagtaatttcagcaagaagtcacatcttacccagcttcggagagctcacacaggagaaaaaacctttgaatgtggtgaatgtgggaaaaccttctgggagaagtcaaacctcactcaacatcagagaacacacacaggagagaagccctatgaatgtactgaatgtgggaaagccttttgccagaaaccacacctgaccaaccatcagcgaacacatacaggagaaaaaccctatgaatgtaagcaatgtggaaaaacattctgtgtgaagtcaaacctcactgaacatcagagaacacacacaggggagaagccctatgaatgtaatgcatgtgggaaatccttctgccacagatcagccctcactgtgcatcagagaacacacacaggggagaaaccgtttatatgtaatgaatgtggaaaatccttctgtgtgaagtcaaacctcattgtacatcaaagaactcacactggggagaaaccatataagtgtaatgaatgtgggaaaaccttctgtgaaaaatcagctctcactaaacatcagaggactcacacaggggagaagccgtatgagtgtaatgcatgtgggaagacctttagtcagaggtcagtgctcaccaaacatcagagaattcacacaagggtgaaagctctttcaacatcctgaatgttagaagccttcatacacttgtgaaattggttatacagtttcaaaaaaggagatcagagaaagccaaagaatgtcagaaatttgtagaaaatgacttcttgtttgaatatgtaaaagctttcaagaaaaattaaaacttttcattagaaaatttgtactgaggggaattctattcatctaagtaatatggtgaaaatatttatctggaatttatgttgtttagtgttatattccagacgtgataccaaaattttgttgcaaatataatggacaatatttatttatacccatattcacagtggaatctgaagcttataaaagttgaatgacagcagcattaaacatatatgtgaagagtccccgatgtttgtagaccttatgtgagtatgcaaatatataaatttgagtatgcttgatttgtatattggaactcaacatgatcataaggagaagatacgtacccttaattgagtaactactatggtatttgttaatattttctacactaaataccattggtgtctttataggttgacataattatatatgtgtatgtacatatgtttgtgtgtatatgtaaatatatttctacacacatacttaaatatagtgatgtgctagtataacctcatactgacttaaaagttctgattgttaaattttaaggaattttgtgagccagttattaaaagcagtcattatttaaaatatgtaaacttacagttaaaaacaaaggtaataaatactcagcactcatcacttcctaattattttgctacatttcactattacctttgctgttttacttatttaatctgtatgatgaaaatactgtataatagtgtgcactgcacatctgtctcttcccagctccacattcagtgctgtcttggtagcttggacttagtgggagtgtttacaccatggaaattgacaaactataaatcagggttttaattttctcagagaacctgctgtcaaatatttacagcacatcactgtgtatatatgaaaacgtatttggcaatacaaaccacataccccttctatttcctgacataaataaatggctatggccatttacagctgaaccacgtcttcaagaaagaagccaaaaatatttccgtgaggtttttaactacctctgaatctgtcctactctaaatactaccggagtctctttgtaggttggccagtatatgtttttagtgaaatattatttcacaaagaactatatcacgtacctttcctctgactgtttcctggcatatatgcatgaatatggccattattgaactatcacttcagtaaagaagttaaacagtacttttctgaggtttttcagctacctctgggtcattctgtaatgtaaatgttgttaataagaatggtttttacataaattatgcaaaggttaacaagcagtaacactgcactcctcaaaaagtggcggtatgtaatgaaaggcccttttgatatccttgatttttcattgtgtatctgtttgggcacggtctatgtaacactagttctgcgtattagtattttagagtatctctgcctcccttgtcctgttgtttcttttgcccccttggaacacattggtcagcagttctaagagacactgcccacatgatggccattccctacttcatccttgctgagctaaattttatatttttgtgcatccttctcccagatgacttaggtggtaagtccagattagtcaaagctaatcatggaagttccattttaatgattctgttggggtgaacttgggagcaatgagatgtttgggaagtattgtgtagtacttctgggaaagatc

SEQ ID NO: 4145 - DNA, 462 bp, Homo Sapiens
  misc_feature (7)..(7): n is a, c, g, or t
  misc_feature (324)..(324): n is a, c, g, or t
  misc_feature (384)..(384): n is a, c, g, or t
  misc_feature (396)..(396): n is a, c, g, or t
  misc_feature (404)..(404): n is a, c, g, or t
  misc_feature (429)..(429): n is a, c, g, or t
  misc_feature (436)..(436): n is a, c, g, or t
ggccganagcaggcgccgcttcgaggcccgcggaaaacggcgccgagacccgctcctgcagtattagttcttgcagctggtggtggcggctgaggcggcatggatctcagcgagctggagagagacaatacaggccgctgtcgcctgagttcgcctgtgcccgcggtgtgcccaaggaggccttgctcctgggcgtcgatgaggcgggcaggggcccgtgctgggccattggtctacgccatctgttattgtcccctgcctcgcctggcagatctggaggcgctgaaagtggcagactcaaagaccctattggagagcgagcgngaaaggctgttttgcgaaaatgggaggacacggatttttcggctgggcgttggatgttgntttttccaaacntcattttnaccagcatgttttgggcgggtcaantacaacntgaattcctgttcacatgatacagtt

SEQ ID NO: 4146 - DNA, 642 bp, Homo Sapiens
ggcgctgtcctgagagggagggctctgtgcggaagagtcagggcgacccttgggcgctggagtacgcttgggactggggctgcgagtgagcaccagcgattggttcggaagcggacatttggttcagaacgagcatttaactctgccagggatccgctgggctctgacgactgcggtagatccatggcttcctggacgttcacccgtagagtcatcctagcttaactcttgttccctggtctcagttcacaagcctcacctgtatcttcctggctcggaagataattgaaaccaagtctgacttctcaatgaatcggacaaagggtgatgaggaggagtattggaacagctccaagttcaaggcttttacctttgacgatgaagacgatgagctttcacagttaaaggagtccaagcgggcggtgaacagcctccgagacttcgtggatgatgatgacgatgatgacctggagcgagtcagctggagtggggaacctgtgggaagtatctcatggtccatcagagagactgctggtaatagcggctcaacccacgaggggcgtgaacagcttaagagcccaaacagcttctcctcctatgcacaactacccaagcctacttctaactactccctgagcagct

SEQ ID NO: 4147 - DNA, 371 bp, Homo Sapiens
ttttttttttttttttttggtttttttttatggaaaaaatatgtgattatttttaatgatttacgtataaaagaaaaataaactttatgatacaatttgacagactacttcataaaaaattttacttacatacaatgtatgcaatttttggcaacccccaaactctattcacatatacaaattcataaaaggcagacatctcaacttgaagtaaaacaaggtccattcagggtcatggctaagtcatttgattcagtagaaaagagattataaatacatgaagggctacttaactcatgtccctccactcccccaaaatgtatgtaatataatctgatcaaacagaattttatggtgcactataggaagga

SEQ ID NO: 4148 - DNA, 1061 bp, Homo Sapiens
tttatttcttgatgcgtactcaatactcctagtgatgttgtattgctggccttcatgggcaaatgtcaggacacagcggtaatagccagcatcttccagggccacatcgtgtacgagtaagtgagtggtccccctcacacttagaaatttctcattgtctttatccaaaagaagagaatccttgtaccattgaatcttcacgtcagttttgtcacgggtgaattcactcaggtcagggcatactaataccccagaggttgacaaggttaaaatttgcgggtatgagatgaacggcaggaaagcatctgtattctcaaaaactctgagctcaatggacattttgtcacagtaagaagcatttctagtagtgcagacgtaggtgccagagtcctcctgcaaggctggcagaagccacagagcaccgtcctgggcccacatccgtgtctcttcttctcctgggaccgtcctagcagagtcatttttatgccatgtcaggttgatgcgggggctgacagaggcccaaaaccgtaaggcaactgggggcacctcaaggctacgagcttccctttcagcctgaactcccgcttgtaatgcctccccgaatcgggaacttcctgcaggccccgtgtttgccgcggaaaagggttaaggcagaaatcccattaccaaacgtacaagggaacattggtctgacaaatttcagaggccacggaaatgaagatttggaccagcagcatgtggcctgtggcgccaaccggggaaagttgcacagccctgtgccgattcttgggctgaaggccaatttccccaggtgggcgatttaaatcgaatcaggtcagaccgttcccggtgaattgttaccgccaaatcccacaatagggccgaagcaaatgtaaaccgggggccaagggtggcaacccataatggtgcccaaagtccgtttcagggggaacctttgcactgcttataatcgcacccccgaaagggtttcttgggctttccttcccgcaaaatcgtgctcggttttttgcggggttagcccccaaggggaaagtttccca

SEQ ID NO: 4149 - DNA, 392 bp, Homo Sapiens
actacttaggtaagatatcttaagtagtaaactcacagaaaacacaagtagaaaggtgcttgcctttggtagggttgtgaaactcagtggagccaaagatcaagtagggatatttggaaaaagcagggcctcacccaggtggccaactcaagagcccatagacatggctgcagataaaacatggcacactaagcttggtcttactaaggatgctgaagcagttctgcaacctgtctcaaactcctctcagctacagtacacaagtggtccttcctatcaagagacctgcaaggagacacacccagccatggacctggaggcaggcctacagcttctatcttaacatattactaaaaatttgtatgagaacaattaggcaaggaaaaggaaaa

SEQ ID NO: 4150 - DNA, 495 bp, Homo Sapiens
aagatttgccattttgttgacctttaattgtttctgtggtcactgctttctgcaggttttgactgtggaaatatttacagaggaccttttctgacttcttccttatatctggtcctagacattggttttgctctcttttcttctggtcttcattgtagttatcatccacttcttttttgtagatgcaaaacttgttcctttcctgagtgcctagccaagccacggtggccgaggaacaggtacggagcttgtcaaaggctttgattcttgtgtcttcaggaagagagggaaatgactgcttagtaggccttgtggtagctagaattttcaacatagatgctcctttcttgtttcctttcagtcgaacgaggtatttagctttaggttttcctctaagctgaaactgctgaatgccttccacattctgagacagaagaagtttcccatctcttctcacttggatttggacagcatccagacaagagtgaataaaga

SEQ ID NO: 4151 - DNA, 642 bp, Homo Sapiens
ttttttttttttttttttttttttttgcttttccccctctatctcaaatgcctcactccgggacaaatattccttcttagccctacttaacataaataaatcaattttggctcttcaaagtcattctgcatataatcctgtcacccttataggagcctactggacattctcattgggaaccaatctctctttacattcacaatattatgatggcggggggggaggggctcttccccaaggtaaatgtggctcatttaaaaaactacaggggggctctgtgatctatgtacacatgtatgtcacatatttgaccatttaaaaaacacagaaacccttgagactttctgtaaaatttgggatcataaaatatattaaaaagcaaaccaaaggcaaggcattctgttctctgacgtccccccgctagtttaattcattttcccaggttttgggaaaagcaggctcaccttgtctcggccaaacctttccacttttttatttggccaaatttacctgaactcaaattcaaataaaaatggggaaaagggctggtttccccaaaattcaaaaaaactttcttttgacgccgggggcaacaatatcccggaataccgaccgggcccaccctgttttttttgtaaaatt

SEQ ID NO: 4152 - DNA, 439 bp, Homo Sapiens
  misc_feature (376)..(376): n is a, c, g, or t
  misc_feature (399)..(399): n is a, c, g, or t
ggctttgtaaccacaggaaaaaataaactcttccatcccttaaagaatagaatagtttgtccctctcatgggaattgggctgtatgtatattgttcttcctccttagaatttagagatacaagagttctacttagaacttttcatggacacaatttccacaacctttcagatgctgatgtagagctattgggaaagaacttccaaactcaggaagtttgcagagagcagacagctagagataactcgggacccagagttggtcgacagatgttagatgtatcctagcttttagctataaaccactcaaagattcagcccccagatcccacagtcagaactgaaatctgcgttgttgggaagccagcagtggccttngggaaggaaggccatggctgttnggttccagagagggtggggcttggcaagcactttcccggg

SEQ ID NO: 4153 - DNA, 1825 bp, Homo Sapiens
aagagccctgacttcccttgttttccccccttgcgcccaacgtgcgtccgctcccccgccgagcgcggagtcgcctcagttgcccaggcctctatctgcatggagggccgggccgccgtgaccagatctgcgcacggggtacggacgtgcccgggcagatgggggcctacggggtgacaccgaggccgggacagcttcaggggccccagaaggacctgacccagaaattgaggtccccgctgccttctgaggagggggaggagttgctcctaggtctgaaccccgccagccttgccccgtaggaagctggagtgcgggcctcgtccacccacagaccccggggagcgcagggaaaagggtgcttcggtcgttccgatggcagtggagaccacggtccacactcacctctctgcgtctccaccgcagggctctccctacgaccacacacccggcatggcgggctccttggggtaccatccttacgcggcgcccctgggatcgtacccttacggggacccagcgtaccggaagaacgccacaagggacgccacggctaccctcaaggcctggctcaacgagcaccgcaagaacccctaccccaccaagggcgagaagatcatgctggccatcatcaccaagatgaccctcacccaggtgtccacctggttcgccaacgcgcgccggcgcctcaagaaagagaataaaatgacgtggacgccgcggaaccgcagcgaggacgaggaagaggaggagaacattgacctggagaagaacgacgaggacgagccccagaagcccgaggacaagggcgaccccgagggccccgaagcaggaggagctgagcagaaggcggcttcgggctgcgaacggcttcagggaccacccacccctgcaggcaaggagacggagggcagcctcagcgactcggattttaaggagccgccctcggagggccgcctcgacgcgctgcagggccccccccgcaccggcgggccctccccggctgggccagcggcggcgcggctggcggaggacccggcccctcactaccccgccggagcgccggcgcccggcccgcatccagccgcgggcgaggtgcctccgggtcccggcgggccctcggttatccattcgccgcctccgccgccgcctcctgcggtgctcgccaagcccaaactgtggtctttggcagagatcgccacattgtcggacaaggtcaaggacgggggcggcgggaacgagggctctccatgcccaccgtgtcccgggcccatagccgggcaagccctaggaggcagccgggcgtcgccggccccggcgccgtcacgctcgccctcggcgcagtgtccttttccaggcgggacggtgctgtcccggcctctctactacaccgcgcccttctatcccggctacacgaactatggctccttcggacaccttcatggccacccggggcccgggccaggccccacaaccggtccggggtctcatttcaatggattaaaccagaccgtgttgaaccgagcggacgctttggctaaagacccgaaaatgttgcggagccagtctcagctagacctgtgcaaagactctccctatgaattgaagaaaggtatgtccgacatttaacgcgggctgcgtcggtcccggacttttctaatttattaaaaacatggccttggcagttatttttccatcaccgagagagagagacagagagagaaaataaactacccctcctattcagaagtttatagtttatggagatggatgacataaaaatgtaaacatctccacacacacaaaaaaatgttttaaccaaccg

SEQ ID NO: 4154 - DNA, 414 bp, Homo Sapiens
  misc_feature (399)..(399): n is a, c, g, or t
gagattttacatgaagatattcccgtttccgacgaaattctcaaatctatgcaaatatcctcatgcagattctacaaaaagagtgtttcaaaactgctctatgaaaagacatgttcaactccgttacttgagtacacacaacacagacaagtttctgagaatgcttctgtctagttttcatgggatgatatatcctttttcaaaataggcctcaaagtgctccaaatgtccacttccagatactacaaaaagagtgtttcaaacctgctctatgaaagggaaggttcaactctgtggacttgcatgggaaacgtcacaaaggaagtttctggggaatgcttctgtcttacttttttaaacgaggatatttccccattttcccacggaaatcctcaaggntatggcaaacttcca

SEQ ID NO: 4155 - DNA, 382 bp, Homo Sapiens
tttttttttttttttctcaatcaaacttttttgtttttatttttttaaatttaaaacacccttttctctcagagagttggattttgtaatggaaacaatggctttaaggacagtagttagctatagatttacaaatgtctacttaaaatccaggagccaatgaattgtgtgtctcatccccaggcccaagagcaggctgcatagacagctctttctggcgcttgaacggtggaggtgtggagccagaggctgtggggagaagatggaaaaagccccaagctcagtgtcaaaacacacaccctgccgtagctctctcctgggctaggtgggattgtgggtgtcacatgcttccctgtgaagagactaccaaacaggctttgtg

SEQ ID NO: 4156 - DNA, 472 bp, Homo Sapiens
  misc_feature (472)..(472): n is a, c, g, or t
ctcagccagctgcgtaaactccgctggagcgcggcggcggagcaggcatttccagcagtgaggagacagccagaagcaagcttttggagctgaaggaacctgagacagaagctagtcccccctctgaattttactgatgaagaaactgaggccacagagctaaagtgacttttcccaaggtcgcccagcgaagacgtgggacttctcagacgtcaggagagtgatgtgagggagctgtgtgaccatagaaagtgacgtgttaaaaaccagcgctgccctctttgaaagccagggagcatcattcatttagcctgctgagaagaagaaaccaagtgtccgggattcagacctctctgcggccccaagtgttcgtggtgcttccagaggcagggctatgctcacattcatggcctctgacagcgaggaagaagtgtgtgatgagcggacgtccctaatgtcggccgagagcccn

SEQ ID NO: 4157 - DNA, 260 bp, Homo Sapiens
ttttaaaatgtggaactagtattcattttttattcaaatattttataaattatcatattggaggccctatagtgtggtagtttacagcatgaactctgtattccaagtgctcacgttcaacttacagtctataatctcaggcaaggagcttaaccactttgtgccttagtttttttaatccatagagtgaggataagaataatacccatctcacagatttctgtgagtattaaatgaatcagtacatgatgaagcactta

SEQ ID NO: 4158 - DNA, 530 bp, Homo Sapiens
  misc_feature (321)..(321): n is a, c, g, or t
  misc_feature (337)..(337): n is a, c, g, or t
  misc_feature (402)..(402): n is a, c, g, or t
  misc_feature (419)..(419): n is a, c, g, or t
  misc_feature (465)..(465): n is a, c, g, or t
  misc_feature (487)..(487): n is a, c, g, or t
tacaggacttgtgattaataaccagctggttgatcagagtgagtcaaaaggccccgtgatacaagaatcagctgaaccaagccagttggaagttccagccacagaagaaataaaagagactgatggaagctctcagatcaagcaagaaccagaccccacgtggtagacctcttccctcctagggtaaatcagcttctgtgtcaggggatgctgtgtggcgtccatctgaaccccctgcatacgcgtagctaatgtgatctccccactttcacataagatggtgggcctgccttcaggggaatgtgggagccaggtgggagnctccccggatatttangctaggaagattctacagggaggattctccttgggatcaatattttgtctctcaaggcaaaaggntgttaaaagcacttttngggctttaaaaaagaatgttcttgtttcttaaataggagtcaacgnttgggcctccctccattggggnatttcaattttgaggtcaagaattcaattaggattgacttttt

SEQ ID NO: 4159 - DNA, 534 bp, Homo Sapiens
  misc_feature (399)..(399): n is a, c, g, or t
  misc_feature (439)..(439): n is a, c, g, or t
ggtggaatggggtaagagcaaaccttttctccttttacctaattttgtttcatccataggattttcagtggaaagaagggactgaaagacataagaaattaatttctgcatttccatggacaatctgttgagctcaagccatcttctaaaacatggaaatgtcatctttgtggcatatattaagtggcagtttattttctttccctgccagtatacttcgttgggtcggggagaacaaagaatggttttgaaaccagagctttcagttcccttcatggtttccagaggtgagaagcctctgtgggtagtagatttgggatggaacacacacaacccttctaatgaccctaagttgttaactaactgcctttgaatggttgtcttgaaatacctggtgtntatactgcagaaaaggaatgcagctgttttccacagtgtntgtccccaacttctgtttgtactcagaatcgtcgaacatatgaagattttggtcccataatccttaaactatagcctgaggtgcacctgattaca

SEQ ID NO: 4160 - DNA, 471 bp, Homo Sapiens
ctttttaattttttatttatttattttttgagacagggccttgctctgtagccaggctagaatgcagtggtacatcatggctcactgaagcctcagcctcccaagtagctgggactccaggcgcaaacctccatgcccagctaattctttattttttgtagagaccggctctcaccatgttgcccaggctaactaaggctctttctaagtgcctgtgatgaccaagcacaatgccatgttgaccttgctttgtccagctttctgtggggcagcctccaaccccacccaagaccctcaaccatcagggaccaacccatgctcacagttcctggttctttgacgctggcgtgctagatatggtggaggctgctgggtgtctcccttgaacaccctgccccagggcagatcactgtagctcggtttcccagagccctgagtggccttggtccactgctgcttggaggcagagct

SEQ ID NO: 4161 - DNA, 358 bp, Homo Sapiens
  misc_feature (282)..(282): n is a, c, g, or t
  misc_feature (315)..(315): n is a, c, g, or t
  misc_feature (324)..(324): n is a, c, g, or t
  misc_feature (333)..(333): n is a, c, g, or t
  misc_feature (357)..(357): n is a, c, g, or t
ggctctgtctggaaaggtaggagtcaccaattctcttcaagccatctcccatccccacgccccgtcactcgggctaccaacaccaggatctaccacccaggaaggaggggcttagcttcggccgccattctgaggcagccacctccacccccacccccaccgcaacagccagccaaggcgctaggagtctccagctgccggcctcagctggtgcactagtaccgcagtcccagcaccttgcccggaatcccgtcaccccgcaggatggggcagggacaggtnatcttcaagccaagggaagagcaggttcactgncatccgtgntcctttttnttcctgggatctttacagccaggnt

SEQ ID NO: 4162 - DNA, 466 bp, Homo Sapiens
tttttttttttttttctgtttcaaactttttattgaagtgtaatatacctatagaaaagtatacatatcagctgggcgccgcaactcacgcctgtaatcccaacacattgggaggccgaggtgggaggatcacttgagcccaggagttcaagatcagcagttggacatggtggcttctgtaatcccaacgactcaagaggctgaagtgagagactggcttgagttctagaccagcttaagcaacatagtgagaacccacgccaaacaacgcatacccggggtcacgcctcgtcctgtttcaacaacgacacccaagggcttccctggagcccagggcgtgggagggagacttgggtttgagttctgcaccttgcggaggtggttagttatttaattgtcttccacctgaattttcctcaggcccaaattgatgagacctccccgattccctcccctcgtgccgaat

SEQ ID NO: 4163 - DNA, 316 bp, Homo Sapiens
  misc_feature (97)..(97): n is a, c, g, or t
  misc_feature (108)..(108): n is a, c, g, or t
  misc_feature (294)..(294): n is a, c, g, or t
  misc_feature (311)..(311): n is a, c, g, or t
tgtatagagttctttatgaaaataatctatttcaataaatctattaaataggtaatagctggataccaaaaaatgacaagagaagtttatcaattanaaagccatttnacaaaagaccaatttatacattcctttgaattatgtccataaaaaatttaaatatacaaattacattatcaaacccaaaagaatctttctaaacaaatgaaatacagatatagacaaagtcaggatccaaattattttaaaaagtttttaaattattttgtaattacaaatggaacaacaaactgncagttttatacaattgntaaag

SEQ ID NO: 4164 - DNA, 1258 bp, Homo Sapiens
ggctctggactggggacacagggatagctgagccccagctgggggtggaagctgagccagggacagtcacggaggaacaagatcaagatgcgctgtaactgagaagcccccaaggcggaggctgagaatcagagacatttcagcagacatctacaaatctgaaagacaaaacatggttcaagcatccgggcacaggcggtccacccgtggctccaaaatggtctcctggtccgtgatagcaaagatccaggaaatactgcagaggaagatggtgcgagagttcctggccgagttcatgagcacatatgtcatgatggtattcggccttggttccgtggcccatatggttctaaataaaaaatatgggagctaccttggtgtcaacttgggttttggcttcggagtcaccatgggagtgcacgtggcaggccgcatctctggagcccacatgaacgcagctgtgacctttgctaactgtgcgctgggccgcgtgccctggaggaagtttccggtctatgtgctggggcagttcctgggctccttcctggcggctgccaccatctacagtctcttctacacggccattctccacttttcgggtggacagctgatggtgaccggtcccgtcgctacagctggcatttttgccacctaccttcctgatcacatgacattgtggcggggcttcctgaatgaggcgtggctgaccgggatgctccagctgtgtctcttcgccatcacggaccaggagaacaacccagcactgccaggaacagaggcgctggtgataggcatcctcgtggtcatcatcggggtgtcccttggcatgaacacaggatatgccatcaacccgtcccgggacctgcccccccgcatcttcaccttcattgctggttggggcaaacaggtcttcagcaatggggagaactggtggtgggtgccagtggtggcaccacttctgggtgcctatctaggtggcatcatctacctggtcttcattggctccaccatcccacgggagcccctgaaattggaggattctgtggcgtatgaagaccacgggataaccgtattgcccaagatgggatctcatgaacccacgatctctcccctcacccccgtctctgtgagccctgccaacagatcttcagtccaccctgccccacccttacatgaatccatggccctagagcacttctaagcagagattatttgtgatcccatccattccccaataaagcaaggcttgtccgacaaa

SEQ ID NO: 4165 - DNA, 365 bp, Homo Sapiens
gcggccgcccctcagacggggagggagtcccctcccgaccggcggccttccagggctagtgtccctgaggtccagggagagacggctgacccgagaccgggctgggcgagagctgtgctgtctgcgcgttgaagcgagttcccccgctttactcgagatgttgttgagcgcgtcctcactcgaggccaggtggggaatcagaagggccctgccctcagggcgcctcccatgggctacgccgaagggcgggacgcggccagggcgcgcgggacaaaggagaccccacttgcttgcggggcggagtcccggcggcggcgcggggcagggccggggttactcggtgactggagaccctcccggcagga

SEQ ID NO: 4166 - DNA, 476 bp, Homo Sapiens
  misc_feature (8)..(8): n is a, c, g, or t
  misc_feature (380)..(380): n is a, c, g, or t
  misc_feature (406)..(406): n is a, c, g, or t
  misc_feature (447)..(447): n is a, c, g, or t
  misc_feature (464)..(464): n is a, c, g, or t
aacgaggngcacatagagacttaattttagatttagacaaaatggaaattatttcatcaaaactattcattttattgactttagccacttcaagcttgttaacatcaaacattttttgtgcagatgaattagtgatgtccaatcttcacagcaaagaaaattatggcaaatattctgagcctagaggatacccaaaaggggaaagaagcctcaattttgaggaattaaaagattggggaccaaaaaatgttattaagatgagtacacctgcagtcaataaaatgccacactccttcgccaacttgccattgagatttgggaggaacgttcaagaagaaagaagtgctggagcaacagccaacctgcctctgagatctggnagaaatatgggaggttgagcctcgtngagacgtgttcccaaccggccccaaaggtttgggagaacancaacagccaaaagtgtntgcaggatgctg

SEQ ID NO: 4167 - DNA, 625 bp, Homo Sapiens
tttatatcaatacatatagatatgcttattcttgttgacagttgcataattttccattaaattgatgtatcatgggcagttaaccagttactcgttttactcttagcataactttagggaacaatgtggatgttttgtggttaaagctattaaaacagtggttcttgaccagatgtgtgtttcagaatgttcatctcacatttccagttgctactgatgctgctggtctaggaaccacatatcaaaaccatttggtctccgactaagataaaccctactttatccaattctgtgctcctcttaatatcatatacagataggtttttgttttgtctgtgattaaatgtatcatctaagatactacctactgatcataacgttcatattaaagtattgggttaacattagatttgggtgtcttatacactatttaatacgccaatgataaatgccttacaccataagaagaaagctaatcattgagtaaatgggagaaaagagatgattcacgtcactacagtttgattcaacctccaacaccaccatgaatatgcataggtttgagcttttagctagattcctgagtgtaaggcatctattttacacagtgcccaggttggccggg

SEQ ID NO: 4168 - DNA, 705 bp, Homo Sapiens
ggccgggcggccgtgtggcgcggctgctcgccccactaatgtggcgcagggcggtttcctcggtggcggggtccgcggttggagccgagcccgggcttcggctgctggccgtgcagcggcttcccgtaggagcagcgttctgccgggcttgccagaccccaaactttgtccgcggcctgcacagcgagcctgggctggaggagcgggcggaggggacggtcaacgagggacgcccagaatcggacgcggcagatcatactggtcccaagtttgacatcgatatgatggtttcacttctgaggcaagaaaatgcaagagacatttgtgtgatccaggttcctccagaaatgagatatacagattactttgtgattgttagtggaacttctacccgacacttacatgccatggccttctacgttgtgaaaatgtacaaacacctgaaatgtaaacgtgaccctcatgttaagatagaagggaaggacactgatgactggctgtgcgtggatttggcagcatggtgattcatttgatgcttccagaaaccagagaaattctatgacattagagaaattatggaccctacgttcttatgatgaccagtaagctcagatagcacctgagacagtacctgaagacttcattcttgggatagaagatgaatctcatctgtgacccgggggttacatgggattatatttttgg

SEQ ID NO: 4169 - DNA, 439 bp, Homo Sapiens
  misc_feature (7)..(7): n is a, c, g, or t
  misc_feature (9)..(9): n is a, c, g, or t
  misc_feature (251)..(251): n is a, c, g, or t
  misc_feature (419)..(419): n is a, c, g, or t
ttggacncnagtttcgctcttgttacccaggctggagtgcagtggcgtgatcttggctcactgcagccaacgcctcctgtgctcaagcgattctcctgcctcagcctccctagtagttgggagaattctagaatgtggggaggattccagaatgttcagaaagtactagaatattgagaaagtcctagaacctgggttgctccagtgtgggttcatagactgaccccatcagcatcacccgggaacatgtnaggaaacacagaatcctggggacccactcaggacctgctgaggtcaggaatctggcattttaacacggaaccccggggtgattcggcatgcatttccaagtttgaggaagttctggggctattgagggcttgggaaagttttaggaattttttagggtttaggcaagnttttttaaaatagggtcctt

SEQ ID NO: 4170 - DNA, 37225 bp, Homo Sapiens
gatcacttgaggccagaagttaaaggccagtctggccaatgtggtgaaaccctatctctattaaaaatataaagattagccaggtgtggtggtgcacccctgtaatcccagctacctgggaggctgaggcaggagaatcgcttgaacccgggaggtggaggttgcagtgagctgagatcgtgccactgcactccagcctgggcgacagagccagactctgtctcaaaaaatgaaacaaaacaaaaaaacaaacaaaaaaacctgaggccctgagagaggtagtaacttgtcacaggctccaaacacaggcctgtcagagctggactccccaccctgagctggggacccccaagtgctcagatgaacctgtgtggcctcatgcccatcttccccgctcccctcgaccaggtggctgacatggaggagctgaccatctgggaacagcacacggccacactgtccaaggtgaggcctccctctccctgtctgggtgccagagagtatggcggcttaggcccagctcaatagaggggagaccctttaccctgggggaaacagcagctcttccttcccctcatcctctctcaggacccccgccggggctttggcattgcgatctctggaggccgagaccggcccggtggatccatggttgtatctgacgtggtacctggagggccggcggagggcaggctacagtgagtatccaggcagctgggttctggcgggggagggcacgtggagaggagaaaccaggccaggcacagtgactcacacccgtcatcccagcactttgcgaggctgaagtgggcggatcacctgagttcaggagtttgagaccagcctggccaacatggtgaaaccccgtctctactaaaattacaaaaattagcgggatgtggtagcgtgttcctgtaatcccagctactcgggaggctgaggcaggagacttgcttgaacccgggaggcagaggttgcggtgagccaagattgcgccactgcactccagcctgggtgacagagtgagactctgtctcaaaaagaaagtaagtgaggtgaggagaaacctttgtgagcctggcactttccagctctgtcaacacagggctcggacttggcagtaggacagtgtcagagacttgggcctcacttccctaaggtacttcctggtccttcacaggaattcttggggtcatagtggccccagagcccttttggaacataaagtcctggaaaccatcgagtgtttgagggtttgatgcttcttggaattatgttgttaaaatggttctgggccccaagtggctgacaggtgatatggctcagcccagcccagaattagggaccaccaggttcagagagaaagagctagaaagaaaatatgaaatacagacaggaagagagggaaagaaaagcagaaagtggggatttgtggtgtggggagcgaggagtgagaagatgccaggtgtagctgtagcttcaaggccgggtgcagtggctcacacctgcaatcccagcactttgggaggccgaggtgggcggattacctgaggtcaggagttcaaaaccagcctggccaacatggtgaaaccccatctctactaacaaatacaaaaattagacgggtgtggtggcgggcacctgtagtcccagctactagggaggctgaggcagaaggatcgtttgaaacgaggaggtggaggttgcagtgagttgagatcatgctactgcaatccagcctgggcaacagagtgagactctgtctcaaaaaaaaaaaaaaaaatgtagcttccactctatgattatagtaggttctacaattggctccattttacaggtgagaaaacggaggcccagaaggataaatgtctttgtgaacctagggacaccaatgaattagaaccaggccttgtagatctggaggttccaggggcaccccctccccagggagggcttgttacgagggtctcccctgcaaagcctcctccgtaagacccgccctcctctctcaggacaggcgaccacatcgtcatggtgaacggggtttccatggagaatgccacctccgcgtttgccattcagatactcaagacctgcaccaagatggccaacatcgtgagtaggcagcccctggcatggccagcatctctgaccccagcctgggtcgtgccgctgtgggggttgtaagcttctgagagcaaggagtcatcttctcatcttacagtttggacattgaggcccagagagagactggtgtcccccagggccacccgggggctgagcagagcctcccccagcccttgcctgtagctgacccttcctgtcccctcctctaacagacagtgaaacgtccccggaggatccacctgcccgccaccaaagccagcccctccagcccagggcgccaggactcggatgaagacgatgggccccagcgggtggaggaggtggaccagggccggggctatgacggcgactcatccagtggctccggccgctcctgggacgagcgctcccgccggccgaggcctggtcgccggggccgggccggcagccatgggcgtaggagcccaggtggtggctctgaggccaacgggctggccctggtgtccggctttaagcggctgccacggcaggacgtgcagatgaagcctgtgaagtcagtgctggtgaagaggagagacagcgaaggtcagaagaggcgggaggtcggacacgatcagtactggacacagggcaccgtggtcggatgggcgacggtttcaagtgattctcctgcctcagcctccctggtggctgggactccaggcgcccgccaccatgcctggctaatttttgtacttttggtagagatggggcttcaccatgttggcaaggatggtttcgaattcttgacctcaggtgattcacccacctcggcctcccatagtgcttgctgggattgtgggcgtgagccaccgcgcccagcctggaagctacaactacacctggcatcttcttgctcctcgctccccccaccacaaatccccactttctgcttttctgtccctttctgcctgtctgtatttcatatattctctctagctctttctctctgaacctggtggtccctaattctgggctaggttgagccatatcacctgtcagccacttggggcccagaaccattttatcaacatgtccccgcgctgatccccgggacctctgtttaggccacctcacttagcaagagggactcagcagatgggatggagtgaaggaccctgagctcagaggtgatcctggatgatctggggggcccagtgtcaccacagggtccttataagaggaggcctggctgagtgtggtggctgatgcctgtaatcccagcactttgggaggccaaggcaggcagatcacttgaggccagtagttctagaccagcctgaccactatgatgaaaccccatctctactagaaatacaaaaattagccaggcgtggtggtgtgcacctgtaatcccagctacctgggaggctgaggcacgagaattgcttaaacccgggaggtagaggttgcagtgacctgagattttgccactgcactccagccccggcgataggagtgagactccttctcgaaaaaaattaaaaaataaaaaataaaaattgaaacaatgatgatgttatgagcaatagaatgcccttagcctgtgcatggcaacatcacgagtggcacggtgacctggtgtccccgccccgtggagatgtcattgacacaatcagatctcgggtcctacgggcgacatcactgttctccttatgatgccatcaaggtgttaggatgggagggcccgcacctggactgcttacagcaggagaatgctcccaggcacccgtctccagagtcctgcctcagtttccctcctccccccttacagagtttggcgtcaagctgggcagtcagatcttcatcaagcacattacagattcgggcctggctgcccggcaccgtgggctgcaggaaggagatctcattctacaggtgaggccgggcttcttgtcctgagagcagggagacaaggcagggttggggcgggcagtcccacggagtcatacagcaaggacagcagaactgggccccaaagcatttaccttcagtgttgttgcttgtatctcaaaggttgcagatggccaggcataaaaccccctttttccccagctactactaatccacagccaaatgtcggtttctagtatccccatggggttgtctgtttctaataccctctagctttgatgtgcatcagagactcatgtgggcagctgactcctggacctaccctaggtgactggatgctaatgacccagtcaccaggtttaggggagctgccctgccctaaaggatggtatctttctggattcttcccctgaaagtctgtttctagtgactcctagtgtttgatttccaaattgctttcagctgattatttccagtgtcttcaaaaagttatctgtttctttttttttttttcagacagagtctcgctctgtcacccaggctggagtgcagtggcgcaatctcggctcactgcaacctccgcctcccaggttcaggtgattctcctgccttagcctcccgagtagctgggattacaggtgcccgccaccacacccagctaatgtttgtatttttagaaaagacgggtttctccatgttggccaggctggtctcgaactcctgacctcaggtgatcccccccgctcggcctcccaacgtgctgggattacaggcgtgcaccaccacaccttgctaattttttgtatttttagtagagacggggtttctccatcttggtcaggctggtctcgaactcccgacctcaggtgatccatccgcctcggcctcccaaagtgctgggattacaggcatgagccaccacacccggccgacattaagttctttctaggaattgtgtgtttctaatctacctctagatgactgttttcttttctcttttcttttctcttctcttttttcttttcttttctttctttttgatatggagtgtcgctctgtcacccaggctggagtgcagtggcgggatcttggctcactgcaacctccacctcccgggttcaagtgattctcctgtctcagtctcctgagtagctgggaccacaggcgcccaccaccacgccctgctaatttttgtatttttagtagagacagggtttcaccatgatggccaggctggtcttgaactcctgacctcaactgatctgtctgcctctgcctcccaaagtgctggcattacaggcgtgagccaccgcgccccactctagatatctgtttctagttatctcccagaagattgtgtgtttctagtatcttttaagtatctgatactccctcttctccagttagagttgtttataatgtcaccctcacatctgttcctagtatcccctgagacatttccacttttggtaagaaaggagagtcaacctgtttctcattttccccagtgtctcccacccctcttagaacattttctgtttctagaattcggtgctcagttcttggtgtggtctccactcacagcaggaatccaattcaacactttccttagggagtggctgtttttagcaacctctgggggaattgtctgtttcaagttcccccacaccaggctgtttctactgtctcccatctctcattaactcacttccgctctttcattcctggtccctttcagatcaacggggtgtctagccagaacctgtcactgaacgacacccggcgactgattgagaagtcagaagggaagctaagcctgctggtgctgagagatcgtgggcagttcctggtgaacattccgcctgctgtcagtgacagcgacagctcgccattggagggtgaggacctagaggttaggacctgggagggggttgaatggatggcagggaaggtgggaagccccaggcagggccaaggaatcaatgagcctggtccctagaggctcagagagtgacaggaacttgctgaaggccacacagcaagtcaagagttcaggggggcgatctcggctcactgggttcaagcgattctctgcctcctgggttcgagcgattctcgtgccttggcctcctgagtagctgggattataggcgtgagccaccgtgcccagctccagagccgaatcttctaactgagcttctgactttggtctagggccctttgtttagaggggtgttgatatacccctctgtaaaatgggtccagtccagaaggcgtgaccatggctgatgagatgtcctctccccctgcagacatctcggacctcgcctcggagctatcgcaggcaccaccatcccacatcccaccaccaccccggcatgctcagcggagccccgaggccagccagaccgactctcccgtgtaagtatcacccatcggccagaatggtgatagggagggagagggaggtgggagggagaggggaacgcgggcgtagctttccaactgggggtaaccttgaggacgcagtcctgtatttctagcatgtgcctcaaaatacctccagcctctacccattacccagttccaaagccgtgtccgcatttgtaggtgttggttacagcagcaccccacttcttagtatcaaactctgccttaggccaggtgcggtggctcacgcctgtaatctcagcactttgggaggccgaggagggtggatcatctgaggttaggagttcgagaacagcctggccaacgtggtgaaaccctgtctctactaagataccaaaattagcccggcgtggtgccgggtgcctgtaagctcagctacttgggaggctgaggcaggagaatcacttgaacccaggaaatggaggttgcagtgagccgagatcgtgtcattacactgcagcctaggcaaccagagcaaaactctgtcttaaaaaaaaaaatttctttttcctctatttatttatttgttttgagactgagtcatgtgagactggctaattttcatatttttggtagagatggggtctgtattgcccagctatgttgcccaggctggtcttgaactcctgggctcaagcatttggcctgcctcagcctcccaaagtgctggtattacaggcgtgagccaccacgcccagcccagataaattaaaattatttttattttgtttatttatttatttatttttttggagacaaggtctcactctgtcgcccaggctggagtgcagtggcatgatcttggctcactgcaacctctgcctcccgggttcaagcaattctcctgccttagcctcctgagtagctgggattacaggcgcccaccatcatgcccggctaatttttgtatttttggagagacggggtttaacctcgttggccaggctggtcttgaaatcctgacctcaggtgatctgcccacctcgacctcccaaaatgctaggattacaggcatgaaccaccgtgcccggcctaaaattctttttaaaatggccccttgaaatccatccctgcctcactcccaatctgttccccaccagggagagtccccggcttcggcgggaaagttcagtagattccagaaccatctcggaaccagatgagcaacggtcaggtgggtggtgactctgagcacccctgtccctgacatttctgatccctgacagcaaggctgtgccaggcagagctgggggaggttggcctgagcctaagtggtgagacatggtttcctgagaaggactcgaggtgggtgacagtccttccaggatgaggacataaagcaaaggtttggaggctggactgagccagtgtgcttgggaaagagactggcttttccctttcagagttgcccagggaaagcagctatgacatctacagagtgcccagcagtcagagcatggaggatcgtgggtatgtaccccagaagaaagcaaacccgctcaaaactcctacatcccaggctgcctccctcatcagcgcaatcctgcctgcttgtatccattgtgttgagtgggaccattaagtgggggttttggggaaactgaggcctggagggggtgggggctttcccaaggacaatgctgagccctccctttgtccgcccactctgctctgaccccatctctgcctccccttgcaggtacagccccgacacgcgtgtggtccgcttcctcaagggcaagagcatcgggctgcggctggcagggggcaatgacgtgggcatcttcgtgtccggggtgcaggcgggcagcccggccgacgggcagggcatccaggagggagatcagattctgcaggtgctccgggggcggctggccagccccactgatcatgggcgtgcagtgtgctaggtcctgcccttgtctgttccagtcctccccttgggtccacctggggactgtcgagaccccagatgggtatttgaacatttcagtgtctccttggctgtgtcatgattttgctgatgtcacgaccttatcttccaggtcatgacctcatcgtccagttacaacctccttttctgtgccttgaccttatctgggttcattttttgttgttgttgtttttgagatggagttttggtcttgttgcccaggctggagtgcaatggtgtgatcttggctcaccgcaacctctgcctcccaggttcaagcaattcttctgcctcacctcctgagtagctgggattacagttgtccaccaccacgcccggctaatttttatatttttagtagagatgagggtttcgccatgttggccaggctggtctcaaactcctgacctcaggtgatccacctgcctcggcttcccaagtagctgagattacaggcatgagccactgcgcctggctaactttttttttttttttttttgagatagagtcttgctctgtcacccaggctggagtgcgggggtgtgatcttggctcactgcaacctccgcctcccgggttcaagggatcatcctgactcagcctcccaagtagctgggatcacaggtggccgccaccatgcccagctaatttttgtgtttttagtagagacagggtttcaccatgttggccaggctggtcttgaactcctggcctcaagtgatgcacccgcctcagcctcccaaagtgctgagattataagcttgagacactgtgctcaagattgggaacaacaatcttgttgttcatgtcatatgacattgttcatgtgacattcttgttatcaatgtcacaatctccttgttatcaatgtcaggactttgggtcacagcctcattgcctatgtcatgaccttgtctgggtcgcaatcctcttgttcctgacattggctgtgttgaccgtgtcatgaccgtcttgtatgtcctaatcgtgtggtcaggtcacagatcattctctcatgatctccatgtccacttatagtcattttctgtgccaccatcccctgtgtctgtgttgtgaccttgcctgtgtcctgccttcatgacagtgtcataactacctccaggatccacagcccctcatcatccccccatctctgtccttgcctcatctcatccccaggctgtctcccctgtcccttgcgcgagttcactcaccaagtctcacccccactttgctctcatgaccttgcttgtgtcttgaccttgcagtgtgagttgtgattcatgatggagtcacagctccccactttccatgtcataagcccactggctgggtgaaaacttgatgccaaattgcctgagggtcatggtattttttactgtatttctactcattttgcttgtgggattctaaccttgacatccacgtcatgaccccgagagtaggtgtctgtgcccacaagctgtgcaagtatattgctgtccctgttatgaccctgagagcaggtggctgtgtctgtatattgctgtccatgtcgtgaccctgagagcaggtggctgtatattgctgtccatgtcatgacccggagagcaggtggctgtatattgctgtccatgtcatgaccctgagagcaggtggctgtgtctgtatattgctgtccatgtcatgacccggagagcagatggctgtgtccatatattgttgtccctgtcatgaccctggtggtaggcatctgtgacccactgtgtgtccatatatcgttgtccctgtcacgaccctgtgactactgtgactacgtctgagttcttttgagcatttcacacagtttccatcgagctccatgccatgacctctgttcccatgttttgatattgacaacccaccatgatttggttatctgaggacaagtgcagtgcctgtgcccgtttctgtgtcaaaactcttgtatccttacaatgccaccagctgtctgtgtcacacatcacacagccatagggtgataccccagtcggaaagccctcggggaactgccgggtcccttggcagcagctctggaagcagctggggctgagttttgcccagaggaaggtccaggatctcatgcacgcccaagaggtaccagagctttttctatagctgcacttgctttctggcaggtgaatgacgtgccattccagaacctgacacgggaggaggcagtgcagttcctgctggggctgccaccaggcgaggagatggagctggtgacgcagaggaagcaggacagtgagtgcgcgtggatatgggtgtgcctgtgtgttgcggggggaggacctggctgtgtggcctggtggtgagtgcagggatgtggttgaatctgcatctctgcaccctccatccctctccctggcccctacagggagagtgccccaaatctccagccaggcccactctcgggtggggagggctcagatcaggcagcagcccaggcagctcatgtggcctcccgctctccccagttttctggaaaatggtgcagtcccgcgtgggtgactccttctacatccgcactcactttgagctggagcccagtccaccgtctggcctgggcttcacccgtggcgacgtcttccacgtgctggacacgctgcaccccggccccgggcagagccacgcacgaggaggccactggctggcggtgcgcatgggtcgtgacctgcgggagcaagagcggggcatcattcccaaccagagcaggtggggactgtgtgctcctgcagtggggcacttctgcttcagcctcagtctccccgttagaaatgggctcgattgggctggacgcggtggctcaggcctgtaatcctggcactttgggaggctgaagtgggcagatcatgaggtcaagagatcgagaccatcctgggcaacatggtgaaacctcgtctctactaaaaatacaaaaattagctgggcgtggtggcacatgcctataatcccagcttcttgggaggctgaggcaggagaatcgcttgaacctgggaggcagaggttacagtgagccgagatcacgccactgcactccagcctggcaacagagtgagactcttgtctcaataaataaataaataggcatgatatcactgcttagcagtgttggtggttcaatctgaggaggtccacaaaaggctctgggcgggccccatttggtgctggtatgagcttcctgttgttgctgtaacagatgcccagaaacttagtggctttaaacaacacacacatcctcttacagttctggagagcaaaagtactaaagtcaaggtatgggcaggcctgggccctcccagaggctccaggagaaaaccaattttccacctttcccagagtctagaggggccgcatccctcagctcggggccccttcctcccccttcatagccacagcacagcctcttctagtctctctctgactctcaccctcccgcctcttcttgtgaggaccctgtgaggacatcgggtcccctgggtcacccaggatcatcatccacctcaatagcatcagtttaatcccatctgcaggccaggcacggtggctcacgcctgtaatcccagcactttgggaggctgaggcgggcagatcacgaggtcaagagattgagactatcctggccaacatggtgaaaccccatccctactaaaaatacaaaaattagctgggcgtggtggtgcatacctgtaatcccagctacttgggaggctgaggcatgagaatcgcttgaacctgggaggcggaggttgcagtgagcagagattgcaccgctgcactccaacctggcgacggagcgagactctatctcaaaaaagtaaataaataaataataaagattagctgggcgtggtggcgggcacctgtaatcccagctatttgggaaagtgaggcaggagaatcgcctgaacccaggaggcagaggttgtaacgagtccagcctgagtgacagagcaagactttgtctcaaaaaacccaaaataataataatagtaataataatcccatctgcagagtcccttttgccatacaaagtggcctgtccacaggctccgaggggtaggacgaggacgtctttggggccaccatgctgctgaccccagtgctcagtactgtcccctcttctccccagggcggagcagctggccagcctggaagctgcccagagggccgtgggagtcgggcccggctcctccgcgggctccaatgctcgggccgagttctggcggctgcggggtcttcgtcgaggagccaagaagaccactcagcggagccgtgaggacctctcagctctgacccgacagggccgctacccgccctacgaacgagtggtgttgcgagaaggtggggcccggagctggaggggccctggggaggcctcacacacagctcctggtgcacctgttcactaacattcagcctctaaaaggcacagtcttggcccggcgtggtggctcacgcctataatcccaacactttgggaggccgaggtaggaggatcgctgaggccaggagttccagatcaacctgggcggtaaagcaagactacatctctacctcaaatttatttatttatttatttttgtttttatttttatttttagacagagtcttgctctgtcttaggctggagtgcaatagcgtgatctgagctcactgcaacccctgcctccctgattcaagcgattctcttgcctcagcctcccaagtaaccgggattacaggcgcccatcaccccgcccccagctaatttttgtatttttagtaaagacggggtttcaccatgttggccaggctggtcttgaactcgtgacctcacgatccacccgcttcagcctcccaaaatgctgagattacaggcgtgagccaccacgcccggcctctacatcaaatttaaaaagatagctgggcatggtggtgcatacctatagtccccgctgcttgggaagctgaggcaggaagattgcttgagcttgggaggtcgaggttgcagtgagctatgatcgcaccagcctggcccacatggtgaaatcccatctctactaaaagtacaaaaaattagctgggcatggtggcaggcgcctgtaatcccagctacttgggaggctgaggcaggagaatcacttgaacccgggaggcagaggttgcagtgagctatgatcgcaccactgcactccaccctgggccacagattgacactgtcttcaaaagaaaaaaaaaaaaaagcatgtttctaaccactctccttctatcaaaaatacttttgggcctgggtgcggtggctcacgcccgtaatctcaatggtttgggaggctgaggcaggtggatcacctgaggtcaggagctctagaccagcctggcccacatggtgaaatcccatctctactaaaagtacaaaaaattagctgggcatggtggcaggtgcctataatcccagctacttgggaggctgaggcaggagaatcacttgaacccgggaggcagaggttgcagtgagcggagatcacaccactgcactccagcctgggcaacaagagcaaaactccgtctcaaaaaaaacaaaaaaacaaaaaaattttgggttattttaggggacagaaggacaggaagggggttcattccttaaaaatctatttgtgtctccaacagaaatatggtgcaaggcatgtagatagccttacaaaaggaaaaagaaatagcaataataataattttaataatttatcttctttgaccgggcgtggtggctcacgcttgtaatcccagcactttgggaggccaagatgggtgggtcacttgagcccaggagtctgggaccagcctggacagcaaagtgagactctgtctctacaaaataaaaaataaattagccaggtgtggtggtacgccagtagtcccagctacttggcaggctgaggtgggaggatcccttgagcccaggaggtcgaggctgcggagagctatgatcatgctgctgcactctagcctgggcaacaaagccagactctggggggaaaaatgcctcatcctgatttcaggaagggaagagattaagctcttatcagaggacagggggttaaaaacccaggtgcagcgattttccaaataaaaccacaaaaggggtgggaagagcaaattgcccgggacaggggtgggtggatggaccttgagaaaagcctttgacactgtcatcgcgctgctccaacatccagatgaaaacgtcctagaaatacaaggccacggccaggcgtggtggctcacgcctgtaatcccagcactttgggaggccgaggtgtaatcccagcactttgggaggtgggtggatcacctgagttcgggagttcgagaccagcctggccaacgtggtgaaaccccgtctctactgaaaatacaaaaattagccgggcgtggtggtgggcgcctctaatcccagctactcaggaagctgaggcaggagaatcacttggacctgggagatggaggttgcagtgagccaagattaagccactgcaccgccagcctcggtgacacagcaagactctgtctcaaaaaaataagtaaataggccacgtgcggtggctcacgcctgtaatcccagcactttgggaggccgaggcgggcggatcacgaggtcaggagttcgagatcagcttgaccaacatggtgaaacccagtttctactaaaaatacaaaaattagccaggcatggtggcgcacgcctgtaatcccagctactcaggaggctaaggcaggagaactgcatgaacctggaaggtgaaggttgcagtgagccaagattgcgccactgcactccagcctgggccacagagctagactccatctcaaaaaaaaaagtaaataaaataaaagaaagaaagggagaaagagaaggattaagttgcaaagaccctgggctaccacttttctcccctcaagacgcttctgtgactgtttcttcagtggtaaaatggtgtatctggtaggccaggtgtcaacatacttttcctgcaaaggatcacatagtaactattttaggctttgtgggctagtctctggcagaactactcagctctgctcaaaggtagccatagacaggacataaagaaatggttgtgactgtgttttgataaaactttattgacgaacacatgcagtgggccagatgtggccctcaggttgtagtctgctgacctatgagttagctaggttcaactgctaaaaagagaccctacagccaggaagaaagggaatgaaggcaggagaggggcttattcctgcccttgaaggcggaacccagaaatgtacacatcaattctgctagtgttccattggccattatttggtcataaggctaacctagctgcaaaggacactgggagatgtagtatttggctgggtagctatggtcctggttaaataggctgtttactataaggaagtggaggggtttgtacaacacactagcagtctttgatcgcaaatgggaccctgattctttcactgtgtctctacccctcagccagtttcaagcgcccggtagtgatcctgggacccgtggccgacattgctatgcagaagttgactgctgagatgcctgaccagtttgaaatcgcaggtgagaagccagatcctctggaaacctcgttggtgaaatagtttcacaactgtttttttgtggggggtcgggggagagttagaataatgatggcaaacatgaagcagatgggccaccagtgccccccccaatacccaagccagacatcctcaatccatcttggcaccgtttgtctggatagaacctccaaatccttcttaacacagttcaccaggtagccattgccaattgaggcaaagtgccacctgttatttgtttaagagaaatttattgatcttctgagacagcagtgaacacgacaggcaaggtcccttggagaagactccaaattaacaactgtagaaacaatggccgggtgcggtggctcatgcctgtaatcccagcactttgggagtccgaggcgggtggatcacgaggtcaagagattgagaccatcctggctaacatggtgaaaccccgtctctactaaaaatacaaaaattagctaggtgtggtggcgcgtacctgtagtcccagctactcgggaggctgaggcaggagaattgcttgaacccgtgaggcagaggttgcagtgagccgaggtcatgccactgcactccagcctgacgacggaatgagactctgtcaaaaaaaaaaaaaacaaaaacaattaagatagactaggaggccgggcgcagtggtcaggagttcgagaccagcctggccaacatggtgaaaccacatctctactaaaaacacaaaaaattagctggacatggtggcgcatgcctgtaatcccagctactcaggaagctgaggcaggagaattgcttgatcccaggaggcggagggtgcagtgagcagagatcacgccactgcgctccagcctgggtgacagagggagaccctgtctcgaaataaaaaacaaaaaatagttaagattgcaaattttggctgggtgtggtggctcacatgtaaaatctcagcactttgagaggccaaggtgtgaggatgacttgagcctaggagtttgagaccagcctgggcaacacagcaaaatcacgtttctataaaagaaaaaagaatttttttaattaaaaaaagatgcaaattttatgtcttttttttttttttttttttttttttttttgcatcagagtcttgctctgttgcccaggctggagtacagtggcaggatctcgactcaccgcaacctctgcctcccaggttcaagtgatcctcctgccttagccaccctggtagctgggattacaggcacgcgccaccatgcccggctaatttttgtatttttagtggagacaggtttcgccgtttggccaggctggtctcaaacttctgacctcaggtgatctacctgcctcagcctcccaaagtgctgggactacaggcatgagccactgtgcccggccaattttacgtttttaaccacaaaaacaaaaaggggggatgagatcacgtctccctccttgaacccctccatgccaggctatgtctccttcctgaaactttgcacgatccaggagggcttcctggaggaagcagtgctcctctcaggtcctagaagacagataggggcaagagtggagtttcctgtggggtcgtagcctgagcagagccctggagttggaactgagtctgggagagccaggggctgcagctcaggctcagcatcaggcctctgaccctgcaaccctgagcaagtggcctgttgtctctgagcctcagtttccccacctgccacataggccagtaccagccacccactcctcaggaggaggagggggctgaggtcaggaggggatgtgagtgcagtgcctggcacttggccaacatgagtttctgctgctgttaggatttctctccagggcaatggggagccatggtggcttcttgagcaggggaggggcaggtaggcatgaatttgaggggacgggggctgccctcctgaagctgctggtcctctctgccgtccacagagactgtgtccaggaccgacagcccctccaagatcatcaaactagacaccgtgcgggtgattgcagaaaaagtaagccgggtcctgctacgggtcccatttcatggatgggggaaaccgaggcctgggcatccaactgaatgtcctgacctgttctcagcccacaccccacaagtgcagtcttccatagagccccttttggaggctttgtgaggcaggaggcccgagacagacaagggcttctcggagtcaaacagcagccagccctgggcaaaggcagagagactcaagttgaggttttgatgcccaagatgctgcgacctgggctgttaccacccccatccccaacttgctagcctgtggatgtgagaggctggggtccactctgacctcagactcttcatctttctatctttctctctctgtttaccctgctgcaatccccctcaccccaacgtccgccggcctggcccaggacaagcatgcgctcctggatgtgaccccctccgccatcgagcgcctcaactatgtgcagtactaccccattgtggtcttcttcatccccgagagccggccggccctcaaggcactgcgccagtggctggcgcctgcctcccgccgcagcacccgtcgcctctacgcacaagcccagaagctgcgaaaacacagcagccacctcttcacaggttggggggtgggtgtcccagggtaggcgggtgggccccagcctgagtctcctgcacacactgacgtcccctccctgcagccaccatccctctgaatggcacgagtgacacctggtaccaggagctcaaggccatcattcgagagcagcagacgcggcccatctggacggcggaagatcaggtactgccgcggtgtgggtgggtcgggcagggaggccccacagacgctgtgcaggcccagctggggtttggggcctctgtcgggagttagggcttggtcagggatcaggactgtggccagagtcaagatgggacctgagacaagggtgttggactggaacttgggtgagatgagattggaggagctgttttttgttgtttgatttgagatggagtctcatgtcacccaggctggagtacagtggtgtgatctcagcttgctgcaacctccgcctcccgggttcaagtgattctcctgcctcagcctcccgagtagctgggactacaggcgagcgctaccaggcccagctaatttttgtatttttagcagagacgaggtttcaccatgttggccaggctgggctcaaactcctgacctcaggcgatccacctgcctcagcttcccaaagtgctgggattacaggcctgagccaccgcgcccagcctggaggagctgttttgagaatggagtcagtggggcacgggagctcacgcccatggtcccagctactcaggaggctgaggcaggagaatcacttgaacccgggaggcagaggttgcagtgagcagagattgcgccacagcactccagcctggcaacagagactccttctcataaaaaagagagagagaatggagtcttctcttggggctggagtcaaggtttggggctcagcttggatttgggggctgagcctctcaggtgaagggtcaatggatacaacccatcctggagtcaacagagaagcctccactgaggctccaggctccaggctcctcgccttgatttgggaccagagtttgaaggtggggggatgtcgtgggtggcagctggggtcctggccagggccagccgcagcatccacacccaccccacagctggatggctccttggaggacaacctagacctccctcaccacggcctggccgacagctccgctgacctcagctgcgacagccgcgttaacagcgactacgagacggacggcgagggcggcgcgtacacggatggcgagggctacacagacggcgagggggggccctacacggatgtggatgatgagcccccggctccagccctggcccggtcctcggagcccgtgcaggcagatgagtcccagagcccgagggatcgtgggagaatctcggctcatcagggggcccaggtgcgtcggacatggggggcaggcctgggaagggtctccggaggggatgccagcacagagcagacacacactgggagcctgttttctaccaggacgtcaacaaacacggcttccctggtcagactggtttctgggactcagacctggggtagctgagacccacgtggcactgagtaacttgcagcattttttttttttttttttttttgagacgcagtcttgctctgtcgcctaggctggagtgcaatggcgcaatcttggctcactgcaacctccacctcccaggttcaagcgattctcctgcctcagcctcctgagtagttgggattacaggcacctgccaccatgcccggctaatttttgtatttttagtagagacggggtttcaccattggtcaggctggtcttgaactcctgaccttgtaatccacccgccttggcctcccaaagtgctgggattacaggcatgagccactgcacccaggcttttttttttttttttttgagatggagtttcgcttttgttgcccaggctggagtgcgatggcgtgatctcggctcaccacaacctccgcctcccaggttcaaacgattctcctgtctcagcctcctgagtagctaggattacaggcgtgcaccaccatgcctggctgattttgtatttttagtacagacagggtttctccatgttggtcaggctggtctggaactccagcctcggcctcccaaagtgctgggattacaggtgtgagccactgcacccggccttttttttttttttttttttttttttttgagttagagtctcgctctgtcacccaggctggagtgcagtggcacgatctgggctcactgcaacctcggcctcctgtgttcaagcgtttctcctccctcagactcccaggtagctgggattacaggtgagcaccaccatgcccagctaatttttttttttttttaaggtattcttagtagagacagggtttcaccacgctggccaggctggtctccgattcctgacctcaggtgatccacgtcggcctctcagagtgttgggattagaggcgtgagccaccgcacctggcctccagccaacattttaacctctctgtgcacctgtttcctcatctaggacacagggtggatggtatcagacttggtggcacagggcggtggtgagcactcaatgtgctcagcccaagttttggcacatagtagttgcgtgtctttttgaacttgacctatctaatttatatattttattttttaaattttagagatagggtcttgccctgctgcccaggctggagtgcagtagtacaatcatagttcgttgcggcctccaactcctgagctaaagggagcctctcatctcagcctccggagtagctgggaccacaggcgcgcaccaccacccacacccagctaattttttttcattttttgcagagatgtggtcttgctatgttgcccaggctggtctctaactcctgggctcaagtgatcctcctgccttggcatctcaaagtgctgggagtacaggcgtgaaccacagcgcccagctgtagttgggtgtttaacagtaacaaatgtgtatgtagctcttagtgtatatgcctcagcatcttcttccacaccctctctaggtcaatgtaaaaatctatgaatcaatgacatctctgattagagtgattttcctggggttgtgcagtacccaacctgctcaactgtccatggcaggctgcatacggagcagccactgtactaagtcctttacgtacatgaactcatggctgtggccctgtgaggacttgcacagatgagaaacccaattccccttttgctgacaggctaggaggtctcagctaaggccttcccctatcccagcctcagttttctcatttagatttggggatgacctgcagacttgtcacggggttagcaagtgggcagcatggcccgggccaaggtgggggatgggatggaggtggttattgatctcgactcaccatgctctggggggagttttgaagctcctctctccctctcctccaaggtggacagccgccacccccagggacagtggcgacaggacagcatgcggtaagaaccccatattccagattggggccctcaacccttcccttgggactcagactctgcggactcagatctagatccaagctatgccttcatggtgcccctagcctagtggggaagacagagcctgccagagcctctctaagccccatataatcagggccaagggagtaggaatccacttcctgggaggcctaggaaggcttcttgaagggcaggatattgcagctggggctttgagggatgcataggagtttgttaacaaggccctacccatgaatgcccagatgtgcttatctctgcccacacccactgtgcctagcacagccagcctcagtttatggtgagaaagctcacacccttcccacccacagcatctattctatttcctgatccccagaacctatgaacgggaagccctgaagaaaaagtttatgcgagtacatgatgcggagtcctccgatgaagacggctatgactggggtccggccactgacctgtgacctctcgaaggctgccagctggtccgtcctccttctccctccctggggctgggactcagtttcccatacagaacccacaaccttacctccctccgcctggtctttaataaacagagtattttcacagcaccggcttctagtggcttccaggaaggacaaggtcctcggtcccgtagaccctgatccgagactttgccaaatgcataagcttttactgtttttatattaggaaatcatacaggaccaagaaccgctggggtcctggccagccagggcaggcccaggatggggctccggggccatggaggcgaaggcacagtggcaggcaagggatgaggtggtcacaggtacacgggctgctcctggcctgtaaggaggcgatatgtggcagctggcatcgtcttgatatgcacctggggagtggaggcggaacggggctcagggcaggcctgggctcgtgggggacgtgggggcgcccctggccaccacccaccacccgcacacctcgccataggcctcggtgagcagctcgatgatgcgggcgtgtggcgtggccaccacactctgcccattgatctcaatgatgcggtggccgacgcggatgcccccacgctcggcgatgccaccacggaggaggctgcagatctgggggagaaaagagggggacgggaaagaggtgggggctgctcaggggccgtgctcagggccgccctacccccccaccccggggccaggggccggggcctcacgatgccgtcctccacgcagaagcccagctgctcgcgggcgtggggccggtggatgatggcggtggtgacgggagggcagtggacgatgctgagtgtcaccgacgtctgcgacttcgtctcctgtggggcgggggccgttggcctcactcagctgccggacagcctggcaggttgtagccccctctgggcctcagtttaccctctcataaaccagagacctggagtccaggggctcaattctggaagaccccctcagatgtgatagagaacagactcgggcccggtgggcatggggtcgaagctgtctgacccgagccatatcgcttccttatggccaaaagccaagccgacagccgggctctccaggcaggctgcaaacatctgtaagaggctgcacggactgtggcctcattcctctgacgggggcaggtccctccctatctctgggcctcagtttccccatctgagcaacaaaggttgagactcaaaaacatggccaggtgcagtggctcacacctgtaatcccagcactgtgggaggccgaggcaggtggatcacttgaggccaggagctcaagaccagcctggccaaccaacatagtgagactccatctctacaaaaaataaaacaataaactgggcgtggtggtgcacacctgtggtcccagctactcgggaggctgaggaaggagatttgcttgagcccagaaggtcaaggctgcaatgagccaggtgcaccgctgcactccagcctgggcaagagtgagaccttgtctcaaacaaacaaacccccccagaaattagctgtttcttgttagagagagagagtggcccagccctggagctgggccacccgcatttccatcctggctctggtactagggaggtgccctggacaagtggcctcccttctccaggcctcagtttccccaagggcacaccagtgggcaggacttaaaagttcgactttgtccctcctggctgggctggagagacctggccagggaggagacctctctgggactcagctccccttcctgggagtgtgggggccctgccacaccaggaaactcacgcggacagcggcctggcacgcagccaggggcagccccaccaggctggtcccgttgatggcggtcaggcggtccccgatgctgagggcccccgagcgctcagcaggccccccgtgcagcaggttggcgatgacggctgtgggcagcagggagccccagcccgactccaccagggccacgcccaggccctcccctcgccgcttctcgaggtgcacctgggacacacagggggcgcggaggctgctcagcagggcccggtgcaggtgcacgggtgtggggggcaccaggtgggggctgcccagcacctcactcacctcccggcagttgtcactgttggagaagtggtccaggtccccattatggaggtggcaggcgcctgggctcgggtgcacgcccacctggctggggtcaataccgctttcccgtaggaactggctgtaggcggcggcgaaggcctggccaatggcctgggcgatgagctgggcctgcggggaggagtggcgcgtccctggggtgtcccacccacctcctccaggtccccaaagtccccagggtcctcagagctgagccctcctgtccccacctggggtgagagtcccaggacacagccttctgccctggggctttgggggaggtggagagacagccgcatcttggggaatctacggggagaaggaaggggaggggcagccctgggctggggggacgatgagggaggcagctccctgcgcatgggctgtgggaaaagctatcaaagacccagccagggggcctggggcctcatgggtggcagggacagcccaggagcgggcaaggtttcggggagtcggccgagagtcttggagtcttataggaggctggacgcggtggctcacgcctgtaattgcagcactttgggaggctgaggtgggtggatcgcttgagcccaggagtttgagaccgtgttcacctgggcaacagagcgagaccgtgtctctataaaaaatacaaaaattagccaggcatggtgataccccggtggtcccagctactagagaggctgaagtgggaggatcgcttgagcctggaaggttgaggctgcagtgaactatgattgcgccactgcactccagcctgggtgacagaaggagaccttgtcccaaaaaaagaatttaaaaataagcttatgggagggaggttaaatgcacggcccactgagggaggcgacagttgcagtgaggagggcctcaggagggtggccccgcgccctggctgctcacgtcctccgcgtagaatacgtggcagagcatcttgtagaggcggcggccgtggtcctggggtgccggcctccgtgccagccgccgccgcgccatcagcaccagcacgcagccgatgtcggctgtgtaggagatggtatgcagggcgtggtccatcatggcctcctggggcgggagaggcagcctgggtgggttggggggccgtgccaggctcgatcaccccacccgcatccctggggcgggtccctgccccgtacctgggagtccgctgtcaagaccttgatcctcttggtggagacgaacaggtccacctccgtcatgggctgggtctccccatcgggggcctgtgggtggcggcgtgggaggtggaggcccccacagacccagcctgcagcccacccgcctgcccgcccggccccggccgccccctcaccttgacgcggtccatggcctcccgggcctgggccatgcgcgtgctggtgggcgggttccgttccgacaccagctgggtggaccccaggtacctggccccaaatatgacaccgtccaggaggtcttcatggtcacagggaccaggcactgagggcgacagcgaagagggtcggcccccaggggcccactcccacaggctctgccccagggctacgctctccgagatggccgggagacacagtgttctagctggtggcttagcactctccagccaggaagcacagcccactgttctagaaccatccaagcagcctggccctcacaggtctagaaccttctgtccatccctcaaggactcgcaggtgggaaaccagtgagtccaggccatggctggattcaaagccagatctagcacccacagataccttcaccccgtgtccccagaattccatgatcaggccggaaccagacagtcccactcctgcttttttgagacacggtctcgctctgtcgcccaggctggagctcggtggtgtgatctcagctcactgcaacctccgcttcctgggttcaaacgattctcctgcctcagtctcatgagtagctgggattacaggcgcccaccaccacgcctggctagtttttgtatttttagtagagacggggtttcgccacgttggccaggctggtctcaaactcccgacctcaagtgatccacccgccttggcctcctaaagtactgggatgacaggcgtgagccacgacgctccaccccccactccaatttcgaaacctccacaacattctagaaccacagtggacccctgcttcttggttctggaattccctccatcaatctagaactggccagctctgcccactgttctagaaccgtctgcagtcagcccaggatagcaggcagctctgttcccgggttgtagaaccactcagaacagagacagaccctgctgcctgtctaaaattcccatactctccagaaccccagctggttctgacccttgattccagaactctctgacaggtctcatagcaattctgtcaggagttttagaatcttattatcactctagaatcagacttctctgctccgtgattccagaacatcttaatcacaatcgcgtcaggcagctcttcctgtggttctagaatctccttcagtagttcacacctttggctacaccagggattctaagaattacctgaccagtcaaggaacaaacaattctgttccaggagaattctagacagttccagaatactcccaacccagcccagaactacataaagctttactcctggctgggtgcggtggctcacgtctgtaaccccagcactttaggaggccggggggggggggtggatcacctgaggtcaggagttcgagacctgcctggccaacatggcgaaaccccgtctctactaaaaatacaaaattagctgggcgtggtggcgcgtgcctataatcccagctacttgaaagctgaggcgggagaatcacttgaacccaggaggtggaggttgcagtgagccgagagagatcgcaccactgcacaccagcctgggtgacagagcaagattccatctccaaaaacaaaaaggaaaaaaaaaaaaaagctttactctcatggttctagaattccctgagctacccagagccagacagctctgccagtggccctagaacattctaaccagtaactacggctctttggtttagaaccacgggtgtagggccccgttctggacaccactaagtgaaattcaccctacaccacagtcggttctgcccactatccttcaggatctaagcattctggaacaagagctccactctggggttctagagagatacgtcattcactgtggtagccaccaggcacatgtatctatcacagacttgaaatgtggctcgactgaatagagatgtaaatagaaaatacacactagatattgaagatttggtatgaaaaaaagtaatttaaggtcaggcatggtggttcacgcctgtaatcccagcactttgggaggcagaggcgggcggatcacctgaggtcaggagtttgagaccagcctggccaacatggtgaaaccccgtctctactaaaaataccaaaattagctgggcatggtggcaggcgcctgtaatcccagctactcgggaggctaaggaaggagaatcacttgaacccaggaggcagaggttgcagtgagccaagattgcgccattgcactccagcctgggcaacaaggtgagactgtgtctcaaaaaaataaaaaagtaaattaaaaatattgattgtatgttgaaataatattttaaatatgttagcttaattaaaatgttattaaagttaatttcttagccaggtatggtggcgtatgcctatagttccagttactcaggaggctgaggcgagagaatcgcttgaagctgggaggcggaggttgcggtgagctgagatcgtgccactgcactgcagcctgggcgacagagcgagactccgtctcagtttaaaaaaaaaaaaagttatttcacctgtttttaattttttaacgtggataactacaaaattttaaatcacatatggctcacgttgtatttctattgtagttccatctagaactttctgattacactataattggacagctctgcccagggttatagaacactagataactattccctccatggttctagaattctccagtctgagtagaaccagatgcctctgttcaccaattctgagcattctcatcagcccagattcctttaccctagaaacagacaaaatgccaagccctggaactccctaggtgtcacagctctgctcgattctagaaccttcttagagctataggttcaaaccagtttttctctctgcaaccacagaactgtttttttttttcttttttttgagacatggtctcactgtcacccaggctggagtgcagtggcacaatcttagctcactgcagcctcaagtgatcctcccacctcagcctcccaagtagctgggattatagacccatgccacgtgcctggctaattttggggggggattttatttttgtggagacagggttttgctgtgtggcccaggctggtctcgaactcctgggctcaagcgatcctcccacatcagcctttcaaagtgttgggattacagatgtgagccacccttcccggccagaacttactatctgacctatatccttagcgaagtgtagaacagaggctggccgcggtggctcacacctgtaatcccagcattttgggaggccgaggcgggtggatcacaaggtcaggagtttgagaccagcctgaccaagacggtgaaacgccgtctctactaaaaatataaaaattagctgggcacggtggcggacgcttgtaatctcagctactcaggaggctgaagcaggagaatcacttgaatccgggcggcagaggttgaagtgagctgagattgcaccactgaaaaaaaaagtctagaacattccagagggccagaaattgttcttcccatgcttttagggcagggcttggcaaacattttctgtaaagggccaaagagtaaatattttcagccttgtaggtcacaaggtatctgctgcagctactcacctctgccattcgaacatcagagcagccatggacaacacatgaataaccaagcatgatgtgtaccaataaaactttatttatgtacactgaaatttgtttttctttttttagagacagagtctcactctattgcccaggctggagtgcaatggcgtgatctcagctcaccgcaacctccgcctcccgggttcatgtgattctcctgcctcagcctcctgagtagctgggattacaggcgtgcactaccatgcccggctaatttttgtatgtttagtagagacggggtttcaccaatgttggccaggctggtctcgaactcctgacctagtgatctgcccaccttggcctcccaaagtgctgggattataggcgtgagccaccgcgcccagcttatgcacactgaaatttgaattgcatttttttatttttgagacagagtctcgctctgttgcctaggctgtagtgcagtggcgtggggtgatctcagctcaccgcagtctcgacctcctgggctcaagaacttctcccgcctcaacctcctgagtagctgggactacaggcatgcaccgccacacctggctaactttaaacattttttgtagagatggggtcttgctacgttgcccaggctggtctccaactcccggctcaagcgatcctcctgcctcagcctcccaaagagctgggattacacgtgtgagccaccatatccagcctagcatatcattttcacatgtcaagaaatagtattctttggccaggcgtggtggctcacgcttgtaatcctagcactttaggaggccaaggcgggcggatcacaaggtcaggagttcaacaccagcctggccaacacagtgaaaccccatctctactaaaaatacaaaaattagctgggcgtggtggcgagcacctgtaatcccagctacttgggaggctgaggcaggagaatcacttgaacccgggaggcggaagttgcagtgagccgggatcacgccactgcactccaagcctgggtgacagactctgtctcaaaaagaaagaaagaaatagtattcttctttcaatgaaaaaaaaagtcaattaaaaatgcaaaggacacccgggcatggtggctcacgcctgtaatctcagtactctgggaggctgaggcaggcagatcgcttgagctcaggagtttgaaaccagcttgggcaacatggtgaaaccccatctctacccaaataaatacgaaataaaattagctgggcgtggtggcacgcacctgtagtctcagctatttgggaaactgaggtgggaggatcgcttgaacctgggagatggaggttgcagtgagctgagatcaagccactgcactccagcctggataacagaagtcatcaaaaaaagtaaagaagccccaaacgcaaaaaccatctttaactcgagacctacgtgagcaggcagtgagttgggtctggcccgacgacgatgatttgccaagcccggttctagaacccagtgctgccaatggccggagctgccccacagtccccttctcactctaccccgttctcaaggctggctctcctctccctggccagccggaatctgctcgaaaccaccctcagaggctcccgagaacctcgtccttactggcaagctgttgccaggctggtgagcctgattctggctgtctaggggccttcagtgcctgaggctagggtgggcgggacactcaccctcctggggggcagggtaggaagccagggtctcggggctctggaagaagatagaggaggggcaggactgagtctccctgcttggttccaggcagtccaggatgcctggagggcggggcgggcactacctgggcaccagcgggtggctcttcaggtgtgactagaggcaccgtctccagccagggttccggggaactgcttgagctcctgctgccctcctgctcagcagaggccccctccacccattctggggagtcagaatcctcatctgggtcctcagggggctgcaacagtcggggggcaggctctagaggctcttcaggaccagtctgggaaggcgggcattcctcgcagtgcaagaggcccagcaggtcatcccggccagcttcggcagacaggagcccgtgggcatcagcaatctcctgggaggccaggccatggcctgtggcaatgtgtaggggacagggggctccacctggggatgggcccaccagatcgcctggcagagcttcaaactgctgcaccagctcctgaaggcttgactcatcaagttccatccgactgaggctgccggggcctcctggcatagggtcccactggctgtcaggggtgaggtcctccgaaggcacaagaatgtccctgggcccctccaagtccatggctggaggccccgaaggggatcgggaaattgtggggaagtccatgcctggactccaggcttaggccggcatcttcaggcagctgaaagagagagagtcagcactgaggtttcgcccgggtgcagtggctcatgcctgtaatcccagaattttgggaggcccagaagggctgactgaacccaggagttcaagatcagcctgggcaacagagcaagaccctctctctacaaaaaatacaaaaaattaaggccgggcacagtggctcacgcctgtaattcccagcactttgtgaggccgaggcgggcagatcatggggtcaggagtttgagaccagcctgactaacatggtgaaattccgtctctactaaaaatacaaaaaattagccaggtgtggtggcaggcacctgtaatcccagctacgcaagaggctgaggcaggagaatcgcctgaacccgggaggcggaggttgcagtgagctgagatcgcgccattgcactccaaggtgggcgacagacgagactatctccaaaaaaaaaaaaaaaaactagctaggggtggtggtgtaggctgtagtcccagctacttgggaggctgaggtgggaggatcacctgaaccaggggaggcagaggctgcagtgagccttgattgtgccactgcactccagcctgggtgacagagtgaggccctgtcttaaaaaaaacaaacaaacccgaaaaacaaaaaacttgaggtttcccggctgcctatccggtgctaggctctagctgggtactgttcatacagggcacataatttaatacccactaacccttgcaaggaagttaggattcccattttacagatgaagaaactgagccacagaatggggaggtgtgaggcagtggcttcccgagcccctgtgtcatcccagacctctctcaactaatggagtctgttcactccagccctggttcttccaggtcctcctccctcaagacgcggaacccaggctggagacccagacctcacaccctgactctaccgactggtcagaggcagttccccaagaccccagacccaagaccccagtcccatgacctcaacccccaatacctccatccagaactttagacccaggaccctggacttaataccagagacccaagacgccataaggcggaccccagtctccaaacctccaatgctaccccaagatcgactccagactcagaccccgacttcaggacccagccccaagcccagaccctagtcccccctcagaccgaagacctcaagcgccgactcagactgcgctctgcacctcgaggacactcacttcccaaatcgaggccgcctcagccccgcgcagcctccaggaccccgctccccacggacggccccgacgtagcccgggccgcgtccccagaaggcgcagctcggggattcccggtcccggcgcccgctcctctatccgcgcagagccctggcccattgagcatgcgcggcctcgcgaggcctgctgggaaatgtagttctcccacccagcctcgccacgcgggggcgctgggacaactgcagatgttggaggggagttcgaatcccaggcttcccggcccgcagactgccccggctggccccaggacctgtttgttctcctgcaaaatagggttaataatcactgcctggctctgggggctgtgttcattattccaaaggatggcagatggggagaagtggggttgggaaatattaaagaagtgtgagaggtggtttccttgggaccttgaggcaccggaagcgtcgtggagaccctgttaaagacggactttcggtttggctcacagtagggagacacataggtgcaccatggatttggggtcggcctgggaactttacctccctgagaactcagtttcctcattataagctggggaaaaaatagtacctacctctcaattgtgaggattaaattagatcaagcgggttaaggatttagcagtagtagagctggaaaagaatatataaaatatatattattaatttatatattatatataaaacatactatatattatatgtattatatatgttatatataattttaaaaatataatgttataaaaattaacagtgattagactccagccctactggagtatattagactcattgttaatcttctttttttaactttaaagctttgaataattactcattggatggaatcaggaacatataaagtgtgatatttttagtaaatgttatgtaattgaagaagggcaagaagtcaatgaaatatcccttgaacgcctcctcctatagtaactgtgtatgtctacaaaagtctgaagaaatcaccatagattatgaaagcttgggagaccgcatttcccagacacctccacggggcctacacttccacggggcctacaactcccaaacacccttgggccactgacgtcttccggaaacgtgcacttgcaagctgcccgcaatacgtcatggcgaccaaacgccttttcggggctacccggacgtgggccggctggggggcctgggagctcctaaaccccgccacttccggaagactcctggcccgggattatgccaagaaaccaggtgagctgggttaagaggaaccaaatggggacggtgggtgcactgaggaattgacagtgcgcaggcggtggttggggaggtggtgctagaactgatgcgcaagcgcagagaggcggatgccaggctgtatgcgcaggcgcagtttgagggacccagcgccgcttggagctcgggcgtctggctcggagatactgtagcgattggacccagggcgcaggcgccagcttggggcggagcggcctgggaggaggatgtggttacgtggagaccacgcgtttcactgcgcaggcgcgggttggaaaggatttgaagggagtctggggaggtcatgaacttgggttccagttctgtttctctgcctgcctccaaatcgctgggtaaccttggccaagacgttaccaaacattcaaagaaattatggagcccgtttaattggccacttcagcaagaacaaaacaaggttattaaggtttagctggatacagccttgcctgatctcctttgttgaaagggggaaattgtccaatgttcggccttaaagacagacacatagcagacaaaatataacttgaatgacttggtcattccaagcatcggtgttacttaatgctatgtccaaatcccacttaaagttacttaatgctgtgtccaaatcccacttaaagtgatttcgaggccaggcatgatggctcacacctttattcccggcactttgggaagccaaggagggaggatcgattgcttgaacccaggagttcgagaccagcctgggcaacatagcaggaccctgtttgtataaaaaaaaaaaaaaattgcctggcgcggtagctcacgcctgtaatcccagcactttgggaggctgatgcaggtggatcacaaggtcaggaattcaagatcagcctgaccaacatggtgaaaccctagctctactaaaaatacaaaaattagtggggcatggtggcacatgtctgtaatcccagctactcaggaggctgaggcaggagaactgcttgaacccaggaggcggaggttgcagtgagccgagatcacgccactgcactccagcctgggcgacacagtgagactctgtctcaaaataaataaataaataaataaaaataaaaataagcggggcatggtggctcacaactgtgatctcagctacttgggaggctgaggcagaaggatcacttgagcctgggagtttgaggctgcagtgagccatgattgtgcccctgccctccagcctgggcttttattttttatttttttattttcttcagacggagtctcgctctgtcgcccaggctggagtgtgcagtggcgcaatcttggctcactgcaagctccgcctcctgggttcacgccattctcctgcctcagcctcccaagtagctgggaccacaggtgcccaccaccatgcccggctaatgtttttgtatttttagtagagatggaatttcaccatgttagccaggatggtctcaacctcctgacctcgtgatccgcccaccttggcctcccaaagagctgggattacaggcgtgagccgccgcgcccggccgggctgtctttattttttaattttttagattttttatttttttgagatggaatcttgctctgtaacctaggctggagtgcagcgatgcgatctcagctcactgcaacctccgcctcccgggttcaagtgattctcctgcctcagcctcccgagtagctgggatcacaggcatatgccaccatgcccagctaatttttttttttgtatttttagtagagacaagttttcaccatgttggccaggctggtcttaaactcacctgacctcaggtgatcttcccacctcggcctcccagagtgctgggattacaggcatgagccactatgcctggctgagaccctgtctttaaaaaaaagttttgagtggccgggcgcggtggctcacgcctgtaatcccaacactttgggaggccaaggtgggcagatcacgaggtcaggagatcgagaccatcctggctaacacggtgaaaccccgtctctactaaaaatacaaaaaattagctgggcgtggtggtgggcgcctgtagtcccagctacttgggaggctgaggcaggagaatggcttgaacccgggaggcggagcttgcagtgagctgagactgcgccactgcactccacctgggcaacagagcgagactccgtctcaaaaaaaaaaaaaaagaaagttttgagtgtagcagagtccagccaggggcagaggccacctgagacagggttctgtgagagaagtttggcttccagaggaggggctgggctgaaatgactctccctctcgtctccccagttatgaagggggccaaatcgggaaaaggtgcagtgaccagcgaggccctcaaggaccccgacgtatgcacagatc

SEQ ID NO: 4171 - DNA, 484 bp, Homo Sapiens
acgtgctcagtgaattgaatttaggtgacactatagaagagctatgacgtcgcatgcacgcgtacgtaagcttggatcctctagagcggccgcctactactactaaattcgcggccgcgtcgacagttattgctgattcttgaatgtctgttatataactgggtcggctatcaagaaggaaggttatatttcttatcacattttaagttgttaagcaaatgtgagtttttttttaagaaatgaggctttcactgagatttgtgtgctattcataattttaggaattactgcttagaacagctgcttgggtgtatttttctacacaggtctgtacttctgccactttctccttttaaaaaaacaaaactatgcatattatgtattaaagttttcttggttttatatatcagagaataaaaacttttttgacttttgagtaaacaaaaaaaaaaaaaaagtcgacgcggccgcgaatttagtagta

SEQ ID NO: 4172 - DNA, 2125 bp, Homo Sapiens
agcaaaatattatttatttagcccaggcttgagagccactgtttgtggacagtcttcatctagattccataccctggcctaggcgaggtaaggctctctggttattgccaggatggagcccctctaccccagtctgctgtagggaataccctaattagttgaggcatgcttttggaatcctggcatgttggcatatggctggtctatcctttttaagatctctggttgggggtatctggatatggattaggagggacaaggagcctttttcttggctaatgttttccaatacttttttgaatggtgccagcccctccaggcatcccacccccaaatcatcatctttagtactaacagggtgtctggtcttagaagcctcccttcagatcccagctgaccctggtgactgcctggccttgatgttggctgcagccttctgatagaaccacatggattccacccacagctggccaggcttgttacatgggtcagggaatacaaatggcccccccccagggagcaggtgttggcctcagttttcagggacccttggtgttgctccttacctagagcccattaatctaccccatcaactctctgccatgaaagccatcttccaggggccctgttttttggagctgaactgcacagattatagctgctattgtacttaaataagggagaggaaaagaaggttctcaggcacagactttctatttttctcaagccaaaccagtttaaaatgtctagcagaatgaactgtatttccatttcttcatgtctacctgccttccccccacaccctaaagttgtacttgtttctagcaaactagaaggaaaagataggaaagcctggcactactaacctcacctctcatacacctctttgaaggccccagctcttttgttcaggcctctcttctcccctagactcactcagcttggtatccatcatcttgagcattcttcagtagattcatctagggttcagattccagactctcagctgaagacagggagccaatttcccccaggtccctgcaggtaatccagggaccccatagggagaacaggctgactggggcattaggaatgtttgtacctctctgcttccctggcagcctggggaagggtgcagggctcagtgcgctaaaccatggtaaacatcttcaatagaactaccctagaatttagtgagtgtgagactgagatattgctcagaataaatttattccatagccatttaggattgcatgttctggaccaaccttgtccagtatgttttctgtttgagctttttcattcttttgttaagccaacaagttgagagtttggccctgctgggatccatgtagtgggcactagctgctctttggccaaggccttcataaatgattcagtctctcattatctgtcctctagccccacaccctgatttagaccgtggcaaaggaagaacttgaggtcaagaccaaccaaatctgtgaattaaagctgttatttttttctctgcaagggcgctttgcttcaggtctgggctatgtgcagaacctaagcaggctgtgagagttagaagaggcagtattacatgttaggcccagaacaccatgggaaaaggtttatgtagtgtatcttagtggcctgcctagctgcctctgggccaggctgacttctgatgtccacattagctcgtacctgaaccctgttgctgaatgccagccctgttctcctgtaactattatatacgccatggcctggggggcattgaaggaagtaagctctcagagatcctaacactggctgggaacctctgactcagagcatgtctttaaagagtccacatctggccaggcgcggtggcacatgcctgtaatcccagcactttgggaggccgaggcgggtggatcacgaggtcaggagtttgagaccagcctggcaacatagtgaaaccccatctctaataaaaatacaaaaaattagctgggcgtggtggcaggcgcctgtaatcccagctacttgggaggctgagacaggagaatcacttgaacccaggaggcggaggtcgcagtgagccaagatcatgccactgcactccagcttgggtgacagtgcgagactccatctc

SEQ ID NO: 4173 - DNA, 490 bp, Homo Sapiens
  misc_feature (159)..(159): n is a, c, g, or t
  misc_feature (392)..(392): n is a, c, g, or t
  misc_feature (451)..(451): n is a, c, g, or t
  misc_feature (459)..(459): n is a, c, g, or t
  misc_feature (466)..(466): n is a, c, g, or t
  misc_feature (473)..(473): n is a, c, g, or t
  misc_feature (490)..(490): n is a, c, g, or t
cggagcttttttcatttttatttaaatggaatgatattttgtatacatatatttttctcctttttccatttgaggaaatgaaggcatagaaaagctcaatggatcgctgaagaccacagccctgataagcgtcagagatggaatctgttgccaggttgnctgcctcccaagttctacacaagcatatactctaatgctcggatcctcagaggaggaaaacttgtcttcatgtcagggacagtttcttagacatctttgtgctccccacagggccttgccgtgctttgcatggaaggcactcaataaatatttgtcggatgaagaaacctggggctcaggctccaattctggcatggacttaagtgactccagtctcctgcaacttgggaagntgcaaggtggttactcagctggggaaacttcaaggggaacatttggaaatccaattaangggttganggaggancctattnaaaaccttccccctttn

SEQ ID NO: 4174 - DNA, 368 bp, Homo Sapiens
  misc_feature (64)..(64): n is a, c, g, or t
  misc_feature (97)..(97): n is a, c, g, or t
  misc_feature (145)..(145): n is a, c, g, or t
  misc_feature (172)..(172): n is a, c, g, or t
  misc_feature (279)..(279): n is a, c, g, or t
  misc_feature (313)..(313): n is a, c, g, or t
  misc_feature (358)..(358): n is a, c, g, or t
  misc_feature (366)..(366): n is a, c, g, or t
tcaatacaatgatctaaatctaaaatctttcacaaggtgcaactttccagtgataaacaagaanaggaagtgaatcttgaatacaacccgacttcangttcccttcactattaaagtatctcctttgctgtctgttacctgagtntcacttaaccagcgttaaacttccatnattctagcccaacagttataaatatctttatttctttttgaacaaaacatatttcctattagactgggaaattttgacacactcaaatgtttgaagtcccaagaggnaagacagctaaaaataaaagggaattgagcaggnaaagcaactcaggaaaagcaggaaaatggaaaaacaggatggttnaaaccctntt

SEQ ID NO: 4175 - DNA, 936 bp, Homo Sapiens
  misc_feature (679)..(679): n is a, c, g, or t
  misc_feature (719)..(720): n is a, c, g, or t
  misc_feature (724)..(724): n is a, c, g, or t
  misc_feature (729)..(729): n is a, c, g, or t
  misc_feature (731)..(732): n is a, c, g, or t
  misc_feature (740)..(740): n is a, c, g, or t
tttttaggttttacccaaactggttttactagaaaaccaatgaacctcaaacactttttgtggacttcaaattctttccttcagattttaaaatgacattatgcatgtacatatttttaaaatttagacacattttagagaacacaattgtgaacacaaatctaagaaatgaatgagatgttctgaaatctgattcaaacacttatcttaaactgacttctgtcaatcctctgtcctgtgaagtaagtcccgtttctcctttgcctggagggaccgagctggaattactgtcacatgttacagacatgaggcaggggttaatgcagaaccacggaacagcacctctgatgacatctagtggataagtaggaaggtgtcaacccaggtggcttttaaaaaaatctgtaaataaaatctcctcctttattccacagattttaatctttccctcagtgtgttagaaagactaatagtgtttttcaaacgtgtgtggatggactcacctggggagacacccgcatcataggccacctttgtggctgctctgcagacacctggctgcacccgctgcctcctcgtctgagaggggctgccctggagagcaccgtgctggctgtgttgcctactggcttttctttgagaatgggaggcaggacctctactgagtgctgtgatgtgntatgtttgatgtggtggggggggggggagatgacatgttnnttgnatgananntgacattngtgtgaggggttttagataagcaggttacccttagctcactggacgaacagcttactgcctggcggggtggggctgtgtgacttggcttaacgtccatctactagggcttggaggccgcggttacatggatccgggtgaatgtttttcccccgtgactgatcttacatggacgaaatcagactcaggcgacgggcg

SEQ ID NO: 4176 - DNA, 601 bp, Homo Sapiens
ggcagcggcgacggcagctgcgacagcaacccctgctgggccgaaactgggcagagcggagcagacgtctgaagcagcgcgagtgaggcgcgagggtagcgcccgcgcccgggaagacccctcggcgcgaaccggcagcccagccccgggtcccggttcccaaggccccgcctctagggcctggggactaatcggattgagagcgcgccggcccgggccgcgaactcgccaattgcggagggcggtggccaccgcccaatccggagcagacaggtgcgaggtccggaaggcggaggccaatcggcggcggttgcgacctgctggggcaggtctcggccaataaggaggctcgagtgacatcttcgcgcaccaatcgggagtgagggagcattcgtgcccgctcgcccttccggccagacctctatttaccagtgggcgtgcagccctgcttgccaatcagagcgcggctgagcggccccgcagccaacccccgatggagcggccggctggcgtccgcacgcgcccaggagttggggatgtcctacaaacccatcgcccctgctcccagcagcacccctggctccagcaccctgggctggga

SEQ ID NO: 4177 - DNA, 372 bp, Homo Sapiens
  misc_feature (152)..(152): n is a, c, g, or t
  misc_feature (310)..(310): n is a, c, g, or t
ttttttttttttttttttaggaaaatcaaaaattttaatcttatcatctttacatacaacaaacatgtcaagaccccctattgtctttgaaaaggtcccccctcccccgccaaaatctgtagaccataagtcttggcctacactgacctggnttgtaaaatatcttcctctgtgtacttttcccttcagcctcaggctcttggctgattcgctcacaacagaaggcagcttggctttcctctggaagtaccaatttgaaagcccaccagcccgcaaacctagagtgtattctccacccctgggtcacagnaacttcgttctccccggctctgtaacccaaggaccctacagcctctgaggccttaacaccca

SEQ ID NO: 4178 - DNA, 382 bp, Homo Sapiens
  misc_feature (3)..(3): n is a, c, g, or t
  misc_feature (18)..(18): n is a, c, g, or t
  misc_feature (68)..(68): n is a, c, g, or t
  misc_feature (276)..(276): n is a, c, g, or t
  misc_feature (290)..(290): n is a, c, g, or t
  misc_feature (335)..(335): n is a, c, g, or t
  misc_feature (358)..(358): n is a, c, g, or t
  misc_feature (377)..(377): n is a, c, g, or t
  misc_feature (382)..(382): n is a, c, g, or t
tangaaagctcgcctgcntttgggaatctccaggatcccccgcaaatttccttccactcggggaccgntcgtgacccagctgcggccggccaggcatggagactggagcgctgcggcgcccgcaacttctcccgttgctgctgctgctctgcggtgggtgtcccagagcaggcggctgcaaccgagacaggcatgttggagaggctgcccctgtgtgggaaggctttcgcagacatgatgggcaaggtggacgtatggaagtggtgcaacctgtcncgagttcatcgggnactatgagaagttcaccaactgcaccgagatggagccaatgtcgnggctgctactgccaaccactggnccaaggcttaataaccggnatcan

SEQ ID NO: 4179 - DNA, 392 bp, Homo Sapiens
tttttttatatcaataaaatagtaaagaaatattttatttacctaaggtgttagtataccattaaaattagggaaggaagaaaatttttacatgggcatagcttcaaaaattctgaagggtatttctgggtatttagataggacttttaagattgaggcctgtgcggttttttaatgggtctaaaattaagacaattcatgtcctttccttgatagtatttgcacaaatcatcattaccagtcacgactgtggtcagatgctgactcccaagtaagtcgaagagggaggcaaacagaaggaaaagagaaatcttcctgatatatctgggtaagacatgaagaggacagagaattgaggttaaggatttgcgtatatgtacctaataagatac

SEQ ID NO: 4180 - DNA, 302 bp, Homo Sapiens
  misc_feature (139)..(140): n is a, c, g, or t
gtcagcctcacgcggcgggaaggaaccggtccgaggccccgggctgccggcgcgggcgcccggcacgtccacaggctgggtcgcgaggtggcgatcgctgagaggcaggagggccgaggcgggcctgggaggcggcccnnggtggggcgccgctggggccggcccgcacggcttcatctgagggcgcacggcccgcgaccgagcgtgcggactggcctcccaagcgtggggcgacaagctgccggagctgcaatgggccgcggctggggattcttgtttggctcctgggcgccgtgtggctg

SEQ ID NO: 4181 - DNA, 743 bp, Homo Sapiens
agaactatttacggaggcgatcaccggtttgtaatttcagtcacgagggacttgcgctattggttgtaccgttacctggtctctgggcgtacatcttgaatgccactgtgtacgtggggggcctggatgagaaggttagtgaaccgctgctgtgggaactgtttctccaggctggaccagtagtcaacacccacatgccaaaggatagagtcactggccagcaccaaggctatggctttgtggaattcttgagtgaggaagatgctgactatgccattaagatcatgaacatgatcaaactctatgggaagccaatacgggtgaacaaagcatcagctcacaacaaaaacctggatgtaggggccaacattttcattgggaacctggaccctgagattgatgagaagttgctttatgatactttcagcgcctttggggtcatcttacaaacccccaaaattatgcgggaccctgacacaggcaactccaaaggttatgcctttattaattttgcttcatttgatgcttcggatgcagcaattgaagccatgaatgggcagtacctctgtaaccgtcctatcaccgtatcttatgccttcaagaaggactccaagggtgagcgccatggctcagcagccgaacgacttctggcagctcagaacccgctctcccaggctgatcgccctcatcagctgtttgcagatgcacctcctcaacctctgttccaatctgtggtatcatct

SEQ ID NO: 4182 - DNA, 275 bp, Homo Sapiens
gcttctctaggtgaaggtttaaattaacttcagcatgggtaaaactattctttccttcttttttctctcccagagttctcaccacctcctcccaggctaaatccttcatgttgcaggagacagagaatcccaggtgagacccggactttttctcctccctcccttccttttttcaccgtgttcaggataaattatcttggttttgtttctggagggaaaagggcagagaggccctgacttgaatctcaatcacatttctgcacacagtaccttgg

SEQ ID NO: 4183 - DNA, 349 bp, Homo Sapiens
ttttttttttttttaacaagggggcagtcatttaatgcaaaaatccagttaacataaagagacagaggttgaacaacaggtcttcaaacaatactgcatagtgtcacgagttagctcttaagcacgtttgatctgtttatcttatgatttcgattccagtacaaagacagagaagagacttaaaaaaaaaaaaacaataaggcaacagaagaagaatcttcctgtgacaaggaacgtccacaaataatgcacaaatatttggtgctgacacaataagacaccatcaggacaagttctgaagatgctgcattaaaatttaacaagcatgatacaatgacaagaaaattat

SEQ ID NO: 4184 - DNA, 225 bp, Homo Sapiens
agtgtggaattgcttcttttctttggtcaaacactaactttggcagaggatagacacagcttaggaagactgaattttaagtcttctgaattgtttttctggacttccaaatctcaagtgataagaccagcagaagcagatataaagacctgaagatagtcttttctgtccaaagatggaaaacagtactactaccatttctcgggaggagcttgaagaactaca

SEQ ID NO: 4185 - DNA, 4586 bp, Homo Sapiens
acgcgtcgactccattggcccagcaatcaaccaacacagctggtatctagctgttttggaggtgaactgttgcaatgggatctcactcaatcttggagacggaaatacaccctcttcagtgcctcatcagaagggcaaaatcattcaagaattgtgtttaatttatgtcctttacaaacagaggatgacaaacagctgttactttctacatcaatggatagagatgtaaaatgttgggacatagccaccttggagtgcagctggacccttccttcccttggtgggtttgcatacagcctggctttctcttctgtggacataggctctttggccataggtgttggggatggcatgatccgtgtatggaatacactctccataaagaacaactatgatgtgaaaaatttttggcaaggcgtgaagtccaaggttacagcgctgtgctggcacccaaccaaggaaggttgcttagcttttggaactgatgatggaaaagtgggattgtatgacacctactccaacaagcctccacagatttctagcacatatcataagaagactgtatatacgttagcctgggggccaccagtaccccccatgtcacttggaggagaaggagacagaccttcccttgctttatacagctgtggaggagaagggattgtcttacagcataatccctggaagcttagtggagaagcctttgacatcaacaaactcatcagggacaccaattcaatcaaatacaaattgcctgtacacacagagataagttggaaagcagatggcaaaatcatggctcttggcaatgaagatggatcaatagaaatatttcagattcccaacctgaaactgatctgtactatccaacagcatcacaagcttgtgaataccattagctggcatcatgagcatggcagccagccagaattgagctatctgatggcctctggctccaacaatgcagtcatttacgtgcacaacctgaagactgtcatagagagcagccctgagtctccagtgaccattacagagccctaccggaccctctcagggcatacggccaagattaccagtgtggcgtggagcccacatcatgatggaaggctggtatctgcttcctatgatggtacagcccaggtgtgggatgctctccgggaagagcccctgtgcaatttccgaggacatcaaggtcgactgctttgtgtggcatggtctcctttggatccagactgcatctattcaggggcagatgacttttgtgtgcacaagtggctcacttccatgcaagatcattcccggcctcctcaaggcaaaaaaagtattgaattggagaaaaaacggctctctcaacctaaggcaaagcccaaaaagaagaaaaagcccaccttgagaactcctgtaaagctggaatcgattgatggaaatgaagaagaaagcatgaaggagaactcaggacctgttgagaatggtgtgtcagaccaagaaggggaggagcaagcacgggagccggaattaccctgtggccttgctccagcggtttctagagaaccagttatctgcactccagtttcctcaggctttgaaaagtcaaaagtcaccattaataacaaagtcattttactgaaaaaggagccaccaaaagagaagccagaaaccttaatcaagaagagaaaagctcgttccttgcttcccctgagtacaagcctggaccacagatccaaagaggagcttcatcaggactgtttggtactagcaactgcaaagcactccagagagctgaatgaagatgtgtctgctgatgttgaggaaagatttcatctggggcttttcacagacagggctaccctgtatagaatgattgatattgaaggaaaaggtcacttagaaaatggccaccctgagttatttcaccagcttatgctttggaaaggggatctcaaaggtgttctccagactgcagcagaaagaggggagctgacagacaaccttgtggctatggcaccagcagctggctaccatgtgtggctatgggctgtggaagcttttgccaaacagctgtgttttcaggatcagtatgtcaaggctgcttctcacctactttccatccacaaagtgtatgaagcggtggagctgctcaagtcaaaccatttttacagggaagctattgcgattgccaaggcccggctgcgcccggaggacccagtcctgaaggacttgtacctcagctggggaaccgtcctagaaagagatggccactatgctgtagctgccaaatgctatttaggggccacttgtgcttatgatgcagccaaagttttggccaaaaagggggatgcggcatcacttagaacggctgcagagttggctgccatcgtaggagaggatgagttgtctgcttccctggctctcagatgtgcccaagagctgcttctggccaacaactgggtgggagcccaggaagccctgcagctgcatgaaagtctacagggtcagagattggtgttttgccttctggagctactgtccaggcatctggaggaaaagcagctttcagagggcaaaagctcctcctcttaccacacttggaacacgggcaccgaagggcctttcgtggagagggtgactgcagtgtggaagagcatcttcagccttgacacccctgagcagtatcaggaagcctttcagaagctgcagaacatcaagtacccatctgctacaaataacacacctgccaaacagctcctgcttcacatttgccatgacttgaccctggcagtgctgagccaacagatggcctcctgggacgaggctgtgcaggcgctccttcgggcggtggtccggagctatgactcagggagcttcaccatcatgcaggaagtgtactcagcctttctccctgatggctgtgaccacctaagagacaagttgggggaccatcaatcccctgccacaccagctttcaaaagtttggaggccttttttctttatgggcgtctgtatgaattctggtggtctctctccagaccttgcccaaattccagtgtctgggtaagggctggtcacagaacactctctgttgagccaagccagcagttagacactgccagcactgaagaaacggaccctgaaacttctcagccagagccaaacaggccttcagaactagacttgagactcacagaagaaggtgagcgaatgctgagtacttttaaggagctcttttcagaaaagcatgccagtctccaaaactcacagagaactgttgctgaagtccaagagaccttggcagaaatgatccgacaacaccaaaagagtcaactctgtaaatccacagcaaatggtcctgataagaatgaaccggaagtagaagcagagcagcccctctgcagttctcagagccagtgtaaagaagaaaaaaatgagccactttctctgcctgagttaaccaaaaggcttaccgaggcaaatcagagaatggcaaaatttcctgagagcattaaggcctggcccttcccagatgtgctggagtgctgcctcgtcctgcttctcatcaggtcccactttcctggctgtctggcccaggaaatgcagcagcaggcccaagagctccttcagaaatacggcaacacgaaaacttacagaagacactgccagaccttctgtatgtgaattttcacacaccttgaagaaactgccaaattgaaaatgtttgacatctttcacctctgcagttatgcctcaccagacattcactctggtccctagatgtttttgcagtaatccaaaagaatacaaacaaggattaagtttgaatcaaccctgcctacccatagacaacggtggatctgactttagactcaattgtggtctcctactggagggaagatcatgaaaagcccacagtagttattcagaactaacacctgcagagtgttggtcatctctacagccttaggcaggtttcaccaaaagaggagaaacttctgtcgtcacccaaagtgttacatgcttaaaacacaagctacctttgtaaatacttcatctgatcagaagtgtgtcatgcttgtttgagatggagttgctgcattttaggactattgatacctttttttaattgtttttataatatttaatttgaaagaggagacccttctctctctactctttcatagactgaagtttgaatatgaaataggccttaaccatcatgttgactctcctgtcagaattttaggttggaaatttggttttattctttcatgtaattgcttatttgaacagatcacttactaaagctttagaagaagtgattcaaatgtgtgttttcccttcagttttataacaaatggattgatggcagtcaaatagctcaggaataaattactgtttcaatggttcttaaactttcttggatcataggatccttttgagaatcagattaaagccaaagatactctttggagaaaaatgcatattcctaattttgcatagatgacctttggattattggactctgactattgggaccctaaatactatttaattataaatctttcttttctcctcaaaaaaaaaaaaaaaaa

SEQ ID NO: 4186 - DNA, 624 bp, Homo Sapiens
tttttttttttttttttgcttaacttcttcagacttgttgatggacctaaggttaacagatttcaggatcgttggtgtaattgcaagggacggtggaggattcgacctcagtgtttctcctactgtgttctgcttattatgagtaaaaacatgcagtggatgacggtggtggaatggtttgttcaagacattatgaagagcacttagatcaagatgggtaggaggtataattggaagttcaaggtctttactcagtgatatagttccatcttttaaagagggttgctgtagtgaggattttctttctgggactttaggttttcttttgctacctccgggagacaatggacctgaaaagaaagctgtagggaaagaggatgttggcgtttcagactggcttgaatagccacttgatggagatgccaagccagccagcttttctggtgaagccagtttaaactcattgtcaacagaaggaagagatggggtggtggctcttgattctgattgtgatgtttgggattcagagctctctggagatttgatgcattcaatgactgtggtacccgtagcggtgcttgaattagatagagatctataaggatcatttgttttcaagtcatt

SEQ ID NO: 4187 - DNA, 616 bp, Homo Sapiens
gggctcagccgcggagtgagcgagggagacgggaggagccgaacccggcgccatccgccgccatcctcccccgccccaccgccatcccgtcacggggagcccctaggcccgggtcccggatccccgcgcacccggccaggctctggcacgttttgggggaggtgcctgcaggacccaacatactcaatgagcttccagcgcaatgtccgatcgctcggggccgactgccaagggaaaggatggaaagaagtattcctcgctcaacctgtttgatacgtataagggcaagtccttagagatccagaaacccgctgttgcccctcgccatggcctgcagagtctcgggaaagttgccattgcccggcgtatgccacctccagccaaccttccaagtctgaaagccgagaacaaaggcaatgaccccaatgtctcactagtgccaaaagacggaacaggatgggcaagcaaacaggagcagtccgaccccaagagttccgatgcctcaaccgctcagccgccggaatcgcagccactgccggcttcacagacgcctgccttcaatcagccgaaactacccgcagcgagcccccgagacactcctttggttccaagcggg

SEQ ID NO: 4188 - DNA, 469 bp, Homo Sapiens
tttttttttttttttttaaagaattcaagtatttacagcagctttatttgtaatatacaaaaatctataaataatataaatgtccctaaacacatggataaacactgacttatccatagaacagcatgatactcagcaatacaaagattcatcatttttgaatctcaaaataattatacagcatgaagaaaaccagtaggtatatatacacacacacatataaccacatatgtatatatatacgtatacgtatgtgcgtaaacgtgtgtgtgtgtgtgtgtgtgtatgtacctcagtaaaaactccagaaaatgcaaactaatttactgtaaaggaaatcagttgaacctgaagagctggggaagggagaaagattataaaaagatacaaggtaaatatatgggtgacacacaaattcatttttatggttggaatgatggtttcatggctttaccaaactgtacacttt

SEQ ID NO: 4189 - DNA, 331 bp, Homo Sapiens
tttttttttttttttttgcccgtctacatcgccatcactttattgtactgtcacccttaatttaactataaatactacggtgggggctagtcgcgggcggcctcgggctgctgggctgtgcgcgccctgaccccagacgccgaccctcccggctctgtacactatttacagctcctcgttcctctttctcgaccccctcccgcaaggcagcgcgtgtgcaagaaagtagcatcgtctgtctgtgcaagtccttcgagttaggtaagtaatacgggcaagtgtcccgcggccgtcagctgtccgagtccaaatcgcttttaccctcgtgccg

SEQ ID NO: 4190 - DNA, 471 bp, Homo Sapiens
gcagtagagaaagataagctttattattgaataaaaattaaatgagaatgtgatgcacatcacagacactttgctaagagatcacaaagacagaaggaaatttcaccattttgtacagccaagcaggtacagcccattacatgtatgttttcgagataaatagtcctcaactaagagaacttgacagcaccactggtcacacagttcattctaactttacctgataattgatgtgaccacttgtgttatctaagatatcaacttttcgggggtgggggagtgtggaaacaggagttacttttatagcttggtgcaaggtactcattaagattaggctgttaccctcccacagaaactgggaagataggtatgctatctgggtaatgtttacatttcccagatccttgagaaagacattccctagggtccttaaagctggaccaaaagggccgattccagttttttaaatat

SEQ ID NO: 4191 - DNA, 160 bp, Homo Sapiens
tttttttttttcactcttctgtcctttttaatgtaaacagagttacaaaaaccactccaaagtgaaggctcccatcctacacacagatatttgcttactgtgtgggccgatagctgtgaactatgtaaggttttttaaacaatagtttaaatttttagac

SEQ ID NO: 4192 - DNA, 176 bp, Homo Sapiens
  misc_feature (130)..(130): n is a, c, g, or t
ctttcgaagtgaatagcaaaaatgcattcatgagcaaggcacttttatacacacacagagagaaaaaggaacgtattatgaacacatgaacataaacatattttaatattcagacctcttccctacctcntcccacctccacttaaacaaacaaacaaaaaaaaaggaaacagttt

SEQ ID NO: 4193 - DNA, 565 bp, Homo Sapiens
tgcagtgttggaggtcggcgccggcccccgccttccgcgccccccacgggaaggaagcacccccggtattaaaacgaacggggcggaaagaagccctcagtcgccggccgggaggcgagccgatgccgagctgctccacgtccaccatgccgggcatgatctgcaagaacccagacctcgagtttgactcgctacagccctgcttctacccggacgaagatgacttctacttcggcggccccgactcgacccccccgggggaggacatctggaagaagtttgagctgctgcccacgcccccgctgtcgcccagccgtggcttcgcggagcacagctccgagcccccgagctgggtcacggagatgctgcttgagaacgagctgtggggcagcccggccgaggaggacgcgttcggcctggggggactgggtggcctcacccccaacccggtcatcctccaggactgcatgtggagcggcttctccgcccgcgagaagctggagcgcgccgtgagcgagaagctgcagcacggccgcgggccgccaaccgccggttccaccgccca

SEQ ID NO: 4194 - DNA, 510 bp, Homo Sapiens
tttcttaacagacatattactgtagccacttttggtgttaacttggaccccagttttaaaatgccataatcaagtatttcagtaatatatgacattcattatatctgtagacactggataactgaacgaaaattcatgctgcaattatcaggaggtcaaaggttaataaattaattatttgagtaacaaaaggagattagcagggcctagcctggtgtctaggaaagattagtggacaagaggtcaggaagttggattcagtcgtcctggctctgccattagcccatccctggagtttaaaaaagcaagtctttttaacttcttggagttcagtttcctcacctgtgaaatgaagaagctgaataagctcatcttagggttatttgctgctccaacagtctaatattctctgaggaacaatatgcttgggttcatgggagagtcacttcccacaggaaccacgctgaccagagcacctgattgctagcctctcttctctggatggggtcg

SEQ ID NO: 4195 - DNA, 473 bp, Homo Sapiens
  misc_feature (56)..(56): n is a, c, g, or t
  misc_feature (319)..(319): n is a, c, g, or t
  misc_feature (455)..(455): n is a, c, g, or t
gcgaccgctggtggtccgggaccgaggggccacggtccacggccctgtggtcaggntcgagatccaccctctggcctcagggagcctctccccatcacttccagttaagcagtgccccgcgtgccctccacattggcccctgggatttgtccccagagctcagggcttcaggcagcgcttcttccttctggatgcttcgggccttctggttgggtgtggaggaaggcaccgcatctggctgaatgtgcagaaccccgtccctaacacttgctgaagtcccttgtggcaaagaagggcctgagcagaagcagcctggggngcagaagggggcctgggccgggggatgttgtgggccattgattctgtcagccaggtcaggagtctgaggtggttcatccaggatgacttgggggcagggctttggcctgaagcatctccccaggaacaaaaagggnctcctgctttctccccaa

SEQ ID NO: 4196 - DNA, 366 bp, Homo Sapiens
caaacatcagtttgccctctatgtcctttgttgaagatgtcaccataggagaaggggagtcaatacctccggatactcagtttgtaaaaacatggcggatccagaattctgatgtcatctgggtgattctcagtgtggaggtgggtggacttttaggagtaacgcagcagctgtcatcttttgaaacggagttcaacacacagccgcatcgtaaggtagaaggaaacttcaacccttttgcctctccccaaaagaaccgacaatcagatgaaaacaacttaaaagaccctgggggctccgagttcgactcgatcagcaaaaacacatgggctcctgctcctgacacatgggctcctgctcctgacc

SEQ ID NO: 4197 - DNA, 461 bp, Homo Sapiens
attttcaaatataaattgtgtatctttatttttaaagtatttgttactatgttcactttcaaaacactatactgagcaaagagcagctttcctttaaaaaaaaaaaaagcaacaaactttcctgaaaaggggcctttaccaactgttaatggaggtagggtttttaaaaatacagtaattagagccacaaaatatattccaaaccaaatactagagcagaagtagagcatattcaaatgaaaacaacaacagattcctacagttttcacagagaatgaatcttttttcttatgggtacctaggttttccagttaaataaattatctatcacaggtttactgactcaattgaaagcaattaactgtaaaatttgttacattgcactgattggccaaaacacaatgtaactaataaacatggtggctgttaagaaaacccacagaactcattccaaaaaagat

SEQ ID NO: 4198 - DNA, 241 bp, Homo Sapiens
  misc_feature (122)..(122): n is a, c, g, or t
  misc_feature (229)..(229): n is a, c, g, or t
ggtgaccagaatgtcagtgcagttggcagctgagggtgtttgtgtgacctgaggtcaccccttgtaagaggctccctggggcctgcatggtacatcctcccctctcctgggggaacccagcntggcccaggatttgtggattgcttagaaagatccttttgggcagcctgaagactggggagggttttcctccctcctccacctccacccacattccacttaccctttncctcctcatccc

SEQ ID NO: 4199 - DNA, 491 bp, Homo Sapiens
  misc_feature (273)..(273): n is a, c, g, or t
  misc_feature (384)..(384): n is a, c, g, or t
  misc_feature (398)..(398): n is a, c, g, or t
  misc_feature (463)..(463): n is a, c, g, or t
  misc_feature (476)..(476): n is a, c, g, or t
atacatttagtttctattagtcaaaaagaccttggagacatttccttcattaggtggcaagaaagaaaagatggagaaaaggataaacttaatataagaatccacagagcagtagtttgatagatatctgagaatagtaggaaaaaaattgggtaatcccaaaataaatcagtgatttcagtatgaagttttctcaacataaatctgctataattaaaaattacaggccttcaggaagtgtcgagtctgggacgcccagcgcgggcccgagcngggggaagggaagcgcctcgggtccgcgtgggtggaggggacgtgaagccgccctgagatgatggttgaggaagggctctacggctcccaagctaggccaaatgcctccgngggcgcgccgggcncctttcccctgtgggcaaaccctagcttgggacgcgtgaaccacctccgtagctgccccaccagnacccccagccgtnggccctggaccatgc

SEQ ID NO: 4200 - DNA, 2164 bp, Homo Sapiens
gaattcggctttaggaggtccccgggttgccggcggcgacagcgggggaagcatgactgctgtgggccgaaggtgccccgcgctggggtcccgaggggctgctggagagccagaggctggcagcgactatgtgaagttctccaaggagaagtacatcctggactcatcgccagagaaactccacaaggaattggaggaggagctcaaactcagcagcacggatctccgcagccatgcctggtaccatggccgcatcccccgagaggtctcggagaccttggtacaacgcaacggcgacttcctcatccgggactcgctcaccagcctgggcgactatgtgctcacgtgccgctggcgcaaccaggccttgcacttcaagatcaacaaggtggtggtgaaggcaggcgagagctacacacacatccagtacctgtttgagcaggagagctttgaccacgtgcccgccctcgtgcgctatcatgtgggcagccgcaaggctgtgtcagagcagagtggtgccatcatctactgcccggtgaaccgcaccttcccactgcgctacctcgaggccagctatggcctgggacaggggagtagcaagcctgctagccccgtcagcccctcaggccccaagggcagccacatgaagcggcgcagcgtcaccatgaccgatgggctcactgctgacaaggtcacccgcagcgatggctgccccaccagtacgtcgctgccccgccctcgggactccatccgcagctgtgccctcagcatggaccagatcccagacctgcactcacccatgtcgcccatctccgagagccctagctcccctgcctacagcactgtaacccgtgtccatgccgcccctgcagccccttctgccacagcattgcctgcctcccctgtcgcccgctgttccagtgagccccagctgtgtcccggaagtgccccaaagacccatggggagtcagacaagggcccccacaccagcccctcccacacccttggcaaggcctccccgtcaccatcactcagcagctacagtgacccggactctggccactactgccagctccagcctcccgtgcgtggcagccgagagtgggcagcgactgagacctccagccagcaggccaggagctatggggagaggctaaaggaactgtcagaaaatggggcccctgaaggggactggggcaagaccttcacagtccccatcgtggaagtcacttcttccttcaacccggccaccttccagtcactactgatccccagggataaccggccactggaggtgggccttctgcgcaaggtcaaggagctgctggcagaagtggatgcccggacgctggcccggcatgtcaccaaggtggactgcctggttgctaggatactgggcgttaccaaggagatgcagaccctaatgggagtccgctggggcatggaactgctcaccctcccccatggccggcagctacgcctagacctgctggaaaggttccacaccatgtccatcatgctggccgtggacatcctgggctgcaccggctctgcggaggagcgggcagcgctgctgcacaagaccattcagctggcggccgagctacgggggactatgggcaacatgttcagcttcgcggcggtcatgggtgccctggacatggctcagatttctcggctggagcagacatgggtgaccctgcggcagcgacacacagagggtgccatcctgtacgagaagaagctcaagccttttctcaagagcctcaacgagggcaaagaaggcccgccgctgagcaacaccacgtttcctcatgtgctgcccctcatcaccctgctggagtgtgactcggccccaccagagggccctgagccctggggcagcacggagcacggcgtggaggtggtgctggctcacctggaggccgcccgcacagtggcacaccacggaggcctgtaccacaccaatgctgaagtcaagctgcaggggttccaggcccggccggagctcctggaggtgttcagcacggagttccagatgcgccttctctggggcagtcagggtgccagcagcagccaggcccggcgctatgagaagttcgacaaggtcctcactgccctgtcccacaagctggaacctgctgtccgctccagcgagctgtga

SEQ ID NO: 4201 - DNA, 484 bp, Homo Sapiens
ttttttttttttttttttgattatgaggcattttaataagggtttacgttctctgaattacagggtttcaaaataaggcgtaactatgattcaattcacttctaaaacactttggatgacaaaactacgtagtacaaggcaggggccaattcctaaaccaacctcgttctcccacagaccttcctaaggaaactttaagggctgcgaaggcaattgagtctggactttgcgaaaggccttcctgtacggggcccctaaatttctcatctcatttctgggccaggaacgaggagtctttccctctatgattagggctttcgtagatgtaccgcctttcctggaatccaagtggatgtggagcccatggcgtcctctggcgctctcggcctcttcgacccctttttactgtgttgatgataaatggggcaggattcccctcctgcaccacctgcagcatcctgtccaggatccatctgggagctga

SEQ ID NO: 4202 - DNA, 12465 bp, Homo Sapiens
gaagatggcggcggcggcggcggtgacggcgcttcccgtgcggctgaggacgatccgccagtgagcgcggagactgcttccacttcgggcgggggagccccggaccgaatcggctctctaggccgtggagcttgccgtcccacctccgtccaaatcgacctttcctttctatccccaaccacccctcaacccctgttttcccctgccttccttgcagaggccatggaggacgaggagagacagaagaagctggaggccggcaaagccaagcttgcccagtttcgacaaagaaaagctcagtcggatgggcagagtccttccaagaagcagaaaaaaaagagaaaaacgtcaagcagtaaacatgatgtgtcagcacaccatgatttgaatattgatcaatcacagtgtaatgaaatgtacataaatagttctcagagagtagaatcaactgtgattcctgaatctacaataatgagaactctacatagtggagaaataaccagtcatgagcagggcttctctgtggaactggaaagtgaaatttcaaccacagcagatgactgcagttcagaggtaaatggttgcagttttgtgatgagaacaggaaagcctacaaatttattaagggaagaagaatttggtgttgatgattcttattctgaacaaggagcacaagacagtccgactcatctagagatgatggaaagtgagttggctgggaagcagcatgagattgaagagctaaacagagagctggaagaaatgagggttacctatgggactgaaggactgcagcagttacaagaatttgaagctgccattaaacaaagagatggcattataacccagctcactgctaatttacaacaagcaagaagagaaaaggatgagacaatgagagaatttttagagttgacagaacagagtcaaaaattacagattcaatttcagcaattacaggctagtgaaactctgagaaacagcactcatagtagcacagctgcagacttactacaagccaaacaacagatcctcactcatcaacagcagcttgaagaacaagaccacttattagaagattatcagaaaaagaaagaagacttcacaatgcaaattagtttcttgcaagagaaaattaaagtatatgaaatggaacaagataaaaaagtagaaaactcaaataaagaagaaatacaggaaaaggagacaatcattgaagaattaaacacaaaaataatagaagaagaaaagaaaactcttgagctaaaggataaattaacaactgctgataaattactaggagaattacaagaacagattgtgcaaaagaaccaagaaataaaaaacatgaaattagagctgactaattctaagcaaaaagaaagacagtcttctgaagaaataaaacagttaatggggacagtcgaagaacttcagaagagaaatcataaagacagccagttcgaaactgatatagtacaacgaatggaacaagaaacacaaagaaagttagaacaactccgggcagagctggatgagatgtatgggcagcagatagtgcaaatgaaacaagaattaataagacaacacatggcacagatggaggaaatgaaaacacggcataagggagaaatggagaatgctttaaggtcatattcaaatattacagttaatgaagatcagataaagttaatgaatgtggcaataaatgaactgaatataaaattgcaagatactaactctcaaaaggaaaaactcaaggaagaactaggactaattttagaagaaaagtgtgctctacagagacagcttgaagaccttgttgaagaattgagcttttcaagggaacagattcagagagctagacagacaatagctgaacaagaaagtaaacttaatgaagcacataagtcccttagtacagtggaagatttgaaagctgagattgtttctgcatctgaatccagaaaggaactagaattaaaacatgaagcagaagttacaaattacaagataaaacttgaaatgttagaaaaagaaaagaatgctgtgttagacagaatggctgaatcacaagaagctgaattagagaggctgagaacacagcttctatttagtcacgaagaagagctttccaaactgaaggaagatttagaaattgaacatcgaataaatattgaaaaacttaaagataatttaggcattcactataaacagcagatagatggtttacagaatgaaatgagtcaaaagatagaaaccatgcagtttgaaaaggacaatttgataactaagcagaatcaattaattttggaaatttcaaagctaaaagatttacagcagtctcttgtaaattcaaagtcagaagaaatgactcttcaaatcaatgaacttcaaaaagaaattgaaatactcagacaagaagaaaaagaaaagggtacacttgaacaagaagttcaagaattacaacttaaaacagaattgttagaaaaacagatgaaggaaaaagagaatgatcttcaagaaaaatttgcacaacttgaagcagagaatagcattcttaaagatgaaaagaaaacccttgaagacatgttgaaaatacatactcctgttagccaagaagaaagattgattttcttagactccattaagtccaaatccaaagactctgtgtgggaaaaagaaatagaaatacttatagaggaaaatgaggacctcaaacaacaatgtattcagctaaatgaagagattgaaaagcaaaggaacactttttcatttgctgaaaaaaactttgaagttaactatcaagagttacaagaggagtatgcttgccttctcaaagtaaaagatgatttagaagacagtaaaaataaacaggaattagagtataaaagtaaacttaaagcacttaatgaagagcttcatttgcaaagaataaatccaactacagtgaaaatgaaaagttctgtctttgatgaagacaaaacttttgtagcagaaacattggaaatgggtgaggttgttgaaaaggatacaacagaactcatggaaaaacttgaggtaaccaagcgagagaaattagagctgtcacagagactgtctgatctttctgaacaattgaaaccgaaacctggtgagattagttttctaaatgaagaagttaaatctttaaagccagagaaagaaccagtttcattgagatgtagagagctagaaatcattattaaccacaaccgggcagaaaatgtacagtcatgtgatactcaagtaagctctttattagatggagttgtgactatgaccagcaggggtgctgaaggatcagtttctaaagtaaataaaagttttggtgaagaatcaaaaataatggtggaagataaagtttcttttgaaaatatgactgttggagaagaaagtaagcaagaacagttgattttggatcacttaccatctgtaacaaaggaatcatcacttagagcaactcaaccaagtgaaaatgataaacttcagaaagaactcaatgtacttaaatcagaacagaatgatttaaggctacagatggaagcccaacgcatttgcctctctctggtttattcaactcatgtggatcaggttcgtgaatatatggaaaatgaaaaagataaagctctttgcagtcttaaagaagagcttatttttgctcaagaggaaaagatcaaggaacttcagaaaatacaccagttagaactacagactatgaaaacacaagaaacaggtgatgaaggaaagcctttacatctgctcattggaaaacttcaaaaggcagtgtctgaagaatgttcttattttttacagactttatgcagtgtccttggtgaatattatactcctgctttaaaatgtgaagtaaatgcagaagacaaagagaattctggtgattacatttctgaaaatgaagatccagaattacaagattatagatatgaagttcaagactttcaagaaaatatgcacactcttctcaacaaagtaacagaagaatacaacaaactcttggtacttcaaacacgactaagcaagatctggggacagcagacagatggtatgaaacttgaatttggagaagaaaaccttccaaaagaggaaacagagtttttatcaatccattctcagatgaccaatttggaagacattgatgtcaatcataaaagcaagttatcttctctgcaagatcttgaaaaaactaaacaacttgaagaacaagttcaagaattagaaagcctcatatcctctttgcagcaacagttgaaagaaactgaacaaaactatgaggcagagatccactgtttacagaagaggcttcaagctgttagtgagtccacggttccgccaagcttacctgttgattcggtggtaattacagaatctgatgcacagagaacaatgtaccctggaagttgtgtgaaaaagaatattgatggtacaatagagttttctggtgaatttggagtgaaagaggaaacaaatatcgttaagttgcttgaaaaacaataccaagaacaattagaagaagaagtagctaaggttattgtgtcaatgagtatagcatttgctcaacaaactgaactgtctagaatatctgggggaaaagaaaatactgcatcatcaaagcaagcacatgctgtgtgtcagcaagaacaacattattttaatgaaatgaaattatcacaggatcaaattggttttcagacttttgagacagtggatgtgaaatttaaagaagaatttaaaccacttagtaaagagttaggagaacatggaaaggaaattttattatcaaatagtgatccccatgatataccagaatcaaaggactgtgtgctgactatttcagaagaaatgttctccaaagataaaacatttatagttagacagtctattcatgatgagatttcagtgtcaagcatggatgcttctagacaactaatgttgaatgaagaacagttggaagatatgagacaggaacttgtacgacaataccaagaacatcaacaggcaacggaattgttaaggcaagcacatatgccgcaaatggagagacagcgagaagaccaggaacagctacaagaagagattaagagacttaatagacaattagcccagagatcctccatagataatgaaaacctggtttcagagagagagagggtgcttttagaggagctggaagcactaaagcagctgtctttagctggaagagagaagctgtgttgtgagctgcgcaacagcagtacgcaaacacagaatggaaatgaaaaccaaggagaagttgaagaacaaacatttaaagaaaaggaattagacagaaaacctgaagatgtgcctcctgagattttgtctaatgaaaggtatgcactccagaaagctaataatagacttttgaagatcctcttagaagttgtaaagacaacagcagctgttgaagaaacaattggtcgccatgtccttgggattctagatagatctagtaaaagccagtcatctgccagcctaatttggaggtcagaagcagaggcatctgtaaagtcatgtgtccatgaggaacatacaagagttacagatgaatccattccctcttattctggaagtgatatgccaagaaatgacattaacatgtggtcaaaagtaactgaggaaggaacagagctgtcacaacgacttgtgaggagtggttttgctggaactgaaatagaccctgaaaatgaagaacttatgctgaacattagctctcgactacaagcagcagttgaaaaactcctagaagccataagtgaaactagcagtcagcttgaacatgcgaaagtgacacagacagagttgatgcgtgagtcatttagacagaaacaagaagcaacagagtcccttaagtgccaagaggaacttcgagagcgccttcatgaggagtccagggccagagaacagctagctgtggagctcagtaaggctgagggcgtcattgatggctatgcagatgaaaaaactctttttgaaaggcaaattcaggaaaaaactgatataatagatcgtcttgagcaggagttgttatgtgcaagtaacaggttgcaagaattggaggcagagcaacagcagatccaagaagaaagagaattactgtccagacaaaaggaagctatgaaagcagaggcaggcccagttgaacaacaattactacaggagacagaaaaattaatgaaggaaaaactagaagtacaatgtcaagctgaaaaagtacgtgatgaccttcaaaaacaagtgaaagctctagaaatagatgtggaagaacaagtcagtaggtttatagagctggaacaagaaaaaaatactgaactaatggatttaagacagcaaaaccaagcattggaaaagcagttagaaaaaatgagaaaatttttagatgagcaagccattgacagagaacatgagagagatgtattccaacaggaaatacagaaactagaacagcaacttaaggttgttcctcgattccagcctatcagtgaacatcaaactagagaggttgaacagttagcaaatcatctgaaagaaaaaacagacaaatgcagtgagcttttgctctctaaagagcagcttcaaagggatatacaagaaaggaatgaagaaatagagaaactggagttcagagtaagagaactggagcaggcgcttcttgtgagtgcagatacttttcaaaaggtagaggaccgaaaacactttggagctgtagaagctaaaccagaattgtccctagaagtacaattgcaggctgaacgagatgccatagacagaaaggaaaaagagattacaaacttagaagagcaattagaacagtttagagaagaactggaaaataagaatgaagaagttcaacaattacatatgcaattagaaatacagaaaaaggaatctactacccgcctacaagaacttgaacaggaaaacaaattatttaaggatgacatggagaaactgggacttgccataaaggaatctgatgccatgtctactcaagaccaacatgtgctatttgggaaatttgctcaaataatacaggaaaaagaggtagaaattgaccaattaaatgaacaagttacgaaactccagcagcaacttaaaattacaacagataacaaggttattgaagaaaaaaatgaactgataagggatcttgaaacccaaatagaatgtttgatgagtgatcaagaatgtgtgaagagaaatagagaagaagaaatagagcagctcaatgaagtgattgaaaaacttcaacaggaattggcaaatattggacagaagacatcaatgaatgctcattccctctcagaagaagcagacagtttaaaacatcaattggatgtggttatagctgaaaagctggccttggaacagcaagtagaaaccgctaatgaagaaatgaccttcatgaaaaatgtacttaaagaaaccaattttaaaatgaatcagctaacacaggaattattcagcttaaagagagaacgtgaaagtgtggaaaagattcaaagcataccagagaatagtgttaacgtggctatagatcatctgagcaaagacaaacctgaactagaagtagtccttacagaggatgctcttaaatccctagaaaatcagacatacttcaaatcttttgaagaaaatggcaaaggttccataattaatttggaaacaaggttgctacaacttgagagcactgttagtgcaaaggacttagaacttacccagtgttataaacaaataaaagacatgcaagaacaaggccagtttgaaacagaaatgcttcaaaagaagattgtaaacctacagaaaatagttgaagaaaaagtggctgctgctcttgtcagtcaaatccaacttgaggcagttcaggaatatgcaaaattctgtcaagataatcaaacaatttcatcagaacctgaaagaacaaatattcagaatttaaatcaactaagagaagatgagttggggtcagatatatcagcattaaccttgagaatatcagaattagaaagccaggttgttgaaatgcatactagtttgattttagaaaaagaacaagtagaaattgcagaaaaaaatgttttagaaaaagaaaagaagctgctagaactacagaagctattggagggcaatgagaaaaaacagagagagaaagaaaagaaaagaagccctcaagatgttgaagttctcaagacaactactgagctatttcatagcaatgaagaaagtggattttttaatgaactcgaggctcttagagctgaatcagtggctaccaaagcagaacttgccagttataaagaaaaggctgaaaaacttcaagaagagcttttggtaaaagaaacaaatatgacatctcttcagaaagacttaagccaagttagggatcacctcgcagaggcaaaagagaaattgtccattttagaaaaagaagatgagactgaggtacaagaaagcaaaaaggcctgcatgtttgagccacttcctataaaactgagtaagagcattgcatcccagacagatgggactctgaagatcagtagcagcaatcagactccacaaattcttgttaaaaatgcaggaatacaaattaatttacagagtgaatgttcctcagaagaagttactgaaataatcagtcagtttactgaaaaaattgagaagatgcaagaactacatgctgctgaaattttggacatggaatccagacatatttcagaaactgaaaccttaaagagggaacactatgttgccgttcagttactgaaagaggaatgtggtaccttgaaggcagtgatacagtgtctgagaagtaaagagggatcctcaattcctgagctagcacattctgatgcttaccagactagagaaatatgctccagtgattctggatcagactggggtcagggaatttatcttacacacagtcagggatttgacatagcatcagaaggccgaggagaagaaagtgaaagtgcaacagattcctttccaaagaaaataaagggattactgagagctgtccataatgaaggcatgcaggtgctttctctcactgagtctccctatagtgatggagaggaccattctattcagcaggtttcagaaccttggctagaagagagaaaagcttacatcaatacaatctcatctctaaaggatttaattacaaagatgcaactgcaaagagaagccgaggtttatgatagttctcaatctcatgagagcttctcagactggcgaggtgaactactgcttgcccttcaacaagttttcttagaagagcgtagtgttttactagcagcatttcggacggagctgacagctctaggtactacagatgcagttggtttactaaactgtttggaacagagaatacaagaacagggtgttgaatatcaagcagctatggaatgcctccagaaagcagatagaaggagtttgttatctgaaattcaggcactgcatgcacaaatgaatggtaggaaaattactctgaaaagagaacaagagagtgagaaaccaagccaagaactcttggaatataatatacagcagaagcagtctcaaatgctggagatgcaagtggagctcagcagtatgaaagacagagcaacggaactgcaggagcagctgagttctgagaaaatggtggttgctgaactgaagagtgagcttgcacaaactaaattggaactagaaacaacactcaaggcacagcataaacacctaaaagaattggaggctttcaggttggaagttaaagataagacagatgaagtacatttgcttaatgacacattagcaagtgaacagaaaaaatcaagagagctccagtgggctttggagaaagagaaagccaagttgggacgcagtgaagaacgggataaagaagaacttgaggatctgaagttttcacttgagagtcagaaacaaaggaatcttcagctaaatctacttttggaacaacagaaacaactactgaacgaatcccagcaaaaaatagaatcacagagaatgctatatgatgcccagttgtcagaagaacaaggtcgaaacttagagcttcaggtacttcttgaatctgagaaagttcgaattcgggaaatgagtagtaccctagatagggagcgggaattgcacgcacagctgcagagcagtgatggtactggacagtctcggccacccttgccctcagaggacctactgaaagagctgcagaaacagctagaggaaaaacacagtcgcatagtagaattgttaaatgagactgaaaaatataaactggattctttgcaaacacgacagcaaatggaaaaagataggcaggttcacaggaaaacactgcagacagaacaggaggccaacactgagggacagaaaaaaatgcatgagctccagtccaaagtggaagatcttcagcgccagctggaagagaaaagacaacaagtttataagttagaccttgaaggacagcgactacaaggaatcatgcaggaattccagaagcaagaactagaacgagaagaaaaacgagaaagtagaagaattctgtatcagaaccttaatgagccaaccacgtggagcttaaccagtgatagaactagaaattgggttcttcaacagaaaatagaaggagaaacaaaagaatcaaactacgctaaattgattgaaatgaatggaggaggaaccggctgtaatcatgaattagaaatgatcagacaaaagcttcaatgtgtagcttcaaaactacaggttctaccccagaaagcctctgagagactacagtttgaaacagcagatgatgaagatttcatttgggttcaggaaaatattgatgaaattattttacaactacagaaattaactggccagcaaggtgaagagcccagcttggtgtccccaagtacttcttgtggctcattgactgaaagactactgagacaaaatgctgagctgacagggcatatcagtcaactgactgaagagaagaatgacttaaggaacatggttatgaagctggaagagcagatcaggtggtatcgacagacaggagctggtagagataattcttccaggttttcattgaatggtggtgccaacattgaagccatcattgcctctgaaaaagaagtatggaacagagaaaaattgactctccagaaatctttgaaaagggcagaggctgaagtatacaaactgaaagctgaactaagaaatgactctttacttcaaactctgagccctgattctgaacatgtcactttaaagagaatttatggtaaatacttgagggcagaaagttttcgaaaggctctcatttaccagaagaaatacctgctgctgttactgggtgggttccaggaatgtgaagatgccaccttggccctgcttgcccggatgggggggcagccagctttcacggatctagaggtgatcaccaatcgcccaaagggcttcaccaggtttcggtcggccgtcagagtatccattgcaatttccagaatgaaatttttggttcgacggtggcatcgagtcacaggttctgtttccatcaatattaacagagatggctttggactgaatcaaggtgcagaaaagactgactcattttatcattcttctggtgggctggagttatatggagaaccaagacatactacgtatcgctcaagatcagatctggactatattaggtcccctttaccatttcagaataggtacccaggcactccagctgatttcaatcctggttctttagcatgttctcagcttcagaattacgatcctgacagagccctaacagattatatcactcggctagaggcactgcaaagacgacttggaactatacagtcaggttcaactactcaatttcatgctggcatgagaagataatcctttgaaacatcattaattgaagtgattttaaatagatttccttttgtaaatcaatggttcttttgtgcttttgtattgtgaatattcaatgggaccaatatgaacacagcttatgattgtatacaaatcccttgccagcacatgaaaacaaactggaatttgtatatataagcattgtgtatgtattcatgcacaataattattgaattacctgtatatttgtggaatgctaatttaaaacattaaattataaaccttgtgtatttatcaaatgggtgaaaagattaaacttttacgcattacaatactgctgaatgtgtagctcgaggtgtcctgcacttttcttataaggctactgaagttacatgttttgcctaatatattctactggtgatgaagacagataatatcacttgtagagacctatttttgtataatggtagaagttttgaattttatggggtattttgtcaagtactgaaataaaaatgacttcaccattttcaccacact

SEQ ID NO: 4203 - DNA, 326 bp, Homo Sapiens
gtcatgctctgcttagcacagaacatggcagtgtagtggaagccattactactcttagttatatgtcagtatttgcagaatacaggccctaccaaattctctattactttgcagtgtagcaaaaaggtgaggagctttaggtggacaaggtatctattaccagaattcaccactgtctccaatcatgggatctttagcaccatccttacaaaaatgaaaggccatcctacacctaagaagtcctcacaggagaggtatttgatattcctagaaaaggtattgtagatgaaactggaattaatttccctgctagaaacaatttaccc

SEQ ID NO: 4204 - DNA, 452 bp, Homo Sapiens
  misc_feature (11)..(11): n is a, c, g, or t
  misc_feature (24)..(24): n is a, c, g, or t
  misc_feature (35)..(35): n is a, c, g, or t
  misc_feature (38)..(38): n is a, c, g, or t
  misc_feature (40)..(40): n is a, c, g, or t
  misc_feature (347)..(347): n is a, c, g, or t
  misc_feature (399)..(399): n is a, c, g, or t
  misc_feature (411)..(411): n is a, c, g, or t
  misc_feature (437)..(437): n is a, c, g, or t
ttcggcacagnagagcgagcgcgnctgcagcccgncantnggctagcacggcttcggagatcatcgccttcatggtctccatctcaggctgggtactggtgtcctccacgctgcccaccgactactggaaggtgtctaccatcgacggcacggtcatcacaaccgccacctattgggccaacctgtggaaggcgtgcgttaccgactccacgggcgtctccaactgcaaggacttcccctccatgctggcgctggacggttatatacaggcatgtagaggacttatgatcgctgctgtcagcctggggcttctttggttccatatttgcgctctttggaatgaagtntaccaaagtcgggaggctccgattaaagccaaagttaaaattgctttgtttnggctggggattntaattcataattgtcaagggttgtgntcaatgattggatgt

SEQ ID NO: 4205 - DNA, 3252 bp, Homo Sapiens
ggggtgaaccgtgacagcgcttcggcccgcactaaggccggctcttgtgccggaaggaggaaggcgtggggcattcgcccctcggagctagggagtgtgtgcgacgccgctgcgaggtcacgtgagccactgccggcagagagggaaaggggcggggcccagaacgaagcggggaggcgccccttgtttccctggggtcacgcgcagccggaagtggcggctgctgcggagaattggagatggggaccgccctggacatcaagattaaaagagcgaataaagtttatcacgccggggaagtgctctctggcgtggtggtcatatcgagtaaggattcagtccaacaccagggagtgtctttgaccatggaaggaactgtaaacctccagctcagtgccaaaagtgtgggtgtgtttgaagctttttataattctgttaagcctatccagattatcaacagcaccatagaaatggtgaagccggggaaatttcccagcggcaaaacagaaatcccttttgaatttcctctgcacttgaagggtaacaaagttctgtatgagacgtatcatggcgtgtttgtcaacattcagtatacactgcgctgtgacatgaagcggtctctgttggccaaggacttgacaaagacctgtgaatttatcgttcactccgctcctcagaaggggaagtttactcccagtcccgtggacttcacgattacacctgaaaccttacagaacgtcaaagagagagctttgcttcccaaatttctccttcgaggacatctcaactcaacaaactgtgtcatcacgcagccactaacgggagagctggtggtggagagctcggaagccgccatcagaagcgtggagctgcagctggtgcgcgtggagacgtgcgggtgtgcagaaggctatgcccgcgacgccacggagattcagaacattcagatcgccgacggggatgtgtgcaggggcctctctgtccccatctacatggtcttccctaggctgttcacctgccctacactggagaccaccaacttcaaagtggaatttgaggttaacatcgtggtgctgcttcaccctgaccacctcatcacggagaacttcccgctgaagctctgcaggatatagcccggaggagggaagcatagagaacgggagtggccatctggaaatccagctggttatccaaatcctaaggggagctacagccagcggcatatacttgtttttgtgattattctgtatcagaaatgaaacagaccctcaaattaactttccttcctcatttcttgaggcttctgcttccaacaggcacctctaatcagaccttttctttgaaattcaacaagatttcttaatgctatttgccaagaccatttcacagaaaacattgactgtggctcttgccttatctgttcctttttaggtacagtaaaacaattgtgacagcagtttgagcttgctggagagtggcatcatggggacaaaaggaaacctctgacttgctaatggatgtagccagggactccccatagcaaagggtctgtggccagttgacatccaggatggctgcaagcgcacttgatggtcaggaagtttgcagatactcgccaaggcagagcgcaaagtgctagccactggaaatgcatgacttccctccacccctactctattctgtagttttttggttttgtttctgagacggagtctcagtctgtcacccaggctggagtgatctcagctcactgcaacctccacctcccaggttcaagcgactctcctgcctcagcctcccgagtagttgggattacaggtgactgccaccgtgcccggctaatgtttgtatttttagtagagacggggcttcaccatcttggccaggctggtcttgaactcctgacctcgtgacccacccgccttggcctcccaaagtgctgggattacaggtgtgagccaccacacccagcctctgtagttctttttacaacatttttcattataactttaaattttttaagcaactggaaaagtgttccttgctctcttggggggatttggctggtgccgaagtgtttctgaagtctcaagaactgccataaaatctcacgctgccatttccctgaacagatacatacatagagagagacagttttccaaactgtgtcacgcaggctgagtgcactggcaggatcacagctcacggcagcctcaacctccctggctcaagcgatccctcccctcagcctcctgagtagctgagactacaggtgagtgccaccacactcagctaattttcaaattttttgtagacagggtctccctatgttgcccaggctggtcttgaactcctagactcaagtgatcctcctgtcttggcctcccaaagtgctgagattacaggtgtgagccactgtgcccagcagtttcccagaatatatttaaatgcaaagttacatgaggggaaaacatgtatgtttgctcctgttgttactgggtaggttctgaacagcagaaacccatgtgcagggtgggctggtgaaggcccctctccgcaaggtggtagcaggaaaaggtccttgacttgatgaatttggtctgcctctgagccactggaggaagctgttttgagccagggttttttggcctaaagccagcatttcctcagtctccctttgtggttcgaaggatatggactattgcaatacatttcttccttcaaatcctgccactgttttgttggcccacaactaataggacctcaaaataagccatgctgctttgcacacacactagccttcttttgtacttttcattctggatgggcttggccaaaacaggctcaggccaaagacctcccaagctgtatgtacttccagtatcctgaaacagtgtttggtgacataatgccaagggtaaacaagcctgatttaggcactgctttatccaggggcttcacccatgaaattaataaaacttatctgagtcacttgaaacttggttcccagaaaacacatttctggtttataatctccttttatgctcacctgacattaattatctatccttgatgatgtgtttaaactgagtagcagaaaacagaggccacactttctgggaaattttaaaggaagaaaccatttttaatgagatgaaaatatttaacgaatttaaaaagctaatgacaattttgagaaaaggtttgggatgtatattgctatgtaatttaataaactgattttatggatat

SEQ ID NO: 4206 - DNA, 4932 bp, Homo Sapiens
gcgcggcccgggcgcggggcggcggcagcggcggcgcgcggggaggcggggaggcggggggcccggccggacgcccctgcgccccctccccgcgccccggccgagggcggagcgcgctggccctgcagcctccggcccgcccccggcccgccgcctcccccgggacgtgggacgcgggcgcaggcggggtccgcgcggcgggcggcgggggacgggcggagtcaaaagtctattgaaaaagcagagagagaatgcctcggtgtgtaagtggagtgatgaggacctgatctctgggccgtgtgggaacactggctgccatttcatcacagtcaacctggactcacagaatttcaagagcttgtcggttgggtcaagaatgaacctacgcatgacggcgtgctgatcctgggtttctagtcatcctttttaagctgcaaagaagcatttgcagacgttgtctcatgggtaccgcttgccaactttggaggatgtgaagccggtagagaaataaagcatcgcccctctgcgcgcccctccccgtctgctagaatgtttctcatgaacgcttctccagtggttgctctccagtccaaatgggaggcctttggcccgccagggagctgtaggttccccaggtgcttctcggaggctgacgagggcgtggagagcgcgtcggtgagcgcccgggtgcagatgcttatcagcactctgcagcgcgacggggctgctcggggcaccagcgatgagcgcgccgcacagaggggccacagggcagagggatgccacgacgccaggccggctgccaagcccaccgtgcacaaggagccacccgcgttggctgtctgtggtctcgttgctgactttgaccccatgggggaggaggaaactacagactttggcccgttggtgctagattcagacagtgatgattccgtggacagggacattgaggaggccatccaggagtacctgaaggcaaagagtggagccgcacagcccggggccggcggggcccagccaggtgcagcccagccttccagggccgcaggcggaggcagtagatgtaagccggaaccggctcacggcagtgccccgactgccctgtgtcccccaaaacttgtacctggatcaggtggtggccccggcagccaggtgggatccagcaaggaccagggctccgcctccccggtcagtgtgagcagcgatgactccttcgagcagagcatcagggcggaaatagaacagtttctgaatgagaagagacagcatgagacccaaaaatgtgatgggtcagtggagaagaaaccagacacaaatgaaaattccgccaagtcactcttgaaatcccaccaagagccgcctacaaaggtggtgcatcggcagggcctgctgggcgtccagaaggagtttgccttccgcaaacctccccggttagcgaagatgaacgtccagcccagaagcctcaggtccaaggtcacaaccacgcaggagaacgagggcagcacgaagccggcaaccccctgccgcccttcagaagcagcacagaataaaggtgggatcaaaaggagcgccagcgctgcaaggaggggaaagcgagtcatgagtgcggcacaggcgtccgaggcgtccgactccagcagcgacgatggcattgaggaggccatccagctgtaccagctgcagaaaacacgcaaggaggccgacggggacctgccccagagggtccaactccgagaggagagagcgcctgaccctcccgcacacagcacaagcagtgccacaaaaagtgccttgcccgagacccacaggaaaacacccagcaagaagaagctagtggccaccaagaccatggaccctggtccagggggcctggacactgaccatgcccccaagctcctgaaggaaaccaaagctccacctccagcgagccctgcttccaggagtgagtttgtggaacggtcctcgtgccgggcggacacatctgctgagctgatgtgtgcagaagcaatcctggacatctccaagacgatcctgccggcccctgtagagggcagtgacgggtccctgtccgcaagcccactcttctactccccgaacgtgccttcccgctctgacggcgacagtagctccgtggacagcgatgacagcatcgagcaggaaatccggacatttttggccctaaaggcgcagtcagggagtttgctggccagaggtgagagctgcccgcaggctgcccagggtccacttttgccgcctggcctcaacagccagaccggcggccacaagacccctctctctaaaacaccagacccactgctgggctgcaaaaggaagcgtagaggtggtggccatgtgaggccatccacgcccaagaaaatgcaggaggtggtgaaagacggtagccaggatgccgaccacagccaggggagagctgagcccggccatgagaggcgagacctgcccatccagggcaaagccagtgaggccctgggaggggagggcaccgccaggggccctggcgacactcgcatgtcacagggccagggtaagacagacgaggcaaggcgcctagacgagaaagagagctctgaagacaaaagcagctccctggacagtgacgaggacctggacacagccatcaaggacttgttaaggtccaagcgaaagctcaagaagaggtgcagggagcccagggctgcgtgcaggaagaaggtcaggttcagcacagcccagacgcacttcttggagcagctgggcgggctccggagagactggaaagacaggggcccgccagtgctgaagagctgcctctccaagtccaagagagacagtggcgagggtcctgggaagaaaccccccagtgtctttggcagcacggcagagaggatgaggcaggagggtgccgcgagccaggacgcggccctggccttccgggtgaggagacccgcctccgcctctgcctccgaagggaatccattccccagggagtcccagggcccagctcccagccccggctccctgtctgatgacagcagttcagtggacagcgacgacagcatcgaactggagattaggaagtttttggcggaaaaggccaaggagtcagtgagcagttcagaagttcaggcagagggccccaccgctcttgggacagggggcccagccaggccagaggtgctgtgcaggaaggagccggccccaccgcctggcgtgtgcacacgcagccagagggccaggggggtcccacatctggccgaagggcttcgaggcacagagagcgcaggagcacagggcacagctggtctgttcagccagggcgggaaggggctccctgctgctcctgcccgaggggatccggtgccgcccaggagcaccagcggcggtgtctccgccaaggggctctcagtgagcaggagaaatgtttacgttcacaaagaccagagcccacgaggggctgagcctgctgccaaaagtgcttttggtcagctgcccagctgtgccacagcgggcaccgaggcaggaggcgccagaggaacctttcacatgggctgcgggagcccgagcttcctgacccccagcccgggagcggagagggacgctggagcccaggccgaccgcacaccgccctggagcgacttcgcccaccagagtcggctgcccagcccgtgggtgctgcgctccgaaggcagagatgcagtgtggagggggggcgtcgggagcgagagagacaaggggtccgagggccccgcccggggcctgcccagcctgccccttgcgggcttctcgccgctgctgtccacccagctcttccactttggaaagggtgtctcctgggggggcaggcaggctggcctcttcagcccccacctggggctgcctctgcagggcccctccttctcggccttcagggaggcccaggccggacccagccctgtctttggaagcccacacttgctggcaaagaaggacggcggcccctggccaaccaggaaggcacaggcagggctgagtttgcatgacaggaggagctcgggctcggaggaaagcattttagacctgaggtatcgacgaagggtcaacagggatgaccaggagcaggacgccttgggcagtgacgccagtgacttcagcgacacctccacggaggacagtggcggcagctcagtagtgaaggtctaagccctcgagctgtgggttcgcgtcctgggttgcgtgcattcgtggaaagcggcgtagccgtgcgtgtgtgtgatggttccgtggctgcaaggaagggaaacagtctattatacatagccctgtatatatgtacaccaacatgaaacttttatttaacagacgtgtcctggtaaatatgatttttgtagctttttgtaaattatttaaagtgatgtaaaagatatttttggaaaatactgttgttcaattttgtagggtgttcctaactgcagttttctgtgttctgcatacaagtcttagcttaggaaacatttggttcttaccatcacagccaggttcacagaggctctgatgctttttggttgattgctggtgagaatggccggcggtggctgcagtggtagcctgaggaaggccaagctgccctccctgggaatcactcagatgccccaagatgtccgttgggaagctcccaggacagcactttttatacagaggacaccgcctcggccccacgtccttagaggccagagcacatctgaaaactgcaatcacagccgtccgctggaaaaacgtttcgaagcacagtggccagcgagcgagcacgtggctactccctgttgcatgtcaaatccacacagatgtcagcggcagctgctcggcagcccagccctgggcctgggtgggttcatgtccaatcttgttcgatcactagatgattctaacatcgaaataaacctctttttatatggc

SEQ ID NO: 4207 - DNA, 1812 bp, Homo Sapiens
gttcccaatcagtttccagccaacaccagggtgtcctagtccgcagaggtgtgggggacacactccataatctctacttttctttttgtgcagctgagtcatggagctttcagccccagcacatggctcctccttaactgcgtctgctcaacctccctcagccctgtgaacagcatccccgcacacagacgcagagcaggactctctctgctgccacttcaccttcctgagagaggaccagcggccagagcctcagtgactgccaccctggaggacagggcacaacaaccgtttctgaagagaatgggaggattccagaggggcaaatatggaactatggctgaaggtagatcagaagataacttgtctgcaacaccaccggcattgaggattatcctagtgggcaaaacaggctgcgggaaaagtgccacagggaacagcatccttggccagcccgtgtttgagtccaagctgagggcccagtcagtgaccaggacgtgccaggtgaaaacaggaacatggaacgggaggaaagtcctggtggttgacacgccctccatctttgagtcacaggccgatacccaagagctgtacaagaacatcggggactgctacctgctctctgccccggggccccacgtcctgcttctggtgatccagctggggcgtttcactgctcaggacacagtggccatcaggaaggtgaaagaggtctttgggacaggggccatgagacatgtggtcatcctcttcacccacaaagaggacttagggggccaggccctggatgactatgtagcaaacacggacaactgcagcctggaagacctggtgcgggagtgtgagagaaggtactgtgccttcaacaactggggctctgtggaggagcagaggcagcagcaggcagagctcctggctgtgattgagaggctggggagggagcgagagggctccttccacagcaatgacctcttcttggatgcccagctgctccaaagaactggagctggggcctgccaggaagactacaggcagtaccaggccaaagtggaatggcaggtggagaagcacaagcaagagctgagggagaacgagagtaactgggcatacaaggcgctcctcagagtcaaacacttgatgcttttgcattatgagatttttgtttttctattgttgtgcagcatactttttttcattatttttctgttcatctttcattacatttaaatctctggaccctggagcacttctaatgtatcaccccatggagtcattgttctaataatcaccaattcagactcagatcctcgtggtctatggagcatgctgcttgctgtctgtgcagctcccatttccccttcttcctgatagacttggagctgtgtgcctccactccaaggctgcctgcctgctgtaaacactattccactctgtctgccaacaactgcttcaggaatgggcctgagatcccatgcaggtccctgagaagtgagtaaaagtccgcagaggtggggatggaagatctctccttagatagaacctgtcttcctccctggcattgtggggtctgggcgtgacactgggactctcagcagctttgtgctgccaacctgagattgaaggcagtgcctcagagcagcacagagagttggggccccctgagccctgagccaccagccctgcagcctgccctatctccgcatttccagttgtattagccaatagatttcctacttatttaagctatttgagctccgggtctcttctacctgcattctaaaacattcaaagtaataaaaatttctccacatt

SEQ ID NO: 4208 - DNA, 406 bp, Homo Sapiens
agaccacagaaagtctaacgcctggaaggstccartcrtmctgctgagtaaacacagagaccccattttccagagacccactgkagaggtggtgcaaagagccgaaaacacatatgcttctctgtggcttccattcttgagtgcgtaatgagtgttgtaataaagaaaagtgaaaatgaagattcagttattaataaatgttggggggaaaagacagaacctggtatttgtcctggcaggtcagcctcctagctgtgtgatgctggacggtgatttcgcttcttgaaatttcagtttccatttctgtaaaatgggaaggttgtactagaagatctccagggtctattttgaaatgaactctcccaacgttgcaatgataagcgctctcagttcatgtgcagcgttg

SEQ ID NO: 4209 - DNA, 718 bp, Homo Sapiens
  misc_feature (216)..(216): n is a, c, g, or t
  misc_feature (459)..(459): n is a, c, g, or t
  misc_feature (706)..(706): n is a, c, g, or t
tttttttttttttttttgagaattaggacagtttattgtttgaccaacatgctgagtcttttccacattttacacagtttaatgtgaaatcaacatggcggctatgtcttctgagcccataacaaatggaattgccaccctttgtgctcctcacagccaatcactttaaagggatgggtgaggggaaagtgaggggagaagtggacacacaccccnagaatgcggctggccttcaatgctatggaggcttcccacctcctgaaggaaccatctaaacccctgctgcaaggatttcctgatgaaaccacacactgctgggagtgccaaccaaacaggggtctggagtccaaggagtttgcacattgagatcccaaggttttggaacacctaaatagttcatgtcaaacaaaaattcaaagggtgtcctgatctgtgtgggtgcccatgacaatcaatcanagtaaacttggggactggcccttgtgcagtagaggagcccaaaataccaccaatattctcactcatatgctgggaagaacctagtgtcctaaccaaaaagagtagagatggtctgaggaacacacccacccatagcagtccctgctgtgtaataaatatgagtcacatttgttccacaccaggcagcaatgggataaaaatgggaaccttaactgttctgatcacttgtaaataagctggttgcttnttccctcgtgcc

SEQ ID NO: 4210 - DNA, 310 bp, Homo Sapiens
ttttttatgttcagcaattgtttatgcctgcagaggggagtgggtgactagaggggaggaggatgatggctaaaggggccgggtttctctttgaagtgatgaaaatgctctgtcattaactgtggtgatgactgtacatatctgtgactaccccaaaacctgctgaactggaacttttgacagatgtaccgtatggcatacgaacaatatctcaacaaagagttaacgaaaaagggaaaggaaaaccttatcaaaggtttcagtcacttaaaaaattagaaccccttggtccccggaattcaatgacctc

SEQ ID NO: 4211 - DNA, 487 bp, Homo Sapiens
  misc_feature (10)..(10): n is a, c, g, or t
  misc_feature (40)..(40): n is a, c, g, or t
  misc_feature (44)..(44): n is a, c, g, or t
  misc_feature (67)..(67): n is a, c, g, or t
  misc_feature (324)..(324): n is a, c, g, or t
  misc_feature (367)..(367): n is a, c, g, or t
  misc_feature (393)..(393): n is a, c, g, or t
  misc_feature (397)..(397): n is a, c, g, or t
  misc_feature (412)..(412): n is a, c, g, or t
  misc_feature (414)..(414): n is a, c, g, or t
  misc_feature (433)..(433): n is a, c, g, or t
ctgcgcccgntctcttttttttccttttttcttttttttngggnttgagatggagtctcgctgttgntgcccaggctggagtgcaatggcacaatctctgctcacgacaacctctgcttcccgcagccaggttatctcagaagccaattttccctttagggaaagttacagaatcagccagggaagaggaatgggaggatgggctggatgatccctgttcaggcctaatccgctggcctccctggggcctccctttctttgtgccaagccctgtgctgggtgctgggaactgggaacacagaatgaatcagacatagcctttgntcccatggggctcagtctcatggggaagacaaatgtgtatcangcattattgacccaggatcatcaagngctncaataaaaagctcananggtgggttgggaaagcttnctggaagaagaagtctggaaggcttgaaggcaagtaaaagttcaagtaaccaaa

SEQ ID NO: 4212 - DNA, 474 bp, Homo Sapiens
ttttttttttttttttttttttttttttttttttctgagagggaaaaatttattgatttctatcatatcagcatgttatgatatgggcacccctgctcatacagctgacttcttagagccaaaagagaatttttttccttttaaaaatacatttgttcagcaggaaaaaacattttaaaaacaagcattttcatattaaggggaaattaaaaacaatggctttccccccgccaactcatgaggaatagggctggtcagcaatagatctttgagggcttccaatttgttttcaggcctttgtccccagtctgttccttgttttccacaaaaagtagttccaggggaaaaagaaattagaatctcaccaaaacagcagcctaaatacagatagaaaaataagaggtagacacgactggaacgatttaactcatttggtagactgggcaagatattttaatatttaaatttttcagg

SEQ ID NO: 4213 - DNA, 3227 bp, Homo Sapiens
cagcagacggcagacggtgcccggcgcccacgggaagctgaagatacagcggtatacaaacctccatgtctcaagctgaccacacttgtatctggacttgccagctgattagctctgttcccaccaggctcgttcaaagacccacagcttgagggggcagagggctgcccctgatggggcctggcaatgactgagcaggcccagccccagaggacaaggaagagaaggcatattgaggagggcaagaagtgacgcccggtgtagaatgactgccctgggagggtggttccttgggccctggcagggttgctgacccttaccctgcaaaacacaaagagcaggactccagactcttcttgtgaatggtcccctgccctgcagctccaccatgaggcttctcgtggccccactcttgctagcttgggtggctggtgccactgccgctgtgcccgtggtaccctggcatgttccctgcccccctcagtgtgcctgccagatccggccctggtatacgccccgctcgtcctaccgcgaggctaccactgtggactgcaatgacctattcctgacggcagtccccccggcactccccgcaggcacacagaccctgctcctgcagagcaacagcattgtccgtgtggaccagagtgagctgggctacctggccaatctcacagagctggacctgtcccagaacagcttttcggatgcccgagactgtgatttccatgcccttccccagctgctgagcctgcacctagaggagaaccagctgacccggctggaggaccacagctttgcagggctggccagcctacaggaactctatctcaaccacaaccagctctaccgcatcgcccccagggccttttctggcctcagcaacttgctgcggctgcacctcaactccaacctcctgagggccattgacagccgctggtttgaaatgctgcccaacttggagatactcatgattggcggcaacaaggtagatgccatcctggacatgaacttccggcccctggccaacctgcgtagcctggtgctagcaggcatgaacctgcgggagatctccgactatgccctggaggggctgcaaagcctggagagcctctccttctatgacaaccagctggcccgggtgcccaggcgggcactggaacaggtgcccgggctcaagttcctagacctcaacaagaacccgctccagcgggtagggccgggggactttgccaacatgctgcaccttaaggagctgggactgaacaacatggaggagctggtctccatcgacaagtttgccctggtgaacctccccgagctgaccaagctggacatcaccaataacccacggctgtccttcatccacccccgcgccttccaccacctgccccagatggagaccctcatgctcaacaacaacgctctcagtgccttgcaccagcagacggtggagtccctgcccaacctgcaggaggtaggtctccacggcaaccccatccgctgtgactgtgtcatccgctgggccaatgccacgggcacccgtgtccgcttcatcgagccgcaatccaccctgtgtgcggagcctccggacctccagcgcctcccggtccgtgaggtgcccttccgggagatgacggaccactgtttgcccctcatctccccacgaagcttccccccaagcctccaggtagccagtggagagagcatggtgctgcattgccgggcactggccgaacccgaacccgagatctactgggtcactccagctgggcttcgactgacacctgcccatgcaggcaggaggtgccgggtgtaccccgaggggaccctggagctgcggagggtgacagcagaagaggcagggctatacacctgtgtggcccagaacctggtgggggctgacactaagacggttagtgtggttgtgggccgtgctctcctccagccaggcagggacgaaggacaggggctggagctccgggtgcaggagacccacccctatcacatcctgctatcttgggtcaccccacccaacacagtgtccaccaacctcacctggtccagtgcctcctccctccggggccagggggccacagctctggcccgcctgcctcggggaacccacagctacaacattacccgcctccttcaggccacggagtactgggcctgcctgcaagtggcctttgctgatgcccacacccagttggcttgtgtatgggccaggaccaaagaggccacttcttgccacagagccttaggggatcgtcctgggctcattgccatcctggctctcgctgtccttctcctggcagctgggctagcggcccaccttggcacaggccaacccaggaagggtgtgggtgggaggcggcctctccctccagcctgggctttctggggctggagtgccccttctgtccgggttgtgtctgctcccctcgtcctgccctggaatccagggaggaagctgcccagatcctcagaaggggagacactgttgccaccattgtctcaaaattcttgaagctcagcctgttctcagcagtagagaaatcactaggactactttttaccaaaagagaagcagtctgggccagatgccctgccaggaaagggacatggacccacgtgcttgaggcctggcagctgggccaagacagatggggctttgtggccctgggggtgcttctgcagccttgaaaaagttgcccttacctcctagggtcacctctgctgccattctgaggaacatctccaaggaacgggagggactttggctagagcctcctgcctccccatcttctctctgcccagaggctcctgggcctggcttggctgtcccctacctgtgtccccgggctgcaccccttcctcttctctttctctgtacagtctcagttgcttgctcttgtgcctcctgggcaagggctgaaggaggccactccatctcacctcggggggctgccctcaatgtgggagtgaccccagccagatctgaaggacatttgggagagggatgcccaggaacgcctcatctcagcagcctgggctcggcattccgaagctgactttctataggcaattttgtacctttgtggagaaatgtgtcacctcccccaacccgattcactcttttctcctgttttgtaaaaaataaaaataaataataacaataatacgggggaaaggaacgaaaggaactaaaaaaaaaaaaaaaaaaa

SEQ ID NO: 4214 - DNA, 457 bp, Homo Sapiens
tttttttttgcatttttgcaccaaccttaatgctatgtaaatagttgttatactgttgcttaacaacagtatgacaattttggctttttctttgtattattttgtattattttttttttattgggtggtctttttttttttttttctcagggttttcaattcctccttggttgaatccatggatgcaaaacccacagatatgaagggctggctatatatgcattgatgattgtcctattatattagttataaagtgtcatttaatatgtagtgaaagttatggtacagtggaaagaatagttgaaaacataaacatttggacctttcaagaaaggtagcttggtgaagtttttcaccttcaaactatgtcccagtcagggctctgctactaattagctataatctttgcacaaattacatcacctttgagtctcagttgcctcacctgtaaaatgaa

SEQ ID NO: 4215 - DNA, 452 bp, Homo Sapiens
tgaaataaaatgttaattggaaacatgaaaattagcagctgataattatagtagtcattgcataatacagtaatggtctttgttattgtgctttcaggacaagagcaatctttcccatccttagggtcttgtaatagcaggggggctctgggaagctttgatggcatgtctgcgaatagctagagctcatggacatcttcagtctgcaactgatacctgggagaacctcgtgtctgatgcaagaataaagcaaggcttaattcatcagcattgccaagtaagtaaagaaaattacctggatttgtacatgcagtagatccctttcatgtagcagttcaatatagaggcccctacattgtatcctgaactgttttagggagttcataaagagaatgagtagaaaccctagtctcccaactaaactttcagtaggccctttcttcaagctactg

SEQ ID NO: 4216 - DNA, 298 bp, Homo Sapiens
  misc_feature (126)..(126): n is a, c, g, or t
  misc_feature (254)..(254): n is a, c, g, or t
  misc_feature (259)..(259): n is a, c, g, or t
  misc_feature (275)..(275): n is a, c, g, or t
  misc_feature (284)..(284): n is a, c, g, or t
ccttccagtcctggtcttgcttttctccccgacctggtgtttcctccaccctgggaaagtgataaggcctagggtcctgtgtagtgcttctgtgaccgaattaaatttttctcctgccgagtcagngggtttagagattacaaagcacagcgtaaagggcagaattaggagcagccgacatgatgcagcagtgatattcgcctttgtcttaaattcccggagtgggaagcagctatttccctcttcggagtaanccccnccgacaggggattccntgggttccnggaaagttaaaaag

SEQ ID NO: 4217 - DNA, 645 bp, Homo Sapiens
  misc_feature (607)..(607): n is a, c, g, or t
caactatcgaaaaagagaagagtgaactcagtactctacttgttaacagctctgatcaacaaacctgtcagctctggccaaaaaactgctgatgtagcaaacctgcatcaagggagtttgataagaacattgaatctgtggggaaaggaataaggagctatgctagtttcatttgtaaagatgaatggtttaactggtagaaacatcctaagattttaaaatatatttactcataacaatcttgtgaggtaaattaggcgagcagcatcccttccatatggctaattagcaaactcaaggaaaaaaagtaatttataaatcaagaacggaaataaaaccatatagaatgaaagccctatgccttgcagtagaatttaatcatatttccgctattaaatctatttcttctattgatttggattgggatggaatttctaccacatactgaacataccacagtatgtacaacagaattatactgcagataagtaatttattagtttcagaaaaacttatccgtaaatctccacatgagcaggattagtaatttacctgtttctgaatccatctctggttctgtccacctgtggtttgccaaaccaggctntagaagttgctgctgtaagcaaggcagtggcagccagc

SEQ ID NO: 4218 - DNA, 490 bp, Homo Sapiens
  misc_feature (17)..(17): n is a, c, g, or t
  misc_feature (63)..(63): n is a, c, g, or t
  misc_feature (285)..(285): n is a, c, g, or t
  misc_feature (357)..(357): n is a, c, g, or t
  misc_feature (434)..(434): n is a, c, g, or t
  misc_feature (463)..(463): n is a, c, g, or t
  misc_feature (486)..(486): n is a, c, g, or t
tgaacccgatgagcggngtgacagtgagccgagattgcgccactgcactccagcctgggcgancagagcgagactctctcaaaaaaaaaaaaaaagaatttttagcaaaacatcctgtttttacttaaaattcttctcatatttattatagttagaaggcaaagatcaagatgacctgccgtttgactgcttttacatcaaactctgcccagtatttgcagcacaactcaggggaagggccttagcttacaggtactcccagccttcatctgcccctgcagagcntggctgtcagccggatgcggcacttttctgtattttcatccacacagctgcccagccagagttcggcaacantgggatattttacaccaaataattgtgggttgattgtctggaagccagctggacaaaagggttcagctttttcccantgtattttttaaaaggggggttgtgatcnttgttcacaggtggggtgttggncttt

SEQ ID NO: 4219 - DNA, 421 bp, Homo Sapiens
  misc_feature (395)..(395): n is a, c, g, or t
  misc_feature (414)..(414): n is a, c, g, or t
ttatgcgatatatagtagtcaaatatagaagataatgcaaaacaatttaaagtgattgtagcagtttgctgtattctacagcagcagattgtagcagattactgtattctacagcagcagcatgtgagattgccagttgctcaaattcgtgccaatacttggtattttttatcttttaattttagacattctggagagtgtgtagtaatttttcatcttggaaaattacattaaattagtatccatttctctaattttgataacattttcataagtttattgttattagatattttctttattttgaagtgcttattgtccattttacattgggtcatctgttattgaattgtaaacattccttgaatatttaaatatgagtgcttggtcagttnttgtcacaaatatcctctnttttcac

SEQ ID NO: 4220 - DNA, 196 bp, Homo Sapiens
  misc_feature (177)..(177): n is a, c, g, or t
  misc_feature (183)..(183): n is a, c, g, or t
caaataaaataagctttgtgcttgggatttttttctttttttttttggttctggtagtgacaggtgtatttataatcaagttgaatcaagagtgacaagaagaaatacagctagagttatatttttgccccaggggtattcttttcctagaagagcaagtccatttttagaaaattnaaatgncttaatttgtaac

SEQ ID NO: 4221 - DNA, 669 bp, Homo Sapiens
gaaggagacgcggccgcgtgaggacgaggctatttgaaaacacgctccgggagctagagcctgaggtctggtcggcgcacgctgttgccccgtgggcttctgctgcccgtcgcttgtcttctcgggcttctcgtccccggccgcggcggggtcctcagtagtcgatgaatgactaagtagatagagataaacgccaacatgattttcgaagaagtaaaggttgaaagttggtaagaaaggaagcccaaggttacaacacactgctatctcctacgaactttaaaacacagactatacatctgcctttagctaactcaatagaggagtgggaacacttccaacaaacaatagaaatacttaacagtacgaggattttgctgtcagcagatgcatcacgtacaatgctggggttagatcaaaggtgctcttcttggacttaaagacctttgtctcaatacccatttatgattgatgcacacctttcaaacatattaacgtgaagtgactgctgtgttctgcggatgaggctgctaagtgtacgattagccagcagttcgaacttcttcaattcctggcccccgagaagtacgagctgaaccaatttctccatttcgtccttgggtaagtgcccatctctctagtgccctgactcacattacttgagggtta

SEQ ID NO: 4222 - DNA, 6263 bp, Homo Sapiens
catcagcgggcgggggtgtcgccgaacaggctgctccgcagagcccgccgcgaccccgcgccgccccgccccgcggcctgcctgccagaggagccgagggggccgcccctcgcccaacctgcccgacatggggaaccccgggcccaggcgtgctggtcaccatgacaacagagacaggccccgactctgaggtgaagaaagctcaggaggaggccccgcagcagcccgaggctgctgccgctgtgaccacccctgtgacccctgcaggccacggccacccagaggccaactccaatgagaagcatccatcccagcaggacacgcggcctgctgaacagagcctagacatggaggagaaggactacagtgaggccgatggcctttcggagaggaccacgcccagcaaggcccagaaatcgccccagaagattgccaagaaatacaagagtgccatctgccgggtcactctgcttgatgcctcggagtatgagtgtgaggtggagaaacatggccggggccaggtgctgtttgacctggtctgtgaacacctcaacctcctagagaaggactacttcggcctgaccttctgtgatgctgacagccagaagaactggctggacccctccaaggagatcaagaagcagatccggagtagcccctggaattttgccttcacagtcaagttctacccgcctgatcctgcccagctgacagaagacatcacaagatactacctgtgcctgcagctgcgggcagacatcatcacgggccggctgccatgctcctttgtcacgcatgccctactgggctcctacgctgtgcaggctgagctgggtgactatgatgctgaggagcatgtgggcaactatgtcagcgagctccgcttcgcccctaaccagacccgggagctggaggagaggatcatggagctgcataagacatatagggggatgaccccgggagaagcagaaatccacttcttagagaatgccaagaagctttccatgtacggagtagacctgcaccatgccaaggactctgagggcatcgacatcatgttaggcgtttgtgccaatggcctgctcatctaccgggaccggctgagaatcaaccgctttgcctggcccaagatcctcaagatctcctacaagaggagtaacttctatatcaagatccggcctggggagtatgagcaatttgagagcacaattggctttaagctcccaaaccaccggtcagccaagagactgtggaaggtctgcatcgagcatcatacattcttccggctggtgtcccctgagcccccacccaagggcttcctggtgatgggctccaagttccggtacagtgggaggacccaggcacagactcgccaggccagcgccctcattgaccggcctgcacccttctttgagcgttcttccagcaaacggtacaccatgtcccgcagccttgatggagcagagttctcccgcccagcctcggtcagcgagaaccatgatgcagggcctgacggtgacaagcgggatgaggatggcgagtctggggggcaacggtcagaggctgaggagggagaggtcaggactccaaccaagatcaaggagctaaagccggagcaggaaaccacgccgagacacaagcaggagttcttagacaagccagaagatgtcttgctgaagcaccaggccagcatcaatgagctcaaaaggaccctgaaggagcccaacagcaaactcatccaccgggatcgagactgggaacgggagcgcaggctgccctcctcccccgcctccccctcccccaagggcacccctgagaaagccaatgagagagcagggctgagggagggctccgaggagaaagtcaaaccaccacgtccccgggccccagagagtgacacaggcgatgaggaccaggaccaggagagggacacggtgttcctgaaggacaaccacctggccattgagcgcaagtgctccagcatcacggtcagctctacgtctagcctggaggctgaggtggacttcacggtcattggtgactaccatggcagcgccttcgaagacttctcccgcagcctgcctgagctcgaccgggacaaaagcgactcggacactgagggcctgctgttctcccgggatctcaacaagggggcccccagccaggatgatgagtctgggggcattgaggacagcccggatcgaggggcctgctccaccccggatatgccccagtttgagcccgtgaaaacagaaaccatgactgtcagcagtctggccattagaaagaagattgagccggaggccgtactgcagaccagagtctccgctatggataacacccagcaggttgatgggagtgcctcagtggggagggagttcatagcaaccactccctccatcaccacggagaccatatcgaccaccatggagaacagtctcaagtccgggaagggggcagctgccatgatcccaggcccacagacggtggccacggaaatccgttctctttctccgatcatcgggaaagatgtcctcaccagcacctacggcgccactgcggaaaccctctcaacctccaccaccacccatgtcaccaaaactgtgaaaggagggttttctgagacaaggatcgagaagcgaatcatcattactggggatgaagatgtcgatcaagaccaggccctggctttggccatcaaggaggccaaactgcagcatcctgatatgctggtaaccaaagctgtcgtatacagagaaacagacccatccccagaggagagggacaagaagccacaggaatcctgacctctgtgaagagatcctggcatttctggtccaacccaagccagagaaccattaagaaggggccttcattctggattctccgacgcaacactgacgtcccagctgcgacgtactgtcactgatgagagactgggaagggaaaagcatatatatatagatatatagagatatagatatatatacaggaaacaccgcatccttgcactgctgctggggctggcagagcagttggctgacagcaacaaccgacatctgaacacctacatttcctttgcagacaaattgaagaactggtgggatttttttcaagaaaaaaaattatataataactataatcccttgctcacccctttcccccgccaaataagaaacgcaagccagaccacgatgattgtagaagtccctcccgccctggttctgcacgttacagttagcagacgagcaattccatttgttcttctccagcatctctaaggcccacttgaatgcaaaggaaaacacttgcacagcaaagcaagagaagtcacagcagcaagacacgcacagtcaaccattttccgagaaaaaaagaaaattccccacttggaaagaaagaggaggaacactggattcttactttctggatcttgacactgggctgcaaaacctaccttcctctctcccgcctcccctcaccctcaactctcaatgtcttgctgtcattttctgtctcggctccctcctcccccttcccccttcccccaccccacacccttcaccctctgtgtcctggtccttctgagggccactgcagatgactctcctttgaaatgagaaaaagaaaagaaagcaagaacagaaaacgaagccacaggaagggaagtagacattgtatgcttatggtttctcattatgaaggtgcagcttgtaggaggtttgtacggatgtgctttgaagttatgtatattacatataacaggaaaaaatattaataaacagtgctggtaagtatgaagctgacattctaaaattataattatctgactgtgattgatgtatcctgaggttcctagatctcactgaactggcccagctaaggagacctggactctgggtgtgggttggctcacagtaggggctgacgggttcagtgtagtaatactgtgtgtggtgtttgtaattggttgattggtggggaggggtggggggccctaatggagaggtgtgggtttggcaagaaagaagcaacacagatgtcgtccccaaaatgccagttcaagacaccttctccctgcccccctggtagtaacagtcagggcctggtctgtgctcaggtactgggtcccagtctgggactctgctgctgaagttgccacagtagaggtccctggcttagtccttatctccctacggggcttgccttggttttcagtcttctctctctttctctcttttttttttttttgccacattctgcccttccctgaccccattgtaataaccaactccatatccaaagggaggtggtgctctcagccattgtagaagatggtggctttaacctgactgtctaaaaattcccagctaagccttttcctctactctcttccttgttctgaatcatttcttcttctcaggccaaagtagccatggtaaggaggcttcatggggcagaccctgaaagatcaaaactgcatttgcaaagccctcccctgtcccaggacaaagctgagactgacgggtgatgttgctcataggctccagctctgcataagaccttggcttggagacctccctctcagtcaacagctgaactctgagcttgtgcccagaaattaccccaagaccacaggaacccttcaagaagctcccatcacaagcttggcattgctctctgccacacgtgggcttcctcaggcttgtctgccacaagctacttctctgagctcagaaagtgccccttgatgagggaaaatgtcccactgcactgcgaatttctcagttccattttacctcccagtcctccttctaaaccagttaataaattcattccacaagtatttactgattacctgcttgtgccagggactattctcaggctgaagaaggtgggaggggagggcggaacctgaggagccacctgagccagctttatatttcaaccatggctggcccatctgagagcatctccccactctcgccaacctatcggggcatagcccagggatgcccccaggcggcccaggttagatgcgtccctttggcttgtcagtgatgacatacaccttagctgcttagctggtgctggcctgaggcagggcaggaaatcagaatagcatttgcttctctgggcaaatgggaagttcagcggggcagcagaatcagtggcattccccctggtgcaggccggtgggtccactccaactccccctgagtgtagcagcacactttccatacaccaggttctttctacaatcctggtggaaaagccacagaaccttcttcctgcccttcttgagagttccccctctttctgggtcaagagctggagtggtggctccatcctctctgggccacttcggtctaggaactcatctttgcaggaaccaggagtcctgagcacactgaacacacctcagagggaggatccttgttgtggattttgcacctggctttggggcaggggtgaagtgaccaggcttagcttgtggagtttatgggccaccagggtttggggaaatcaccatcccgcggatgctgtgacctcccttctacggagatgcaggcagtgccacgagggaggaggggacctgcaaagctagaatctagggcactgtttcctccccatccttctctttgtagagaatagagacgtttgtcttgtctgtcttcaacctacttttccttttctcttttttgtttctcatcctctctgtgccacctctccacccaggaggccatgtagcatagtggaaaaagtccctgagggcggttaggagttctgggtgaccatcctggctcagctcctaactcaccatgtgacatcaggctatccccattccccctcttgggcctcagtttcccgacttgcaaaataagcagaaagaaccagatgctctccagggtctttttctactttgctatctcatgggtcttcattttctcttattttgttttctctggatcttttccatctgagggtacaggaagtaccaggacctgtttcagtttttgaatcctgcaagcacattccaagactggcctgaaactgcatgagcaacatcactcgaaataattttttttttcaaaagcaccttaacaaccaattgcgatgctgtcctgttcctttttactcacacccttctctcctttctcgtccccatgctcccccacctcagtgctccgtgctgtatgcgtgtgctctctgttcttgtatactcaatataagtgaaataaatgtgtttgatgctgaaccat

SEQ ID NO: 4223 - DNA, 413 bp, Homo Sapiens
agtgtttttttttttttttttttttttttttaatttataaaatatcctttatttatgctaaggaacagtcaagcagtagctttaaaaaaaaaaaaaaagacacattttttgaaagatattcttagtgttgtgacctggcattgggcccctgtgagcgggacggtggctgagaccgcctgctgtggctttgcgagttctctgcactcactggcaggggtttggtgggaaacggggaagctttggcatggttctgtccagttgcttataatcaagaataatgagttttgaggtttacaaagagcagaagtaacatttatacggctggcatttgacaaaagattgctgataatatactcattccaggaagtgtaaaaatgctttaaaggaatgataatttgtacttactgtttatg

SEQ ID NO: 4224 - DNA, 458 bp, Homo Sapiens
cacgaggggcgcctgtagtcccagctactcgggaggctgaggcaagagaatggcgtgaacccgggaggcggagcttgcagtgagccgagattgcgccactgcactcccgcctgggccacagagcgagactccgtctcaaaaaaaaaaaaaaaaaataagaaatctttagaagccacagggctagaagagaagtcaccaaacacctagggacagtcctaggcctagaaagccctttaaagtaatagtgaattgttttaaaattaagttattgagtggcctactgactgccatccaaaaacctttatcaccaaatttgttcagtgtttgctattgggagattgtccatatccctccgtaattaagggccagcaagtaatacgatcttcttacagccaaccttgctcttcccaaagggagaaagtaatacatcattaacctgcaatttgtgatataacagg

SEQ ID NO: 4225 - DNA, 230 bp, Homo Sapiens
  misc_feature (125)..(125): n is a, c, g, or t
  misc_feature (214)..(214): n is a, c, g, or t
agaagggggcagcccaagtggcagccgtcctggcccagcatcgtgtggccctgagtgttcagcttcaggaggcctgcttcccacctggccccatcaggctgcaggtcacacttgaagacgctgcntctgccgcatccgccgcgtcctctgcacacgttgccctgcaggtccacccccactgcactgttgcagctctccaggagcaggtgttctnagagctcggtttcccg

SEQ ID NO: 4226 - DNA, 519 bp, Homo Sapiens
tgccttcacaccactgacaggaacaataattcatcagaagcaacatctcttgcgacgtgcagtgattcccaggcccacagatgttcccctgtagagaacaagtgctagtgggttggtgcaagcaccaggagctcttctgaggaaaaggccttgcagttatttacatttatgattcttcaatgctggaagatcgtggatcaatcccaggctttgccagttctagctgtgtgaccctgggagaattacttaatgtatctgagcctcaatttcttcatttatgtagtcaatataatcatagttcctgcttcacattgctagaacttaaagagacaatgaatgtaaaatgctgagcccagtacttgaccataacaagtatagaattgacactagacgttgttatttaatagctcttccaaactagaaaactcagagctctgtctggtgggctggatgggattctattgtgaggtctttagcttcaaacaagtaataataatgacaatagtaagtactatattt

SEQ ID NO: 4227 - DNA, 2340 bp, Homo Sapiens
gtctgaacctctgccagtcctggagactggtgccctgagctccaaccagcgggcctcatcctacaccctcaccaccgcaacttctcacccgagcaagaagcagctcccagagagaaagaacgttcccacctgcctagccatgggagaggacgctgcacaggccgaaaagttccagcaccctgggtctgacatgcggcaggaaaagccctcgagccccagcccgatgccttcctccacaccaagccccagcctgaacctagggaacacagaggaggccatccgggacaactcacaggtgaacgcagtcacggtgctcacgctcctggacaagctggtgaacatgctagacgctgtgcaggagaaccagcacaagatggagcagcgacagatcagtttggagggctccgtgaagggcatccagaatgacctcaccaagctctccaagtaccaggcctccaccagcaacacggtgagcaagctgctggagaagtcccgcaaggtcagcgcccacacgcgcgcggtcaaagagcgcatggataggcagtgcgcacaggtgaagcggctggagaacaaccacgcccagctcctccgacgcaaccatttcaaagtgctcatcttccaggaggaaaatgagatccctgccagcgtgtttgtgaaacagcccgtttccggtgccgtggaagggaaggaggagcttccggatgaaaacaaatccctggaggaaaccctgcacaccgtggacctctcctcagatgatgatttgccccacgatgaggaggccctggaagacagtgccgaggaaaaggtggaagaaagtagggcagagaaaataaaaagatccagcctgaagaaagtggatagcctcaagaaagcattttctcgccagaacatcgagaaaaagatgaacaagctggggacaaagatcgtatctgtagagaggagagagaagattaagaaatctctcacgtcaaatcaccagaaaatatcctcaggaaaaagctcccccttcaaggtttctcccctcactttcgggcggaagaaagtccgagagggagaaagccatgcagaaaatgagaccaagtcagaagacctgcctagcagtgagcagatgccaaatgaccaggaagaggagtcctttgcagagggtcattccgaagcgtccctcgccagcgctctggtggaaggggaaattgcagaggaggctgctgagaaggcgacctccagggggagtaactcggggatggacagcaacatcgacttgactattgtggaagatgaagaggaggagtcagtggccctggaacaggcacagaaggtacgctatgagggtagctacgcgctaacatccgaggaggcggagcgctccgatggggaccccgtgcagcccgccgtgctccaggtgcaccagacctcctgagcttagagccaccgtgccatcctgtgctgtgctcaagcgggcagccagggctgaagaacaaactcttgcacatctccagcacgactcacccactcctgcgttcctgtccaggcagtaatcattgaccatatagtcatagtaagacacacgagaccaggctttaccatgaaagcgacctgtcacggactccacttttaatttgctcttaggttctatctctgtagaatgtctccaagattgaagaagaaactgagcagttgaaaaatgctaatctctttgacttagtcagaaaaaaacagaggataattaagatactagtcatgaaaagtgattcattcttttttgtcattccataagcttgctgaatagtgtaccggtaatatattgtatttccaccgtactctgtgaatctaattattattctttaagtgttgatatataatatacataaatatgtaagctaaacatataactatatgttttaagaagaaaacatctacgaaaggtaaaaagagatgatcagttggttgtttacttgctagaaaccattgttttattgcaaacgaaggaaaaatgaagagattataaaagtcagctaatgaagtaagatacgtagtaaagtcaggactattcaaaaagtaagaaagaaaatttggaaaatgagagaaacaggaaacaaagaatgccgaaaagaatgaaaacagagaaaaaatgtatgtgcttgaaagtaaaatacttacaatagtagcttaactatttcactctttaaataaaaatactaaagaagttcgtatatcctggaataacatgtcatcttcaaaatatttttattttctaatatttttaataataaacattttatagtgttaaagctgtatttttcttaataaataaaggacattacaaataaaaaaaaaaaaaaa

SEQ ID NO: 4228 - DNA, 572 bp, Homo Sapiens
gcggccgcacgcctgccgggactgtggcaaggccttcagccagagctccaacctggccgagcacctgaagatccacgcgggcgcacggccacacgcctgtcccgactgcggcaaggccttcgtgcgtgtggcggggctgcggcagcaccggcgcacgcacagcagcgagaagcccttcccctgcgccgagtgcggaaaggctttccgcgagagctcgcagctcctgcagcaccagcgcacgcacactggtgagcggcccttcgagtgcgccgagtgcggccaggctttcgtcatgggctcctacctggcggagcaccggcgcgtgcacacgggcgagaagcctcatgcgtgcgcccagtgccggaagggcctttagccagcgctccaacctactgagccaccggcgcacgcactcgggcgccaagcccttcgcctgcgccgactgcggcaaggccttccgcggcagttcccgcctggcgcaccaccggctatcgcacacgggagagcgacccttcgcctgcgcagaatgcggcaaggccttccgcggcagctccgagctgcgccagcaccaa

SEQ ID NO: 4229 - DNA, 482 bp, Homo Sapiens
tttggtttgaaaacatacattttatagaatggcatgatataaactatccaaacacaaaacacacatgaacacatcaaatgacaggtcatttccttttgcagaaactggcttaaaaaattgatattgaaatttcatagttgaaaaaaatatttctgaatgtacaaataaagcagcagttttgaatagaaacaggaagttaccctaggcacattcattagccacatggtagctacctcttagcctcattgttgattgtgtgaatgagactttctttgtatcacattaatacatgtttttggttattttttcacaaaaatgaaagaaagtatgttggtttcatattcaaatgaattatgcccaggataatccttatttatacaaaaagagtttagagagtgaaaaagagaaacagaaaatatggttctcatacatgtctttttgtaccccaaaaaactttggggcccacttttcaaagataaaaa

SEQ ID NO: 4230 - DNA, 450 bp, Homo Sapiens
ttttttttttttttttttttttttttttttttaatattggaaaacttttattttctcaaaggagccccaacacagatgggaaatatgacagaaacaatgcacttttctctaatactgaatcactatgtacaaatacaggaaagggggaagacaaattatttgaaaacaattacctttgttatagaagcaaagggacctgaaaaatgccaccaaagaaaacaaaaacccaaacccaacaaatacagtttgtaaacacaagcataaatagacagattctgtattggaagatagtctctgcaggttgggaaagggaaccgactcccactgtcaccgaaatgttatacaaaaacatatgcgcagatagaattgggtaacatgagaatagctttcatagtttcttctaggctttaccttttctgccagatttcataactattttaatttttaaaa

SEQ ID NO: 4231 - DNA, 703 bp, Homo Sapiens
aagacggggattggccatcgcttccggaagttgtgagctttgtttcggagcgggacctccccgagacgcactgggggccggatgtagaatcctgcttatctgtgaaatgcagttaacacatcagctggacctatttcccgaatgcagggtaacccttctgttatttaaagatgtaaaaaatgcgggagacttgagaagaaaggccatggaaggcaccatcgatggatcactgataaatcctacagtgattgttgatccatttcagatacttgtggcagcaaacaaagcagttcacctctacaaactgggaaaaatgaagacaagaactctatctactgaaattattttcaacctttccccaaataacaatatttcagaggctttgaaaaaatttggtatctcagcaaatgacacttcaattctaattgtttacattgaagagggagaaaaacaaataaatcaagaatacctaatatctcaagtagaaggtcatcaggtttctctgaaaaatcttcctgaaataatgaatattacagaagtcaaaaagatatataaactctcttcacaagaagaaagtatcgggacattattggatgctatcatttgtagaatgtcaacaaaagatgttttatgaaatgtcagaaatattaacaaaaattctcagcattaaagaaaacattgattttcctttcctgactataaa

SEQ ID NO: 4232 - DNA, 488 bp, Homo Sapiens
tgatgtcactccaggacagtttatgacatgccacagctgtctggcatgtccagacatggctgggtaaggggcctacagaaaggtgtccccaagctggggaggcgggaggggaggcctgggcttccccagggcccttgcagtggcttcgagcaccgccacctcctcggcctgctgagcctccatgagtgccatctgctgctccaacttccggcgttgctcttcctgcttccggtgggctcctcggaaggccaggaccagggcgctgtgggctttgcataaatccctgttcagctcggcactctgagaccgtctggctcgccccttctgagccacctgttccagctccctgcgcagagactgcagctgctcctgcaggtccagtgtcctggtgagcgatgctgccagttcctgggctaacttctctgggtcccaggctctgcccacctggccaccatcaatgccactggtgccaccagggacagcaggaa

SEQ ID NO: 4233 - DNA, 206 bp, Homo Sapiens
  misc_feature (104)..(104): n is a, c, g, or t
  misc_feature (106)..(106): n is a, c, g, or t
  misc_feature (109)..(109): n is a, c, g, or t
  misc_feature (154)..(154): n is a, c, g, or t
  misc_feature (158)..(158): n is a, c, g, or t
  misc_feature (173)..(173): n is a, c, g, or t
  misc_feature (191)..(191): n is a, c, g, or t
gatctgaatttgtaagttattaatgtgaaagggggagcaggaagctccccgtttgcacaaagggggatttgtttgcacaaagttcactgtaaatactgtgagantnganttctgaaaaggtcatatttagtgatttcaaaagcacacatttaantgangactgactaaataanaggtaccacacacttctnggttggtttcattcc

SEQ ID NO: 4234 - DNA, 466 bp, Homo Sapiens
  misc_feature (419)..(419): n is a, c, g, or t
  misc_feature (436)..(436): n is a, c, g, or t
  misc_feature (444)..(444): n is a, c, g, or t
  misc_feature (452)..(452): n is a, c, g, or t
ctgccttccagaagagcaatctgaaggaaaccagtacaccccggatgcccagcgctttaactgccagaaaccagatatagctgagaagtacctgtcggcttcagagtatgggagctccgtggatggccaccctgaggtcccagaaaccaaagacgtcaagaagaaatgttctgctggcctcaaactgagcaacctaatgaatctgggcaggaagaaatccacctcactggagcctgtggagaggtccctccgagacatccaagttacctgaaccgtgctggtgaacaagccaagtggaagtctcgctggtgctctgtcagggacaatcacctgcacttctaccaggacccggaacccggagcaaaggtggccccagcaacccctcaagcctggtgggcttgcgaaggtggtcccaaganccccagcccccgaccanctctactnctttccgnaatccttccacaaa

SEQ ID NO: 4235 - DNA, 753 bp, Homo Sapiens
atccttaattaaattaattttcttccccccccccccccccgtttttctcaggcataagggctgtagtgtgaggattgggaggaactcgacctacttcgttaacccagtggcctgagccaatcacaaagaggattggagcctcactcgagcgctccttcccttctcctctttctgtgacagcctcttggaaagagggacactggaggggtgtgtttgcaatttaaatcactggatttttgcccaccctttttccaaataagaaggcaggagctgcttgctgaggtgtaaagggtcttctgagctgcagtggcaattagaccagaagatccccgctcctgtctctaaagaggggaaagggcaaggatggtggaggctttctgtgctacctggaagctgaccaacagtcagaactttgatgagtacatgaaggctctaggcgtgggctttgccactaggcaggtgggaaatgtgaccaaaccaacggtaattatcagtcaagaaggagacaaagtggtcatcaggactctcagcacattcaagaacacggagattagtttccagctgggagaagagttcgatgaaaccactgcagatgatagagactgtaagtctgttgttagcctggatggagacaatactgtccacatacagaaatgtgatggcaaagaaacaaatcttgtaggagaaattaaggatggaaaaatggttatgacccctactttatgttgatgtggtgctgttcggcatttcgag

SEQ ID NO: 4236 - DNA, 502 bp, Homo Sapiens
tttttttttttttttttgagactaattcaggagttcttttattgccagtgaccgagagatggctagagctcaaaattctctcagccccgaagaaggggatagatttctttttataccgtggtctaaatagggcagggggagcctagctgaagcaatttttacagaagcagaacacgcaaaaagttaaaaaaaattaatggttacagagatagttacagaaaaatacacagttccaggtgcaggggcttaaactatcacaaagagataaatgcaggggcttgggtaccatccactgagcacgtccccaggagctgctggtacagcttgcctcaatatcttatcagtaagtgcattcctggatgtgcttggagtcagcttgcactagttattcccttaagggagggggataaggggactgcaagtgaagaggctaaaatggagtctgtccagctctcccagctgagagagagtcactcagattaaaacaggatagggtatccca

SEQ ID NO: 4237 - DNA, 1216 bp, Homo Sapiens
gcacatacatagtgtacactaaattttacatacacacagaggaatatatatgtgtatagttatcttgtgtttagaaatttggaatcccttctagttgtcttgtaacatgtgcttactctattttgaggattttctctatgaatttcatgtagctctttaaattaactttcaggaggattgtaacaatgtgctctccacccagtattttaccagccttgagttttctcaaagggggcattggaggggttcttatacatttacagtgggaatgtgaattgatacaacttctgtggagggcagtttatcagccactatctaaattacacatacataaaccctttgtctaagcaaacttgctgggaataaatcctacacatatatttgtatgtgtgcagactgtttgtacatggttttcattatgctattgattttaaaagtcagaatttggaaacaaccctccatgtccaccatggggaactggctaagtacatttatggtggaatggagatcatatccttaaaaatgaagactctttatatacaggttgagtatcccttatccaaaatgctcaggaccagaagtgtttcagatttcagatttttgaattagggatcctcaaactatactaatgtgagaaagagctctaagatagttaagtagataaaagcaaggtgtcaaactgtagagtatgtttccatttatgtaaagaagaaacaggctaggcaaggtgactcacgcctgtaatcccagcactttgggaggccgaggcgggtggatcacctgaggtccggagttcaagaccagcctgaccaacacggtgaaaccccatctctactaaaaatacaaaagctgggtgtggtggtgcacacttctaatcccagctactccgtaggctaaggcaggagaatcgcttgaacccaggaagtggaggttgcagtgagccaatattgtgccattgcactccagcttgggcaacaagagcgaaactccatctcaaaaataaataaataaataagaaacatttgtttatatgtacacacataatctctgaaagggtaaaagtggcatactggttggccagaagaattgggaggacagtgatgaggaataattttcactctttatcattttatatttttggaattttgaaacatgtaaaattattaccagttcaaaaaataaatttaaacaaaaatcttaactgttaaaaaaaaaa

SEQ ID NO: 4238 - DNA, 177 bp, Homo Sapiens
  misc_feature (31)..(31): n is a, c, g, or t
  misc_feature (72)..(72): n is a, c, g, or t
  misc_feature (80)..(80): n is a, c, g, or t
  misc_feature (87)..(87): n is a, c, g, or t
  misc_feature (146)..(146): n is a, c, g, or t
gtggccatagagcagacatctcttaagatgntgcaggcagtaggaggtgcacctgcacgtcccactggagantatatctntaatcantgtggtgctaagtacacatccctagacagctttcagactcacctaaaaactcatctcgncactgtgcttccaaaattgacctgtcctcag

SEQ ID NO: 4239 - DNA, 455 bp, Homo Sapiens
tttcgttctttgtgtgtgtgtgtggcaggggggtaactatgtaatgtgtaaaacttcactactattttcattaggttccttttgggcttttttgttgttgtcactgatgaagtttttcagtgataatgtacaaatcaaacccacaagaaacatgtcttgctccaggaaaggaattaagtggtcatcactgtgctctcaaacaacacttacaaaaaacagagaaaggtcattttaaacactctttgattacccaacattctgtgctcttaaattttgcaaaaataagtcatatttatgtggtacttcagaatttaatgtgttagtcatatccttttttatctagtcttcactgcaaataagtttaaaaagtagggggaaaattatcttcattgtaagatagcagaaacagaagcaggaccagatgaagcatgtttcctaaagtcccacaagtaact

SEQ ID NO: 4240 - DNA, 1378 bp, Homo Sapiens
gggacccgggcttctgtgaaacatggcggtaggctgggaccataacacaagcatgactatatgaaggaagaggaaggttttcctgaagatgaggcgactgaatcggaaaaaaactttaagtttggtaaaagagttggatgcctttccgaaggttcctgagagctatgtagagacttcagccagtggaggtacagtttctctaatagcatttacaactatggctttattaaccataatggaattctcagtatatcaagatacatggatgaagtatgaatacgaagtagacaaggatttttctagcaaattaagaattaatatagatattactgttgccatgaagtgtcaatatgttggagcggatgtattggatttagcagaaacaatggttgcatctgcagatggtttagtttatgaaccaacagtatttgatctttcaccacagcagaaagagtggcagaggatgctgcagctgattcagagtaggctacaagaagagcattcacttcaagatgtgatatttaaaagtgcttttaaaagtacatcaacagctcttccaccaagagaagatgattcatcacagtctccaaatgcatgcagaattcatggccatctatatgtcaataaagtagcagggaattttcacataacagtgggcaaggcaattccacatcctcgtggtcatgcacatttgggcagcacttgtcaaccatggaatcttacaattttttctcatagaatagatcatttgtcttttggagagcttgttccagcaattattaatcctttagatggaactgaaaaaattgctatagatcacaaccagatgttccaatattttattacagttgtgccaacaaaactacatacatataaaatatcagcagacacccatcagttttctgtgacagaaagggaacgtatcattaaccatgctgcaggcagccatggagtctctgggatatttatgaaatatgatctcagttctcttatggtgacagttactgaggagcacatgccattctggcagttttttgtaagactctgtggtattgttggaggaatcttttcaacaacaggcatgttacatggaattggaaaatttatagttgaaataatttgctgtcgtttcagacttggatcctataaacctgtcaattctgttccttttgaggatggccacacagacaaccacttacctcttttagaaaataatacacattaacacctcccgattgaaggagaaaaactttttgcctgagacataaaacctttttttaataataaaatattgtgcaatatattcaaagaaaagaaaacacaaataagcagaaaacatacttattttaaaaaaaaaaaaaaaaaaaaaaaaaaaaaa

SEQ ID NO: 4241 - DNA, 2872 bp, Homo Sapiens
cggcgctgggagacaccggacgcccgctcggctgcgctgcggctcaggcccccgctcgggcccgacccgctcggtcaccgccggctcgggcgcgcacctgccggctgcggccccagggccatgcggaggcccacgaggaggccggcggccacgcgcatcccgtagcccaggtggcccaggtctgcaccgcggcggcctcggcgccatggagcccccgtattcgctgacggcgcactacgatgagttccaagaggtcaagtacgtgagccgctgcggcgcggggggcgcgcgcggggcctccctgcccccgggcttcccgttgggcgctgcgcgcagcgccaccggggcccggtccgggctgccgcgctggaaccggcgcgaggtgtgcctgctgtcggggctggtgttcgccgccggcctctgcgccattctggcggctatgctggccctcaagtacctgggcccggtcgcggccggcggcggcgcctgtcccgagggctgccctgagcgcaaggccttcgcgcgcgccgctcgcttcctggccgccaacctggacgccagcatcgacccatgccaggacttctactcgttcgcctgcggcggttggctgcggcgccacgccatccccgacgacaagctcacctatggcaccatcgcggccatcggcgagcaaaacgaggagcgcctacggcgcctgctggcgcggcccgggggtgggcctggcggcgcggcccagcgcaaggtgcgcgccttcttccgctcgtgcctcgacatgcgcgagatcgagcgactgggcccgcgacccatgctagaggtcatcgaggactgcgggggctgggacctgggcggcgcggaggagcgtccgggggtcgcggcgcgatgggacctcaaccggctgctgtacaaggcgcagggcgtgtacagcgccgccgcgctcttctcgctcacggtcagcctggacgacaggaactcctcgcgctacgtcatccgcattgaccaggatgggctcaccctgccagagaggaccctgtacctcgctcaggatgaggacagtgagaaggtcctggcagcatacagggtgttcatggagcgagtgctcagcctcctgggtgcagacgctgtggaacagaaggcccaagagatcctgcaagtggagcagcagctggccaacatcactgtgtcagagtatgacgacctacggcgagatgtcagctccatgtacaacaaggtgacgctggggcagctgcagaagatcaccccccacttgcggtggaagtggctgctagaccagatcttccaggaggacttctcagaggaagaggaggtggtgctgctggcgacagactacatgcagcaggtgtcgcagctcatccgctccacaccccaccgggtcctgcacaactacctggtgtggcgcgtggtggtggtcctgagtgaacacctgtccccgccattccgtgaggcactgcacgagctggcacaggagatggagggcagcgacaagccacaggagctggcccgggtctgcttgggccaggccaatcgccactttggcatggcgcttggcgccctctttgtacatgagcacttctcagctgccagcaaagccaaggtgcagcagctagtggaagacatcaagtacatcctgggccagcgcctggaggagctggactggatggacgccgagaccagggctgctgctcgggccaagctccagtacatgatggtgatggtcggctacccggacttcctgctgaaacccgatgctgtggacaaggagtatgagtttgaggtccatgagaagacctacttcaagaacatcttgaacagcatccgcttcagcatccagctctcagttaagaagattcggcaggaggtggacaagtccacgtggctgctccccccacaggcgctcaatgcctactatctacccaacaagaaccagatggtgttccccgcgggcatcctgcagcccaccctgtacgaccctgacttcccacagtctctcaactacgggggcatcggcaccatcattggacatgagctgacccacggctacgacgactgggggggccagtatgaccgctcagggaacctgctgcactggtggacggaggcctcctacagccgcttcctgcgaaaggctgagtgcatcgtccgtctctatgacaacttcactgtctacaaccagcgggtgaacgggaaacacacgcttggggagaacatcgcagatatgggcggcctcaagctggcctaccacgcctatcagaagtgggtgcgggagcacggcccagagcacccacttccccggctcaagtacacacatgaccagctcttcttcattgcctttgcccagaactggtgcatcaagcggcggtcgcagtccatctacctgcaggtgctgactgacaagcatgcccctgagcactacagggtgctgggcagtgtgtcccagtttgaggagtttggccgggttttacactgtccaaaggtctcacccatgaaccctgcccacaagtgttccgtgtggtgagcctggctgcccgcctgcacgcccccactgcccccgcacgaatcacctcctgctggctaccggggcaggcatgcacccggtgccagccccgctctgggcaccacctgccttccagcccctccaggacccggtccccctgctgcccctcacttcaggaggggcctggagcagggtgaggctggactttggggggctgtgagggaaatatactggggtccccagattctgctctaagggggccagaccctctgccaggctggattgtacgggccccaccttcgctgtgttcttgctgcaaagtctggtcaataaatcactgcactgttaaaaaaaaaaaaa

SEQ ID NO: 4242 - DNA, 7864 bp, Homo Sapiens
ccactgagcagccaaccgcagcctctggccacaaggagagcggagcacaggagcaggaagccgcctaccaccatgagcagcacgctgtcacccacagactttgacagcttggaaatccagggccagtacagtgacatcaacaaccgctgggaccttcctgactcggactgggacaatgacagcagctcggcccgcctctttgagaggtctcgcattaaggctctggcagatgaacgagaagctgtgcagaagaaaaccttcaccaagtgggtaaactcgcacctggcccgggtcacgtgccgggtgggggacctgtacagcgacctccgggacggacgcaacctgctgaggctcctcgaggtgctctcgggagagatactgccaaagcctacaaagggccgcatgcggatccactgcctggagaacgtggacaaggcactgcagttcctcaaggagcagaaagtgcacttggaaaacatgggctcccatgacattgtggacggaaaccaccgactgacccttgggctggtctggaccatcatccttcgattccagatccaagacatcagtgtggagacagaagacaacaaggagaagaagtcagccaaggatgccctgcttctgtggtgccagatgaagactgcaggttatcccaacgtcaatgtacacaacttcaccaccagctggagagatggactagctttcaacgccatcgtgcataaacaccggccagacctgctggattttgagtctctgaagaagtgtaatgcacactataatctgcagaatgcattcaatctggctgaaaaggaactgggacttaccaagctgctggatcccgaagacgtgaatgtggaccagccagatgagaagtcaatcattacctatgtggctacttactaccattacttctccaagatgaaggccctggccgtggaaggcaagagaattggcaaggtgctggaccatgccatggaggcagagcgcctggtggagaaatacgagtccctggcctcggagctgctgcagtggatcgagcaaacgatcgtgaccctcaatgaccggcagttggccaactcccttagcggggtccagaaccagctgcagtccttcaactcctaccgcaccgtggagaagccgcccaagtttaccgagaaagggaacttggaagtgctgctcttcaccatccagagcaagcttcgggccaacaaccagaaggtctacacgccccgcgagggccggctcatctcggacatcaacaaggcttgggagcggctggagaaggcggagcacgagcgtgagctggccctgcgcaccgagctcatccgccaggagaagctggagcagctggccgcccgcttcgaccgcaaggctgccatgcgggagacctggctcagcgagaaccagcgcctcgtgtcccaggacaactttgggctggagctggcagctgtcgaggcagcagtacggaagcacgaagccattgagacggacatcgtggcctacagcggccgggtgcaggcagtggacgccgtggctgcagagctggccgccgagcgctaccacgacatcaagcgcatcgccgctcggcagcacaacgtggcacggctctgggacttcttgcggcagatggtggccgcccggcgggagcggctcctcctcaacctggagctgcagaaggtgttccaggacctgctctacctcatggactggatggaagagatgaagggccggctgcagtctcaggacctgggcaggcacctagcaggagtggaggacctgctgcagctgcacgagctggtggaggcagacatcgccgtgcaggccgagagggtgcgggccgtcagcgcctctgccctgcgcttctgcaacccagggaaagagtatagaccttgcgacccgcagctggtgtcggagcgggtggccaagctagagcagagctatgaggcactgtgcgagttggcagcggcgcggcgggcccggctggaggaatcacggcggctctggcgtttcctctgggaggtgggtgaagctgaggcctgggtgcgggagcagcagcacctcctggcctcagccgacacgggccgagacctgaccggtgccctccgcctgctcaacaagcacacagccctgcggggcgagatgagcggccggctggggcccctgaagctcaccctggagcagggccagcagttggtggccgagggtcaccctggggcaagccaggcctctgcccgtgcagctgaactccaagcccagtgggagcggctagaggccctggccgaggagcgtgcccagcggctggcccaagccgccagcctctaccagttccaggccgatgcaaacgacatggaggcctggttggttgacgcactgcgcctggtgtccagccccgagctggggcacgacgagttctccacgcaggctctagccaggcagcatcgggccctggaggaggagattcgaagccaccggccaaccctggacgccttgagggaacaggcagcagccctgccccccacactgagccgcacgcccgaggtgcagggccgggtgcccaccctggagcggcactacgaggagctgcaggcccgggcaggcgagcgagcgcgggccttggaggcagccctggcgctctacaccatgctcagcgaggccggggcctgtggactctgggtggaggagaaggagcagtggctcaacgggctggccctgcctgaacgcctggaggacctggaggtcgtgcagcagaggttcgagaccctggagcctgaaatgaacacccttgcagcacaaatcaccgcggtgaatgacattgccgagcagttactgaaggccaaccccccaggcaaagaccgcattgtcaacacccaggagcagctcaaccacaggtggcagcagtttcggcgtctggcagacggcaagaaggcagctctcacctcagccctgagcatccagaactaccacttagagtgcacggagacccaggcctggatgagagagaagaccaaagtcatcgagtccacccagggcctaggcaacgatctggctggggtgctggccctgcagcgcaagctggccggcacggagcgggacctggaggccatcgccgcccgggtgggcgaactgactcgagaggcaaatgccctggctgccggccatcccgctcaggcagtggccatcaacgcccggctgagagaggtgcagaccggctgggaggacctcagggccaccatgcggcgtcgagaagagtcgctgggggaggcgcggcggctgcaggacttcttgcgcagcttggatgacttccaggcctggctaggccgcactcagactgctgtggcctctgaagaagggccggccaccctgcctgaggcagaggccctcctggcccaacatgcagccctgcggggagaggtggagcgggcccagagcgagtatagccggctgcgagccctgggcgaggaggtgacccgggaccaggctgacccccagtgcctcttcctacgacagcgactggaggccctgggaactggctgggaggagctgggccgaatgtgggagagccggcaaggtcgcctggcccaggcccacggcttccagggattcctgcgggatgctcgtcaggctgagggcgtgctcagcagccaggaatatgttctgtctcacacggagatgccagggacactccaggctgctgatgctgccattaaaaaactggaggacttcatgagcaccatggacgccaatggggaacggatccacgggctcctggaggctggccgccagctggtatctgaaggcaacatccacgccgacaagattcgggaaaaggcagactccattgagaggaggcacaagaagaatcaagacgcagcgcagcaatttctgggccgtcttcgggacaaccgggagcagcagcatttcctgcaagattgtcacgagctgaagctctggatcgacgagaagatgctgacagcccaggacgtgtcctatgacgaggcccgcaacctgcatactaagtggcagaagcaccaggcattcatggccgagctggctgccaacaaagactggctggacaaggtggacaaggaagggcgagagctcacccttgagaagccagagctgaaagccctggtgtcggagaagctgagagacctgcacaggcgctgggacgagctggagaccaccacccaagccaaggcccgcagcctctttgatgccaaccgagctgagctgtttgcccagagctgctgtgccctggagagctggctggagagcctgcaggcccagctgcactcggatgactacggcaaggacctcaccagcgtcaacatcctgctcaagaagcagcagatgctggaatgggagatggctgtgagagagaaggaggtggaggcaatccaggcccaggccaaagcactggcccaggaggaccagggtgcaggggaggtggagagaacctcgagggccgtggaggagaagttcagggccttgtgccagcccatgcgggaacgctgccggcgcctgcaggcttctcgcgagcagcaccagttccaccgcgatgtggaagatgagattttgtgggtgacagagcggctgcccatggccagctccatggagcatggcaaggacctgcccagcgtccagcttctcatgaagaaaaaccagaccctgcagaaagagattcagggccatgagccccggatcgcggacctgagggagcggcagcgtgctctaggtgcagcagcagcaggtccagagctggctgagctgcaggaaatgtggaaacgcctgggccacgagctggaacttcgagggaagcgactggaggatgccctgcgagcccagcagttctaccgcgatgccgccgaggcggaggcctggatgggcgagcaggaattacacatgatgggccaggagaaggccaaggatgagctgagtgcccaggcagaggtgaagaagcaccaggtgctggagcaagccctggccgactacgcgcagaccatccaccagctggcggccagcagccaggacatgattgaccacgagcacccagagagcactcggatatccatccgccaagcccaggtggacaagctgtatgccggcctgaaggagctggctggagagcggcgggagcgcctgcaggagcacctccggctgtgccagctccgccgcgagctggatgacctggaacagtggatccaggagcgcgaggtggtggcggcctcccacgagctgggccaggactacgagcatgtgactatgctccgagacaaattccgagagttctcccgggacacaagcaccatcggtcaggagcgcgtagatagcgccaatgcgctggccaatgggctcattgctgggggccatgctgcacgggccaccgtggccgagtggaaggacagtctcaacgaggcctgggctgacctgcttgagctgctggacacacggggtcaggtgctggccgcggcgtacgagctgcagcgcttcctgcacggggcacgccaagccctggcgcgggtgcagcacaagcagcagcagcttccggacgggactggccgcgacctcaacgctgccgaggccctgcagcgccgacactgtgcctacgagcatgacattcaggccctcagcccccaggtccagcaggtgcaggacgacggccaccggctccagaaggcctacgctggagacaaggctgaggagatcggccgccacatgcaggccgtggccgaggcctgggcccagcttcagggaagctctgccgcccgccggcagctgctgctggacaccacagacaagttccgcttcttcaaggctgtccgggaactgatgctctggatggatgaggtcaacctgcagatggatgcccaggagcgtccccgggatgtgtcctccgcggatctagtcatcaagaaccagcaaggcatcaaggcagagatagaggcccgggcagaccgcttctcctcctgcatcgacatggggaaggagctgctggccaggagccactatgcggccgaggagatctcagagaagctgtctcagctgcaggcacggcgccaggagacagctgagaagtggcaggagaagatggactggcttcagctggttttggaggtgcttgtgtttggaagagatgcagggatggcagaggcctggctctgcagccaggagccactggtgcgcagcgctgagctgggttgcacggtcgacgaagttgagagcctcatcaagcggcacgaggccttccagaagtcagcagtggcctgggaggagcgattctgtgcgctggagaagcttactgcgctagaggagcgggagaaggagcgaaagagaaagagggaggaggaggagcggcggaaacagccgcctgctcccgaacccacagccagtgtgcctccaggggacctggtgggcggccagacagcttctgacaccacctgggacggaacccagccacggccaccaccatccacacaagcacccagtgttaatggagtctgcacagatggagagccctcacagcccctgctgggacaacagagacttgagcacagcagcttccccgaagggccgggacctggctcaggggacgaagccaatgggccccggggagagaggcagacccggactcggggcccggccccatctgcaatgccccagagcaggtctaccgagtcagcccatgctgccaccctgccgcctcgaggcccagagccatctgcccaggagcagatggaggggatgctgtgccgcaagcaggagatggaggccttcgggaagaaggctgccaacaggtcctggcagaacgtgtactgtgtcctgcggcgtgggagcctcggcttttacaaggatgccaaggcagccagcgcgggagtgccataccacggagaagtgcctgtcagcctggccagggcccagggcagcgtcgcctttgattaccgaaagcgcaaacatgtcttcaagctgggcttacaggatggaaaagaatatttattccaggccaaggatgaggcagagatgagctcgtggctacgggtggtgaatgcagccattgccacagcgtcttctgcctctggagagcctgaagagccggtggtgcccagcaccacccggggcatgacccgggccatgaccatgcccccagtgtcacccgtcggggctgaggggcctgttgtgctccgcagcaaagacggcagagaacgagagcgagaaaaacgcttcagcttctttaagaagaacaagtagttgggggcaaggtcccaggccaactccctccctccgttcaggaaactgccagggacagtcgacagggaccgccctcttgtcaggacaactgcctgctgctagggtctgttgccaaggtcaacccatcaccaggaactgtcactggggacgagtccatgttcccaagggcagcccttctcttctgctgtttaattccagactggtggtgggacccaggtaaccccctctcccacccccgccgacttctcccctttccccagcctcgtgcctctgtccctcaccacggtgtggacagtgccgcaccctcaacataggccatgtggggagtggctgcccctgcctcagggtcattctcctgccatgcgagggcactcgccttctgccttctggttcctcacccctcagaccagccaggaacctctcagagctgaagcaggccctgggggcagaagtgccagatgacagtcagaggcgcaggagccctccctccccacccccaccctgtaactccagctgccactccatctccagctgctctcaatggcttccaggtgtgttgttcggggacagccaccgccttgagtctggccaaggaggtgattaaacagctcagcttctc

SEQ ID NO: 4243 - DNA, 350 bp, Homo Sapiens
  misc_feature (129)..(129): n is a, c, g, or t
  misc_feature (239)..(239): n is a, c, g, or t
  misc_feature (293)..(293): n is a, c, g, or t
  misc_feature (309)..(309): n is a, c, g, or t
  misc_feature (328)..(328): n is a, c, g, or t
gcaatttaattttcacatgccttctcatttcaggaaaggttgaatccaggtgctcaattgattttaggagataaaatttaatttataaattaggcacagtaagatattaacaacaataactaataacanaatagaacaattatagaactatagtgtaataaaagttatgcaaatgtggtttctctctgtctctgtcaatatcttattgtattgtaccattggtaactgaaactgaaganagcaaaaccacagaagagggttgactgctatactccagttgggactgagggganggcactttagattaangactaccaccgtgtaggancagggacaattctcacgagaga

SEQ ID NO: 4244 - DNA, 394 bp, Homo Sapiens
cacgaggtcaagcctcaaattctataaggacggcttgagccagggcagttcaggaaacacttgaggagcagaggcagcagggcgctggaccagacagaggacgggaatgtccaagaagtggtctctgtgtgcggtaatgagccgagattacagctggcagctggaaactaaaccccatgggtgccacccagagagagctgagactgaccatggagtaacggccaaggtcatgtgtgtagccccgggccatggagagggggtaccctggaggggctgggctggctggctgggctcaggctgtctgacaggcaacgggctccccagtgttctgaagagggagtggccctggtggtaactctctgtggcttagaggggctgaagctagaacaccgct

SEQ ID NO: 4245 - DNA, 446 bp, Homo Sapiens
  misc_feature (2)..(2): n is a, c, g, or t
  misc_feature (7)..(7): n is a, c, g, or t
  misc_feature (420)..(420): n is a, c, g, or t
gncgttnaaaatcaagaccacggtcaaacccctcttctaatcacattaattgtttcattctttttaccctgagtgagcacttttcactttccagctaggtctgtttttcagcttgcagacaagattgagaaatccttgaaaatttggttttggttaaaatttttggtttatttatttgaaatccacactcccttggaaactcttaagtgcatttgtgcacttctgtttgtttgtctcaaagaagggactgtaacaatctgagtaatttccatgtcctcttccttattcctctagtgggttgaagctgtgtagcattttaacatatatatattcacaaatatattcatataaacagtatacattttgaatcagtcatttgttaaagaaaagtatattcaatggaggatggaaatttaaatnaaaaagggacagagtctatcctccgg

SEQ ID NO: 4246 - DNA, 204 bp, Homo Sapiens
ttttttttttttttttgactaaactgtataagtatataattataaaccatggtaaaagctgtgaaaaaaaagtacagctttaccagcttgctactggaagggggtgggggcaagtgtcacaaaaaagcaccccaagtaaatacagggaaaaggacatggaggttattgccttggaggccaggaacaagcacatccaaaggccct

SEQ ID NO: 4247 - DNA, 4340 bp, Homo Sapiens
agaaagcggcgcgcggagggtgtgagatggcagacaggtttgcaggaaaccctcagaaagggggctggaggatttagccactctgtcctccccttccggcagtccagggcctcctcccgagcacagcggcgctatggactctccaggatacaactgcttcgtggacaaagacaagatggacgctgccatccaggacctggggcccaaggagctgagctgcactgaactgcaggaactgaagcagctggcgcgccagggctactgggcccaaagccacgccctgcggggaaaggtgtaccagcgcctgatccgggacattccctgccgcacggtcacgcctgacgccagcgtgtacagcgacatcgtgggcaagatcgtgggcaagcacagcagcagctgcctgccgctgcccgagttcgtggacaacacgcaggtgcccagctactgcctgaatgcacgcggcgagggggccgtgcgcaagatcctcctgtgcctggccaaccagttccccgacatctccttctgccccgccctgccggccgtggtggccctgctgctgcactacagcatcgacgaggccgagtgcttcgagaaggcctgccgcatcctggcctgcaatgaccccggcaggaggctgatcgaccagagcttcctggcctttgagtcgtcctgcatgacgtttggggacctggtgaacaagtactgccaggcggcccacaagctgatggtggccgtgtcggaggatgtcctgcaggtctatgcggactggcagcgctggctgtttggggagctgcccctctgctacttcgcccgggtctttgacgtcttcctggtggagggctacaaggtgctgtaccgcgtggcgctggccatcctcaagttcttccataaggtgagggccgggcagccgctggagtcggacagcgtgaagcaggacatccgcacgttcgtcagagacatcgcgaagacggtgtcccctgagaagctgctggagaaagcgttcgccatccgcctcttgtcccgcaaggagatccagctcctgcagatggccaatgagaaagccctgaagcagaagggcatcaccgtgaagcagaagagtgtgtcactttctaaaaggcagtttgtacacttggccgtccatgcagagaacttccgctcggagatcgtcagcgtgagggagatgagagacatctggtcctgggtccccgagcgctttgccctgtgccagccccttctgctgttctcctccctgcagcacgggtacagcctggccaggttctacttccagtgtgaaggacatgagcctaccctcttgctcatcaagaccacgcagaaggaggtgtgtggtgcttacctgtccacagactggagtgagagaaataagtttggaggcaaactgggcttctttgggaccggagaatgctttgtgtttaggctgcagcctgaggtgcagcgctacgagtgggtggtgatcaagcaccccgagctgaccaagcccccacccttgatggctgccgagcccaccgccccactcagccactccgcctcctcagaccccgctgaccgcctctcgcccttcctggccgctcgccacttcaacctgccctccaagaccgagtccatgttcatggcggggggcagcgactgcctcatcgtcgggggaggaggcggccaggcgctctacatcgatggggacctgaaccggggccgcacaagccactgcgacaccttcaacaaccagcccctctgctccgagaacttcctcattgctgccgtggaggcctggggcttccaggaccctgacacccagtgacggcctgtgccacggtgactgagccgtggtggggcggtgggccgaggctgggctgccgcctcgggcagcagagagcagatgaaacccccatgtggtaggcagggttgggggacggcaggaccccatggccaagcctggcgttgcctggacctgctgctgcctctacctggggtttgggctgggcttccccagtccacctgcatctgggtcagagctggagggcctgctgtgcccccagccccacccagagctggcataggaagtaccttcctcctccgtggaggcttccatagcccaaggccttgggagtgtctgggtcttgctgcccctgagcctctctaggcagcctgagcccctggggtgggagtacaacggcagtgggaacgtgcagctaagggtgggcctgtggtgccccctgctggtgccgcatagcatcgcgccctcctgagcagggccctgcagcctggctggctggcgactgaatcccagcgtagatcccgagaacagactggcacccttgggcctgccccctggcggaccccaccccctgtcctgggcgtttgccccagttccctccccaggcctcctgggccacctctcacattaacccttcttggctgcctctgaggctcccctgggctgcgtttgggagctgctgggtgggaggaggagggtgggatttgtgctgggctccacccccagggagggtgggagctggagggggatgtcacatgtccttgtgtttctgcagagcctgaagcttttgctgggcctccctgcgtgttcccatctgaagaggtagccccgggagaggccctcagggaccgacccagaccagcaagctccatttccaggggtctgcccagagaagcctggacccagggggcttctcagctcccctcccttccagcccaggcctccttgagctcctgtagcctctgcagctgcccatttcacctctttgtcattgcaatgacctggggcccagggtcacgcccaagcccctctttgtggcatgctcatctcagtgcagccccaactgcttctctgcaccaggccccgtgccctcccctggccctggccacacagcacctccttggccaccttgcatggatgcatgtcctccctctgtccctcttgtggtgctgtggctggccacgtgtcagggttttctgtgagcctctcaccttacagcctttgggcccctgggcccctgccctgcctgagccctgcgctggccagacgcaggtaggtgccaggggaggccttgcctctgggcactatagggggcagccccctgccttgtgacctccctccatgccccatgacctccttcaactcgtcttgagggtctggtcaccacggaggggagaagggagacacagaggcccaagtggctgttctgggaccatggaagcctgggtcacagaggcaggtaccagcagtcctgcccccacccccgtccctgctggcctccagccagtgccacttggagtcccctgcaccgtgccactttccatccccacaccattgcctgctcctcccatggggctttagcctcccctgaccatctgctcatgtagcctctgactgggcgcacagtggtgcaggaggaaggaccgggaaccctgtgtggctttgggcaagctgacaaacccgtctggaactcagtttccccagctgtgaaatggggccagtccccatgccctgctgtcctcctcacaggactgttgagaggctcgcagggggatggggtgaatccctctcacggggagaggtatgggagggaagtcgccactcatctcagcccaccgcagccctccaggcccccgcctgagcccctgaggccctcatctgtaccgccagctttggtgttcattaaacatggtcttgctgcatcaactccagggctccaagctgagtctgatctcttcagccagaggggcctccgggggcttcctgggcctacagccaagcaggtgtgggaggctgcccgctgtagtgctcacccacattctatgactggaatgctgcaagcctcttccagagggagccctccaggagcagggaagtcatatccgtggaccatttgtaggtttccctctgcaaacttcctgaactgggtggtgatttttctggcgagttaagtccagcaggttctgcgtggctgcccccagggggccccacccgggccttccagtgatctggaccaggaagacggattgctgctgggtcatgatttccacatcatgagcgaagttctttgttttttgtgtgcatgcaaaatattgtttctttaaatttaatatcttttcctaacttttctactaacctagaaggtatgtgtgattattatcttttttattcttatcactgtacttgttagtatctgatattaggtattcccaaatagaacataatttattttgttaatgttctctatttcttcttgattatttattagctttggatgttaaaaattagccaaaagtggctgctctgcctatgaagtagccattctttgttt

SEQ ID NO: 4248 - DNA, 1539 bp, Homo Sapiens
gctgactccagtgtcccgagaggcgccgcttcttccgctttctcgtcaggctcctgcaaccccaggcatgaaccaaggtttctgaactactgggcgggagccaacgtctcttctttctcccgctctggcggaggctttgtcgctgcgggctgggccccagggtgtcccccatggcggggccgcgggtggaggtcgatggcagcatcatggaagggggcggccagatcctgagagtctctacggccttgagctgtctcctaggcctccccttgcgggtgcagaagatccgagccggccggagcacgccaggcctgaggcctcaacatttatctggactggaaatgattcgagatttgtgtgatgggcaactggagggggcagaaattggctcaacagaaataacctttacaccagagaagatcaaaggtggaatccacacagcagataccaagacagcagggagtgtgtgcctcttgatgcaggtctcaatgccgtgtgttctctttgctgcttctccatcagaacttcatttgaaaggtggaactaatgctgaaatggcaccacagatcgattatacagtgatggtcttcaagccaattgttgaaaaatttggtttcatatttaattgtgacattaaaacaaggggatattacccaaaagggggtggtgaagtgattgttcgaatgtcaccagttaaacaattgaaccctataaatttaactgagcgtggctgtgtgactaagatatatggaagagctttcgttgctggtgttttgccatttaaagtagcaaaagatatggcagcggcagcagttagatgcatcagaaaggagatccgggatttgtatgttaacatccagcctgttcaagaacctaaagaccaagcatttggcaatggaaatggaataataattattgctgagacctccactggctgtttgtttgctggatcatcgcttggtaaacgaggtgtaaatgcagacaaagttggaattgaagctgccgaaatgctattagcaaatcttagacatggtggtactgtggatgagtatctgcaagaccagctgattgttttcatggcattagccaatggagtttccagaataaaaacaggaccagttacactccatacgcaaaccgcgatacattttgctgaacaaatagcaaaggctaaatttattgtgaagaaatcagaagatgaagaagacgccgctaaagatacttatattattgaatgccaaggaattgggatgacaaatccaaatctatagagtatttgcctcttaaatgatacctcattgatatattgcactatttcataaatactataaaataatgactaggaagtaacttattaaaggctatgacttaaatttgaagatgaagtacagtgttctaggtttgctgagaaggcttcattaaattaatctcactttgaatatctcctgagagatggacaatgaaatatcagttggtggatatgtgtgatagctgatttcaatattgaagtattgaaataaaatattctttacacctgag

SEQ ID NO: 4249 - DNA, 353 bp, Homo Sapiens
  misc_feature (64)..(64): n is a, c, g, or t
ctcgggctctagaaaaaactagccagaaggtggggcacgcggaccgcgacggagcgagcgcagnggctctgcgtggcccaacggacagcccgaggtccgccgtcttcccgcttccagggcccggttcgttcccgcccgcacccgtccctctcctctgcacccctgctgcttctgctttgaaggcggaggctccatgttgtcccctcagcgagtggcagcaagctgcctcaagaaggagcagatgactgccactggagagcagcaagccttggtccagttgcaggttgttttgggttcagaaagatcaacattcctttgagctaagatgagaaagcctttggccaagcatcctc

SEQ ID NO: 4250 - DNA, 384 bp, Homo Sapiens
acggcccccgaattgaatttaggtgacactatagaagagctatgacgtcgtttgcacgcgtacgtaagcttggatcctctagagcggccgcctactactactaaattcgcggccgcgtcgactttttttttttttttttttcaatgtaaagcaaattagttcatcactttattacatcttagggctttcttaaaataaatacagtactatcatatcaaacttactgtgagaaataaagcccatgtgtgaaagtatggtaacagaaagcttactcaggactgtgtaactgagcacttgagaaatcatacagcctttatttccctatttacaggacagagagcggctgtgttcaacaccatttatacaaaatcccaagagactgta

SEQ ID NO: 4251 - DNA, 464 bp, Homo Sapiens
tttttttttcaaattgaatgtatatatttattataatctccaaaataatttcacttggtacaactgcttcttaaaaccatatcaatatcaggctcagaatttaattacaaccaagcaattcacaaaaacactgagcaacaaaacatgcttaatatttctttgagaaagacccttcaaatatgtgtacagcatcactgggagttacacaaaactgttacaaggtgaccattaagtgccccaattctgcacttctgacatacatgaatggctaatgtaaccacgtttgggaatctttttacatctcaaaataaagctttctgatgcaacttgccatccttttaaattttaaaggatattcttggtaattccttaggaaagtaaaactacacacactttcagagaaacaataagctgcttagatttttaaaattttttatattatacacttcaattatgggttattt

SEQ ID NO: 4252 - DNA, 705 bp, Homo Sapiens
cggatgttactgagcgtcgtcctggttttatttcgtacgggggcggcgcctgtgctagtggtggcttgtcctggcgtacaacctctacttcctgccggggggcgcgcgctccgagatgatggacgacctggcgaccgacgcgcggggccggggcgcggggcggagagacgcggccgcctcggcctcgacgccagcccaggcgccgacctccgattctcctgtcgccgaggacgcctcccggaggctggcgtgccgggcctgcgtcgacttcaatgacgtggatgcggacgcatgcagaagcgggacaccaagtttagggaggactgccctgccggatcgcgaggaactgggcctgccacagctggtgctgtcctccacaccctggccgcctactaccccgacctgcccaccccagaacagcaagcaagacatggcccagttcatacatttattttctaagttattacccctgtgaggagtgtgctgaagacctaagaaaaaggctgtgcaggaaccacccagacacccgcacccgggcatgcttcacacagtggctgtgccacctgcacaatgaagtgaaccgcaagctgggcaagcctgacttcgactgctcaaaagttggatgagcgctggcgcgacggctggaaggatggctcctgtgactaggagggtggtcagccagagctcatgggacagctagccagg

SEQ ID NO: 4253 - DNA, 391 bp, Homo Sapiens
  misc_feature (262)..(262): n is a, c, g, or t
  misc_feature (366)..(366): n is a, c, g, or t
gagtagctgaatttctgaaaccaaatctgtgtcttcataaaataaggtgcaaaaaaaaaaaaataccagttaagtaaagcctcaactgggtttttgtttctatgaaaatatcattataatcactatttatttcctaagttgaacctgaatagaaagggaaaccattcttattaagctttttattaggccctgtggctaaatgtgtacatttatattaggaatgtactgtacagtccagatcttttctttaattcttattggnttttttttttttttttttttttaggagatgggagtcttgctatattgccaaggctgatcttgaagtcccgggggttcaagtgatccctcccacctcagcctccngagtgggttggggggttacggggcc

SEQ ID NO: 4254 - DNA, 360 bp, Homo Sapiens
taatagaaattcagaattcctaggcatatgacctagactaaaatgtcttcataactacaaatgaaatcagggtcatttatagtacaaactaccacagaagtcagtagttaggggatggagatagatatgaaaaaaaaaaaaagcaaacccagcctaactcccagggagggaagaggggcgacagatatgcagctacacaatgtttttactatcttgagttctttttacccagattccatagctaaatccagatgtattaataggtagagactacttcagaaaggatgagactattttcttgcttaattatccacacagtaattcagaatgtatattgaacactttttatatgccccgggg

SEQ ID NO: 4255 - DNA, 507 bp, Homo Sapiens
  misc_feature (392)..(392): n is a, c, g, or t
  misc_feature (478)..(478): n is a, c, g, or t
cgaggagatattcagcagagcccatggcctctgctggacagacagtgggaaggggaagctctgtgggggccctaaaagaatttcttgttaaccccccgaggttggcccttcctctccactggccatgatccacctgaagggaacttgagcatttaattcaacagaccagcatatacttcctcctgtggcctgatgagcaagtggagtgagcccaggcctgcagagtgacacaacagtaggtagacagttgcagaaggaaatagctgacccagaaggactctgggccagggccacccagcatgggaactggtttacacatgctatggaaactctgttttgatcacatgggaaacttcaggagctgatttttccctgccttgctcaatcctctnttgaaccctatcttaatgataacatggtagcgggagagggcagctctttcagaaggcaaaccccaggaaggcagacatttctgctntgtctgtgttattcactgccctattccaa

SEQ ID NO: 4256 - DNA, 497 bp, Homo Sapiens
  misc_feature (418)..(418): n is a, c, g, or t
attaaacagcctaataatggtttggcaacttgcttttctctttcaagtctttaatcttttattcagaggatgctttgttttctgggaagcaccaggataatgtggcaatgctttaaaaaaaaaaaaaaaactggctttacttcagcaagctttcctgggagactctaatggcagagactgttgaaatagaaatgcctcatgaacactggccgccccatagtgtctcacttccctctttccagccagtgattaacagctcttaatgaattcagaggactgcatggctagattctggggttactggtgcaggctgatggagaaggggttgaactgcattaaataaacaaaacaaattagtgctccagaaaaagcacggggccgggtgcaatggctcatgcctgcaatcccagcacattgngaggctgaggcagggagattgcttgagccaggagtttgagagtagcctagccaacataacgagaccccgtctctatata

SEQ ID NO: 4257 - DNA, 929 bp, Homo Sapiens
ggctaggtacgaggctggtgtgaatcggccgaggagacttcaccctggaaacatactggttcaggatgccaacggcctgtcctcgagtcaggaggcgcagctgcagcaggcggacatctgtgacactctggtggtggccgtgccatcttccctctgcccgctgcgactggtgctgctggatgctggcattgtggcggagctgcaggcccctgacctgaggaatttccgggcagttttcatggctgtggtgatggggcagggccagagagtggctgagctgatcctgcatcatgcccgggccagcgagtgcagggacgtggaggggttcaaaaccgagatggccatgctggtgacccaggccaggaagaacaccatcaccctggagaagcttcatgtgtccagccttctctctagtgtctttaagttgctgatgactcacaaggtaaagcttgagagcaactttgcctccattgtgtttgccatcatggtgttggaggggcttggccgctcactggaccccaaactggacatcctggaggcagcgaggccttcctcctcacgggcccagtgtgccccccgtgatggggcagtggcctctgtgggcccttgtcaagagctggaggccactccccaagagcctctcctatggcagctgggacgttttaaaaatttggggacacccaatttcaaatgtaaccctccaagtggtggaaggcacaccatggcttcctctgcttggtttgagggtctgttcaaagcttgggccaattagggagtcaaggaggcaggggctatcattccatgtggaagctggccaggtgccaggtacactctcttcagggaaatgtttgtgcggaggcgataatttggtttcaaaaaaacaaaaaaaaaaaactcgggtttttcgggggggaaacgtttaagcgtgc

SEQ ID NO: 4258 - DNA, 469 bp, Homo Sapiens
tttttttttccccatacaggcaattttttattttttatcatgcgtatagaaaacaaaagtgtcacagatccccttgtgactggacaaagccacctcaggaatatttctctgcttaaaagaagcattgtcagttacagggatgtcaattacaacctggcacaaaatcatcaagaccatcagggtcacagaattctttctggaggttatccttgcagaacacaggcacagcttccagtctgaagtccaacaaaaccagaactctgcttctaagtacaagattatggtaaaggccccaacaacctgataacaattgtgaatagtcacataagtttccaagtggcataaaaaatgtacacatacaatcttgcaaaagttctcaactaaaagcaacaagcaagcctttacagcataatgccccagtgggctgaaacacaggaggggatgcatagggtcttacttaaaagcagca

SEQ ID NO: 4259 - DNA, 332 bp, Homo Sapiens
tttttttttttttttttgaagcattcctcataggtggtttttattttttgaagttgaggcaaggtcaccagctaaaaatgagaggtagggaaaaaggatgtgaaatttgaggagatgtgaacgtatgaatggttaacccagagactggaatagcattgccagccagtgttgagtgctactgagaggactgaggtcatgaattaaaaccagttagcttgttatatgactgacttttctccagcagcttttgctgtttggatgtaagcaatgagaaagttcagctggagcatggtttagtccaagcaaggctgagattctttcaagcaaaaacc

SEQ ID NO: 4260 - DNA, 5970 bp, Homo Sapiens
ggcgcggggagctgtgggcggcagctgcgtctcctgccaccgccctccctccgccacgatgccggggatcgacaagctgcccatcgaggagacgctggaggacagcccgcagacaaggtctttactaggtgtatttgaagaagatgccacagctatttccaactatatgaaccagttgtatcaagctatgcatcggatttatgatgcacagaatgaattaagtgcagcaacacacctgacctcaaaacttttaaaagaatatgaaaaacagcgttttccattgggaggtgatgatgaagttatgagctctacattgcaacagttttcaaaagttatagatgagcttagctcttgtcatgcagtgctttcaactcaacttgctgatgccatgatgttccccattacccagtttaaagaaagagatctgaaagaaatactaacattaaaggaagtatttcagattgcaagtaatgatcatgatgctgcgattaatagatatagccgtttatcaaaaaaaagagaaaatgacaaggtgaagtatgaagtaacagaagatgtgtacacatccagaaagaaacaacaccagaccatgatgcattatttttgtgcattaaatactcttcagtacaagaagaaaatagcattgttagaacctctacttgggtacatgcaagctcagataagtttctttaagatgggttctgaaaatcttaatgaacaactggaagaatttttagctaatattggaacaagcgttcagaatgttcgcagggaaatggacagtgatatagagaccatgcaacagacaatagaggatttggaagtagccagtgatcccttatatgtgcctgacccagaccccaccaaatttcctgttaatcgaaatttaacccgaaaggctggataccttaatgctaggaataaaacaggcttggtgtcatctacctgggacagacagttttacttcacgcagggtggaaatttaatgagtcaggcccgtggggatgtagcaggaggcctggccatggacatagacaactgttcagtgatggctgtggactgtgaagacagacgatattgttttcagatcacctctttcgatggaaaaaaatcttcaattttgcaagcagagagtaaaaaagatcatgaagagtggatctgtacaataaacaacatatctaaacaaatatacttaagtgaaaatccagaggaaactgctgcacgagtaaatcaatcagctctggaagctgtcactccttccccatctttccagcagaggcacgagagcctgcggccagcagcaggacaatctcggccaccgacagctcgaaccagcagttcaggatccttaggatctgagtctacaaatttggctgccctctctctagattctcttgttgccccagacaccccaatacagtttgacataatttctcctgtgtgtgaagatcagcctggccaggcaaaagcctttggccagggaggcaggcgtacaaatccatttggagaatctggaggaagtacaaaatctgaaactgaagattctattcttcatcagttatttattgtccgattccttggttcaatggaggtgaaatcagatgaccatccagatgttgtttatgaaactatgcgccaaatcttagctgcccgggccatccataacatctttcgtatgacagaatcgcatttattagtcacttgtgactgtttaaagttaattgatccacagacacaagttacaaggctcacgtttccattaccttgtgtagttttgtatgctacacaccaggaaaataagcgcctttttggatttgttcttcggacatcaagcgggagaagtgaaagtaatctgtcatcagtctgctatatatttgagtcaaacaatgagggggaaaagatatgtgattctgttggactggcaaaacagatagctttgcatgctgaactggatcgtagggcatcagaaaaacaaaaagaaatagagagagtaaaagagaagcaacagaaagaactcaataaacaaaaacagattgaaaaggacttggaagaacaaagtcggttgatagctgcttccagtagaccaaaccaagccagtagtgaggggcagtttgttgtccttagcagtagccagtcagaagagagtgatttgggagaaggaggaaagaagagagaatcagaagcataagcttatacttttggtagatattcccccttggaatttgacagtttctatggtgaaatggcagaaggtaacaactatgttgaaatatcaaggaggagattaagctttatatttgcttatttgttgtagctacattttaaaaaaaagattgaacttgatgacttaggtttgcattgatcttttttcccccttaaacataatgtactatgtattaacatctaaaggaaacctgctcatctccctgaagcagactgctgaggaattacatttgctcaagaattttttccgtcaaattgtgaacttttaattcttgcattgtaattggctgtgtccataagaaatcatttattcttcaggcttagacattcatggatatgcttttctttcattaggaacattttgctggtgatgaggaagcatttagctgaataagtttaaagccctttatacagagaattctacaagtttgcaaatattttaacaatattaaatgtgcaatagaacttttataaaataattagaacagagattttacagttaaggtttcaaattgtggcaggtggtactgttgatctcagggtactttctgggattgctcacatttctctaatgtactgcacttgatgccagtaggaaagaagcttaagtgtcttcagttcaagattgatagagcccttggcattttattatcacattcttagttctcaggttgggacttcaattactgctgcagagcagtagtggttaaaaataagatattggaatttattaaaagatttttgttcaatacattttagattaggattgacaagtaaagatactgctatggaatgatacattgtattttctgcattgtgtgaaatagtttttattgaaagtcaagtgacatttcaaaagaagttctataacaattatgtttcatgcttaaagtaaaaattcccagagtttagtttagaaaatgtaatcttttaaatttcagactgatatattcccagtattttcataatgccatgttttgataaagtactgaatcaccactttatatccacaaaggcaaataactaatgtatgataatagaataatttgcactaattattgtaaatatgtctactcttcaaatgagtaaaaggtccaattttgtgaaagattgaaaatgaattgaatgcctagtagagtataggagaagttgaccaaggaaggatttaacctggtgccaaggttaaaataacatttctctactgcctattgtttatgttaaaccttaattttttttctgtaatcacttttaacactgctaatagaaattatgttttcatgtgtttcacatgaaaaagtatatatatacaaagttaatatagtgggtaaaatactttacatagtcacacatttacaaatttttcaagaggttagccactaagactttaataattttacaagggaaaaagcctttttttttctttgatatacagttttttcttcttagttctgcattagaaatggcatctgttttaggtctcaaaatataactcggctgtttcacactgtatatgtacattgttttctgtaggaataggataatgatatataggatcatgatattccttctatccatgtgccaaatgggtgtaatgtttatttactgatgctttatgttaccaaaacatacagtaaaaaagtagaaatttatgaaatacttttgataaaaagtttattttgtgcttaccaaaaggaatgctttcacaatagtgtatcagttcttttgttttgttaaagttggaatttattctgttgccagcatttaagtagtcatggcaagtcctgtttttaagaccttttggagactggagctttctgttccattaagtcttttgtttatactacaaattgtcacctcacttagttcagatgaaatctgttactctacaaggaaggtgttcatcattaggaggcagctttactaagctggtgctttgcatggtagcaagtgctgccctttatcagcaccctgggtcatagtgtaggctagagttaaggcactggcagacttagggatgctggacagacctgtagttcgttttaagtcatgttcacaggaatttctacaataataaacccatcatctccataggtcagatcgaagtgcattccaatgctaaatagaagttatgagtgggtttaacaattttagatgattcagcttttgttccattactgttgaactatatgaactattccattactgcagagatttaagtatctgttttaataagctctttttgttatttaaaggctgcccatgggtttctgcctagtggtaaagctgattgttaccctcctttgaaatcccttctagttctgagatgctttgagggtaactggattcgattttgggatatcttttctcacattcagacttacacttaatggtgttagaaatcaacaaaactcctttttaaaaagaaaagatattaagcctgcctacttctacaatgcattctgttacctatttgaacagtatgtttgtaactatggcaatgaagtcagtagataggaaaccagttattccttctacctttaaaaattttgagaacttgccaaccagggattaaagctattatcttgaacagagtccctaaagctagtctagtttttgccacatctgcaatgattattgtttaatttcaaaagaatcctcaggctctacaatctaggggtggtaaatgtgtttccactatacttgggaaaaggtcagtaggatgtgcatcctagggaagataaaatcgtatatggtaaaggcatttgagttaattttgcattatatctaggaaccatattatttaaaatttgaatcctattaatgctgagagatcctaagagctagtatgttgtaaaacctgccacctgaataaaatgaaaaaaaaaagtgtttttttgagacagagtcttgctctgttgcccaggctggagtgcagtggtgtgatcttgggtcactgcaaactccgcctcccaggttcacgccattctcctgcctcagcctcccgagtagctgggaccacaggggcccaccaccgcgcccggctaattttttgtatttttagtagagacggggtttcaccgtgttagccaggatgttctcgatctcctgacctcatgatccgcccgcctcggcctcccaaagtgctgggattacaggcgtgagccaccgtgcccggccctaaaatgaaattattaatgttggttctgaaacagcctcttagcattcagattgtattttaaatacttaaacacaccaattgtagaaagcaaccctttatttttagcaagtttggtttactcttctcccatgagattttgtctttctacattaactagtaagacataaagatttgaaactggaactatattatactttttaaccaatctctgtggcttcactcatgaaatttacttcagttaatatgagactgggggttaagttgtaactaatatgcaaaattgctttgtatatttggtgattttgtaatgtaagtgaattgattcttatttcactgatactattaatcatgcagtgtacaattcaaaatcatgcaatgtttcactttagaattggatttgaagaactcgactttatgtgatcatggtattggtatacatgtggggtggagaacttattttttcattttgtcacaataggtatatactgacaaggcttcaggaaaaaagttgttagaagattttttaatgtataataaagtccatgatttttgtacagtgttttttaatg

SEQ ID NO: 4261 - DNA, 314 bp, Homo Sapiens
ttttttttttttttggcagtttgacagttctaatatagaacttgcatgacaacttcctttaaagtatagtaaataaagaatggcaatataaattagttatctaaggagatacaagacattctgaagcagcattttcagttacttcatttttcagaaaaacaagtttcacccatcaacatggaattaagacttccagtcttccaaatacattagaaagtacagttaatcacagtaaaacttgcaaataaccaaatttagttctggcctcagccaggactattcacatatttgaatttgttttattttcatccttc

SEQ ID NO: 4262 - DNA, 541 bp, Homo Sapiens
  misc_feature (7)..(8): n is a, c, g, or t
  misc_feature (66)..(66): n is a, c, g, or t
  misc_feature (234)..(234): n is a, c, g, or t
ggcacgnngggaggcccagggagaacggggaagggacatttagtttgagacggtgctgagataggntcatgaaggaagaggtgaagggaattcctgtaagagtggcgctgcgttgtcgccctctggtccccaaagagattagcgagggctgccagatgtgcctttccttcgtgcccggagagcctcaggtggtggttggtacagataaatccttcacctacgattttgtatttnatccctctactgaacaggaagaagtcttcaatacagcagtagcgccactcataaaaggtgtatttaaaggatataatgcaacggtcctggcctatgggcagactggctctggaaaaacctattcaatgggaggtgcatatactgcagagcaagagaatgaaccaacagttggggttattcctagggtaatacaactgctcttcaaagaaattgataaaaagagtgactttgaatttactctgaaagtgtcttacttagagatttacaatgaagaaattttggatcttctatgcccatctcgtgagaa

SEQ ID NO: 4263 - DNA, 1108 bp, Homo Sapiens
cacacctcatacgcagccacatctgccctattctccatgctttccagcttgcctgcccttcctcatctctccctgcctgtgcagacctccacccttctttcctccacccctccatcccccaatgcttgtagaccttccattcattccgtctcatcgtgcgtggtctctgatcgtccatcacctgaccttctccaggactgtcttctcacccttccccactccctggtccccgggagcagctccttctgcccgactcactcacagtgcagggaaaggaggcagggaaaagaccaggattctgtgagttctgaggttgccacacacaaagaagctgtggtttctctgcctcggccactgatgagactaaaactggcttccccttggagacggcagatttcaggctgatccctgcttaagccctctcatccccacgctggtcctggtattgatacaagacccagctggtgacaaagcctccaatcctgggggtccacgagcctgggcctgacattcccagaactaccgccagtggcgccaggcccccacagtctgtggccgtggtcttagcccccagttccactctggatgggcctgtgacaccccaaagagaagaaggggactctggatagggtccccacatccagggcgtggggagaccattggcatttgggaaccattttccttcgaacggcttccccttgagctgagcattctgcttgctgcagtagacgggtcgccttttgcccataccgaaattttctgaaattaaatcgcacacccccaccatttcctctccctggggatctggaggaacatcatacatagtaggtgaatcgttttgtagagtgaagaatgctaatgtaaagcaaatagtcacccacgttccttgtaaatccaaatgtttctatattgtagctttgcttaaaatgggggtcggccccaactgcatcctcctctttggcgggctggggagcggcccccagccgggacgggagggcagcgaccccgaggcctcgtggacgtgggagagagtgtggtgggaagtcttgagcggaggaggggatctgcccttctccactcctctcttggatccgcctcggtttcctgt

SEQ ID NO: 4264 - DNA, 1089 bp, Homo Sapiens
caagaggtgctgtttcatgggggcagcagcttcacagtgctgcgttgcaccagctttgcactggagagctgtgcccaccctgaccgccactactccttagctgacctgctcaagtacaacttctacctgcccttcttcttcttcgggcccatcatgacctttgatcgcttccatgctcaggtgagccaggtggagccagtgagacgcgagggtgagctgtggcacatccgagcccaggcaggcctaagcgtggtggccatcatggccgtcgacatcttctttcacttcttctacatcctcactatccccagcgacctcaagttcgccaaccgcctcccagacagtgccctcgctggcctagcctattcaaacctggtgtatgactgggtgaaggcggccgtcctctttggtgttgtcaacactgtggcatgcctcgaccacctggacccaccccagcctcccaagtgcatcaccgcactctacgtctttgcggaaacgcactttgaccgtggcatcaacgactggctttgcaaatatgtgtataaccacattggtggggagcattccgctgtgatcccagagctggcagccacagtggccacatttgccatcaccacactgtggcttgggccttgtgacattgtctacctgtggtcattccttaactgctttggcctcaactttgagctctggatgcaaaaactggcagagtgggggcccctagcacgaattgaggcctctctgtcagtgcagatgtcccgtagggtccgggccctgtttggagccatgaacttctgggccatcatcatgtacaaccttgtgagcctgaacagcctcaaattcacagagctggttgcccggcgcctgctactcacagggttcccccagaccacgctgtccatcctgtttgtcacctactgtggcgtccagctggtaaaggagcgtgagcgaaccttggcactggaggaggagcagaagcaggacaaagagaagccggagtaggagggagcgggtagagggatgggctctgctcagctattcttgggccagatggggcctgaccgatagaataaaagacttttctacaac

SEQ ID NO: 4265 - DNA, 534 bp, Homo Sapiens
aatttaggtgacactatagaagatctatgacgtcgcatgcacgcgtacgtaagcttggatcctctagagcggccgcctactactactaaattcgcggccgcgtcgaccatatagctatgccaatttacgtgttccttggagtggtggtggaaaaatacctcttctttcagagtttatgtggatttacatagtatgagtgttttagctatagggtgttttaaactgtgcttaaaataatttgttacatgttttgttactgtgttactttattgaggacagctagtccctttgtgttgttaaacgtttaaagacagttgagaagcttcataactctgttcattgaaaatcttagctttcttgtaatatgtattttaataaaatatttaccttgcaactctaaaaagtcgacgcggccgcgaatttagtagtagtagtcgacccgggaattccggaccggtacctgtaggcgtaccagacttaccctatagtgagtggtattagagccttgcggtaatcatggtcatagcttgttcc

SEQ ID NO: 4266 - DNA, 5252 bp, Homo Sapiens
cacgggggaagcaggcgggccccccagcacccgggaggccgagctgaagctgcggctaaagctggtggaggaggaagccaacatcttgggccggaagatcgtggagctggaggtggagaaccgtggcctcaaggcagagatggaggacacgcggggccagcaggagcgggagggcccgggtcgggaccacgcacccagcattcctacctcacccttcggtgactccctggagtcctccactgagctccgccgccacctgcagtttgtagaagaggaagcggagttgctccggaggtccatctccgagatcgaagaccacaaccggcaactgacccacgagctcagcaagtttaagtttgagcctccccgggagccgggctggctaggagagggtgcaagtcctggtgccgggggtggggcccccctgcaggaggagctgaagtcagccaggctgcagatcagcgagctcagcggcaaggtgctcaaactgcagcacgagaaccacgcgctgctgtccaacatccagcgctgcgacctggcagcccacctggggctgcgtgcccccagtccccgggacagcgatgccgagagtgatgcgggcaagaaggagagtgatggggaggagagccgcctgccccagcccaagcgggaagggcctgttggcggggagagtgactcggaggagatgtttgagaagacgtcgggcttcgggagcgggaagccatcggaggccagcgagccatgccccacggagctcctgaaggcccgggaggactctgagtacctagtgaccctaaaacacgaggcccagcggctagagcggacggtggagcgcctcatcacggacaccgacagcttcctccatgatgcggggctgcggggtggtgcgcccttaccggggcctggcctccagggcgaagaggagcagggtgagggggaccagcaggagccccagctgctggggaccatcaacgccaagatgaaggctttcaagaaagagctgcaggccttcctggagcaggtgaaccgcattggggatggcctatcccccttgccccacctcacagagtcctctagcttcctctccactgtgacttccgtgtcccgggactcccccatcgggaacctggggaaggagctgggcccagacttgcagtccagactgaaagagcagctggagtggcagctcgggccggcccgaggggacgagcgggagagcctgcgcctccgagccgcgcgggagctgcaccgccgcgcagacggggacaccgggagccacgggctgggaggccagacctgcttcagcctggagatggaggaggagcacctctatgccttgaggtggaaagaactggaaatgcacagcctggctttgcaaaacaccctccatgagcgaacctggagtgatgagaagaatctgatgcagcaggagctccggtccttgaagcagaacattttcctcttctacgtcaaactcaggtggctgctgaaacactggcggcaagggaagcagatggaggaggaaggagaggagttcactgagggtgaacatccagagaccctctccaggctcggggagcttggagtccaggggggtcaccaggcggatggcccagaccacgacagtgaccgaggctgtggctttccagtgggggagcactccccacactcccgggtgcagattggagatcacagcttgcggctgcagaccgcggacaggggacagccccacaaacaggtggtggaaaaccagcagctgttcagcgccttcaaggccttgctggaggacttccgtgcggagctgcgggaggatgagcgtgcccgactacggctgcagcagcaatatgccagcgacaaggcggcctgggacgtggagtgggccgtgctcaagtgccgtctggaacagctggaagagaagactgagaacaagttgggagaactaggctcctccgctgagagcaagggggccttgaagaaggagagagaggtgcaccagaagctcctggcagacagtcacagcctggtcatggacctgcgctggcagatccatcacagcgagaagaactggaaccgggagaaggtggaacttctcgaccgcctggacagagatcggcaggagtgggagcggcagaagaaggaattcttgtggaggatagagcagttgcagaaagagaacagtccccggagaggtggcagtttcctctgtgatcaaaaagacggcaacgttcgcccctttccccaccagggaagcctccgcatgccccgtccagtggccatgtggccttgtgcagatgctgactccatcccgtttgaagaccggccgctgtccaagctgaaggagtcggacaggtgctcggccagtgagaatctctacctggatgccttgtccctggatgacgagccagaagagccaccagcccacaggcccgagagggagttcaggaaccgcctccctgaggaagaagaaaatcacaaaggaaatcttcaaagggcggtgtccgtgtcctccatgtctgagttccagcgtctaatggacatctcccccttcctgcctgagaagggcctgccgtccaccagcagcaaggaggatgtcaccccacccctgtctccagacgacctcaagtacatcgaggagttcaacaagagctgggactacacacccaacaggggccacaatggtggggggccggacctttgggccgacaggaccgaggtggggcgggcagggcacgaggacagcacagagcctttccccgactcctcctggtacctaaccacaagtgtcaccatgaccacggacaccatgaccagcccagagcactgccagaagcagccactgcggagccacgtcctcaccgagcagtcggggttgcgcgtgttacacagcccgcctgccgtgcgcagggtcgacagcatcacggcggcaggtggtgagggtccctttcccacaagcagagccagagggagcccgggagacaccaaggggggccctccagaacccatgctcagcaggtggccttgcacctcccccaggcactcccgggactatgtggagggggcacggcgcccccttgatagtcccctctgtacctccctggggtttgcctccccactgcacagcctggagatgtccaagaacttgagtgatgacatgaaggaggtggccttctctgtcaggaatgccatctgctccggccctggcgagctgcaagtcaaggacatggcctgccagaccaatgggtcccggacgatggggacccagactgttcagaccatcagtgtgggcttgcagactgaagccctgcgtggcagcggtgtcaccagcagcccccacaagtgtctcactccaaaggctgggggcggtgctacacccgtgtcgtctccttcccggagccttaggagcagacaggtggcccctgccatcgagaaggtgcaggccaagtttgaacgcacatgctgctcccccaagtatggttctcccaagctgcagaggaagcccctccccaaagccgaccagccaaataacaggacgtcaccagggatggcccagaaagggtacagtgagtcagcctgggcccgctccaccaccacaagggagagccccgtgcacaccaccattaatgatggcctctccagcctcttcaacatcattgaccacagccccgtggtgcaggaccccttccagaaggggctgcgggccggcagtcggtctcgctcagcagagccccgaccagagctgggcccaggccaggaaacaggcaccaattcccgaggaaggtcgcctagccccattggggtggggtcagagatgtgcagggaggaagggggagagggcacgccagtgaagcaggacttatctgctccccctggctacaccctcactgagaacgtggcccggatcctcaacaagaagctgctggaacatgccttaaaggaggagaggaggcaggctgcccacgggcccccgggtctccacagtgacagccactcgctgggggacacagccgagccagggcccatggagaaccaaactgtcttgctaactgccccctggggactctagccctgcctgcctcacgctgaactaccttgttctgcactagctccatccctagagccctgcttctccaggcccgagagaccagcaaaccgtcgccctccgtcccgttgggccccacattcccccactgcctcacagcctcagtcacccggagacccgacgtccttggaggagcatggtggcgaggagccgcccgaggagcagccacaccgagatgcaagcttgcatggattatcacagtataattcactgtaatttgcataaccacaccatcaccatgaacaaaactctgcccaacaggagagatctagttttctcaaggtcaaagaatgttttttaaaaacacaaagctgctgaatgttcaacctgtgaaactgagatgtttctagaatgaaacagtaaatgtgcctgtaataacttaatttttttcatagctcagaaaactatttttgtctccatcttttttacacacagtatattaaacgaaaacgtaaataaggtataaatagatttaaaaaataaaagttttaaaaaatgtacattttaagagattctgaacaccctcgctgtcaatacctgactgcctctgttaaatttgcactgttacattttggttcagtttatttccatgttgaattagagtggattaagttaattttattttgtcagtgttactgttttttatgaattttttaatgcttcagactgtctgattcagtgaactttttgtagtgaaaaagccatgaagccagtagacaagacagatattctgtatgctggaggggatacaggatgattttgaaaaggtacaaagtcctcagtgggcttagaaaattcactgtatgatccttatattatcctacttggcttgcacgtcttcgggtgcatgtatataccgctactgtgtcctcgccatcacctaaatgtgactcagtctgttccactgtaatatgttgtgaatttccttgtactgtacttttattgttggtcttcttgcatcgatgatccaacagcaacaccatttttaaattattgtgaaaagattaactggcaatgtacagagtttactcaaagttttcttaagggaaaacactacaaaaagtcacaaggataccaaatggaaacacatgatgatgcctctgggtctgtatgagaccgtgatgaagtagaaataaagcccttctgagatggc

SEQ ID NO: 4267 - DNA, 448 bp, Homo Sapiens
ttttttgcttttaggaagaggctgaatttaagacaaagaaaacttgaatgttaaatatttaaaggattataaaagagcagcaacattcttggtctatttttgtaggcaatagatatgaggattaggttctgactggaatcctgagtgtcacggagacagcccccacatgtgacccacctgtagttttccaacaggcatttttccaagagtgagttttggaacattaaattaagagcaaattaaattttctcaggctttgaggggcctgggctgaatttttttaatgtatagagtttagaatcaacgatttaaagctcagtgtcccctatatgggtctaattatgaacatgccactatgtccacattagaattgaactgattttgtaacaagttattttctatgaaaccctggaaggtggtgaatgagggaaagtgcccaaaacatgta

SEQ ID NO: 4268 - DNA, 329 bp, Homo Sapiens
  misc_feature (61)..(61): n is a, c, g, or t
  misc_feature (64)..(64): n is a, c, g, or t
  misc_feature (167)..(167): n is a, c, g, or t
  misc_feature (175)..(175): n is a, c, g, or t
  misc_feature (178)..(178): n is a, c, g, or t
  misc_feature (199)..(199): n is a, c, g, or t
  misc_feature (205)..(205): n is a, c, g, or t
  misc_feature (279)..(279): n is a, c, g, or t
  misc_feature (292)..(292): n is a, c, g, or t
  misc_feature (312)..(312): n is a, c, g, or t
  misc_feature (328)..(328): n is a, c, g, or t
ggagaagatgctgctgtccctggtgctccacacgtactccatgcgctacctgctgcccagngtngtgctcctgggcacggtgcctacctacgtgttggcctggggggtctggaggatgctctccgactttctgcccgaccgattataccaagcgctggacgaccggntgtactgngtntaccagagcatggtgctcttnttcttngagaattacaccggggtccagatattgctatatggagatttgccaaaaaataaagaaaatataatatatttagnaaataattaaagnacggttgaatggattgttgntgacatcttggccatna

SEQ ID NO: 4269 - DNA, 485 bp, Homo Sapiens
caaagtgacagatgtctgtgatgtttcatgacataggttatgatcgagccaatttacaaaatttaataaccaacctaaactcacatacatatttgttaagaagctgacatcagttcagtattgtaaggaaactaactaggtggtgatgatgataaaagaattagggaaaatattttatttgatatattcccttttataattcctaaaatgaagattctatttaagggttataatttatataagtttagtcatataccattacattatgataccataagcagagtgcattatgattctctagaaatataattcaatcagatatgtattatatttatttatgtcacacattttctttactgagaataaaaattatcttattttcagaagctttgtatcaatcagtttcatgtaataagcaacccagatatctactagattatgtatttcttcatttgaaactacactgttttctcctagtcccttga

SEQ ID NO: 4270 - DNA, 392 bp, Homo Sapiens
ccttactagaaaaatgaaacctgatgaaactcctatgtttgacccaagtctactcaaagaagtggactggagtcagaatacagctacattttctccagccatttccccaacacatcctggagaaggcttggtttgaggcctctttgtactgctgacttaaatagaggtttttttaaggtatgggtcagctaacagagactggagttgtcagccctgaacaatttatgaaatcttttgagcatatgaagaaatctggggattattatgttacagttgtagaagatgtgactctaggacagattgttgctacggcaatctgattatagaacataaattcatccattcctgtgctaaggtatgtgctgcttataaataaaatggacagctgtttt

SEQ ID NO: 4271 - DNA, 4440 bp, Homo Sapiens
aaaatgctgattttttatccctgcgccagactgaactgccaggaaactcttgtgctcaggatccggcatcctttatgcctccacagcagccttgctctttccccagccaatcactttcagatgctgaatcgatttctaaacatatgtctttgtcatatgttgctaatcaagagccaggtattttacaacaaaaaaatgcagttcagattattagttctgctttagatactgataatgaatctacaaaagatacagaaaatacttttgtcctaggagatgttcaaaaaacagatgcctttgtcccagtgtactctgacagcactattcaagaagcatcaccaaactttgagaaagcttatactttacctgtgttaccatcagaaaaggactttaatggaagtgatgcctctacccagctaaatacacattatgcatttagcaaactaacttacaagtcttccagtggccatgaagttgagaatagcacaactgatactcaggtcatttcacatgaaaaagaaaacaaactggagagtttggttttaactcatttgagtaggtgtgattctgatttatgtgaaatgaatgcagggatgccaaaaggaaacctaaatgaacaagatccaaaacattgtcctgaaagtgaaaagtgtttgctttccatagaagatgaggaatctcaacaaagcattttatcaagtctggaaaaccattcacagcagtcaactcaaccagaaatgcataaatatggtcagttagttaaagtagaattagaagaaaatgccgaagatgataaaactgaaaaccaaatccctcaaagaatgactagaaacaaagcaaatacaatggcaaatcaaagcaaacagattcttgctagctgtacactattatcagaaaaagacagtgaatcctcatctcctagaggaagaataagattaactgaagatgacgatcctcaaattcaccatccacggaaaaggaaagtgtcacgtgtacctcagcctgtgcaagtgagtccctctttactacaagcaaaagagaaaactcagcaatctctggcagccattgtagattctctaaaactagatgagattcagccatacagttcagagagagcaaatccatattttgaatacttgcacataaggaaaaaaatagaagaaaaacgcaaattactgtgtagtgtgattcctcaagcacctcagtactatgacgaatatgtaacatttaacggatcatatctcctggatggaaaccccttaagcaagatttgtattcccacaattacaccaccaccttcactgtcagatccacttaaagagctttttcgacaacaggaagttgtaaggatgaaactacgtttgcaacacagtattgaaagggaaaaactcattgtatccaacgaacaagaagttttgcgagttcattacagagctgcaagaacattggcaaatcaaacactgccatttagtgcttgtactgttttgctggatgccgaagtatacaatgtaccattggactctcagtctgatgacagtaaaacttctgtgagggatcgctttaatgcaagacaattcatgtcttggttacaagatgtggatgataaatttgacaaattaaagacctgtcttttaatgaggcaacaacatgaagctgcggctttaaatgctgtccagaggttagaatggcagctcaaactccaggaacttgatcctgccacctataaatctatcagcatttacgaaatccaggagttttatgttccccttgttgatgttaacgacgactttgaattgactcctatatagcagtcagtacttcctgatggtattgtcctaaactggtgatgctcaagcattatactgtggaatactgccttttgacaaaaatactcatgcctttacaattgttagtaaagttcgattatagttggttatgtagtaaacactgtcattttataaaaaatgagaattattttggatcttagatccaaacacagtttctaatagaaaactattatttatattgggaaaggtaactattgcattagagcatgttggcagactggtaggtatttaaaaagttgagaatctgctaacagcgctggaagttgttagcgctctaagtaataagataaccactagtattcaaatctctttcaggttttattaaaaaatatatatcaataaactaaaaggttcaattcctaccaaatagtttctaatgtgggagaaaaacttggcacaaaatttcttcagtttattatctgtaaattgtacagttttctttttgaaagttttaatattgtcttcctttttaataacttattttatacatattgtgcagatgtaaatcttgtaattaatggtcaaactgtataaagggattggtagtcaaaacatgtacaaagaaatacctgtaaaactgttttgtctcatgttttattggaccaaagttgtggtttgtatggagtgtagtagtagtgtgtacaggtagaaaacttttaaatacagcatgcaggtgtttcagttagcttgttttcatcaccataactgcaaagatgtggcttagttgtattgcatgcttcctataatttaactctccataattgatgcctgcagtagtgtaaggcatttcatactagtctcctctagtagacctgtgacttactgtgttggacatattatttagacttagtcatacaaagaaacttagctcttttttcatctcacagtaaagcctatttccccaggaaaaaaataaatgcctttgaatgaaaattctgaaattgtaaatgtctattttaatattcacctatgaaagaatctgtgaatatatgtaaatacgtttaataaattttattggtcatgttaaatcattgtaaaacttttttacattgcttaatgttttaagcttaatagcctttgcacttttaaaataaaaaccaagtatgcaaatcaaagatatttggtagtcaaaataagtaaaagaaatataggaatattccagtcaatctctgaaatgtttatgaaaaacaggttaatatgttgtatttttttccttgtatcaagatgcaaaacataatttgcaaaattttataattgaaataaaacttggtatgctgttttataataaattagcaatatactttaaaaaaaatccagtttctcctataacatgatgtaaattaaatattcaggaatatttcaggtctgaaatctgctgctgaacttgttagacatttttgaaaggaaaattaggttagcgtacaatttatcataaatatatgaggtaaaatttgcaaaactttccacagtactttcttgaattataatactgaatgttttctgttccgatagagaaaagtgaagcaaatatgtgaggaatgaagtgatctagtgcaagttggtaattccagctaatgggagagaatgtaaatgtgcaaaggtacatattaagcttagggatttttgaatttttacgtcagtttatattttaattcttactgtacttggcatgcgcaataaagcagcacatgtaaaaaaaaatacacagtgcaaggactttattataaaggttggatgtagttttccttagaaatttaggtgagagattttggccttttttattggataaattgggccagaaaggcagggtagatttcgaagcactggttctgttgaagttaagtttattaagcctgggaacattaaaagctaatttataaaagcaatactttttaatatgaaaacttactgcaaagtttgtttatacttttgcctaaaaaggaaattggatgggatactgtggcaaatcataaaaaaccagataattgaactttgaagttatagaaaatcagagaggggtaagtttatagggcattttgttctgatggttcaaccagaggtctgggaaatagcactgttggcccaaacagaacaggcttttagaagataaaagcgacaagaaggaatctggtgaattttagtcatcccagctttttagtcttaaccacagttctcactctcttaaatggtacctcaaaaagctggagcctctctgccatgattatgcttctacaaatttcttttataaagagactcaaagctaatgatagcttaaaagaaaagttaatgccttctcattggaaatgtataatcaaataagtagttaagggcttttggtattaaagatattctgaagctctgaaatgctagaaaaaaatttggaatggagtatatgcctgaaaaggttttggattcagaaagaaaaaggatggttagtttaatcagtgattctttttaaactcttcaaatatcatgaacaagatactaaattgtacctaaggatttgtatttctttacaatttgttctaaatatctgtttaatgactagttgatatttgtgcatgttatttaataaagagttatatttttatag

SEQ ID NO: 4272 - DNA, 374 bp, Homo Sapiens
  misc_feature (66)..(66): n is a, c, g, or t
  misc_feature (373)..(373): n is a, c, g, or t
ctagtgttaaaaccctaatagtgtttgaattcaaaaagcttatttatctgggtaacccaaactttntctgttttgtttttggaagggtttttgtggtatgtcatttggtattctattctgaaaatgcctttctcctaccaaaatgtgcttaagccactaaagaaatgaagtggcattaattagtaaattgttagcatggtcatgtttgaatattctcacatcaagcttttgcattttaattgtgttgtctaagtatacttttaaaaaatcaagtggcactctaggatgcttaatagtactttaatatttgtagcatacagactaatttttctaaaagggtaagtctgttctaggctgctttgtggaacaaggnt

SEQ ID NO: 4273 - DNA, 280 bp, Homo Sapiens
tttcgagcggccgcccgggcaggtactaattttttttttttttttttggccaactgagattgaaatccaagtgctggtttctagttctgaacatcaactaaagagttttggaaatgacagcaatttataacaagttcatattgacttcctctctatggcaggaagacattctgtgctgttttgaacagattaaagatttgtgtagtttgtgggaaattgacgtttttgtttaaattccacccgcgtttgtcttttcctaccacctgtggccaggtgctcg

SEQ ID NO: 4274 - DNA, 427 bp, Homo Sapiens
tttttttaaagctaaagaattggatattttttaatgcaaattgttgtttttcttcatttgtctactttattaagctgtcctcaggccccaagaaacatactgtcccctcatttagaaacagactaactccgttttcctccactatcccctcccctgtccttgatctgtagatcctgttaagacaggaaaaacagtgttggtcaaagggtacacgctttcagttacaagatgaacaagttctgaatacgtaagatagaacatgggaggtgatgtggccgggtgcagtgactcacgcctgcaatcccagcactttgggaggccgaggtgggcggatcatgaggtcaagggatcgagatcatcctggccaacatggtgaaaccccgtctctactaaaaatacaaaaattagccgggcatggtgggcacac

SEQ ID NO: 4275 - DNA, 191 bp, Homo Sapiens
  misc_feature (125)..(125): n is a, c, g, or t
  misc_feature (145)..(145): n is a, c, g, or t
gtctggggagtgggtctcacgcactgctcaggttggcacgagggacctcccccatcccaacccagccccaagggtcccagcaggctctcagcatggctgttttgagggtacacaggtggctgganaggggtggggcagttgcatnggtgggtggcaaagtgtgcatttagaagctgcttcgtggcgttaag

SEQ ID NO: 4276 - DNA, 454 bp, Homo Sapiens
cggccgccgcacaggcccagccccgctgccgcgttccgcttgccggtcgacgaggcccagccgatgagggcccagcagatgagggcccagcagctgggagcccgcccgcagccccgccccacgcggtgcctcacgcaaagccctccgtgcgggaagccccgccgctccgcgccctctggcgaccgcggcgcgaaccgcagcctaacggcgggggtgggagcccgaaggatgagaggcggggcgggtcttacatacacctgtgggctgaaggctccctgcaggagtcagattcccagttattcattgacgcagccctcatttcattaattgtgcattcgttcattcacttacttgtcaagcatttactgagagctatcaatggcccgacgtttttctagggctgtggatatggcagggagcaaaacaaagtccctgctcccatgcttcttacatt

SEQ ID NO: 4277 - DNA, 416 bp, Homo Sapiens
  misc_feature (68)..(68): n is a, c, g, or t
  misc_feature (97)..(97): n is a, c, g, or t
  misc_feature (350)..(350): n is a, c, g, or t
  misc_feature (413)..(413): n is a, c, g, or t
gctactccgaggggctgcgtgtcgcctgtgcatcgggtgccctcgcaggcctgggggctgggcggggntcttagcgtccttgtcttgtgtgtgttgncaaacagtgttactgacattgctgccccccacaggccagggaaagcagggagtctggggctttttgcaggcgggcctggggtctcagtggaggggacaaaggcaagcaaaagcccatgtccagggagccctggggtgtccccacaggctcgccttctgagagcctctttggggtgagcagccttgtattggccacaggtgcactaaattgactgtgaatcccaaaccttccccagaccagccagggccgcctncccccacccagaacctttccggttttgctcttgtatgggaaagccacttttcggaaatccctnttt

SEQ ID NO: 4278 - DNA, 461 bp, Homo Sapiens
  misc_feature (57)..(57): n is a, c, g, or t
  misc_feature (85)..(85): n is a, c, g, or t
  misc_feature (87)..(88): n is a, c, g, or t
  misc_feature (125)..(125): n is a, c, g, or t
  misc_feature (137)..(137): n is a, c, g, or t
ggcgttggtcgtggctggtctccaactcctgacctcgggtgatccgcgccccgcctnccggacgtgctgggattgcaggcgtgcncnngtgcccggcctaaataaaattttgaagaggctagaancccgcacttgtnccttgagcttactgacctcaacaccctggttccactaaaactttatttacaaaattatgctgccggtctgcaggatgtagtttaacaatttgattattttggatattaaaatattttttaagtcttgaaaatattgtttactattaccaaagtttttgaacccttcttaaaattctgtaccagaggtgaggtggccacaccctaacctaagtctgaagtttttaatggtgtaaaagatcataaaaacgttggtaaagtttttctaaaaacaccataaagctctccaataaacggttagcttaatcattgtcaaaaaaaaaaaaa

SEQ ID NO: 4279 - DNA, 401 bp, Homo Sapiens
ctagtcactaggccaccaaagaaagttccacccaacggccaatcgatccgtcgcagcgactctcttttccctgaacggagggtttatggctgacacctccacttgtttctcagagccggggctgactgccggctgcatctttgaatggcgaccaaaaaagacatgcatttgtctggcaaagtcgctggcgttcgcctggtgcccgcgcttgccgggtcctagagcagccagattttcacaccagcgagtccagcgcccagcgccactcctccttcggatcaccggtttctcacatccgcagcagcactggcctgacagttttccggttgcgacagcgctagttgagccaaacaaaacgttttcctgcttgctctgggcgtcccattctccatccgaggcct

SEQ ID NO: 4280 - DNA, 320 bp, Homo Sapiens
  misc_feature (50)..(50): n is a, c, g, or t
  misc_feature (111)..(111): n is a, c, g, or t
  misc_feature (117)..(117): n is a, c, g, or t
  misc_feature (182)..(182): n is a, c, g, or t
  misc_feature (214)..(214): n is a, c, g, or t
  misc_feature (266)..(266): n is a, c, g, or t
  misc_feature (278)..(278): n is a, c, g, or t
  misc_feature (295)..(295): n is a, c, g, or t
tggttttgtcagaggcaggcaggattttggagctggaagaatctgctctncggtggcgtgccctgtgaacagagggctcccggtcagcttcccaggcccttcgccctatgnccaganaggagcgtgcctctccctgggccggggtggcgtgggtgccaggaggaggggagcataccccacancctccctgccaccgttgccgttccagaacctnggtcagtgtttccctgtctggggggcagggccagaagcgagcacgcttcttngcgctgctgttngttgtttttctaccccntacttaacccaacagcacaaagggc

SEQ ID NO: 4281 - DNA, 476 bp, Homo Sapiens
tttgtctgatgggggtctctctattgctcaggagggtttcaaactcccgggctcaaacaatcctcccgcgttggcctcccaaagagcctggattacaggcatgagccaccatgcccagctgagaagcaaacttctatcttgtacaagcaattgctgtttggggacacagccaacctcatacatatgaactaatgcatgccaagttttaatttccttaactgaaaaggctgatgcaaatgacatattgcacctggtggcaggcagctacatctactgctaaaatgacataagatagaagaagttttctgtagagaacattgtgtgtcacaaacagtgacattttcaaaagtgcttaattcaatatgacttcccagcggcaaagcttgcacctatggttttaggaaaacaacaacaaaaagtttagtctagcttaagatgcaaaatgactgacaaagtccctccccacaagagaactg

SEQ ID NO: 4282 - DNA, 195 bp, Homo Sapiens
  misc_feature (20)..(20): n is a, c, g, or t
  misc_feature (93)..(93): n is a, c, g, or t
  misc_feature (99)..(99): n is a, c, g, or t
  misc_feature (149)..(149): n is a, c, g, or t
  misc_feature (156)..(156): n is a, c, g, or t
  misc_feature (177)..(177): n is a, c, g, or t
  misc_feature (179)..(179): n is a, c, g, or t
  misc_feature (193)..(193): n is a, c, g, or t
  misc_feature (195)..(195): n is a, c, g, or t
gatcataaaatgtatctttnccatggccaacaaggggcatctttaataaatgcataataacccagtttgtatcaaagggtatcgacttaagtnaaattncaacatgctgttacttttcccttttaatgtaattctgttttccaaataantgggggngacaaatggcctttgagtaantnccttagcatatcanan

SEQ ID NO: 4283 - DNA, 512 bp, Homo Sapiens
gcacatcaaacaggttgaccctcagcttggactgcagctagccagcatgctaggctgctcattctatgaagtgtctgtcagtgaaaattataatgatgtctacagcgccttccacgtcctctgtaaagaggtcagtcacaaacagcagcctagcagtacacccgagaagcgaagaacctccctcattcccaggcccaagtcacccaacatgcaggacctgaagaggaggtttaagcaagccctctctgccaaagtgaggactgtcacctccgtctgaagcaggaggagcactcaagggggtttggtcttcccaggaagagggcctgaggttctcctagtgcaggaacgttgaatattggcaatgattcctggttccagaaagggctggagcagaagggccaagagggctgtggaactgctacagaaaaggaagtgttgttctgagcagggggacaggattgatgaggcttgaaagagcccactgagccactctctgaatatgtgaaatgtac

SEQ ID NO: 4284 - DNA, 413 bp, Homo Sapiens
catcacaaccaggtttcatcagtatttaaaatatttaagattgtggcttggaatgtggttcagccatttactcacttatacaaatattcagaagtgtaataaaaatgtgaatgaagaaaactttgatataactcttcttgcttagataaatggttgcagatgacatcacttttagtataacagaacatttctggttttgtttgtattatcttgtaaacatggccaaacatggtgaaaccccatctctactaaaaatacaaaaaattagccgggagtggtggcatgcggctgtaatcccagctactcgggaggccgaggcaggagaatcacttgaacccgggaggcagaggttgcagtgagccgagatcgtaccactgcaccccagcctgggcgacagagtgagactccgtcac

SEQ ID NO: 4285 - DNA, 562 bp, Homo Sapiens
  misc_feature (409)..(409): n is a, c, g, or t
  misc_feature (526)..(526): n is a, c, g, or t
caacccggctgcattaaatcctgcctcattgcagtgtaagttggacgaaaaggatataccattctcagctacagacatcaagacaagtactgccagatgccatcctttgaagaaatatgtgttttcagtagaactcttttcattgttctgtttttcttgccttcggatgttactcaaaatagtgaacaacctgccccagaagaatatgatcaattacaatttgtgcttcaagaagagttttccagtgatgattcaacaacaaatgcacaatctgttatctttggaggctatgctttcttcaagttaacactctctaggagtcctttagtctcccaaccaggtaataaaggtagagaatttgtgccagatgaacaaaagcaaagtatccttccatctcccaaattttcangaggaagaaattgaacctttgcctcccacactagagaaaaagccctcagaaaatatgtccattcaagctagactctacatttaaacaaatgaaagatgaagatctacaatctgctantgtacaaccttctcaaatgcaaaccaagcttctgca

SEQ ID NO: 4286 - DNA, 542 bp, Homo Sapiens
tttttttttttttttttgtccgcttttggccaggggggccctgtttatttgctgaattctgtactttaccaacagaaaaaaggagcacaacaaacatgcacatgttactgacttctgcattctcgtcgcattgcacacatacatttcacctgctgtctgcagtgtgcacacactgtcaacactttacagtagttcatggatcctccgtgttcatgcacatcccattttcagtgtggctgtgaccttcctccaggtcacctactgtagagctcgctaagccattcccctctgcaccggcattgggcttgaagtgaactcaacaccattgctcccatgattccttttctctcaaggattattctgggaaagtgggctctccaagccacccagtgtgtagagtccttgatcattctcatcatacatttatgtcctgctctccagaaacactgaatcagtcagactgtagagtgtcaccagtttccctctagccttgcaagtgctgggtgtatttatgtgtacgtgtgtatatatagagagagact

SEQ ID NO: 4287 - DNA, 1482 bp, Homo Sapiens
gcttaagttgacctctgggtccggaatcgcgggcaaagatggcggcggccaggtgttggaggcctttgctacgcggtccgaggctttcattgcacaccgcggctaatgccgccgccacggctacagaaacgacctcccaagacgtcgcggcgacccccgtcgcgcggtacccgccgattgtggcctccatgacagccgacagcaaagctgcacggctgcggcggatcgagcgctggcaggcgacggtgcacgctgcggagtcggtagacgagaagctgcgaatcctcaccaagatgcagtttatgaagtacatggtttacccgcagaccttcgcactgaatgccgaccgctggtaccagtacttcaccaagaccgtgttcctgtcgggtctgccgccgcccccagcggagcccgagcccgagcccgaacccgaacctgaacctgcgctggacctcgcggcgctgcgtgcggtcgcctgcgactgcctgctgcaggagcacttctacctgcggcgcaggcggcgcgtgcaccgttacgaggagagcgaggtcatatctttgcccttcctggatcagctggtgtcaaccctcgtgggcctcctcagcccacacaacccggccctggccgctgccgccctcgattatagatgcccagttcatttttactgggtgcgtggtgaagaaattattcctcgtggtcatcgaagaggtcgaattgatgacttgcgataccagatagatgataaaccaaacaaccagattcgaatatccaagcaactcgcagagtttgtgccattggattattctgttcctatagaaatccccactataaaatgtaaaccagacaaacttccattattcaaacggcagtatgaaaaccacatatttgttggctcaaaaactgcagatccttgctgttacggtcacacccagtttcatctgttacctgacaaattaagaagggaaaggcttttgagacaaaactgtgctgatcagatagaagttgtttttagagctaatgctattgcaagcctttttgcttggactggagcacaagctatgtatcaaggattctggagtgaagcagatgttactcgaccttttgtctcccaggctgtgatcacagatggaaaatacttttcctttttctgctaccagctaaatactttggcactgactacacaagctgatcaaaataaccctcgtaaaaatatatgttggggtacacaaagtaagcctctttatgaaacaattgaggataatgatgtgaaaggttttaatgatgatgttctacttcagatagttcactttctactgaatagaccaaaagaagaaaaatcacagctgttggaaaactgaaaaagcatatttgattgagaactgtgggaatatttaaattttactgaaggaacaataatgatgagatttgtaactgtcaactattaaatacattgatttttgagacaaaaaaaaaaaaaaaaaa

SEQ ID NO: 4288 - DNA, 285 bp, Homo Sapiens
ttttttttggggaaacggaaagctaagttttaattttgctattgcttttgcttttttaacagaaaaggtacaaaaaagaaaaaatgggagagatgttgctgaactccgtcccgcctgtgggctgtgggccgttagcaaagctgctagcatgaaatcgtcgagcaccgcttgcgaaacgccaaatcctcgagagcgaggccggaggtccaaacccgcgctggggaaagggccgcctccgggcccccatcccgctgcggacggaggtgaggttggagcgagcgctgg

SEQ ID NO: 4289 - DNA, 2570 bp, Homo Sapiens
attaaaatgagaaatacataagatgataaataaaatgaaggtgaaggtattccagatctaccgaaaagattttcagtatcacagattattcataagaaattgagaaaaggaacaatcagaagttgcaaaagatggtatagccgaatataatggaaataggaaaaattagtcgaaaataaaggttgatttagaaatgaagaaaatgaatatatttcttaatacaaaataagtgggaaatgagaagttataccaataaaaagcatttacaaatttaggggatattgtaacccagtataattttctgacaggttggactttgaccctaatggacttactggtgaactttttcaaatgtttaaataatgtctatccatgtatcatgaaggacagtatgcttcaaattgtcttttgaggcagacatgttctcagtactaaaagacatttttagaaggattttattctcaacagatgcaaaatgcaaaataaaatattgacaaacaatacagcaacaaataatttactatcactcaggattataaggctggtgttaagcagaacagccattaaatcagcatcaaaagaacaaatagtaaaatccaaagtattaattacagataacttttcaaaaattcatcattcacccttgatttaattatttctctggcaattatttaatagacttctcggagtctgttaagtacttaaaccaagaactaccattattcctactgggaaaacataaacatttctcaagtggaaagtaaacagtgttggcactatttttatatatggttaaagagacctgtcattgcaataaaagccagcattcacaaaatgaggaagataaggaaagtagcataaatattttctattaacatggctttacaactgctaaaacttatagtataaaaatgtactaacaaagactaattcaagaagttgcaggatacacaatttttaaaaatctcatttctacatcttagcagtgacaaactgcaatttaaaaagtgtgtttggttattaatatatatgagacttttaaagaaagttatataactacatagagataaattaagaaagatgcctaaatagaagcaagtttaaagagctatatttttaaacatgaacaaactcccatgggagccatgccagtgtagtggaaaagtagtacatggggagatggggagtttttttgaaaaccagaattacagttctcatttcactacttaccagttgtatactcttgggaaagtcactcctagtatctatttcaccatctacagaagagaaatacttcacagaattattgtggggattaagttagataatgtgttttaaaatataaagctacatccaaagaaatgccaatatgtgacattagtatgaaatttactacagttccatttaacattccaactggttgctgtgtggaatatggcataattgtaataaattatttaggaaagcaagcaaagatgtaagtttttttaatttagggggaaaaaatgggagccttgctctccaaatccttaaaacatgctattaagcaacctttctgaatattctgtggtgccaagtagaaagtttaactgaaattaataagccaatggaaagaaagaaatattaataactgctggtggaaagactagctagatgtcagtgtggaaagattagatccactttacatgtgatattccaaatgaattaaaatgttaagtataaaaagaaaaatactacaagtctcacaccaatagtggtataaaggaacttcatggcaattggcaaggtagatcaactaagagaaaaagttttaaatgtgtagtaaataggaaaaagacaaaacaagatggaatttaaaagaagctatttgcattacacatggatgcactcagtttttgtaaaactatatgcatatccataggggtttgtactcttaggcaaatttataaagcgatcgtgtataaatgatataaaaaatcaatttgaatggtattcaaatttcctaatattaaaaatgcaactttgacttagttcatgctattgtattagcaaaactgttttaattgcatgtgtccttatagcagcagcattgtgtattagtagccttttaagagaactgtgtagaagactataaaaagggctttataactgatcttttgacatactcactttgagtggcatatgcccaggaaaatatttaaaagaaagaaaagctatttgtacaaagttttctagcagttccactcagataactttaagggggaaaaaagcccaacgattggaaatggttaagtaaattttggtgtattgctagtgctatcacagaatgttatatagccattcaataatattgatatatgtcaaattgtatgcaaaaaagtgagattcaaaaatgttaataagaacataaattgtgtttactgatacatgtgaaaatttaggtctacattgaaaagaatcagaagataacatgtaattcagtttaacattaggggttctttatttttcttctgttaaatattgatgtatgcaataaaaaataaaagattaattggtaaagtggtttactg

SEQ ID NO: 4290 - DNA, 361 bp, Homo Sapiens
  misc_feature (12)..(12): n is a, c, g, or t
cctttgcccgcnttggcggccgggctctacgttccctgttctcgcctgcagctccgccatggctcctaaaggcagctccaaacagcagtctgaggaggacctgctcctgcaggatttcagccgcaatctctcggccaagtcctccgcgctcttcttcggaaacgcgttcatcgtgtctgccatccccatctggttatactggcgaatatggcatatggttcttattcagtctgctgttttgtatagtgtgatgaccctagtaagcacatatttggtagcctttgcatacaagaatgtgaaatttgttctcaagcacaaagtagcacagaagagggaggatgctgtttccaaagaagtgact

SEQ ID NO: 4291 - DNA, 277 bp, Homo Sapiens
  misc_feature (147)..(147): n is a, c, g, or t
  misc_feature (250)..(250): n is a, c, g, or t
ggaaacgtgcaggaacttctctgcctcggctccggttgccgaagagaaaggggatcgcgcgtggtggggaggagaagggcgagagggggcgccaccggggaaggggcggctgcggggggcaggtcgggggcgcaggggtctagttcncagctttgtacctggaggcaggttcacccctcgcctctctcccctcccccaggctcatcccacttgtaagagtgggacattcttgtgctcacactagcaccangtagaggccactacacacctcattaaa

SEQ ID NO: 4292 - DNA, 554 bp, Homo Sapiens
gagacaagtaaattgactacatcaagactgccactatatgggagcagatttagagatagaagatgctcatggacatacaccactcactctagcggctagacagggacataccaaggtggttaattgtttgattgggtgtggagcaaatattaatcatactgatcaagatggttggacagcattaagatctgctgcttggggtggccatactgaggtagtttctgcactactttatgctggcgtaaaagtggattgtgcagatgctgatagccgaacagctttgagagcagcagcatggggaggacacgaggatattgtactgaatttgctacaacatggcgctgaagtgaacaaagctgataatgaaggtagaactgctttgatagcagcagcatacatgggacatagagagattgtggaacacctactggaccatggagcagaagtaaatcatgaggatgttgatggcaggactgcactctctgtagctgcactttgtgtgcctgcaagtaaagggcacgcatcagttgttagccttttattgatcgaggtgc

SEQ ID NO: 4293 - DNA, 327 bp, Homo Sapiens
ttttttttttttttttttttgaatagaatcatttattttaatttttaacagaggtaaaataaagcatacttatccaaagggataacacataatactggatattaacctaaaggtgaaaagaaagaaggaaaaaagtaacagttttattttttaatatttgctattttctttaatgccttagttctggagaaaggctaaaatctcatcatattgacattaacacatttttaaaaagtgtctctcaagtgtaatatttaataaaactaggtactgaaaaatgttctgaaatttttcaagtcaatgttgttttcaagtatattaaaatgc

SEQ ID NO: 4294 - DNA, 440 bp, Homo Sapiens
  misc_feature (50)..(50): n is a, c, g, or t
  misc_feature (334)..(334): n is a, c, g, or t
  misc_feature (404)..(404): n is a, c, g, or t
gcgaggagctgatccgaggcggagaggaaggcggtgcaggctatgtgggnccggctctatgccaactgcgaggacgtgggggtggccatcctggtgaggttctttgtgaacttcccctcggccaagcagtacttcagccagttcaagcacatggaggatcccctggagatggagcggacccccagctgcggaagacgcctgccgagtcatgggggccctcaacactgtcgtggagaacctgcatgaccccgacaaggtgtcctctgtgctcgcccttgtggggaaagcccacgccctcaagcacaaggtggaaccggtgtacttcaagatcctntcttggggtcattcttggaggttggttcgccgaaggaattttgcccagtgactttcccaacttgagaacncagagagccttggggccaaggttgtgttgggcttca

SEQ ID NO: 4295 - DNA, 386 bp, Homo Sapiens
tttttttttttttttttaagggaagggggcagtgtggtatcccccagtgagggaggcatttattcgctgtttgaaggagatgggagccagccactgaggtaccagtgggagggcatggacgggagccgtgggagcggacttgtttctgctgggctctcacagccgcctgtgtgtctcccatcaaagcccacgtcctttgccccactgagttatggcttctaaagagtggggcgtctgtcttcaggatggccctgtgcctagatagacccaaggtgcttgagattattcatgatatatcctcagttccgggggccccaggcctccagcagcgctgtggcgagagctcctcctctgggcccaaaccctggttccaattcctgctcttc

SEQ ID NO: 4296 - DNA, 548 bp, Homo Sapiens
ggaagatgttagagattacaatttgactgaagaacagaaggcgatcaaggccaagtatccgccagtcaataggaagtacgagttggattgtattacacagagcatgaatatacttctttaggttacacgcatggggagatactctggaggaagcatttgagcaatgtgcaatggccatgtttggttacatgacagatactgggacagtggagcccctccaaacagtagaagtagaaacccaaggagatgacttacagtctcttctgtttcactttttggatgaatggctttataagttcagtgctgatgaattcttcataccccgggaagtgaaagtacttagcattgatcaaagaaatttcaaattacgattcaattgggtggggagaagaattttcattgtccaagcaccctcagggaacagaagtcaaagcaataacatattcagcaatgcaggtctataatgaagagaacccgggaagtttttgtgatcattggacatttaagaccacccaaaaaattaaaagactccctacgggaaaaaaaaa

SEQ ID NO: 4297 - DNA, 407 bp, Homo Sapiens
tttacatttttcacatatcagtatttattatcttttcaaaggaacaggtcaagatgagaataaagtttatgatcaaaggtagtcaaacatttattttatataaatataatttccttgcctatatccattagatttggggaaaaaaggttcaagtttacagtgccagaacagctccttctttaaaggcttgtaaacagtgacttgttctatgccagcatgcacactttgagcatatcaactcacttaatccttaccaacaattctatgaagattgtgctatcattcccatttcacagataaaaactaatgtatctagatatgataatcttgctcaggatcatgcactgggatttgaacctaagtgatctattctctgatgccgtactatcaatgcagtacaattttta

SEQ ID NO: 4298 - DNA, 413 bp, Homo Sapiens
gagacagtctcactctagcctgggagacagccaggctccatctcaaaaaaaaaaaaacacaaaaattatccaggcgtgatggcacatgtctgtaatcccaggtactagaaaggctaaggtaagattatcacctgaacctgggaggcaatggagtacagtggcacaatctcggctcaccaccacctccgcctcccgggttcaagcgattctcccgcctcagcctcagaagttgctggaattacaggtattttttctaaatgtgagatcaaggaattaccaccaaaaaaggagagtaatacaggagaaatattccagacagtaatgttggaaagacatgaaagccacgacatacaagatttttgcttcagagaaacccagaaaaatgtacatgactctcagtgtctgtggaaaca

SEQ ID NO: 4299 - DNA, 538 bp, Homo Sapiens
  misc_feature (299)..(299): n is a, c, g, or t
tttttttttttttttttttttaaaagcagggaatgcctttatttaaaaaaatgaaaaacagaaactaaaacaaaataacaatcacctctgttgcctccatttgagagaatacttccaggggctctgcatgtctggtccccaacctggtcggggagttcactttcagaggctcagggatgggccttccccagccccaccagcaaatcatctctccctgcttccaggagggtacttactctccaactagtgggctttatgggccaggaaggatgacaggaaggggtgtgtggggtactacntccctccacactgagaatccgaaagccaagatgcccaagattctatcgttatctgcttgtcttgtagaagcccctctgtgagactgaggggcaaaggagagagggcaggggcgtgtctcaacccttctggccacttctaggttgtgcagactgccactcttgttactacgatggactgtcagatcagcaggtggcccaggagggcttgcttgatgcgggctgctttttccttttgcctc

SEQ ID NO: 4300 - DNA, 2327 bp, Homo Sapiens
aaatggtagaactagtgatctcacccagcctcactgtaaacagcgattgtctggataaactgaagtttaaccgtgctgacgctgctgtgtggactctgagtgacagacaaggcatcaccaaatcggcccccctgagagtgtcccagctcttctccagatcttgcccacgtgtcctcccccgccagccttccacagccatggcagcctacggccagacgcagtacagtgcggggatccagcaggctaccccctatacagcttacccacctccagcacaagcctatggaatcccttcctacagcatcaagacagaagacagcttgaaccattcccctggccagagtggattcctcagctatggctccagcttcagcacctcacccactggacagagcccatacacctaccagatgcacggcacaacagggttctatcaaggaggaaatggactgggcaacgcagccggtttcgggagtgtgcaccaggactatccttcctaccccggcttcccccagagccagtacccccagtattacggctcatcctacaaccctccctacgtcccggccagcagcatctgcccttcacccctctccacgtccacctacgtcctccaggaggcatctcacaacgtccccaaccagagttccgagtcacttgctggtgaatacaacacacacaatggaccttccacaccagcgaaagagggagacacagacaggccgcaccgggcctccgatgggaagctccgaggccggtctaagaggagcagtgacccgtccccggcaggggacaatgagattgagcgtgtgttcgtgtgggacttggatgagacaataattatttttcactccttactcacggggacatttgcatccagatacgggaaggacaccacgacgtccgtgcgcattggccttatgatggaagagatgatcttcaaccttgcagatacacatctgttcttcaatgacctggaggattgtgaccagatccacgttgatgacgtctcatcagatgacaatggccaagatttaagcacatacaacttctccgctgacggcttccacagttcggccccaggagccaacctgtgcctgggctctggcgtgcacggcggcgtggactggatgaggaagctggccttccgctaccggcgggtgaaggagatgtacaatacctacaagaacaacgttggtgggttgataggcactcccaaaagggagacctggctacagctccgagctgagctggaagctctcacagacctctggctgacccactccctgaaggcactaaacctcatcaactcccggcccaactgtgtcaatgtgctggtcaccaccactcaactaattcctgccctggccaaagtcctgctatatggcctggggtctgtgtttcctattgagaacatctacagtgcaaccaagacagggaaggagagctgcttcgagaggataatgcagagattcggcagaaaagctgtctacgtggtgatcggtgatggtgtggaagaggagcaaggagcgaaaaagcacaacatgcctttctggcggatatcctgccacgcgaacctggaggcactgaggcacgccctggagctggagtatttatagcaggatcagcagcatctccacctgccatctcaccctcagaccccctcgccttccccacctccccaccgagaactccagagacccagatgttggacaccaggaaggggccccacagccgagacgactgtccagtgaccatctcagaagccgtccatcagtccaaatgggggttctgagaaggaaagtacccaacattggcttcggagtatttgactttggggaaaagggctggctcggagtctagactcttctgtaagactcacagaacaaaagcaaggaattgctgatttggggggtgcctggtgatgaggaggggatgggtttgtcttgtcttctttttaatttatggactagtctcattactccggaattatgctcttgtacctgtgtggctgggtttcttagtcgttggtttggtttggttttttgaactggtatgtggggtggttcacagttctaatgtaagcactctattctccaagttgtgctttgtggggacaatcattctttgaacattagagaggaaggcagttcaagctgttgaaaagactattgcttatttttgtttttaaagacctacctgacgtcatgtggacagtgcacgtgccttacgctacatcttgttttctaggaagagggggatgctgggaaggaatgggtgctttgtgatggataaaaggcattaaataaaaccacgtttacattttg

SEQ ID NO: 4301 - DNA, 440 bp, Homo Sapiens
tttttttttagttctggctttgtaccagccagggcaaggcaggaaactctccagcgtgagtccgtgaggccaagaagtcccgccctgttctcggggaggacctggcttttctggtgtctctggtgcccgagagcccggtgctgccatctttagtgaaagagtaaatggtggccgagggtccttttgtgagggatgtgccttggtgaagaaggcatgttccctgccgtgaagatacttggaagctctgggtggcgagggaaaagggatacccctggtgctccctgggcctggcggaaggctaggaggaaggacagctgaggtgaggactgagtggggcaggtatcaccctgacaaacagtttgggaagatcaggacaggcaggtgagacctggtgcagaatccaggttgggtaatagatacatcgtcgaagatgtagcaag

SEQ ID NO: 4302 - DNA, 519 bp, Homo Sapiens
ctcttatgtaacagaaaggtcagaaaatttaagcaagtagaagtgtggagcatattaagcaagatgaacatctcgggaagcagctgtggaagccctaactctgcagatacatctagtgactttaaggacctttggacaaatcttaaggaatgtcatgatagataagtacaaggtttacaagtaaaagtaaccaagctaaaacaggaacgaatcttagatgcacaaagactagaagaattcttcaccaaaaatcaacagctgagggaacagcagaaagtccttcatgaaaccattaaagttttagaagatcggttaagagcaggcttatgtgatcgctgtgcagtaactgaagaacatatgcggaaaaaacagcaagagtttgaaaatatccggcagcagaatcttaaacttattacagaacttatgaatgaaaggaatactctacaggaagaaaataaaaagctttctgaacaactccagcagaaaattgagaatgatcaacagcatcaagcagctgaa

SEQ ID NO: 4303 - DNA, 377 bp, Homo Sapiens
gcatcaaagatgaagaagaagagacagtctttcgagaggtggtcagtttttccccggaccccctgccagatattatgacaaggacaccaccaaaccaatcagcttttacttgtcttcgctggaggagctcttggcgtggaagccccgcttggaggatggctttaatgtggccctggagcccctggcgtgtcgccagccccctctgagcagccagaggccccggactttgttgtgtcatgacatgatgggcgggtacctggataacaggttcattcagggctcggtggtgcagactccctatgctttctaccactggcagtgcatcgacgctctttgtgtacttcagccaccacaccgtcaccattcccccagtgggc

SEQ ID NO: 4304 - DNA, 413 bp, Homo Sapiens
  misc_feature (24)..(24): n is a, c, g, or t
  misc_feature (56)..(57): n is a, c, g, or t
ggatcaggaagtttgtgctctctncgtggctaagtttttcacctactaggacgggnntggggtggggagaacaggtgtccttctaaaatacagcacaagctacagcctgcgtccagccataacccaggagtaacatcagaaacaggtgagaatgaccactttaactcaccgggcccgtcgcactgaaataagcaagaactctgaaaagaagatggaaagtgaggaagacagtaattgggagaaaagtccagacaatgaagattctggagactctaaggatatccgccttactcttatgggaagaagtattgcttctgggactaaaagataaagaggggtacacatctttctggaatgactgcatatcatcaggcctgcgagggggcatcctgatagagctggccatgcggggt

SEQ ID NO: 4305 - DNA, 586 bp, Homo Sapiens
ttttttttttttttttttttttttttttttttcaataaataaaatattgtttatttggggatacatgctgaaaatcattttattgatggggtacaaaataaaaaaaaaaagcagagactactgaattagaaatatacattttttcaggcacagatggaacatttacaaccacatactaggccatagagcaaatctcaaacaaatgccagaggattcatatgtattcattttctacagctgctacaacaaattaccacaaacttagtggttgaaaacaacccaaatgtattatgttacagctctacaggtcagaagtctaaaacaggcctcaccaggctacaatcagtgatggcaggtacagctgcccctggaggctgaagggtcaaatccatctccttgccccttccagcttctagaagccgcccacatactgaggctcatggccttcttcttccaacttcaaagtcagcaacatcttgatccttctcatgcagctgcctctctggcgctggctactctgcctctttgccacttaaaggatggctgtgattacacgggtctactggagtcccgttctcgaagggtg

SEQ ID NO: 4306 - DNA, 550 bp, Homo Sapiens
  misc_feature (459)..(459): n is a, c, g, or t
  misc_feature (501)..(501): n is a, c, g, or t
  misc_feature (518)..(518): n is a, c, g, or t
atcttgggcctgtgttatctggggaatctgccacagcagacagcaaaaggtaaaaagcatccctttaataactacaccccactccagcaattgaggtttattcaggggtgggtcaaagtagtacaagacaaaaatagcttagtgaaatggttagaatccagactgaggtgccagactgcctgcatctgagtctcagtcccaccatgtatgagccgtgtgaccttggggtgagttactagcctccccaggcttcaaatctctcacctgtaaaatgggaacagtaacaatacctacttcatcccgtctgtctggggactgaatgagctaatatgtgtaaagtgcttagaggagtgtttggagcatagtaagtgctgtgtgaagtactttcaaaaataaaaacaagaacttggggaaaaagtgctctctgagggttgtagggcagtgatgctacttaagtgntgagcatatttcattctaagaagttagcatctggacataagnccttaaccctagggaancttgggctaccttactttggaaattttccaag

SEQ ID NO: 4307 - DNA, 2880 bp, Homo Sapiens
actccagtctcctgggactttgactcgccgtactcggcgcgctcctgctgagggtcgccggagatgtcgctcggccgccttctaccaggagcctgatccgtgccgcccgccgcccggatgggaccaccagagtgctctaagtctccagtgaatattgaattgctgaggattttgggaaaagacaaatcaaagttcccattccatggatcccttaggtgcaccttcccagtttgtggatgtggatacactaccaagctggggtgactcatgccaagatgaattaaattcctctgatactacagctgaaatatttcaggaagacactgttcgatcaccttttctttataataaggacgtcaatggaaaagtggttctttggaaaggagatgtggcattactgaactgtacagccattgtgaataccagcaatgaaagtctcacagataagaatcctgtgtcagaaagtatcttcatgcttgcagggcctgatttgaaggaagatctccagaaacttaaagggtgccgaacaggtgaagcaaaattgacaaaaggattcaatctagctgcccggttcatcattcacacagtgggacctaaatataaaagccgctatcgcacagcagctgagagttccctttatagctgctacagaaacgtacttcaactagcaaaagagcagtcaatgtcttctgttggcttctgtgtcatcaattctgcaaaacgtggttatcctttagaggatgcaacacacatagcacttcgcactgtaagaagattcctagagattcatggggaaaccattgaaaaagtagtatttgctgtctctgatcttgaagagggtacttaccaaaagctgctacctctctacttcccaaggtcattaaaagaggagaatcgatcattgccctacctacctgcagatattggaaatgcagaaggggagcctgtggtacctgaacgacagattagaataagtgagaaacctggtgctccagaagataaccaagaagaggaggatgaaggcttgggagttgatctctctttcattggctctcatgcttttgctcgaatggaaggagatattgacaagcaaagaaaactgatccttcagggacaattatcagaggcagctctgcagaagcagcatcaaagaaattataatcgctggttatgtcaagcaagatctgaggatctgtctgatattgcttctctaaaagccttataccaaacaggtgttgataactgtggtcggacagtgatggtggtagttggaagaaacattcctgtaacattaatagatatggacaaggctctcttatatttcattcatgtaatggatcacattgctgtgaaggagtatgtattagtgtattttcacaccctgaccagcgaatacaatcacctggactccgacttcctgaagaaactctacgatgttgttgatgtcaagtacaagaggaatttgaaggctgtttattttgtacatcccacatttcgttcaaaggtgtcaacatggttttttaccaccttttctgtctcaggactgaaggacaaaatccaccatgtggacagcctccaccagctgttttctgccatatcaccagaacagattgactttcctccttttgtccttgaatatgatgccagggaaaacgggccttactatacatcatatcccccatcaccagatttgtgacctgccatctttcagtgcttcttggttcccaggatgccacttcctccacgaatagctacctgttgaagtgatattcattgttgctgtacagatccagagagccttttgtccccacctctctggtatttttttattgactgtatattttctggcacataagcaatctaaaaatggtaggccattctgaactgcacacattttaaatttgtatatttatatgaaatggaaatgttcatttttagattgttaatagaaattggggagcaacttttgagtatctttagtttcctgaaggacaccgaattctccattagataaaccaccaagactgttcacatcatctctctaacattgcacgcttcctttgtgtacttaagtgattctcgaaatatacagaaccaatgtatgctaaccagatgcattgtttgcttcagatccatggtgttaataccatgtatattttataaagataatttggctgtgttaaaagagaattacctgagtccaagaatgtggaaatgtatctgacaaaaaacatcaaaatcattagcaaaacataggacttagaatgttaatgtacaagttaagactaaagtttaaggactaaggttccttggattatatgacttgttaagattgccacagttccgatctcaacagtgtggggtgaaacaagaagactgtatcttcagcctttttcctataatcatggatgatttggtcttattcaaaaggaccgcacatattagtactcttaagagcatcttccaagactccagcagtgagcatttagagagtgtgttgtcttccagagtcatgaatgattttgtttagctatcaggtctactacctctaaggacatttcatagcagcatctcttgagttgcctgcatcagtgtggaggaagtgtgtcacagtgaacaaatccagggagctgataattggcaaaagaccacttttaccactcaggctctatttgtgccttagcttggttatgagtaaaaattagaattatgctgcctacctcacagaggtatcatgaagatagcatttagaaagggctttgttgtggtggggtatcttcagttagtttttaaatgggaataaatatatatgagggaatgctacacagcactcctcttgtccttgatccccaaaaaaaaaaaaaaaaaaaaaaaaaaaaa

SEQ ID NO: 4308 - DNA, 477 bp, Homo Sapiens
ggtgatctgaggatcccggccgcgcgagagccatacgaattctgtctacttatgaagagtatatccaactaagcagtacctccctgtgtatacaacttatctgctgatcccaaggtatgggaagaagctgcactcagaaacttgcaaattgtgcaactgttccccacgattcccttggggccagtgccgactgaggcatctccaggaggccccagttgggcttggggacatgctgagaggtgacagcactgctctcaagtcatatcctctgcttctgcaaaagctgtggagctcacccatcaatagcagctccatgccgggcgcagtggctcacgcctgtaatcccagcactttcggaggctcaggcgggcagatcatctgaggtcaggagtccgtgaccagcctggccaacatggtgaaaccccgtctccactaaaagtacaaaacttagctgggtgtggacattcggcgtgtgca

SEQ ID NO: 4309 - DNA, 423 bp, Homo Sapiens
  misc_feature (38)..(38): n is a, c, g, or t
  misc_feature (100)..(100): n is a, c, g, or t
gaaaccccatctctttaaaaaaaaaaaaaatccaaaanttagctgggcatggtggcatgcagtggtagtcccagctactcaggaggctgaggtgggaggntcactggaacccgggagcagagactgcagtgagctgagatcacactactgcattccagcctgagcaacagagcaagacacacacacacatcaatttattttagttgtataatgcttttctattagtaaagcatcagctaagcttcagtggcctgctccatcccctaatgactcccatgggctatcctaaaggaacttccagaacctttgttggtgtgttgacattgaccatgcagaccaatttgggcacaactggacattgattccttttacacaagagctgcctcccaaagatagataaattttcccagccctaaatatgaa

SEQ ID NO: 4310 - DNA, 696 bp, Homo Sapiens
  misc_feature (591)..(591): n is a, c, g, or t
ctgactttgtccttttattcatggaacacaagcaccaggaaatgccttaaacgactcagacagacaatctgtggattgtaacgtggcggggcccaagggcgtgttttggacatttggctaggacaagtggctggtacaatggccaattaagaggcacttttatgaggaaaaacatactttctgcaagatagatctctagtgaccgatccaccaaatgccttcgctctactctgtatgtggcatctgctgctactttgctgatgcgttaaatgatgtcctatctcctggacacacaagctgccactgggaaggggctgggaacctacattgctggtgtcactgatactaatggtgtgtgtaggagtcttccccaccttaggtctttcttacacttcttcaataagactttctataaaggcagaagcataacagaaccaaagcgaaggccttgcaaacaccagccagacgcaggggcccgaggagctgaggagctgaggcgccggggttggggagagtaggacaacattcggccaaggcagccacatcctgttcctggacagccacagtggcaatgtgccaggaggacgcggngatggctccacacccgctgccaagtcaaacacggggcacttccaggcagaattgaggatgaaaaccccgtaagttggtggggcttaattttctggtatttttcct

SEQ ID NO: 4311 - DNA, 440 bp, Homo Sapiens
  misc_feature (17)..(17): n is a, c, g, or t
  misc_feature (303)..(303): n is a, c, g, or t
  misc_feature (313)..(313): n is a, c, g, or t
  misc_feature (406)..(406): n is a, c, g, or t
  misc_feature (419)..(419): n is a, c, g, or t
gccagactgcttagcgnctgagatccgcgtgaaaagtcctctgcccacgagagcagggagttggggccacgcagaaatggcctcaaggggactctgctccacgtggggccaggcgtgtgactgacgctgtccgacgaaggcgcctacggacggacgcagcacacgaagtcacgtgcaagtgcctttgattcgttccttctttctaaagacgacagctttcgttgttagcactgaattattgaaaatgtcaaccagattctagaaactgcggtcatccagttcttcctgacacccgggatgggngcttgggaanccgtttgaagccttaatagatcattttacattcaatttttttaactcagcaagtgagaacttacaagaggggtttttttttttttttttttcncttaatggaacanattttctaaaggaattttttt

SEQ ID NO: 4312 - DNA, 255 bp, Homo Sapiens
gtaggcagggactgggttctactgtgagctgagatccctggagctccatgaaaaggagaaaagaatgccgtgtttcctggatctatggagggaatcccaggatttcctggaaaccgaggattaatgggccaaaagggagaaattgggcctccaggacagcaaggaaaaaaaggagccccagggatgcctggtttaatgggaagcaatggctcaccaggccagcctggaacaccgggatctaagggaagcaaaggt

SEQ ID NO: 4313 - DNA, 632 bp, Homo Sapiens
  misc_feature (23)..(23): n is a, c, g, or t
  misc_feature (487)..(487): n is a, c, g, or t
  misc_feature (489)..(489): n is a, c, g, or t
  misc_feature (612)..(612): n is a, c, g, or t
  misc_feature (626)..(626): n is a, c, g, or t
  misc_feature (629)..(629): n is a, c, g, or t
caggactgagaccacagccgtancaaacaaggaggggcacttatctttttgctttgaaagccagcatcctggagctggtccggccctatgaatgccttggtggcccgggtactgagcacagagagccaccatttccaaaggtttgaatgagttaacacttggcagcaattgcattcccgtgcacttagagtcgagacacatggagaagggttctggggtaggcttcttctttcccttttttctttttcctttttggttgttttatgtttaaaaaccacatgtctgtacggaggagcttggttagctgacattgttttacagtgctgaaaaagaagcgtggcattgaacggcatgcaccagctaaagggctgcaagcagtgagtcatgcagtctcagactgcagcgtccctaggcctgcagaattaacaaaatatatgtgtgtataatatgtagcaatttggttccaaaagggaatcaagaacagccnanaaaagtgtccaaattaagcccccatgtttcaccaaccccaagggggggagaacctaagtcttcccctttggtggggaactggacccctatcttccttccccggattaaagccttatcttcctnttataactattggnccntta

SEQ ID NO: 4314 - DNA, 204 bp, Homo Sapiens
gtctgtccttgatgcaaaaatcccctctgcttcctctgcagctgcagatcatgcttgctactacagtctctcttcccgacccaagaagaactatctgtagggtcagaaaaacaccccagcctcttcctgcttctagccttcctgctctgtatccacacagctgaagccacaaaacaagcaagcaacaaacaaaaacagaatagg

SEQ ID NO: 4315 - DNA, 485 bp, Homo Sapiens
ggagggttacttatgcctccagtgctacttataaatggtagttttcccttccttctttcatggactttccacccacctgtctcatttaagcacaaagggcagggctggctcaggactaagttgtctcctaaaccctttttgagagtatatcaatgacatatgtcctagtttgttccccatcaggaattctaattgctggtatccaacagcattagcaatatcagtgtgtaaaggaaaaacaactggtgatgagggatgggagggagtacagcatctgggcaggaggagcattagaggagctggagccacggatgaaagaaacaagatttgcagaattgacagctccatagtagtaaatgtggagctcagtcttgagggagttaactctcatgaaggagaagtgcaggctgtagtcccagtgacagtgactagcatccactggcatcccactcaggatgagggtaatgtgttgggcgataacatca

SEQ ID NO: 4316 - DNA, 318 bp, Homo Sapiens
  misc_feature (275)..(275): n is a, c, g, or t
atgttttgttttttttattcacccagttccttgaagactgcttctcacacaataagagctcaacaaatagttgctggttggctgaatgaatgaatgaatgaatggggttcaacatacaatggcagatggtgatcccttctgggaagctcgaccaaagagccctgtgaggggtcaccacagggatcacattgtggggtagagttgggaatctggcttatcaattcccatggcccaggttagtaaggcaaacctagcactgacattgccacgccttnactctcagcaggttcacaaagccttctgcacacttgctggtat

SEQ ID NO: 4317 - DNA, 342 bp, Homo Sapiens
  misc_feature (51)..(51): n is a, c, g, or t
tttttttttttttttttgcaatccctctccccctgaaccaatttcacattngggaatgcaggacctagactgctgaataaaaagctacttcttctataattgtcaggttctctccaatttctcagcttcctcaaagacatggggtggagttgggtgtgccatcactgagagagctctggaacttttgactcttagtgacatttttagatttaggggttcatggccttccacatgttgccaccaactggtgatctctgccccttcatgctgatcaagaaagtagaaactcctcgtcgccttcaggtttgcagtcgcagaaacattgcctgctgtggactgtca

SEQ ID NO: 4318 - DNA, 300 bp, Homo Sapiens
  misc_feature (73)..(73): n is a, c, g, or t
  misc_feature (262)..(262): n is a, c, g, or t
  misc_feature (291)..(291): n is a, c, g, or t
tttttttttttttttttatgagcaggagatcttaattgacagaaactcattggtggttggagtggccaatggnacgggaaaaagtatccagtaatcagaagaattgtatctgggttatgtaatcttatgcacattccattgtctttgccaagcccagaagccatgttgtgttcattgttaagaaatttgatagatttacccagcttttctatgtattttgacttattgaaaatatgtaacaactgagtcgggttgcagcacnggtggggtagaatcgactttccccccaangtggcacac

SEQ ID NO: 4319 - DNA, 469 bp, Homo Sapiens
tcccgcgcgtgatgttactattttaagacttttaaacgtattctagatacttgtccttggcaaatatagtcatgcatggcataaggacattttggtcaatgacaaactgcatataggatgcggtcccataagattataataatgggcctgaaaaaattcctgttgccgagtgcaatgctactcatgtgtctagtgatgctcgtgtaaagctactgtgctgccacttgcataaaagcacagcgcacaccattctgtacagtacacaatacttgataatgataatagatgtgttcctggatagcacagcacacaccattctgtacaatacacaatacgtgataatgataataaatgtgttcctggtttatgtatttactataatatactattgatcagtgttttagagtgtactccttctctctataaaagaattaagtgaactagcaggccctttgggaagtactgtaga

SEQ ID NO: 4320 - DNA, 280 bp, Homo Sapiens
  misc_feature (4)..(4): n is a, c, g, or t
  misc_feature (135)..(135): n is a, c, g, or t
  misc_feature (216)..(216): n is a, c, g, or t
  misc_feature (237)..(237): n is a, c, g, or t
  misc_feature (247)..(247): n is a, c, g, or t
  misc_feature (254)..(254): n is a, c, g, or t
  misc_feature (261)..(261): n is a, c, g, or t
  misc_feature (270)..(270): n is a, c, g, or t
  misc_feature (276)..(276): n is a, c, g, or t
gcgnccgcttgcccgggtaccccgatcgccgaggccccggagccttcctccgctggggctcaggcagcggaggagccgtcgggggccggctcagaagagctgatcaagtcggaccaggtgaacggcgtgctggtnctgagcctcctggacaaaatcatcggggcccgtagaccagatccagctgactcaagcacagctggaggagcggcagcgganatggagggcgcagtgcagaanatccagggcnagctgancaagctnggcaagggngaaccnacca

SEQ ID NO: 4321 - DNA, 403 bp, Homo Sapiens
gtggggtgggaggagacaggttgtggttatgcaggaaaatcttgtcctaaaaatatatgagtttgggggtaaggggtgggatagccaagcaaaatcagtaattattttaaaatgaacatatgtatttttattaacttttagttaaatacagattttacaacgaggtcagcataagcctaaatctatatagagggctaactcaggcattgtcttgtttatttgtagactggattaaaaacgacctgtcctgttttgtcacttcccagcttcttcgtttagaataaattagaccaaaagaagaaacgtgcttgtctctgtatacccgcagaatgaagttactgttgttaaaactggattttttcattttactagtttccgaagagtccagatgcttggtagatgt

SEQ ID NO: 4322 - DNA, 366 bp, Homo Sapiens
gattcggcactaggccacaaccccacaagctccaacccatccctccagcgtctcagaaagcactatttctggagccaaggaggagactgtggccaccctcaccatgaccgaccgggtgcccagtcctctctccacagtggtatccacagccacaggaatttcctcaaccgcctggtccccgccgggactcggaagcctgggacagcagggaacatctcccatgtggccgagggggacaaaccgcagcacagagccaccatctgcctgagcaagatggatatcgcctgggtgatcctggccatcagcgtgcccatctcctcctgctctgtcctgctgacggtgtgctgcatgaagaggaagaagaag

SEQ ID NO: 4323 - DNA, 589 bp, Homo Sapiens
  misc_feature (499)..(499): n is a, c, g, or t
aagcttgcggccgccgccaagaagagcaggaagagccggccgaatgctagcggcggtgcggcctgttcagggccggggcctgagccggctgtgttctgcgagcccgtggtgaagctgtactaccgggaagaggcagtggctgaggacgtgctcaacgtggatgcctggcaagacggcgcggtgctgcagatcggcgatgttaagtacaaggtggagcgcaacccgcccgccttcaccgaactgcagttgccgcgctacatcatggccgggttccctgtgtgccccaaactcagcctcgaatttggggatcccgccagctcccttttccgctggtataaggaagccaagcccggagcggcggagcccgaggtcggtgtcccctcgtcattgtctccctcctcaccttcttcttcttggactgagactgatgtggaggagcgtgtctacaccccgtccaatgccgacatcgggctaaggctcaagcttcactgcaccccangcgatgggcagcgctttgggcacagcccggagttggaaagtgtgtgtgtggtataaggctggccttgcacctgcacttttggacacccgc

SEQ ID NO: 4324 - DNA, 302 bp, Homo Sapiens
  misc_feature (70)..(70): n is a, c, g, or t
  misc_feature (89)..(89): n is a, c, g, or t
  misc_feature (114)..(114): n is a, c, g, or t
  misc_feature (136)..(136): n is a, c, g, or t
  misc_feature (226)..(226): n is a, c, g, or t
  misc_feature (237)..(237): n is a, c, g, or t
  misc_feature (252)..(252): n is a, c, g, or t
agaagaggggatctcaataggtattatggccccgatcaaagtgggctccggaagctagaaggcgcggaanccagcgcccagtagcagangcgcggggcaactgggcatggcgcncagggggtgcacggggcggacngcagttctgggggcgcacggctctggactctgctcactcacgcggcctctccctcggcctcgactacgccgcagcctggaccggtcctcngcggtctcccngacaagccaaccgantggtttacaaacacacatgcacttcgctgaagggatgtctgggcaatccc

SEQ ID NO: 4325 - DNA, 286 bp, Homo Sapiens
  misc_feature (47)..(47): n is a, c, g, or t
  misc_feature (194)..(194): n is a, c, g, or t
  misc_feature (210)..(210): n is a, c, g, or t
gcaagcaagggcttgcaggacctgaagcaacaggtggaggggaccgnccaggaagccgtgtcagcggccggagcggcagctcagcaagtggtggaccaggccacagaggcggggcagaaagccatggaccagctggccaagaccacccaggaaaccatcgacaagactgctaaccaggcctctgacaccttctntgggatcgggaaaaanttcggcctcctgaaatgacagcagggagacttgggtcggcctcctgaaatgatagcagggagacttgggtgacccc

SEQ ID NO: 4326 - DNA, 2475 bp, Homo Sapiens
ccggaggagtccgagaggaagcggaggcgcgagctggaggcggcggctcccgtcggcctccggcaggactgagcgctgggaggccggaaggcgggcgcgcacggcggagaggcgggcgggaggccggagcatattaatgaaaagtgccataaactgaaaaaccaaacatgagggtagcaggtgctgcaaagttggtggtagctgtggcagtgtttttactgacattttatgttatttctcaagtatttgaaataaaaatggatgcaagtttaggaaatctatttgcaagatcagcattggacacagctgcacgttctacaaagcctcccagatataagtgtgggatctcaaaagcttgccctgagaagcattttgcttttaaaatggcaagtggagcagccaacgtggtgggacccaaaatctgcctggaagataatgttttaatgagtggtgttaagaataatgttggaagagggatcaatgttgccttggcaaatggaaaaacaggagaagtattagacactaaatattttgacatgtggggaggagatgtggcaccatttattgagtttctgaaggccatacaagatggaacaatagttttaatgggaacatacgatgatggagcaaccaaactcaatgatgaggcacggcggctcattgctgatttggggagcacatctattactaatcttggttttagagacaactgggtcttctgtggtgggaagggcattaagacaaaaagcccttttgaacagcacataaagaacaataaggatacaaacaaatatgaaggatggcctgaagttgtagaaatggaaggatgcatcccccagaagcaagactaatggaaatgtggagagaattgaagaaagcgcactttcactcttaatgggagagctataaatggcagagctatgtgtaaatattttaagagcatgcagccatcttggtgtgtgcatgagtattgtctcttttgatatcaggattatttattgctaacgtaaatagatagcattgtaaataatcatcacaatgatcaaatcactgaaccatgtctccgcacatttccctaaaagtacaatgtttagactgctatggtaatacatattttaaattctaaaagcatacacaatgtgtaactgaatggtttgtgaaaaatatattgatatatatactagttgctatgaaaatatcatggaataatagggattttagggtggatactttattttcttttatgtttctatatgttgcgttgtgatgacattatcttttaaattaaaaagagatttggctagttgtgtgtgtaatgttactttacagtccgactctcctgatgtacctcttttcatgatctttttctttccttcccaagaaactgaggaatgtttaatatgaaaacatacatcggatatgtgaaaagcacaacaaaattcttaatgtacacagtaaaaaagtaaatatataaatgtagatggcatttaggaccacagcttgctggatttgtgttagctatgggaataacttgattttgtataagctatttagagtgaggctggaggtggcagcttcacagaactggagaaccaggccaagtcccctccccaacctaattaggtcattcaggacagctaagtcagtatatttagagcaatactagcatacgtttttcttaattgttatcagcattgaccaagtggtttggaaggaggcatgctttaatatcacaataattttgatttgtaaaccaagaaattaatcctgtgtttatctaacttcataatagcaattattgcccgaagctatagtggcatatttacaaaagttcttattactgggcggactgataacatttaaaaaataattgtgtttgaccccaaatgactttatacccaattctacataaaaatatagaagatctatctttttttgttaccttcagatgttcactaaataactcagtttttaagcagaagttttcagggcattaaatatatgttgtgtatgaagtatctcaaactggaacataaatttagtgatcaaactgccattcacagtgtaaggcagcacttaaatttcgaacctaaagtttagatgcattgtataaaaaaacctaaaagcagtatctgttatttagctgtaaaccaagttggaagctattcggataatttcttaaatattgatgaactttggagtactgtttcttccttcaaactgaatgtaattaattcatgaataaatgcaccttatatgtttaaacaatctttgtatacttttgggatttttggtgcttatatgctaaatcacattcagcatgtgtattttgacatttaaaatacttccctcaattctgtaaattaaaagaatagttattttacagttccagggattgtgaaataaatgttgcagttttttaaaataatgaaaataaatactcttggttttgctttgtgaaaaaaaaaaaaaaaa

SEQ ID NO: 4327 - DNA, 5669 bp, Homo Sapiens
gagggagatagcgtgcatccagaaagacaaagacattcctgcggaggatatcatctgtgagtactttgagcccaagcctctcctggagcaggcttgcctcattccttgccagcaagattgcatcgtgtctgaattttctgcctggtccgaatgctccaagacctgcggcagcgggctccagcaccggacgcgtcatgtggtggcgcccccgcagttcggaggctctggctgtccaaacctgacggagttccaggtgtgccaatccagtccatgcgaggccgaggagctcaggtacagcctgcatgtggggccctggagcacctgctcaatgccccactcccgacaagtaagacaagcaaggagacgcgggaagaataaagaacgggaaaaggaccgcagcaaaggagtaaaggatccagaagcccgcgagcttattaagaaaaagagaaacagaaacaggcagaacagacaagagaacaaatattgggacatccagattggatatcagaccagagaggttatgtgcattaacaagacggggaaagctgctgatttaagcttttgccagcaagagaagcttccaatgaccttccagtcctgtgtgatcaccaaagagtgccaggtttccgagtggtcagagtggagcccctgctcaaaaacatgccatgacatggtgtcccctgcaggcactcgtgtaaggacacgaaccatcaggcagtttcccattggcagtgaaaaggagtgtccagaatttgaagaaaaagaaccctgtttgtctcaaggagatggagttgtcccctgtgccacgtatggctggagaactacagagtggactgagtgccgtgtggaccctttgctcagtcagcaggacaagaggcgcggcaaccagacggccctctgtggagggggcatccagacccgagaggtgtactgcgtgcaggccaacgaaaacctcctctcacaattaagtacccacaagaacaaagaagcctcaaagccaatggacttaaaattatgcactggacctatccctaatactacacagctgtgccacattccttgtccaactgaatgtgaagtttcaccttggtcagcttggggaccttgtacttatgaaaactgtaatgatcagcaagggaaaaaaggcttcaaactgaggaagcggcgcattaccaatgagcccactggaggctctggggtaaccggaaactgccctcacttactggaagccattccctgtgaagagcctgcctgttatgactggaaagcggtgagactgggagactgcgagccagataacggaaaggagtgtggtccaggcacgcaagttcaagaggttgtgtgcatcaacagtgatggagaagaagttgacagacagctgtgcagagatgccatcttccccatccctgtggcctgtgatgccccatgcccgaaagactgtgtgctcagcacatggtctacgtggtcctcctgctcacacacctgctcagggaaaacgacagaagggaaacagatacgagcacgatccattctggcctatgcgggtgaagaaggtggaattcgctgtccaaatagcagtgctttgcaagaagtacgaagctgtaatgagcatccttgcacagtgtaccactggcaaactggtccctggggccagtgcattgaggacacctcagtatcgtccttcaacacaactacgacttggaatggggaggcctcctgctctgtcggcatgcagacaagaaaagtcatctgtgtgcgagtcaatgtgggccaagtgggacccaaaaaatgtcctgaaagccttcgacctgaaactgtaaggccttgtctgcttccttgtaagaaggactgtattgtgaccccatatagtgactggacatcatgcccctcttcgtgtaaagaaggggactccagtatcaggaagcagtctaggcatcgggtcatcattcagctgccagccaacgggggccgagactgcacagatcccctctatgaagagaaggcctgtgaggcacctcaagcgtgccaaagctacaggtggaagactcacaaatggcgcagatgccaattagtcccttggagcgtgcaacaagacagccctggagcacaggaaggctgtgggcctgggcgacaggcaagagccattacttgtcgcaagcaagatggaggacaggctggaatccatgagtgcctacagtatgcaggccctgtgccagcccttacccaggcctgccagatcccctgccaggatgactgtcaattgaccagctggtccaagttttcttcatgcaatggagactgtggtgcagttaggaccagaaagcgcactcttgttggaaaaagtaaaaagaaggaaaaatgtaaaaattcccatttgtatcccctgattgagactcagtattgtccttgtgacaaatataatgcacaacctgtggggaactggtcagactgtattttaccagagggaaaagtggaagtgttgctgggaatgaaagtacaaggagacatcaaggaatgcggacaaggatatcgttaccaagcaatggcatgctacgatcaaaatggcaggcttgtggaaacatctagatgtaacagccatggttacattgaggaggcctgcatcatcccctgcccctcagactgcaagctcagtgagtggtccaactggtcgcgctgcagcaagtcctgtgggagtggtgtgaaggttcgttctaaatggctgcgtgaaaaaccatataatggaggaaggccttgccccaaactggaccatgtcaaccaggcacaggtgtatgaggttgtcccatgccacagtgactgcaaccagtacctatgggtcacagagccctggagcatctgcaaggtgacctttgtgaatatgcgggagaactgtggagagggcgtgcaaacccgaaaagtgagatgcatgcagaatacagcagatggcccttctgaacatgtagaggattacctctgtgacccagaagagatgcccctgggctctagagtgtgcaaattaccatgccctgaggactgtgtgatatctgaatggggtccatggacccaatgtgttttgccttgcaatcaaagcagtttccggcaaaggtcagctgatcccatcagacaaccagctgatgaaggaagatcttgccctaatgctgttgagaaagaaccctgtaacctgaacaaaaactgctaccactatgattataatgtaacagactggagtacatgtcagctgagtgagaaggcagtttgtggaaatggaataaaaacaaggatgttggattgtgttcgaagtgatggcaagtcagttgacctgaaatattgtgaagcgcttggcttggagaagaactggcagatgaacacgtcctgcatggtggaatgccctgtgaactgtcagctttctgattggtctccttggtcagaatgttctcaaacatgtggcctcacaggaaaaatgatccgaagacgaacagtgacccagccctttcaaggtgatggaagaccatgcccttccctgatggaccagtccaaaccctgcccagtgaagccttgttatcggtggcaatatggccagtggtctccatgccaagtgcaggaggcccagtgtggagaagggaccagaacaaggaacatttcttgtgtagtaagtgatgggtcagctgatgatttcagcaaagtggtggatgaggaattctgtgctgacattgaactcattatagatggtaataaaaatatggttctggaggaatcctgcagccagccttgcccaggtgactgttatttgaaggactggtcttcctggagcctgtgtcagctgacctgtgtgaatggtgaggatctaggctttggtggaatacaggtcagatccagaccggtgattatacaagaactagagaatcagcatctgtgcccagagcagatgttagaaacaaaatcatgttatgatggacagtgctatgaatataaatggatggccagtgcttggaagggctcttcccgaacagtgtggtgtcaaaggtcagatggtataaatgtaacagggggctgcttggtgatgagccagcctgatgccgacaggtcttgtaacccaccgtgtagtcaaccccactcgtactgtagcgagacaaaaacatgccattgtgaagaagggtacactgaagtcatgtcttctaacagcacccttgagcaatgcacacttatccccgtggtggtattacccaccatggaggacaaaagaggagatgtgaaaaccagtcgggctgtacatccaacccaaccctccagtaacccagcaggacggggaaggacctggtttctacagccatttgggccagatgggagactaaagacctgggtttacggtgtagcagctggggcatttgtgttactcatctttattgtctccatgatttatctagcttgcaaaaagccaaagaaaccccaaagaaggcaaaacaaccgactgaaacctttaaccttagcctatgatggagatgccgacatgtaacatataacttttcctggcaacaaccagtttcggctttctgacttcatagatgtccagaggccacaacaaatgtatccaaactgtgtggattaaaatatattttaatttttaaaaatggcatcataaagacaagagtgaaaatcatactgccactggagatatttaagacagtaccacttatatacagaccatcaaccgtgagaattataggagatttagctgaatacatgctgcattctgaaagttttatgtcatcttttctgaaatctaccgactgaaaaaccactttcatctctaaaaaataatggtggaattggccagttaggatgcctgatacaagaccgtctgcagtgttaatccataaaacttcctagcatgaagagtttctaccaagatctccacaatactatggtcaaattaacatgtgtactcagttgaatgacacacattatgtcagattatgtacttgctaataagcaattttaacaatgcataacaaataaactctaagctaagcagaaaatccactgaataaattcagcatcttggtggtcgatggtagattttattgacctgcatttcagagacaaagcctcttttttaagacttcttgtctctctccaaagtaagaatgctggacaagtactagtgtcttagaagaacgagtcctcaagttcagtattttatagtggtaattgtctggaaaactaatttacttgtgttaatacaatacgtttctactttccctgattttcaaactggttgcctgcatcttttttgctatatggaaggcacatttttgcactatattagtgcagcacgataggcgcttaaccagtattgccatagaaactgcctcttttcatgtgggatgaagacatctgtgccaagagtggcatgaagacatttgcaagttcttgtatcctgaagagagtaaagttcagtttggatggcagcaagatgaaatcagctattacacctgctgtacacacacttcctcatcactgcagccattgtgaaattgacaacatggcggtaatttaagtgttgaagtccctaaccccttaaccctctaaaaggtggattcctctagttggtttgtaattgttctttgaaggctgtttatgactagatttttatatttgttatctttgttaag

SEQ ID NO: 4328 - DNA, 525 bp, Homo Sapiens
ttttacaaaggtgtttagtttattctcatcagtatcactgatattctccagcattttttccgaatatagtcttacatgattgcaattcctgaggtaaactaagtgtccactgccaacatccttggacgaaaaccaagtcccccgggagaattcagatatttatattcacacatacaatacaacggaattcatcaatgtaatcagatattgcagatttaaaaatggaaaatggactcttgcaatacttctgcatccatatataattttaccagcagggcctcccaaaatgttgtgtaagtatagtttaaatggatttcattaataagtttctgcatttagataaaaattcttggctaatctgtaagaagtgaacactgactagcattgccaaacagaaaatcaaaagtttcaacaatttgcaaagcagcacagaattgacaccctaaagaggatgccaattttgctaactacagctcttaccactcttctccatggaaaacctttaagctaaatgttgtcagtgtt

SEQ ID NO: 4329 - DNA, 367 bp, Homo Sapiens
cccagaggctgggtgcgaggctagcggggtcagtcgggttctaggccatacggctgcagcccaggcggccggagcggaacccagccccgctccgagtgccacgtctccaggaaccccctccttactcttggacaacactccgcccccgcccgggcctccgtcccccaaaccgccctcatttgtgcagcgcagatccttcggacacatccctaggtgtctccatcctcattcggtccatccaactcccagacctcacgtcaaccggctgcaccccactttccagcctgcgccccagatctgcagccttcgcccctagatacacccgcctggtgatgaggcgctcctcgcgttccttccgtctccagtg

SEQ ID NO: 4330 - DNA, 431 bp, Homo Sapiens
attaattcgaatttagcaatacgatctctaagtggtgccatgaattaaagatgccacttcgggctttcagtgcttctcagcttttgggcaaagggcttgtgtcttcaggggcagctcagctttcctgagtcctgactgctggcattcgtctgcatttgcctgtgcttctgcgagtcggacctcaagctgccaacactgcatgtggataaatccagttttcccgggccagcatgcaaaatgaagaggactccatctaagctgagaagcatggcctccccagagcagcctgcagcctccaagccttcctggcccaggcaaatgccagtgtgcaccaggctggctgctgggggcaggtctttggaggggagcagcatttccagccttctgaacatagttaatagtaatgacagccgtaacactaacgcgctctg

SEQ ID NO: 4331 - DNA, 471 bp, Homo Sapiens
  misc_feature (268)..(268): n is a, c, g, or t
ggctggtcagctccagacagacagaagaaagggattcttttcagtctagaaaaatgctcaccccttcctcagaacatttccactgtgacgaaaagagactgatgaagcctcagagagaaaggcaactctgggtggtgatgcaatagtgcagaatccagaatggatgtcctctttgtagccatctttgctgtgcacttatcctgggacaagaatatgaggatgaagaaagactgggagaggatgaatattatcaggtggtctattatanacagtcacccccagttatgatgactttagtgcagatttcaccattgattactccatatttgagtcagaggacaggctgaacaggttggataaggacataacagaagcaatagagactaccattagtcttgaaacagcacgtgcagaccatccgaagcctgtaactgtgaaaccagtaacaacggaacctcagagtccagatct

SEQ ID NO: 4332 - DNA, 310 bp, Homo Sapiens
  misc_feature (18)..(19): n is a, c, g, or t
  misc_feature (290)..(290): n is a, c, g, or t
ggagttttgccctaccgnnttccaaagcgtgtgctggtttctcatattgtctgtaggctcactcagcccgcagtttatgtgtgtgcttttttctatgaaaaatgatgtattttgctacttcctgtgtacaaagttttattgtaaatgttttttgtgctttgcatgaacaggggccacgttgttgcaattgtttcagtagaactggtttgatttctaaaatgttcctgtaacatatcttttatgaacaaatctgaacaatttgtgaaataaaacattgaaaaccaaaaaanaaaaaaaaaaaaaagtcgac

SEQ ID NO: 4333 - DNA, 231 bp, Homo Sapiens
  misc_feature (50)..(50): n is a, c, g, or t
  misc_feature (207)..(207): n is a, c, g, or t
cgtgtgctttacgaaggtggcagctgacagacgtgggctctgcatgccgncagcctagtagaaagttctcgttcattggcaacagcagaacctgcctctccgtgaagtcgtcagcctaaaatttgtttctctcttgaagaggattctttgaaaggtcctgcagagaaatcagtacaggttatcccgaaaggtacaaggacgcacttntaaagatgattaaaacgtatcttt

SEQ ID NO: 4334 - DNA, 455 bp, Homo Sapiens
aagtcacctcttctggtttaatttaacctgccaagtaccctacaaatcagcatcttgtttgaagggagattgaggacacaggcagatagttcctatgtattcacctgtatctggtatcatgatggtgaggaacagggttatgtcttgacatttgcagccctgaggacctccactgacaactggcttaagatccagaaggcatcttttccaaatcacataccaaacttgtattttaaaaatttgataataaatgaacaaaattgagagcttgtacaacatgtatatttcttgatcaagtgcttagataatacatgcttatggtattggttcaccagcagtgaatgtttctttggctgaccagcacttgttactctatgatattcccagacattgcttgcttgagacattggataaaaccacccaacttcacctatcatttgggtttatgggttcag

SEQ ID NO: 4335 - DNA, 362 bp, Homo Sapiens
  misc_feature (12)..(12): n is a, c, g, or t
  misc_feature (348)..(348): n is a, c, g, or t
  misc_feature (350)..(350): n is a, c, g, or t
tgatccggccgnaaaccaaggaccttctgttcagagatgacacagtatgtttggccaaacttcatgacataaacacatattaaaaatacttaggagaagaatatgtcaaggctgttgggaacctgagaaaatgctccacctcatcactcctggaagcctgcactttccgtagaccttaaaatctcagaggtagggctgccaccaaggtgaagatgggaacgcagatgatccatgagtttgccctggtttcactggcccaagtggtttgtgctaaccacgtctgtcttcacagctctgtgttgccatgtgtgctgaacaaaaaataaaaattattattgattttataananaaaaaaaaaaaa

SEQ ID NO: 4336 - DNA, 317 bp, Homo Sapiens
gggttttttttaaggtttttttttttttttttttttttttttttaggtggaaaaatcaatggagaatattaaattcaccaaacacagatagatcagatctacataaaaatatggtttaatattttaaaattttcctttactccaaaaaaccccatatatatatgtttctcctttataagcttaaagattgctttggtggccaagtgcagggcggctgggggaggtaaaacctttaggaaggccatatcccggacaagacccaaaagggaagcccccaaagccaagggtaggagggccccacccaggttttaaccact

SEQ ID NO: 4337 - DNA, 3068 bp, Homo Sapiens
tgggaagttcgcgcaagtgcggctctgcagggaggagggagggccgaggggaaggccctcgagagagtggagggcaacagtggccacggttcctctgtacttcgtttcttccctttatagaattgagagattgctgagcctaaatacatgttgctgcattgcctccgagaatggccggacctatccccactctcaccaaaacagagtgtgggactcactgctccctcgcctactagagcagagccactgccagaaggaaggggacaagacccagcaggacaccttctttccacgctttccagcctgtgggagcggcaggggcaacagagagaggatctggagccaggattaatgactcatttatgaagcatcttattctgcgaccgaggctcagtggtcagtggcgacgtaaatggctcgactccccgctggcattcgcttcatcatctcattctccagggatcagtggtacagagccttcatttttattttgacatttctgctgtatgcaagttttcacttatctcgaaagcctatcagcatagttaagggtgagctccacaagtactgcactgcttgggatgaagctgacgtcaggttcagcagccagaacaggaagtctgggtccgctgccccccaccagctccctgacaatgagaccgactgtggctgggcaccgtttgataagaacaactatcagcagctgcttggggccctggactactccttcctgtgcgcctatgccgtggggatgtacctcagtggcatcattggggagcgcctgccgattaggtattacctaactttcgggatgctcgccagcggagccttcaccgccctgttcggcttagggtatttctacaacatccacagtttcggattctacgtggtaactcaggtcatcaacgggctggtgcagaccaccggctggcccagcgtcgtcacctgcctcggcaactggtttggaaaaggaaggagaggtttgattatgggggtctggaactcccacacctccgtgggcaacatcttggggtcattgatcgctggctactgggtgtccacatgctggggcctgtccttcgtcgtgcctggagccatcgtggcagccatggggatagtgtgctttctcttcctcattgaacatccgaacgacgtcaggtgctcctccaccctggtgacgcactcaaaaggctatgagaatggtacaaacagattgagactccagaagcaaatcttgaagagcgaaaagaacaagcctctggacccagagatgcagtgcctgctgctctcagatgggaagggctccatccacccgaaccacgtcgtcattctccccggggacggtgggagtggcacggccgccatcagcttcacaggggccttgaaaattccaggcgtgatagagttctcactgtgtctgctgtttgccaagctggtcagctatactttcctcttctggctgcccctgtacatcacgaatgtggatcaccttgatgccaaaaaggcgggggagctctccaccctgtttgacgtgggcggaatctttggtgggatcctggcaggtgtgatctcagaccgactggagaaaagggcctccacctgcggcctgatgctgctgctcgcggcccccacgctctacatcttctccaccatcagcaagatggggcttgaggccaccatcgccatgctgctgctcagcggagccctggtcagtgggccctacacactcatcaccaccgccgtctccgccgacctggggactcataaaagtctgaaaggcaacgcgcacgccctctccaccgtgacggccatcattgacgggacgggctctgtaggagcagccctgggccccctgctggctgggctcctctccccgtccggctggagcaatgtgttttacatgctgatgtttgcagatgcctgtgccttactgttcctgatccgcctcatacacaaggagctgagctgcccagggtcagctacgggggaccaagttccatttaaggaacagtgacaccccaccccagtcccgtggagggggtctgggcccacccttcacaactgcctttcaaggacagttcagacaaagggccctgcatggaaagagtgacctccctttgccttttgcacacgcacctggaaaagacacagaagccaacctgagaacccctggtgctattttaaaggagacatattgctgaacagcagtgagaaaagtctgcaggaactgctgcctgagccaagccagagaaccgaagacccggccggccctggcctcacaggcgtgtgcccatgcagccacccaaatgcacgcgtgacaacaaggccgggagggtggggggggtgcacaggtagccccgaccctctcaggcattccagccacagaacatcaaagtgagcgagtactgcgctggctgtggcttcagagaacctgtatgtgccacatggaaaaacaggacaccagagcccaccagacagtgccggccagcagagaagcagagagccagcgccacacaacatcaagaaggccgacaaccaggttggaaaccaagacggagctcagacccaccacatcgccccagaggcttttccagcacccatgatgttccggactgacctaaaaactaattgtcgagaagccaagggtgaggaggcaggaagcacctccggttggaggcacccaggcttgccagccacagagcgccccgaagtcaccgtcatcccagcccctggccttcctgctgccctccggggccatggcactgctgttcagctcaggcacaggggcacagcagaggtttgggaagcggtctccccaccggcactgggattggcgggtccaagcccagcaaccggcttcgctccacaacacacaccacacctgggactgtttttaatacatagcaacagactgggttatttatttaagatgtgtattgtgtcatatgaagtttaagagacataaatggcattttgttatttattaagacaaactccaattgttctctggctgtttttttcagttgtgtctagcaaaatacttatctgccctttgaaataaaatgttt

SEQ ID NO: 4338 - DNA, 413 bp, Homo Sapiens
  misc_feature (385)..(385): n is a, c, g, or t
tttttttttttttttttgcaacagaaatttctactattattcatgtcttacatgagatgggcacaccctgtccccgtgtccgaggactggacaagcccactctagcggtgcacagctggggcgtgcccctcggcagtggggtgacctggccctctcgcccagtgatgtcctcatgctttgtgtcacgtgaaccacaaaatctgagtgaaaacgaaagtccatgaatgtccagggcagctaccagacgtgcgcaagtaagtctcatgaaacaaaagcttccctggatggggacaaaacacacttccttccgcttgtcaccatccctggctccttcaactcggtccgtctccatgacgtgttcctctgcttctcttcctccgaacanaccgcgcttggcagatgttgcctgaaag

SEQ ID NO: 4339 - DNA, 962 bp, Homo Sapiens
cagcgaacgttgcatagcctcccgggaccctcaggccgccacctctgctgccaggcagtccaggtcctcagcttcccggggcccttgtccgtgaactctgtgctcagctgccacaccttcactgtgccctgggcatcgcccgcagccaagagctgagtctgctggctgttgaactccagacagtagacaggggctttcatcctgggtttgcttgatcaaaactgtgggtttctgggagcttttctggagatcaaacagctgcacgtcacctttcccagaggcagctgcaaaaaccaagggccgcactggggaccagcgcacagcaaacagatacttgagggagagctgcagcgaagtcaagggaggggcctgcagcatggagtacaggtggacatgcccgtcagtcccagcgctcaggaagagattcctgtggaagggggaacagctcacagagtagatgggaccgccgtggggggagaaggtaaactgtgctggggcccgcaggggcacggagctgggcatccgcgtgagggctgcctctccagctgccagggaacacttgagcgggaagccgccttccgtgcccagaatgaacagcctagggtcaaagctggagaaggccactgccgtggcgcccacctcggtctccccgcggggatgcttcttgagcttgggtgctccgtgggcagctgctgcatgaccagggcgaagcctactgtgagcttgaagctgggctaacccccgatgccactggccagaagtaccaccttccagtcaggtggcaacactcagccacctggacaccggtaggtgtgcgcaggctcggtcgccacaacacttgggacccacggacggttggattcaacagacaggattgccaaagcagggtccagatggccaggccacacaaacctcaccaaaagcctctacccttgggggcctcgttgcaacagacagggacc

SEQ ID NO: 4340 - DNA, 2650 bp, Homo Sapiens
gacctgaccgcaagaggccaatggagtgtgggagctgaaagggtcttcgctggcggccggacagtactgcttttaaagagacagtgttagggatcttggaagcacagccaacatgtgtgacattgaagaagccactaaccaactcctagatgtgaaccttcatgagaaccagaagtctgtacaagtgacagaaagtgacctcggaagtgaatctgagcttctagtcactattggagccactgtacctactggctttgagcaaacagctgcagatgaagtcagagagaaacttgggtcatcatgcaaaatcagcagagaccgtggcaagatatattttgtcatttcagtggaaagtctggcacaggttcattgtctgagatcagttgataacttatttgtggtggttcaggagtttcaagattaccagttcaaacaaacaaaggaagaagttctaaaggattttgaagacttggctggaaaactcccatggtcaaaccccttaaaagtgtggaaaattaatgccagttttaaaaagaaaaaagcaaagcgcaaaaagataaatcagaattcaagtaaagagaagattaataatggacaagaagtcaaaatcgatcagagaaatgttaaaaaagagttcactagccatgctttagattctcatatcttagattattatgaaaatccagccatcaaagaggatgtatcaacattaataggtgatgatttggcatcttgcaaagatgagactgatgaaagctcaaaagaagaaactgagcctcaagtgctgaagtttagagtcacatgcaacagggcaggagagaaacattgctttacctcaaatgaggctgcaagagattttgggggtgctgttcaagattattttaagtggaaggccgacatgaccaactttgatgtggaggttcttttgaacatccatgataatgaagtcattgtgggcattgcattgactgaagagagtctccaccgaagaaatataacacattttggacctacaactcttagatcaactcttgcctatgggatgctcaggctctgtgatcctctaccttatgatataatagtcgatccaatgtgtggaactggggcaataccaatagagggggccactgaatggtctgactgtttccatattgctggtgataataatccactggctgtgaatagagcagcaaataacattgcatctttattgaccaagagccaaattaaagaaggcaaaccctcctggggcttgcccatagatgctgttcagtgggatatctgcaatctgccattgagaactggctctgtggatattattgtaacagatttgccatttggaaaaaggatgggatccaagaagagaaactggaacctttatccagcttgcctacgcgagatgagccgtgtctgcacacctaccacaggccgagctgtactacttactcaagacacaaaatgctttaccaaggcgttatctggaatgcaacacgtatggcgaaaggtggatacagtctgggtgaacgttggtggtcttcgtgctgcagtttacgttctgatacgtacacctcaagcttttgttcatccttcagaacaagacggagaaagtggaactctttggcaatgcaaagaatgaagatgactaatagtacttgtacttcccaccactggaaatgttagcataaaagaacttggagaggaaaaaagtattaacaaaactgcagtctgcactctttaaacctgtttaaggctcttcatcctggttagcaaaaggtgtgaatgtaatgtgatggaatttaaaagttttatgagaccaggcacagtggctcacgactgtaattccagcagtttaggaagccgaagtgtgcagatcacctgaggtccggagaccagcctggccaacatggtgaaaccctgtctctactagaaatacaaaaattagccaggtgtggtggcgggcgcctgtaatcccaactactcaggaggctgaggctagagaatcacttgaacccagcaggcggaggttgcggtgagtcgagatcacgccattgcactccagcctgtgcgacaagagcgaaactctgtctcaaaaagattttataagaaagcagagcttttccttgaagctcttttgaagtggtagcttaattagtattttgttgaaaatactttaaagatgcctagtgaaaagcctactaaagtgctgtgagattggggtttagaacattttattttcaggctttatggcctattttccattgtgtcaagtgcaaaactaccctggcccaaaggaagggcagagaacataattacatcttaggccacatttcattctttgcagctttgctaatccagttgctcaagttctttacctcaacctgaaggaatgaagcattattacattttgtgaatggtgttcagcctataagacgaagtctcacaagacctataggaaagtttaccatctgccttaaatattaaaatatccatctgttattcacattaatacacagaatgaaaatagaggtctaggaattatcaaaggtactgcaaaaatactgtatagaacttatttgtaaatagcacatacattgatagatggggtgtgggaccaacaaaccaaattaaaagaaattgtttttctttcagt

SEQ ID NO: 4341 - DNA, 243 bp, Homo Sapiens
gtcctccccaacaccactattgaacaggagcccttgtcaccaggtccaataattccctaaggtatcacaaacaatggtgggggcaattttaccttactcagtaaccacgaggctcacatccctaatttcagactctaccagctctcaggtgccctcccaaggggctgcctgcatgaagatgccttggaagtagcccctttcacaatcacaggaattaaccccctggtgttgggcgataaatca

SEQ ID NO: 4342 - DNA, 256 bp, Homo Sapiens
  misc_feature (44)..(44): n is a, c, g, or t
  misc_feature (47)..(47): n is a, c, g, or t
  misc_feature (74)..(74): n is a, c, g, or t
  misc_feature (202)..(202): n is a, c, g, or t
  misc_feature (209)..(209): n is a, c, g, or t
  misc_feature (220)..(220): n is a, c, g, or t
  misc_feature (229)..(229): n is a, c, g, or t
  misc_feature (235)..(235): n is a, c, g, or t
  misc_feature (241)..(241): n is a, c, g, or t
cccggacccagcagccgtttcacgccaatagatagggcgcatgnagnaaatcctcctcggctctctagcgtgantttcccaaggggccacgcagcttgccttctgattggtccagctggtgggttgtcttccgccatctttgatcagggcactaaggatgctcccgacggccttcacagtgacggcggagaccctgccccgncagctgntcagtaacgtngccggttanccgtgncaagcnaaagttgtgagtccg

SEQ ID NO: 4343 - DNA, 402 bp, Homo Sapiens
tttttttttttttttttcagttgtttgtttcctttaattaacatctaaatagattatacatcttctataattataatatggaaatgtatatgagcaaaatatataaattttttggtgactgcttagggaagaatgatgtcagtgaagttcatccaaggtcttaagcagcagcatctatgcagccagggcgtggtcagcgtttggggacagaggtaaatatccgcaatccatgcatctctttgatttcttcttttagtgcctgattaaccatctggtgctgctggacagttctcttctccttaaattcttctgattcaattttaatttcatacatcgccccacaacctcctgaaatgtcagtgacttttatagctgtagctcgtggaaactttcctcgtgccg

SEQ ID NO: 4344 - DNA, 475 bp, Homo Sapiens
  misc_feature (356)..(356): n is a, c, g, or t
  misc_feature (408)..(408): n is a, c, g, or t
  misc_feature (470)..(470): n is a, c, g, or t
ttttttttttttttaataactgttcagctacaaaattttattggtatctttttatgttccctctagaggatgtaatgcacaaaagcattgccacggaacatataaaattacaaatgaaatttattgtaaaaagtagaatgtcttctagactggtgtcagtatttatgtcattcataaaccaaaactgctgtataatatattcattgtcagacaagttcatgtgtgtaaattgccatccaatgttattgactgatataagacagatattgaaaagacaatttaaatttactcttccaaacataaactgttccacaaaaggcactgtaaaacctccttcaaggattttggggttgtgncttggacatttatgggttaactacattaatttgggtcgtgtccataaatccnttgtgtttgggcatttgggcctttaaacggcggcgggcggattggggtcctcaccacctcantagta

SEQ ID NO: 4345 - DNA, 6868 bp, Homo Sapiens
gaattccagagggccgcctttcggcagaacacacctcttctttggtgccttctctgcatatcaccacactgggtcaagagcaagccatcctttctggggcggttcccgcatcaccatcaactgggacagccgactttccctccatacttactttcctccagcccacagagaatcatgcctccccatctcctgtgccagaaatgcccactcttccagcagagggcagtgatgggtcccctcctgcaactagagacttgctcctctcaagcaaagttcctaatcttctttccacatcttggacatttccccggtggaaaaaggacagtgtgacagccattttagggaagaatgaagaggcaaatgtgacgattcctctccagggctttccaaggaaagaggttttgagtcttcacactgtaaatggatttgtctctgatttcagcaccggtagtgtctcatctcccatcattacagcaccaaggacgaatcccctttcttcaggaccacctctaccttccatactctccatacaagccacccagactgttttcccatctctcttggctttttccagcaccaagccagaggtttatgcagctgctgtggaccattctgggttgccagcttcagctcccaaacaggtgagagcatcgccctcctccatggatgtatatgattccttaacaataggagacatgaaaaagccagcaaccacagatgttttctggagttctctttcagcagaaactggatctctttccacagaatcaataatatctggcttgcagcagcaaacaaattatgatttaaatggacacacaattagcaccacaagttgggaaactcatttagctccaacagctcctcccaatggtttaacttcagctgccgatgccataaaatctcaggatttcaaagatactgctgggcattcagtgactgcagaagggtttagtattcaggatctagtcctcggtacaagcattgagcagcctgtgcaacagtcagacatgaccatggttggaagccatatagacctctggcccacaagcaataacaaccattccagagacttccaaacagctgaagttgcatattactcacccacaactcgacattccgtgtctcatcctcagctacagttgcccaaccagccagcacatcctcttttgctaacctcaccaggaccaacttctacaggtagcttgcaggaaatgctttcagatggaacagatacaggttctgaaatttccagtgacatcaattcatcacctgagagaaatgcttccacaccattccagaacatcttgggatatcactctgctgctgaatcttctatatcgaccagtgtctttcccaggacctcctccagagtgctgcgggcttctcagcaccccaagaaatggacagcggacacagtatcatctaaggtacagccaacagcagcagctgccgtcacattgtttctgaggaaatcaagtccacctgcactgtctgcagccctggttgctaagggcaccagcagcagccctttggccgtggcctcaggaccagctaagagcagttcgatgactactcttgctaaaaatgtcacaaacaaggccgcatctggcccaaagaggacaccaggggcagtccatacagccttcccattcacaccaacctacatgtatgcaagaacaggacataccacgagcacacatacagccattgcaaggaaacatggacactgcctctggcctgttgtctacaacttacctcccccaggaaaaccacaagccatgcacaccggcctcccaaaccccaccaacctggagatgcccagagcatccacgccacgcccactgacagtcacggccgcgctgacatccattacagcctcagtgaaggccacccggttgccaccattgcgagcagaaaacacagatgctgtccttcctgctgcatcggctgcagtggtcacgactggcaaaatggcatccaacctggagtgtcagatgtccagtaagctcctggtgaagacagttctctttctcacccaaaggagagtgcagatcagtgaatccttgaagttcagtatcgccaaagggctcacacaggcattgcggaaggctttccaccagaacgatgtctcagctcacgtggacattctggaatattctcataatgtcacagttggttattatgctaccaaagggaagttggtgtatttgcctgctgtggtgatcgaaatgctgggtgtgtatggagtcagcaacgtcactgcagacctgaagcaacacaccccacacttacagtctgtggcagtacttgcctccccatggaatccccagcctgcaggctacttccagctaaaaacagtgctgcagtttgtgagccaagcggacaacatacagtcctgcaagtttgctcagacaatggaacagaggctgcagaaggcattccaggatgccgagaggaaagtcctgaataccaaaagcaacttgacaattcagattgtgagcacgtccaatgcctcccaggcagtcaccttggtgtacgtcgtgggcaatcagagcacattcctcaacggcaccgtcgccagcagcctcctcagccagctctcggctgagctggtgggattctacctcacctatccgccgctaaccattgctgaaccactggaatatcccaaccttgacatatcagaaacaaccagagactattgggtaattacagtgctgcagggtgtggacaattcgctggtgggcctgcacaaccagagctttgcccgggtcatggagcagcgcctggcccagctattcatgatgtcccagcaacaaggccggcggtttaaacgggccaccaccctgggaagctacactgtgcagatggtgaagatgcagcgtgtcccaggcccgaaggacccagcggagctgacttactataccctgtacaacgggaagcctttgttggggaccgtagctgccaagatcctgagcaccattgattcccaaaggatggccttgacccttcatcacgttgtccttctgcaagctgaccccgtggtgaagaacccgcccaataacctgtggatcatcgctgcagtgctggcgcccattgccgtggtcacggtcatcatcatcatcatcactgccgtgctctgcaggaagaacaagaacgacttcaagcctgacaccatgataaacctgccgcagagagcaaagcctgtgcaaggctttgattatgccaagcaacacctgggccagcaaggggcagatgaggaggtcatccctgtgactcaggagacagtggttctcccactgcccattagagatgctcctcaggaaagagacgtcgctcaggatggaagcaccatcaagaccgccaaatccactgaaaccaggaagagcaggtcgcccagtgagaatggctctgtcatcagcaacgaatcagggaagcccagctcagggagacgctcaccccagaatgtaatggcacagcagaaagtgacaaaggaggaggcaaggaagagaaatgtgccagcgagtgacgaagaggagggagcggttctatttgacaactccagcaaggtggccgctgaaccctttgacacatcttctgggtctgtgcagctcattgccataaaacccacagccctccccatggtgccccccacctcggacaggagccaggagtcatcggcagtcctcaacggcgaggtgaacaaagccctgaagcagaagtcagacatcgagcactatcggaacaagctgcgcctcaaagccaagaggaagggatattacgacttccctgcagtggagacgagcaagggtctgaccgaaagaaagaagatgtatgaaaaagccccgaaggaaatggagcatgttttggatccagattcagaactctgtgctccattcaccgagtctaaaaacaggcaacagatgaagaactctgtctacagaagccggcagtctctgaacagcccgagtccaggggaaaccgagatggaccttctggtgactcgggagcgaccccggcgtggaatccgcaacagcggatacgatactgagcctgaaatcatagaggaaaccaacattgacagagttcctgagccccggggctattccaggtctcgacaggtgaaaggccactcggagacctccacactgagctcccagccatccatcgacgaggtcaggcagcagatgcacatgctgctggaggaggccttcagcctggcatccgcgggccacgcaggccagagccggcaccaagaggcctacggctcagcccagcacctgccctattcggaggtggtgaccagcgctccggggaccatgacgcggcccagggccggggtgcagtgggtgccgacctaccgcccagaaatgtatcagtacagtctgccccggccggcttacaggttttcccagcttcctgagatggtcatgggctcaccgcctccacccgtacctccccggactggtcctgtggctgtcgcttctctcaggcgatccacctcagacatcggcagcaagaccagaatggccgagtctacagggcccgagccggcccagctgcacgacagcgcctccttcacgcagatgtccagaggccctgtgtccgtgacgcagttggatcagtcggctttaaattactcaggtaatacggtgccagcagtgttcgccatcccagctgccaacagacctggcttcaccggctacttcatcccaacgcctccctcatcctataggaaccaggcctggatgtcctatgcaggagagaatgagctcccgagccagtgggcagattcggtgcccctcccagggtacatcgaggcctacccccgatcacggtacccccagagctctccctccaggcttcctcgtcagtacagccagccagccaacctgcaccccagcctggagcaggccccggcgccctccacagcggcctcgcagcagagcctggcagaaaacgacccgtctgacgctcccctgaccaacatctccactgcggcccttgtgaaggccatccgggaggaggtggccaagctggccaaaaaacagacagacatgtttgagttccaggtctaacgccttagccccgtgggactctggacttccaaactctgaggactcagcctttgggtttcccatgcctacgtgttaggacttgagacatagcaatgggtgagtctttctcaccctccatttctgaaaaggtgaactatggggcttctgggaacaggaaactcttgaacgactagattcttggctcatccaactgattgtgggtcaagtccctggcttggggccttatgtttgatactctctcatgtcaaatgtttgaactttgggcatgtgccctatggaagcttagtcacaagaggcactagctaatctacagattcctatccaatgccacattttaataaatcaccggaagcgggagaatgtagctcttatcttcggtgacctctgcatgttaactctgtttctgtgttaaaggcaatgcaggagtgtggattaagcaccagactgtattctcattcaaccatgaccgtgcgcattaaaatcagtttgtaagggagacactgactccagccaagaaacctgagccccttttttttaggttcatattcaaagtcaaatgaactggatgaaagtcagtaccaatggctgtgcctataaatagacctgattctttgtttccctcgtcaattaaacaaaggccaagaaagagagaagatgagagggaatggtggatttgcgttgacagattttttaaaaggtgttgccattttggaaataaaagtcccctacaagttaggatctaactgaaagagaatcggtgctaagagcttttaggatcctacaaaagaaacacagttatttgtgaaggtttttctttgccttgttttgaaggtggcctgaggaatggagcttctctttttcttgggataatagatacatcaacttttacaagaaaatctctgtctcttcaacaatgatgtccagtgtgtgctgctgagtggtacaaaaggaaatagtacttgaaacctgttagaaacaggagtggtagaaccacagtcttcccaggccgcagcctctgtttatagaagcttctgaatgtagaaaagctgttgaatttcatttaaatgtaaataaccttttaaaaagcgtatggagttagccagttccccctagttaatggacataggaagacatttgctgaaatggtagggtggccactttgtgaccatgatgttgcaagttgccctccctggcatggtgagttggcttccagagctgtgggtagaggacatcgcctcacggcactgaggcaccagccgctgcctacccatcaatgcaagcaaaacagctactgactttgtgtagcagggagattggggactctggttccctcgccaagtgtggcagcctgtgcagtgttgggggcttacttggtattctgttggagaatgaggtcctgtcctgctttcacccatgacccatctagcttcagctgtatccattttcttctgagcccatcttccattgtcctcaacgagtttctttggtctttactgaaagaagatagtagaaatttaaaagttgagagaagactagaaatggaactgattagaaggggaggttcaaactgtcaatgcacagacttttcaaagaagttgtttatattttccaatggcaaactgccctttctggaatgttcagagatgatgtgtcatggaaccttcaaacaagtctcttgttcggatgataataggtagtgtccttttagtatgctggttgatctttcatagtgttagtgttttgttacttaaaaaggaaatcagctataaataaaatgtatttttgta

SEQ ID NO: 4346 - DNA, 517 bp, Homo Sapiens
  misc_feature (305)..(305): n is a, c, g, or t
  misc_feature (388)..(388): n is a, c, g, or t
catgaaacatgccaacatttatttgctcattggttaaatattctctacctattctacatggaatgccaggaaaaccagcagagggcttctccattatccagaatctgttaggaccacttatatcatgctctggggtgcaaagaagagacacaagaaagaccatcccagctgcctcaggtttcaacctaatggtagtttcctatgtttggttcaaatgttcatgccaagttggggaactgaagacacatgacaaatgagacttcactctcttttgagagggaagctgggagtaaaagcaaaattgnatcaatcctggggcacagtctggcctttttcacctcccaggcctcaagagtggaaaggggtacgagaagacagggcaggtggnctctggatccgtgggcaaacaggagagggaacatgctgagggaagccccgttatttagactcttcaaactttaggatgtgcaaccccgagttcaagcaccagtgattttccctttgaggattcgaggga

SEQ ID NO: 4347 - DNA, 279 bp, Homo Sapiens
  misc_feature (162)..(162): n is a, c, g, or t
caggaggtggccattaagcagatgaatcttcagcagcagcccaagaaagagctgattattaatgagatcctggtcatgagggaaaacaagaacccaaacattgtgaattacttggacagttacctcgtgggagatgagctgtgggttgttatggaatacttngctggaggctccttgacagatgtggtgacagaaacttgcatggatgaaggccaaattgcagctgtgtgccgtgagtttctgcaggctctggagttcttgcattcgaaccaggtcatt

SEQ ID NO: 4348 - DNA, 2316 bp, Homo Sapiens
caggcggcgaggcggccgtcgagggcgcgggcggcggggacgcggcgctgggcgagccggggctgagcttcacgaccaccgacctgagcctggtggagatgacggaggtggagtacacgcagctgcagcacatcctctgctcgcacatggaggcggcggctgacggcgagctcgagatgcgcctcaactcggcgctgctggcggcggcgggcccgggcgcaggcgcgggcggcttcgcggcgggcggtcaggggggcgcggcgcccgtgtaccccgtgctgtgcccgtccgcgctggcggccgacgcgccctgcctgggccacatcgacttccaggagctgcgcatgatgctgctaagcgaggcgggcgcggcggagaagacgtcgggcggcggggacggagcgagggcccgggccgacggcgccgccaaggagggcgcgggcgcggctgcggctgcggctggacccgacggcgcgcccgaggcccgggccaagccggccgtgcgcgtccgcctggaggaccgcttcaacagcatccccgccgagccgccgcccgcgccgcgcggccccgagccccccgagccgggcggggcgctcaacaatttggtaactctcattcgacatccatctgaactaatgaatgttcctcttcagcaacaaaacaaatgtacagcattagtgaaaaataaaactgcggctacaactactgctttgcaatttacatacccactgtttactacaaatgcttgctctactagtggaaattctaatctttcacagacacagagttctagtaactcatgttctgtacttgaagctgccaagcaccaggatattggattgcctagagcattttctttctgttatcagcaagaaattgaatccactaaacagacgttaggtagtagaaacaaagttttgcctgagcaagtttggattaaagtgggagaagcagcgctatgcaaacaagcactgaagaggaatcggagtagaatgcgtcagttggacacaaatgtagagcgaagagcccttggagagattcagaatgtgggcgaaggtgccaccgccacacaaggcgcttggcagtcctcggagtcctcacaggcaaacctgggggagcaggcccagagtgggccccagggaggaaggtctcaacgtagggagaggcataaccgaatggaaagagatagaaggcgcagaatccgcatttgctgtgatgagttgaatctcttagtgccgttctgcaatgccgagactgacaaggccacaactctgcagtggaccacagcattcctgaaatacatccaggaaagacatggagattctcttaaaaaggaatttgagagcgtattttgcggtaaaactggccgaaggctaaagctgaccagaccggactccttggtgacctgtcctgcacaggggagtttacagagcagcccctcgatggagatcaagtgatcggactgaacaggaatcctcggggggtgaacagccattccttcgtgacctgtgcacgccttctgcaaccctggagctctgctcggctagtctgactcgaaaagggcgtgactcaagctgacgggactccagtagggactttgagagcacattttgtaaaaatatttatctagacgcaaatgcttatccatgaatgtcctcttagaccatttggggatgaagccatcttaataattagtaataattaattagtaataattagtaagcattttctcaatgctctgattccatcatgttttcttaacatgataacttaaaaaattgacatcctttgtactttctttaatcttaaaaagtacacggctttttacttatttaccttttaaatatgcccctttagcaattggaacaagttaaattgttaactaaaaacagtttggaaattttatttcattcgttatatcacacccccttgtcatgactctgagtcacgtgctgctgtattgcaacgtgcaggaccattttaaacctgtgtgctaaaaattttccagatacttgctttaaagctacttttgtccacaaatgaaatactgtcacagtagacgcttaaatgccacgttttcataccaagagtcattcattacttcatgtgtcacaaactgtggtgtttggaattgggtttttcaatgagtggctttacttatcaatcacaacaggtaatagcaatagacgttagtgcaatacaaagtcaccctcaataaatactgttaattggagatgtgagtttgtacacaaaacatcagactagacctttgtatgggagagaatttactgtacattaaattctttattttttgtt

SEQ ID NO: 4349 - DNA, 528 bp, Homo Sapiens
  misc_feature (373)..(373): n is a, c, g, or t
  misc_feature (514)..(514): n is a, c, g, or t
gggaagcggccctcgcgcacactagtcgtctggttctctggctccggaagctgcgctccttcaccctcctcgttggtgtccttcaccatggcgctggctgtcttgcgggtcctggagccctttccgaccgagacacccccgttggcagtgctgctgccacccgggggcccgtggccggcggcggagctgggcctggtgctggccctgaggcctgcaggggagagcccggcagggccggcgctgctggtggcagccctggaggggccggacgcgggcaccgaagagcagggtcccgggccgccgcagctactggtgagccgcgcgctgctgcggctcctggcactgggctccggggcctgggtgcgggcgcggncggtgcggcggcccccggcgctaggttgggcactgcttggcacctcgctggggcctgggctcggaccgcgagtcgggccgctgctggtgaggcgcggagagaccctcccagttcccggaccgcgggtgctggagacgcggncggcgttgcaaggg

SEQ ID NO: 4350 - DNA, 426 bp, Homo Sapiens
ttttttttttttaaagcctttatcggcatgaaaggttgaatgctctaggtttgagcactgctttctcggcttgctcttctggtgcagtataggcacacctagagggccacgtcagtctttgcgatcaccaaatctggttctgagaaataggcactggcaatttacacatgccttgctgtgtaatctcactatatttgctcaggcaaagtgggagaagcagccttaggttttcattctagagatgccggctttcccacctgatcggcttagagttcacgattgactgttttgggcttcatttcaccctctacataacaagcgggtggactagatgccttagcaagggtccgtgttgtgtggtgtctacagccacgcactcagcttaatcttagcacagttaaaaaatgcctttctagcaagttatct

SEQ ID NO: 4351 - DNA, 813 bp, Homo Sapiens
gcgcgcggtggggcatggcgggttcgcggggtgcggggcgcacggggcgccgagcgtgcggccggagaagcggcggtctgagcccgaactggagcctgagcccgagccggagccccccctcctctgcacctctcctctcagccacagcaccggcgcgattctggcgtctccgacagcgaggagagtgtgttctcaggcctggaagattccggcagtgacagcagtgaggatgatgacgaaggcgacgaggagggagaggacggagcccttgatgacgagggccacagtgggattaaaaagaccactgaggagcaggtgcaggccagcactccttgccccgaggacagagatggcgagcgcccggattggggatgagtatgcggaggacagctctgatgaggacggacatccggcacacacggtgggcaactgtgcccttggaagtggtacgatgacttcccccacgtgggctacgaacctggattggcaggcgcatcttacaagcccctggggacccgggattgagctggacccaggttcctggaccaagatgggaccgatcctgactaacgtggcgcccccgtgcagggaacccgattgacaagggccgggaccttgggacttgacggaatgacgcagtgtggcccctggtgcgggcggctgcagagttggccactttggggaatgtggggttaagccctattaagccggcgtgtcgacctcttcacggggcggacggttgatccacccggggaccaccggcggcgacaaggcaggttataccctccctggtggaagggaaggtccccggag

SEQ ID NO: 4352 - DNA, 339 bp, Homo Sapiens
tttttttttttttttttttcagggcccatgtgcactttattcactcgtgtcgtcgcctctcgggtccatgcgtcggggcgagcgtctcagccgggcgggaccgcaaaggccccgggaccacccgactgaggacgccgcccaggcctcggcagggctggggcttttgtttttaataaataaaaacggaactctaaaaaatatatatataaaaactggggagaaattaagttttacaacaattggaactcaaaattccaaaatggaaaatgtacaaactcggtcccccagcagctctggccccgagaacggacagtcccgggcccggcgccttcccgctcg

SEQ ID NO: 4353 - DNA, 2148 bp, Homo Sapiens
gcttcagggtacagctcccccgcagccagaagccgggcctgcagcccctcagcaccgctccgggacaccccacccgcttcccaggcgtgacctgtcaacagcaacttcgcggtgtggtgaactctctgaggaaaaaccattttgattattactctcagacgtgcgtggcaacaagtgactgagacctagaaatccaagcgttggaggtcctgaggccagcctaagtcgcttcaaaatggaacgaaggcgtttgtggggttccattcagagccgatacatcagcatgagtgtgtggacaagcccacggagacttgtggagctggcagggcagagcctgctgaaggatgaggccctggccattgccgccctggagttgctgcccagggagctcttcccgccactcttcatggcagcctttgacgggagacacagccagaccctgaaggcaatggtgcaggcctggcccttcacctgcctccctctgggagtgctgatgaagggacaacatcttcacctggagaccttcaaagctgtgcttgatggacttgatgtgctccttgcccaggaggttcgccccaggaggtggaaacttcaagtgctggatttacggaagaactctcatcaggacttctggactgtatggtctggaaacagggccagtctgtactcatttccagagccagaagcagctcagcccatgacaaagaagcgaaaagtagatggtttgagcacagaggcagagcagcccttcattccagtagaggtgctcgtagacctgttcctcaaggaaggtgcctgtgatgaattgttctcctacctcattgagaaagtgaagcgaaagaaaaatgtactacgcctgtgctgtaagaagctgaagatttttgcaatgcccatgcaggatatcaagatgatcctgaaaatggtgcagctggactctattgaagatttggaagtgacttgtacctggaagctacccaccttggcgaaattttctccttacctgggccagatgattaatctgcgtagactcctcctctcccacatccatgcatcttcctacatttccccggagaaggaagagcagtatatcgcccagttcacctctcagttcctcagtctgcagtgcctgcaggctctctatgtggactctttatttttccttagaggccgcctggatcagttgctcaggcacgtgatgaaccccttggaaaccctctcaataactaactgccggctttcggaaggggatgtgatgcatctgtcccagagtcccagcgtcagtcagctaagtgtcctgagtctaagtggggtcatgctgaccgatgtaagtcccgagcccctccaagctctgctggagagagcctctgccaccctccaggacctggtctttgatgagtgtgggatcacggatgatcagctccttgccctcctgccttccctgagccactgctcccagcttacaaccttaagcttctacgggaattccatctccatatctgccttgcagagtctcctgcagcacctcatcgggctgagcaatctgacccacgtgctgtatcctgtccccctggagagttatgaggacatccatggtaccctccacctggagaggcttgcctatctgcatgccaggctcagggagttgctgtgtgagttggggcggcccagcatggtctggcttagtgccaacccctgtcctcactgtggggacagaaccttctatgacccggagcccatcctgtgcccctgtttcatgcctaactagctgggtgcacatatcaaatgcttcattctgcatacttggacactaaagccaggatgtgcatgcatcttgaagcaacaaagcagccacagtttcagacaaatgttcagtgtgagtgaggaaaacatgttcagtgaggaaaaaacattcagacaaatgttcagtgaggaaaaaaaggggaagttggggataggcagatgttgacttgaggagttaatgtgatctttggggagatacatcttatagagttagaaatagaatctgaatttctaaagggagattctggcttgggaagtacatgtaggagttaatccctgtgtagactgttgtaaagaaactgttgaaaataaagagaagcaatgtgaagcaaaaaaaaaaaaaaaaaa

SEQ ID NO: 4354 - DNA, 294 bp, Homo Sapiens
gtggggtggagggcggaggctagccatcacccaggtggagactgaagcatcagcccagattccgttcttgctggttcctacatcgtcattttgtcccttggatcatacacacagagccacccacatgtgcagcctcagacaaacatacttattagcacctcaaaactcagtagaaggtagccactatgctgttatcctgagcctcatccatatattggggaaatacacatgaacaaattctcgaagaggattggtgagagtacacagcctctcccaacggtgaccggcgacttc

SEQ ID NO: 4355 - DNA, 1809 bp, Homo Sapiens
acgccggcgctcccaggccgcgcttcctgcgtccccaacccggtccctgagagggcactgcgccctctccaccactgcgttccctcggctaagaatcccccgaaccccagccccgcgatcgcggcgcccaccgaggaggccgcccgggtggggcgcgggggtcgcgaagcccgcagccccggaccgcccagccgagacggagccggacccgccgcctcccgggcccttccaccgcagctatccgcacgggaggcctcgcgattgctcggaaccatcccgcaggagttcagctgatattttctagtgtggggcgagagattttgtggagcgcatttaaggggtttttgttgtgactgctgccttgtatatatttattttctttcttggaactgggcctcgccctcctcccactgacatgatggcccagtccaaggccaatggctcgcactatgcgctgaccgccatcggcctggggatgctggtccttggggtgatcatggccatgtggaacctggtacccggcttcagcgcggccgagaagccaacagctcagggcagcaacaagaccgaggtgggtggcggcatcctcaagagcaagaccttctctgtggcctacgtgctggtcggggccggggtgatgctgctgctgctttctatctgcctgagtatcagggataagaggaagcagcggcagggcgaggacctggcccatgtccagcacccgacaggcgctgggcctcacgcccaggaggaagacagccaggaggaagaagaggaggatgaggaggctgcctcaaggtactatgttcccagctacgaggaagtgatgaacacaaactactcagaagcaaggggagaggagcagaacccgaggttgagcatctctctcccgtcctatgagtcactgacggggctcgacgagaccacccccacatccaccagggctgacgtggaggccagccctgggaacccccctgacaggcagaactctaagttggccaaacgactgaaaccgctgaaagttcgaaggattaaatctgaaaagcttcacctcaaagactttaggatcaacctcccagacaaaaacgtccctcctccctcgatagagcctttgactcctccaccgcagtatgatgaagtccaggagaaggcccccgacacccggccgcccgactgaatggccccacttgagccacgctccctcctgtctctcacacctttcacccccaagactctaacaaagccacatgagccacagttgagaagcggaggggccagctgtgcatggagccatttggatggcggcgggcgggggggattctctgtatcaggagtgactttgttgccccacacagcctcctgctgcaggtgctttggaaagagatgctgccttggagctggtgaatctgtggaccacattcaagggtgtggcacaggcatcttcccatccttttcactccgaatcgctggcgacacattctcctttccagctaggaaagggttcctcgcggctggtttagattgtggttgtttgttttgcttctactaagactgttttgtttcaaaaaggaaacaaattttgtgtttgctgtctacgctggagtcctgaactgtgggtagaaaacacgacctggctttgtagaaaggacacagggctgttttatgaactaagcggtgaggctcaggtggcggctctcacagagcccctgatgctgttgttctttgagggcttaaggcctgatgaacgtaggcacgtgatgcgtaatagtcttcaatggtacacttaactagtctcttctgtgtaacagc

SEQ ID NO: 4356 - DNA, 426 bp, Homo Sapiens
gaaagatgaccttagatgtattctcaaagtgcaaatcgggatataaaaaaatagtaggtatgggggaaatgtagccccatcttctgtcccccaccctccaaaacggggctgatttgattccctctttctagcatttgtatccttccacctatactttaagataatcatttttcagccgacctagtcgggtcccatggctcctaatggtgagggccagcagctcgtatttgtccctgagccccacagagatgtccagtgtctccttcagcagggacctggtgtggaccagcattcccagaaagtcctcgttgagcctgctctcctgccggctgtcctgttcctggccctgcttgaacttgctctccagctcagtgagggatttgtccgagttggagtaggcatccccgatctggtgggactcccgcc

SEQ ID NO: 4357 - DNA, 461 bp, Homo Sapiens
  misc_feature (413)..(413): n is a, c, g, or t
taaagcattcatctgcatgttatattacagttaatacaaggaggtacttaccattttatctttactttaaaaacaatgccttttccaaaatataaaaaaaagacctatttttaaagaactatttaaagatggctttgaaaacaacacttttatttacaacaaatagatggtagtgcaacagcactcgtggcttgtttcgataaataaaaatactattgttctggcattctttgggtacaggcccctttatatttatagatggctaccaagacttcttgaaataaaatcccttaagggcctttaatttggtattttaaacccgaatttggggaaacccaaggaagaattaatcttttttttttggggacctagaagcgctttttttttgaaaaactggaaggtttaaaaggttnttcaatttcccatttacccctggggcaaccaaaaatattttcccaaac

SEQ ID NO: 4358 - DNA, 2782 bp, Homo Sapiens
gggcggcgcggaggggcagggccagagggaagcgctttgttccgcgcgtggttcccgcgcctgggggtgcgcgggagaggcgcgaatccgagtgccgcgcgcggcccggggacttgcacgggcgtgcggggtggaaccgcaggaagcggagctctcgggttcccgccccgccccgccccgccggcggcggaggcagcgagcgcgagagcccagcggagtcgctgggagcctgaggcaccgagacacaaaggcaggcgggatgcgggagcaggcaaagggaaagcgaaagccgcgcgcccggccggtgactgggtgaaggcgccgcgcagctttcccgacgccggctgtacccggacctcctggtcgagcctggcgcgccgcagccatggccatcgctcaactggccacggagtacgtgttctcggatttcttgctgaaggagcccacggagcccaagttcaaggggctgcgactggagctggctgtggacaagatggtcacgtgcattgcggtggggctgcccctgctgctcatctcgctggccttcgcgcaggagatctcgattggtacacagataagctgtttctctccaagttctttctcctggcgtcaggctgcctttgtggattcatattgctgggcggctgttcagcagaagaactcactgcagagcgagtctggaaacctcccactgtggctgcataagtttttcccctacatcctgctgctctttgcgatcctcctgtacctgcccccgctgttctggcgtttcgcagctgctcctcatatttgctcagacttgaagtttatcatggaagaacttgacaaagtttacaaccgtgcaattaaggctgcaaagagtgcgcgtgaccttgacatgagagatggagcctgctcagttccaggtgttaccgagaacttagggcaaagtttgtgggaggtatctgaaagccacttcaagtacccaattgtggagcagtacttgaagacaaagaaaaattctaataatttaatcatcaagtacattagctgccgcctgctgacactcatcattatactgttagcgtgtatctacctgggctattacttcagcctctcctcactctcagacgagtttgtgtgcagcatcaaatcagggatcctgagaaacgacagcaccgtgcccgatcagtttcagtgcaaactcattgccgtgggcatcttccagttgctcagtgtcattaaccttgtggtttatgtcctgctggctcccgtggttgtctacacgctgtttgttccattccgacagaagacagatgttctcaaagtgtacgaaatcctccccacttttgatgttctgcatttcaaatctgaagggtacaacgatttgagcctctacaatctcttcttggaggaaaatataagtgaggtcaagtcatacaagtgtcttaaggtactggagaatattaagagcagtggtcaggggatcgacccaatgctactcctgacaaaccttggcatgatcaagatggatgttgttgatggcaaaactcccatgtctgcagagatgagagaggagcaggggaaccagacggcagagctccaaggtatgaacatagacagtgaaactaaagcaaataatggagagaagaatgcccgacagagacttctggattcttcttgctgatgatttttttccttgagctgtaaatctgtgacttctgcgacatgggatttaatttggctaaagcacccctgttggtttcacagctggtttgcaataaatggttcttggtggagatactgagcatgtcttattgagtccctaatggaaatggtgatcaacaaaaggttatggaagaatggtttatgaacttcccataggaagcacctgagagatagtaaactgcagcaagtaactatgtgtaagtcctcatcaaatgaaaagcagaaagacaagaacaattagtcaagagcagtagccctgtcagagcctcggagcaatacctttctgtacccgtggtgagacaagacccagagctactggaaaacaagcactttggaagatttgttttgttttcatggaataataatatgtcagggtataatttaacgtgagtttcttatgtgcccttaaagactgttagacaagaaaagcattcactggctaataatccataggtcgacctatgtcctaagttaggtgtaaggtccgatgccttggcccacactcgagctctctttacattgttagttgtcaaccttggctgatggaaatcccgtaaccactatttgttgcactgtgccttgaagggcagcaggcccaagtgctgctctgactgaaaactgagttaacaagatgaaatctaaaggatattcacagtgacttcaattcaggaagaatgcttccaaaagagcccagtggggaaatctgacatcacagaagacattaattcagtcactttcaaagagtttgtctacaggcggtttctctgttatcaaaggcatttgaaataggattttacttaaacaataatggaacacaggagtatttaaagtgaagaacactttgcctgaatgtgatcagggcacataagtgacattggcatgcttcatatggcgtgcttggagccagaaaaacttagcggtttattttgtttatatttaagcacagctttaaaaaattcattatcgtttattcagtgtccgaattgaggccatttgggaagaaaattctagcactggtggagaattatagaataaagattataaatggttggataagacaaaaaaaaaaaaaaaa

SEQ ID NO: 4359 - DNA, 467 bp, Homo Sapiens
ttattcatgtaatgtttcattaattctttgatgctgaagttttacctcctgcagggagcatttgcagcaccccaggcgagttgtcagcagttgctgcctggcagtagcacacattaactctagtgagcagaagtggagctcgaaggctccccacactgctgcaccttgagctgctcttcctggcccagcccgttctgctttctgggaccccagatctggtctccaagtactgtttctcttctaagtgtagtcattaacttcccagagtgagaagaagagactaaaaaaaaagagagacagactgtctcttagttttaattaattgttgaaagaatagagaggggccatatttctactgaaagaaaggagaagttggggaatgggaatattctgaaccggaatgaaaaagtgaatgaaaggtaatctttagattcagtctctttgccctagtctttaaaagtttctgt

SEQ ID NO: 4360 - DNA, 3079 bp, Homo Sapiens
ttttagatgtatttcaagctgtgaagagtttacgacttcagagaccacatatggtgcaaaccctggaacagtatgaattctgctacaaagtggtacaagattttattgatatattttctgattatgctaatttcaaatgaagattcctgccttaaaatattttttaatttaatggtcagtatattttgtaaaaatcatgttaatttatttcatagttgacattaatatcttccctaatttctttgtatatattttgttatgccttaaaggccacctgctatacagttgttaaatcttaaatatgctttttaaaaattggaataatgtattaaggtcaaataatatcccataaaatatatatttctgctaatattagtaaatatcttaatttttcattagattcatatcatttaatttcacatattcaacacctttaaatgttgtaatcttaatatgcgaagtgtgcctctgcaagatactaacacaaagctcatgttaagaaaacagttgaggactcggaagtcagttgaaaatgcactttcctaacagtgaattcacaaccctgaacagcagcatttttggaaggcaaactgttcgtgatggtacaatgtaaatggggacttctgtaaagttctcagtttcggtccatgtggtttatctttacattttgaagatcaaagaagtctttacaacctgaatccaggtctaaaacacactagagtagctggtgactataaataatatttaaaaatgctgtgtctacaccatcaagactgtgtctacactatcttggctgaacgagaagagatgtaaatgctgggtggtcccgttgacccacggcgttgggtacaacaaaaccagccatcggagttacaccccaaagcaccatttgctgtccagctgcctgtcgtttggcccagaccaccctcagaaaaaaaccagctgcctctcccattctgccctcccgttctgccacagcggcctgggctggtccagtgctatgcctggaggctcaacacaaaacttcccatccaaacattcagatgaactgagcgtcttacacacgcagtacagaggagcacacattgggatagaaacagtagaataaccacgggcaattaaactttaaattttctgagcagcattttggtatttaaacatctcttgtaaaaagctgagacagtttgtaagaaaagaatccttaaaatctagatttataccattttttaaagtcccacctttcaatgtttaataaaacaaaaagagaaatccttaatctaaaagctaaattatttttgaatggaaatactactgagaccattgacactggataacagtaatgatcccattaccagataagattgactgatggggaaaaaaaaaaaaagaatggggtgtgaatgtaccaacactgaatcttacagcagttatctttctatggccattaggtacctagcagatgtgcacaatataaacaaaaagatatctggcctaccttactactaaaagcatttaacacatgcattttttggtactttcttttgttttctaaaagctacataaaggccttatttgacattttcactgataactgatcgcaccctcgtgttgcagtgttcgtcccctattcattaacagtgtgtgcaaatgcaaccccaggacacgttattgttctgatagatgctcacagggaatcaagcttctcgcccactccacggctctgagccccatccaagggcaagacttggtgcccagctggaaggacgaaagcacactttgtgaccgccatcctcaccagctgcatgcctgggctgcacactgctgaacgtgctcctctctccttctctgtacaatgattcagcatctcggcggaagaggaaaatggagctttttgaggctcgccaggtcccttttgttttcaccattaaaattccaaacccaaagcctttgtttgactgaaggagaagagagggaagtaagcttctgttcagcacctgaaccctagaaaaagagccagtttgctacgatgaaggtgacatttctctggtcatttgagagttcgaagtcaaagccgaggggcacaggctttggttcatgtctaggagccctctgtcagaatccttgaagccctttaatggtctaactggcatctcttgtatcaagaagtacctttaaggtagaccttttcagggtgccctcaggaaagggccctgctcatgtttttttcctgtccccttagaccaaccccaggtttccactgcaggggttctgcctgttcccaaactttttccattccaggaacaaaggagaagccactttccccaggacgcaggactctcccctccactgtccgggacagcgttcgccctttagcggggaggtcattacagcctcatggcctctaccaaggccccagatcacaggatctcctgggccttggagcacctcacgctgggggaatcaatccctgagggactcagaatcttctccgtgcaacctggaaagttcatctcttgtttccttcagtcaaagaaagtccattgtacataacaaaacagcccccaaacagcccagtgccgacaccattgttcctttcacactttcctttgttgcatgcagttgggttcaaatgccaaatagtgattagaagacgaccattctgatctgtgtgtgatctggtcactatgtgactgcctttacggtttctctccatgtgctatatgaatgaagaatgcataccagtgttttaaaaggtatttttatgtgtttttaaacacttttttaaatgagcctgacacctgtgtttcagcatttggagacatccccatgttattcttttaagtgtataattactgatacttttttgtttgtttgtttaactaagttgtgtttaatttatgtgcagtctttataatgtatgtatgttattacagttcaactatcatattttctttgattacatttataatttgatcttgctctgattataatgccagtgaatgttgctgaactctttgtatatgcaaattgcaagatttaaaccattctgatgcaaggacaaacctttactttgactacc

SEQ ID NO: 4361 - DNA, 410 bp, Homo Sapiens
  misc_feature (247)..(247): n is a, c, g, or t
  misc_feature (324)..(324): n is a, c, g, or t
  misc_feature (375)..(375): n is a, c, g, or t
  misc_feature (385)..(385): n is a, c, g, or t
  misc_feature (409)..(409): n is a, c, g, or t
ttaaaatttcattctcattattttctgtaatcttgagaggttccaatcaacatttattgccttattctttttatctcattcctttttgaatgtgtttatctcctaagattttatctgtgatggagatgggatgcctgtgaatacaaaagttcgcagtggtggcaccagggtgggggggtgcggccggggcaccatggtctcccctgagagggggtcgctgtcttaggtgccccaagaggccctcggnacgcaagcgtggggtgctgccaaaatacagctccccctgggtgggcaggacacacgtggcctcctggcagacaggtncctgggtgagcccgctggctcctgattagtcatgaaatggcaccttgtctnggcgaaatcnaccgcaggaaagccctgaactggnc

SEQ ID NO: 4362 - DNA, 261 bp, Homo Sapiens
agtaagcttacatttctgtgtaggtttgggaatatagttacttggcaaagtctttcaggaaggaagcccttccttatgttacatgtggaaagcctgccttccaagacatgtggaagtaattgatccacctgccagagaaacacaggctcagaggatgcctgggaacagggaggatgggattagtggaagcttaatggaaaaggaaagttatgatcctccaagacccttaattgatagaccataccaggttctgcaggtcag

SEQ ID NO: 4363 - DNA, 623 bp, Homo Sapiens
  misc_feature (517)..(517): n is a, c, g, or t
  misc_feature (539)..(539): n is a, c, g, or t
gggcagccaggcccatctgacggtgaaggatgagaaaaaccaccatgaactcgatcacagagagagagaatccagtgcgaataactctgtgtcaccctccgaaagcctccgggccagtgagaagcaccggggctctgcggactacagcatggaagccaagaagcggaaggcggaggagaaggacagcttgagccgatacgacagtgatggggacaagagtgatgatctggtggtggatgtttccaatgaggaccccgcaacgccccgggtcagcccggcacactcccctcctgaaaatgggctggacaaggcccgtagcctgaaaaaagatgcccccaccagccctgcctcggtggcctcttccagtagcacaccttcctccaagaccaaagaccttggtcataacgacaaatcctccacccctgggctcaagtccaacacaccaaccccaagaacgacgccccaacttcaggcaccagcacgaccccagggctcaggtcgatggccggtaaaactncgggcatggacccgatagcctnggttctgcgcacgcccatcttcatcaccagcttctatgccgggcccctcggcatgatgagccaccatgagaagaaccggtccct

SEQ ID NO: 4364 - DNA, 453 bp, Homo Sapiens
tttttttttttttttttttaagttaaaaaatatttaatattatcagataaaaacattgattgtgacagctttacatgtttcattccatacacagtgaaaaaggcaaagtattactaggaaggaaatgagtagttgggtttgtaaaagatttattgatcacataaaagcaatgaataggagatgacatatatctaactcatgattacaaaacttttagagacaactaggttaaatatttcatgttttggctaagggaaaagaattcatgatctcgttaaagaagttcaaagtcaacactgatattgtacaactaccagtgcttttctaatgatctagaaatttgctataaatagctttactttttgctagttaatcacttactatgattgggttttatttaacagtgaggactaaagaggcagaatccttttttaaccactggataaaacagag

SEQ ID NO: 4365 - DNA, 360 bp, Homo Sapiens
  misc_feature (268)..(268): n is a, c, g, or t
tttttttttttttacaaaggcgtttagtttattctcatcagtatcactgatattctcatggttcacatttgccaacgccgctcctctccttacagtagttaaatgtgcaatctcacttgggggcccagggaggggtgggggctcggcccaaggtggggagggcgttggcacttcacgtggacagggtgggcaacctgttcctgcttgaaaaaggtgtgggttgagtgggcggccagggaaggggagttggcaggggagggccccacantcttttttctctggtggttggggattctccattcaaattccttcctggctgcccagggtgggggaaccattgcactcagggcaggggaggaa

SEQ ID NO: 4366 - DNA, 396 bp, Homo Sapiens
  misc_feature (2)..(2): n is a, c, g, or t
  misc_feature (21)..(21): n is a, c, g, or t
  misc_feature (32)..(32): n is a, c, g, or t
  misc_feature (114)..(114): n is a, c, g, or t
  misc_feature (156)..(156): n is a, c, g, or t
  misc_feature (221)..(221): n is a, c, g, or t
  misc_feature (259)..(259): n is a, c, g, or t
  misc_feature (270)..(270): n is a, c, g, or t
  misc_feature (376)..(376): n is a, c, g, or t
antttcggcacagctttgtancggaggcactncggacgtcgaagcctagagtctctgcgtctttccctcttccgctgcctcattcctttccttcctagccttggtcgtcgccgncaccatgaacaagaagaagaaaccgttcctagggatgcccgngcccctcggctacgtgccgggctgggccggggcgccactggctttcaccacgtggtcagacattnggcccgcccgtgatgcaaatgaccctgtggatgatcgncatgcaccccnagggcaagagaaccgttcgggaccagatgaagaaaaatcaggctgctgacgatgacgacgaggatttaaatgacaccatttacgatgattttattcggttttgttngggagcttttgttcaagttg

SEQ ID NO: 4367 - DNA, 386 bp, Homo Sapiens
  misc_feature (24)..(24): n is a, c, g, or t
  misc_feature (27)..(27): n is a, c, g, or t
  misc_feature (149)..(149): n is a, c, g, or t
  misc_feature (299)..(299): n is a, c, g, or t
  misc_feature (346)..(346): n is a, c, g, or t
  misc_feature (380)..(380): n is a, c, g, or t
cggcacaggacgacttcgccgcgnttnggtcagccatggccaccgctctcgcgctacgtagcttgtaccgagcgcgaccctcgctgcgctgtccgcccgttgagcttccctgggccccgcggcgagggcatcggctctcgcggcgaatngacgagctgtatcagcggacggcatctctctgctgcaacgcgaggccgctcaggaatgtacatcgacagctacaacagccgcggcttcatgataaacggaaaccgcgtgctcggcccctgcgctctgctcccgcactcggtggtacagtngaacgttgggatcccaccaggacatcaccgaagacagcttttccctnttctggttgctggagccccggatagatcgtggtngttggg

SEQ ID NO: 4368 - DNA, 3627 bp, Homo Sapiens
atggagcggctgcgggacgtgcgggagcggctgcaggcgtgggagcgcgcgttccgacggcagcgcgggcggcgaccgagccaggacgacgtggaggcggcgccggaggagacccgcgcgctctaccgggagtaccgcactctgaagcgtaccacgggccaggccggcggcgggctccgcagctccgagtcgctccccgcggcggccgaagaggcgccagagccccgctgctgggggccccatctgaatcgggctgcgaccaagagtccacagcctacgccagggcggagccgccagggctcggtgccggactacgggcagcggctcaaggccaatctgaaaggcaccctgcaggccggaccagccctgggccgcagaccgtggcctctaggaagagcctcatctaaggcatccaccccaaagcccccaggtacagggcctgtcccctcctttgcagaaaaagtcagtgatgagcctccacagctccctgagccccagccaaggccaggccggctccagcatctgcaggcatccctgagccagcggctgggctccctagatcctggctggttacagcgatgtcacagtgaggtcccagattttctgggggcccccaaagcctgcaggcctgatctaggctcagaggaatcacaacttctgatccctggtgagtcggctgtccttggtcctggtgctggctcccagggcccagaggcttcagccttccaagaagtcagcatccgtgtggggagcccccagcccagcagcagtggaggcgagaagcggagatggaacgaggagccctgggagagccccgcacaggtccagcaggagagcagccaagctggacccccatcggagggggctggggctgtagcagttgaggaagaccctccaggggaacctgtacaggcacagccacctcagccctgcagcagcccatcgaaccccaggtaccacggactcagcccctccagtcaagctagggctgggaaggctgagggcacagcccccctgcacatcttccctcggctggcccgccatgacaggggcaattacgtacggctcaacatgaagcagaaacactacgtgcggggccgggcactccgtagcaggctcctccgcaagcaggcatggaagcagaagtggcggaagaaaggggagtgttttgggggtggtggtgccacagtcacaaccaaggagtcttgtttcctgaacgagcagttcgatcactgggcagcccagtgtccccggccagcaagtgaggaagacacagatgctgttgggcctgagccactggttccttcaccacaacctgtacctgaggtgcccagcctggaccccaccgtgctgccactctactccctggggccctcagggcagttggcagagacgccggctgaggtgttccaggccctggagcagctggggcaccaagcctttcgccctgggcaggagcgtgcagtcatgcggatcctgtctggcatctccacgctgctggtgctgcctacaggtgccggcaagtccctgtgctaccagctcccagcgctgctctacagccggcgcagcccctgcctcacgttggtcgtctctcccctgctgtcactcatggatgaccaggtgtctggcctgccaccgtgtctcaaggcggcctgcatacactcgggcatgaccaggaagcaacgggaatctgtcctgcagaagattcgggcagcccaggtacacgtgctgatgctgacacctgaggcactggtgggggcgggaggcctccctccagccgcacagctgcctccagttgcttttgcctgcattgatgaggcccactgcctctcccagtggtcccacaacttccggccctgctacctgcgcgtctgcaaggtgcttcgggagcgcatgggcgtgcactgcttcctgggcctcacagccacagccacacgccgcactgccagtgacgtggcacagcacctggctgtggctgaagagcctgacctccacgggccagccccagttcccaccaacctgcacctttccgtgtccatggacagggacacagaccaggcactgttgacgctgctgcaaggcaaacgttttcaaaacctcgattccattatcatttactgcaaccggcgcgaggacacagagcggatcgctgcgctcctccgaacctgcctgcacgcagcctgggtcccagggtctggaggtcgtgcccccaaaaccacagccgaggcctaccacgcgggcatgtgcagccgggaacggcggcgggtacagcgagccttcatgcagggccagttgcgggtggtggtggccacggtggcctttgggatggggctggaccggccagatgtgcgggctgtgctgcatctggggctgcccccaagcttcgagagctacgtgcaggccgtgggccgggccgggcgtgacgggcagcctgcccactgccacctcttcctgcagccccagggcgaagacctgcgagagctgcgcagacatgtgcacgccgacagcacggacttcctggctgtgaagaggctggtacagcgcgtgttcccagcctgcacctgcacctgcaccaggccgccctcggagcaggaaggggccgtgggtggggagaggcctgtgcccaagtacccccctcaagaggctgagcagcttagccaccaagcagccccaggacccagaagggtctgcatgggccatgagcgggcactcccaatacagcttaccgtacaggctttggacatgccggaggaggccatcgagactttgctgtgctacctggagctgcacccacaccactggctggagctgctggcgaccacctatacccattgccgtctgaactgccctgggggccctgcccagctccaggccctggcccacaggtgtccccctttggctgtgtgcttggcccagcagctgcctgaggacccagggcaaggcagcagctccgtggagtttgacatggtcaagctggtggactccatgggctgggagctggcctctgtgcggcgggctctctgccagctgcagtgggaccacgagcccaggacaggtgtgcggcgtgggacaggggtgcttgtggagttcagtgagctggccttccaccttcgcagcccgggggacctgaccgctgaggagaaggaccagatatgtgacttcctctatggccgtgtgcaggcccgggagcgccaggccctggcccgtctgcgcagaaccttccaggcctttcacagcgtagccttccccagctgcgggccctgcctggagcagcaggatgaggagcgcagcaccaggctcaaggacctgctcggccgctactttgaggaagaggaagggcaggagccgggaggcatggaggacgcacagggccccgagccagggcaggccagactccaggattgggaggaccaggtccgctgcgacatccgccagttcctgtccctgaggccagaggagaagttctccagcagggctgtggcccgcatcttccacggcatcggaagcccctgctacccggcccaggtgtacgggcaggaccgacgcttctggagaaaatacctgcacctgagcttccatgccctggtgggcctggccacggaagagctcctgcaggtggcccgctga

SEQ ID NO: 4369 - DNA, 296 bp, Homo Sapiens
  misc_feature (167)..(167): n is a, c, g, or t
ataccatttaaaggtgtgcggcgggtctctgttcacatggctcaactggaaacctgtttcatgaacaagcttactcaggaaccatctggtggtattccagcacattgttcttcagggggacgactctaagtcgctttgtggtggcagcagcttagaatcagtatttntggttgggaaagatggacttacgggagcttggtaatgcaggtggtgaaggagcaggttatgagagcacttacaaccaagcctagctccctgggacccagttcaagaggcaaacttgcaagaacccttga

SEQ ID NO: 4370 - DNA, 439 bp, Homo Sapiens
  misc_feature (411)..(411): n is a, c, g, or t
tttttttttttttttttggacttttaaattttattacttttaaattttgtttccatagtttacttttatttcaatggtttttggttacatggataagttctttagtgatgatttttcagattttggtgtacttgtcaccctgctttaaatgaatatgacttgggttcttctggcatttttattcctgtaaaataaacagtgtctgcacatcgctaattagaaaagtgttcgacacagagtgtggattccattgtcctcagaaaaccgtcagaaggaggagcaggtagggaaatgatgttcctggaagtgcagtcacttttttaagcttacacaactcctaacctgcaggactggatttgtaacctgaggctgcctgactctaaacccttttggctgctcacaggagcctcncaaagtccttgtttttgtctctgcctta

SEQ ID NO: 4371 - DNA, 451 bp, Homo Sapiens
  misc_feature (13)..(13): n is a, c, g, or t
  misc_feature (16)..(16): n is a, c, g, or t
  misc_feature (304)..(304): n is a, c, g, or t
  misc_feature (364)..(364): n is a, c, g, or t
  misc_feature (400)..(400): n is a, c, g, or t
ttttgcaagcgcnaanagacgtttatttaaatattctttggctgcaatactaagtggaaaatacctggaagatttaactccttaggactctttgaaaagtacacagaaagacaaaggtaaaatcggggacaaattttgcataactccctaatagggagaaagagtgaaatacagaagcatgtgtgcgcacacacacacacacacacacacacatacacacacactctctctcacttactcacatgtttctttccagagggactgctcacaggcagcaaaaagagcctatgctcaaacttgctanagccccatatatacctacaatgtttcatgggtcctcaaatatgaggacatttctcctctnctccactctcttcagaatttctttccaaaaacaagncatactatccaagggcaaacagtggatgtcaggttcttctaacctggcctc

SEQ ID NO: 4372 - DNA, 1727 bp, Homo Sapiens
gtgggggcggggaggagaggcggcggcggcagtgtccaagctacgccactcgggctggggcgttgggagcgggagtgcagagcgtggtcgtggcggcggcggtgagaagagcgaggcggaggagggggtgccatggccgggcagcagttccagtacgatgacagtgggaacaccttcttctacttcctcacctccttcgtggggctcatcgtgatcccggcgacatactacctctggccccgagatcagaatgccgagcaaattcgattaaagaatatcagaaaagtatatggaaggtgtatgtggtatcgtttacggttattaaaaccccagccaaatattattcctacagtaaagaaaatagttctgcttgcaggatgggcattgttcttattccttgcatataaagtttccagaacagaccgagaataccaagaatacaatccttatgaagtattaaatttggatcctggagccacagtagcagaaattaaaaaacaatatcgtttgctgtcacttaaatatcatccagataaaggaggtgatgaggttatgttcatgaggatagcaaaagcttatgctgctttaacggatgaagagtcccggaaaaattgggaagaatttggaaatccagatgggcctcaagccacaagctttggaattgccctgccagcttggatagttgaccagaaaaattcaattctggttttacttgtatatggattggcatttatggttatccctccagttgttgtgggctcttggtggtatcgctcaatacgctatagtggagaccagattctaatacgcacaacacagatttatacatactttgtttataaaacccgaaatatggatatgaaacgtcttatcatggttttggctggagcttctgaatttgatcctcagtataataaagatgccacaagcagaccaacggataatattctaataccacagctaatcagagaaattggcagcattaatttaaagaagaatgagcctccacttacctgcccatatagcctgaaggccagagttcttttactgtctcatcttgctagaatgaaaattcctgagacccttgaagaagatcagcaattcatgctaaaaaagtgtcctgccctacttcaagaaatggttaatgtaatctgccaactaatagtaatggcccggaaccgtgaagaaagggagtttcgtgctccaactttggcatccctagaaaactgcatgaagctttctcagatggccgttcagggacttcagcaatttaagtctccccttctgcagctccctcatattgaagaggacaatcttagacgggtttctaatcataagaagtataaaattaaaactatccaggatttggtgagtttaaaagaatcagatcgtcacactctactgcacttccttgaagatgaaaaatatgaagaggttatggctgtccttgggagttttccatatgtgaccatggatataaaatcacaggtgttagatgatgaagatagcaacaacatcacagtaggatccttagttacagtgttggttaagttgacaaggcaaacaatggctgaagtatttgaaaaggagcagtccatctgtgctgcagaggaacagccagcagaagatgggcagggtgaaactaacaagaacaggacaaaaggaggatggcaacagaagagtaaaggacccaagaaaactgctaaatcaaaaaaaaagaaaccttt

SEQ ID NO: 4373 - DNA, 1270 bp, Homo Sapiens
ggcacgaggctgcgccggaagtccctagccaggcctggcggtaaccttgggggcctcactgcagccgccgctgctgttggagtgggctttgcgagtctgaacgttggcggggctaggctcgttaactgccgagagcctccgggtttgcggtggaggacgctgaggcccgtggggggcaggcacccgggcgccgggcctcccagccgacatgtctctagtggcggaagccttcgtctcccagattgcagctgcagaaccttggcctgaaaatgctacattatatcagcaattgaaaggggagcaaattttactttctgacaatgcagcttctcttgcagtgcaggcctttttgcaaatgtgtaacttgcctatcaaagtagtttgtagggcaaatgcagaatatatgtctccatctggtaaagtaccttttattcatgtgggaaatcaagtagtatcagaacttggtccaatagtccaatttgttaaagccaagggccattctcttagtgatgggctggaggaagtccaaaaagcagaaatgaaagcttacatggaattagtcaacaatatgctgttgactgcagagctgtatcttcagtggtgtgatgaagctacagtaggggagatcactcatgctaggtatggatctccttacccttggcctctgaatcatattttggcctatcaaaaacagtgggaagtcaaacgtaagatgaaagctattggatggggaaagaagactctggaccaggtcttagaggatgtagaccagtgctgtcaagctctctctcaaagactgggaacacaaccgtatttcttcaataagcagcctactgaacttgacgcactggtatttggccatctatacaccattcttaccacacaattgacaaatgatgaactttctgagaaggtgaaaaactatagcaacctccttgctttctgtaggagaattgaacagcactattttgaagatcgtggtaaaggcaggctgtcatagagttatgtgttagtctcaggagtcttaacttttgaaatatgttttacttgaatgttacattagatattggtgtcagaattttaaaaccaaattactgctttttgaaacctcaaattatataatgtatcttatgtatgtgctttatattgttatttgtgtatacattaaaataattctgaattatttaatctgatatgttgtattctgtatcttgaaatttttgtttccttgaaacatgcatgcatttaaaaataaagcttaaacaactgt

SEQ ID NO: 4374 - DNA, 377 bp, Homo Sapiens
tttttttttttttttttttttttttttttgcaaaaaatggacaatgaaggttgcacattaaaatcaaatagtacaatcactttaaagagtacatgaaaccggaataaaacaaattttcagcaagtactatctcaatttctagggatcactgctaacaagccttcaaaacaaagatgaaatttatagccgcgtttaccactaccaaccagtaggcagaaaggtttttgacacagcagggtcttcagataatatctaataccccattaggcagaagcttcattacatgataaaatcttcaatcactgaacttcgaaaaatcctgcaaacgagcagactctgataacagcaaaccagaagtagggaataaagcctgcttg

SEQ ID NO: 4375 - DNA, 433 bp, Homo Sapiens
cgggttcaagcaattctcctccctcagactcctgagtagctgggattacagaaaccctcttgtgagcacgcctgaatttggaggatcacgtcgcaagctctcaatagccacttgaactcatggccttaaagagcacaagtatcggcctttgtcttagtcaagctttcgaggagcaactcagcaattctgttaccgataatcacctaacagtttacacattcaaaaccactgggaagccacagaccaggcaccgtgggatggggaagtggagactgagaggctgctgccggggaaatatgcagtgcagacaagagggtaatgggtgtccgatgtcacgggggactctgtgatccgtgttcccctgaccctcctagtgcacaacttggccgggctcactgggctcctgcaccactgcctgtcaggtccgctgcca

SEQ ID NO: 4376 - DNA, 497 bp, Homo Sapiens
tatggcatggtcgtttaataaattcacataaacagagtttatttggcaaggcaaactgggatcgctgtccgccagtaggttagggtgagtgtgatgttgtacaataaatgaaaggttctgtgtgaaggagagtgagcagggtacaacaaccaaaaaggcaaactacatatttgaaaacacagctgtggttcatactcaatcatttcatatctccaagagaattctttttaccaaaaaaaaattgcatacaaaggttagtttaattatcatgtgaatgtttgaaactctctgatataggaaatctcccaggattacctgtctactaaacagatttccttctctttccaaatacattattgatcaatttggccattgatttagatccactgggacgtctcttttctttgagtttgaagtttatcaggatgtccttgataattctgataaacatcatttccacctccagagactgctctgctgcagacagttcacagaat

SEQ ID NO: 4377 - DNA, 481 bp, Homo Sapiens
  misc_feature (174)..(174): n is a, c, g, or t
  misc_feature (433)..(433): n is a, c, g, or t
cctcagctcccaagtagccggaattacaggcatgtgccaccatgctgggctaatttttgtatttttagtggagacggtgtttcaccatgttggccaggctgttcttgaactcctggcctcaagtgacccgcccacattggcctcccaaagtgctgggattacaggcgtgacccncgtgcccagcaaggattgctgttttaattcttgtatcttcgttgcttctttggtctttgcttaaacaaaacaataaagcttaatagttggggagaatgctgttaccagtgtcctctaggaaggctgttagcatatggctctactgagcaggcagtgccatctggtgcctgagatcatgtgcttcaggcagttgtcacactgcatctacagccaagcatcacagaaacacttcactcatgtggtcagggaaggtggggantgatttcacatgtttaggagacaggtccagatggggaaattaaggccc

SEQ ID NO: 4378 - DNA, 307 bp, Homo Sapiens
  misc_feature (61)..(61): n is a, c, g, or t
  misc_feature (77)..(77): n is a, c, g, or t
  misc_feature (184)..(185): n is a, c, g, or t
  misc_feature (192)..(192): n is a, c, g, or t
  misc_feature (269)..(269): n is a, c, g, or t
  misc_feature (282)..(282): n is a, c, g, or t
ctgcaggtggggaatgttccccttaaaaaagcaaaggagtctaaaaagcatgaaaagcttnagaaaccagagaaggngaagaaaaaaaagatgaagaatgagaacgcagacaagttacttaagagtgaaaagcaaatgaagaagtctgagaaaaagagcaagcaagagaaagagaagagcaagnngaaaaangggggtaaaacagaacaggatgggctatcagaaacccaccaacaaacacttcacgcagagtcccaaggaagtcagtngccgacctggctnggggtcctttgaagggcaagcgaag

SEQ ID NO: 4379 - DNA, 2222 bp, Homo Sapiens
gagtcccggcagtgcgggactccggtagccgcccctccggtagccgcccctcctccccccgcgccgccgccctatatgttgcccgccgcggcctctggggcatggagcacgctgcccagccctggcgatggcaacggcgacgggggtggcggaggagcgcctgctggccgcgctcgcctacctgcagtgcgccgtgggctgcgcggtcttcgcgcggaatcgtcagacgaactcagtgtacggccgccacgcgctgcccagccacaggctccgagtgccggcgcgggccgcctgggtggtgcaggagctgccctcgctggccctgccgctctaccagtacgccagcgagtccgccccgcgtctccgcagcgcgcccaactgcatcctcctggccatgttcctcgtccactacgggcatcggtgcttaatttacccgtttctgatgcgaggaggaaagcctatgccactgttggcatgtacaatggcgattatgttctgtacctgtaacggctatttgcaaagcagatacttgagccattgtgcagtgtatgctgatgactgggtaacagatccccgttttctaataggttttggcttgtggttaacaggcatgttgataaacatccattcagatcatatcctaaggaatctcagaaaaccaggagatactggatacaaaataccaaggggaggcttatttgaatacgtaactgcagccaactattttggagaaatcatggagtggtgtggctatgccctggccagctggtctgtccaaggcgcggcttttgctttcttcacgttttgttttttatctggtagagcaaaagagcatcatgagtggtacctccggaaatttgaagagtatccaaagttcagaaaaattataattccatttttgttttaagtgcgtttttcatgaaattatcttcaacttgaagctttccaatggcgcttctctatggactttgtaaataagttatatctttgtaattttcctgctactttatcattttcaagatgtcctctaggaattttttttctagtaattttgcaatctacctaataagtacctaaatacgctgaaatggaggttgaatatcctactgtgtaacaggtcagaatttcaagctctgggtaataactgctgatattttttctaatttcaaatttacctcttttggctatgtcttgccaagtgtgtatgagactagactttacaactgtctttgatggcattttcagaacaataaatgtcacaatcccttctatagccccctacagtgatctcttcaaggtcaactgcagtgttgcttccctccccctatagggctggaatctgtctaggagccctctctcggaggccatagaggctgggggtagccattgtgcagtcatggcccgggggaaacttgccaaccttcgtgtcaggtgctgtgtataagtggagaacttggggatagaggaggaagctcctcgtggcccttccaaggtgaggcaaaggcatctggacttgttccagcccagcccaccgggtgacatcaccgggcagggaggggtgctggtggtggttcatacggagtaagctgctctgcctgtgtgagtggctcctgggccctaaacaggcacctttaggccatgggtcactcaccgtgagccatcaatgtgctctggtctgacatggtttctctctgtcttctagtctagacctagtttttttgttctgttccccacgtatggatatagtagagattgttgtctgtgaaatttctcttttgtagattttgagttttcccttgtagtgtaaagaatgatcactttctgtaacaataacaagaccactttttaagatttatcctgtttgttctttgttgattgaaacataataattgttaaaattctctacagccttctttttcttccatagctaatcttccttctaatagtttttgctttctgttttgctgttgttgctttgcaaagctttcccctcatagcctgtacctgttatcaatataaaataatcttcctgttgaatgcttcatgacttgaattctactttgataaaaacattgccatactgctttttatcttgatgaattcatctggcattgctttgccttatcatctcatctggagtttttaaatgccatttgtttcagttgtctttaacaacataataaatagactttgccatttaaaaaaaaaaaaaaaaaaaaaaa

SEQ ID NO: 4380 - DNA, 408 bp, Homo Sapiens
ttttttttttttttttgaaggactattaggttaacagtgatttttaaaatttattgtaaatatgagtgctataaaacaggaattttcatattattttgggattataaattggtatgatcctgaatagcaatttggcaatgtatatgttaagaaccttagaaaatgtttttcacttttgatttagtatttccacttcatgaagtctatccttaggaaataatatttgaacaaagatttatgtacaaagatgtgtgagctatataatctataatataatgcataaaaatgggaatcaattgaagtagtcaataacaaatacataattatcaatatatccataaattatacatccataaaaaagtttctaagtatatttatctaaatatatatcatgacacctaaatttat

SEQ ID NO: 4381 - DNA, 272 bp, Homo Sapiens
tacccatttatgtaggggccccaggtaacctacacacagccagaatgaggttcccaaaggacttacattaattatggctcttgcttcctttcacaaatgagctgaggcctctacttttttttttaagctgcatacgtgaggcttaccttcttcaggactagttaaccagaggggcttcctttgtatgttacatgcctggttacatgggcctggacagcatgtcctctacctgtgacttctcattttcctgtttacactggggatttggaggg

SEQ ID NO: 4382 - DNA, 5065 bp, Homo Sapiens
cgagatggtgagtcttctgtggtccctcccccacaaggcccaagtccctgggcagagagtgggcccagaggacagcaggcagcacctaggacctaagcctgggagttgccccctgcagacagcttagacccacgaccagctcccccacccccaccctgcggctgcatcctgggaggtgggcactcttagtgccctgtgacattcattcattccatggcccctcagggagctcaccttctaggagacggcacagaggctctggccctggcaaactgggattcgagcccaggcatgaggcccagtcctctgccgtctgggccacagcacaccatctcccaacaaccaagagattctcttcgtcccagcctcatcagcccccaggggatgggagagggcaggcaccaggcaacaaggtccaaagagacctcacgacttgctcaaggtggccgagcctgtcccctggaggacagactcagctgccaggcctgtccaggcctggggactgcaaagaacaagaattccattcacacgaagcctcccagcagccccatattgggggggcgccagcctcagagaggggagggacgttaggtttcatccaaagaaagcatttccgtgactcaaaatatctgcaggggggatactgtctagcctcctaatgtttagcccagggctgggcacacagtagggcttcaagacctacgtggggatgacagtggaatcacatttaggtgtcagcacactccatgccgggtcatgagacagaaataagccacctcagagtgatggctgggttcgttcattcatctactcttcagtcaacaaacacttactgagaagtggctgtgtgccaggcacgctttaggtgctggggttgcctccatgaacaaaacaagcagaaaactctgctgctgtgaagcaagctaaggcggagcccagcatggcaggggcgggaggggctggctggcaagacattgcttcctgccctccccccaggggcaccacacagaacagtttacaaagcactcccacggttgcgttcccattaacaagccttcgcccccaacacaagcctttcctctcctagtccccgggacggtgtcagccctgaacatagcccaggctgggagagtggggggcttacacccttgggtgacttaatgtgcccactggcccaccctgcccaagacctaccacttctgccctctcagctctccctggatccatcgggtcccgagtgggattgcccactgggctccaaggacctggaggaagagggcccctggggagggggctctggcctgccgcccacaggctgcttccctggctcctggcgccaggacgtgggcctggactgcaagggatcccccgagggggccgaggcccgggcttggactgtctactactacagcctcctgcagagctgtctgcagcaagctggccttccggagactcaggaccgcggccaggtgccccgcacaggctgtcctggggcggaggtgaccttgtgcgttctgggctcccccagcacctttctgcctgtgctgctggagggtggggtccagagcccgggaaacatgctcctttgcctgtcccctgcttggctgatgaaggtgccagcacccgggcagccgggtgaggcagccctgctagtctccaaggctgtgagcttccaccctgggggcctgacattcctggatgactttgtccccccgcgccgtgccacctactttttggcaggcctgggcctggggcctggccggggccgagaggcagcagaactcgcccgtgacctgacctgccccacaggagcttcggctgagctggcccggctgctggaggaccggctgctgacaaggcagttgctggcccagcagggtggtgtggctgtgccagcaaccctggctttcacctacaagccgccggggctgctgcggggaggggatgccagcctagggctacggctggtggagctgagtggcaaagagggccaggagacgctggtgaaagaggaagtggaggcttttctgcgctccgaggccctgggtgatatcctgcaggtagctgtgaagctcagtggctggcgctggcgggggcggcaggcatggcgtctgcacccgcgggcagagctgggtgcagtggtggacacagtgctggcgctgctggagaagctggaggaggaggagagtgtcctggtggaggctgtgtacccacctgcccagctgccctgctcagatggtccttcacccggccccggcctggccgtgcgaatctgtgctgtggtgtgtcggacacagggtgataggccactgctgagcaaggtggtgtgcggcgtgggccgcggggaccgccctctacggcaccacaactccctgccgaggacgctggaggtggcgctggcccagtgcggcctgggcgaggaggcgcaggtggcggctgtgcggcagcgcgtcaaggcggcggccgaggccgcgctggccgccgtgctggctctggaggccggcctgagtgccgagcagcgcggcgggcgccgggcgcacacggacttcctgggcgtggatttcgcgctgacagcggccggcggcgtgctgaccccagtggccctggagctgaacggcggcctgtgtctggaggcgtgcggcgcgctggaggggctgtgggccgcgccgcggctggggccggcggccgacgaggcggtggcggcgccgctggtggagaccatgcttcggcggtcggcgcgctgcctcatggagggaaaacagctgctggtggtcggcgctggcggcgtcagcaagaagttcgtgtgggaggcggcgcgcgactacgggctccagctgcacctcgtggagtcagaccccaaccactttgcatcccagttggtacagaccttcatccactttgacatgacagagcaccggagggatgaggagaacgcacggctgctggcagagttggtgcgggctcgcggcctcaagctagatggctgcttctcctactgggatgactgcctggtgctcacagccctgctctgccaggagctaggtctgccctgcagctccccagctgccatgcgcctggctaagcagaagagcctcacccagctgcacctgttgcaccaccatggcccaccctggcctgcgccctccctccatgctgtgccctgctgcccactggagagtgaggctgatgtggagagggccgtgcaccaggtacccctgccaggtgtcatgaagctggagttcggggcaggtgcagtgggtgtccggctggtagaggatgcgccacagtgccatgagcacttttcccggattacccgagacttgcagggcgaggccgaccacccaggcattgggctgggctggggcaatgccatgctgctgatggagtttgtggagggcaccgagcacgacgtggacctggtgttgtttggtgggcggttgctggctgcctttgtctccgacaatggccctacgaggctgcctggcttcactgagacggcggcctgcatgcccaccgggctggcaccagagcaggaggcacagatggttcaggcagccttccgctgttgcctgggctgcgggttgctcgatggagtcttcaacgtggagctcaagctgaccggggctgggcctcggcttatcgagatcaacccccgcatgggtggcttctacctgcgtgattggatcctggagctctatggtgttgacctgctgctggctgctgttatggtggcctgtggcttgcgtcctgccctgcccacccgcccacgtgctcgtggccatctggtgggcgtcatgtgccttgtgtcccagcacctgcaggccctgagttccaccgccagccgtgagaccctgcaggccctgcacgaccgtggactgctacgcctcaatctgctggaggaggccctggtgcctggcgagtatgaggagccctactgcagtgtggcctgtgccggacccagccccaccgaggcccgtctccgcctgctgggcctctgccagggcctgggcatcgatgggcccagctaccctgttgcccacttcctgtctcacttcaaatagcactggggtcagggggcagggaagcagtgctgggtggaggcactgtggtgccctctgctccctggagctcttcctgcttctctccccatcaccatgccccagccccagcctggcccgctgcaatgcctaggtctgttccagagcagcagggcaatttagacaccaaggcatcctggactcaagggcctcttgccctcccgaaggccccagtccagcctacagcttccccagcattctagccttggagaaatgacaatggccacacacacacacacacacacacacacacacctctgacgccagctccccaggtgggagtgggcccaaacccagcccctcctgtccacctctccaggtctcactctcttcctgccatctacaagaggagaggacctggctgggccccaagccttggacaaatcctgggaaaacctgagactagaacccttgtcttcctcttacccaaattctaggatagctctgaagcctgctggaaacttggtggcatccaacctgcctcattcggcctgaccggtagaggcaggtggcctgtggacagaagtaatcctctttctgctcaccccaggcagacacaactgcctatgttcccccgatgagaggaaacaggctgagagaagaaaaatgactgctccaggattataccacagtggagagcgggtcacaggacatgatgcagggtccaggtttctgttttgatcaagtcttacatgcccattcagcttctaggcccccctcacctccctgccctcattcacaagtggccctgagacacgtgaacacctccctcctatgcatcacaaaccttctccaccgagctttggtgctttggcctctggcacacctaactagcattggcagaggagagtctacactctcttcctcattcagggaagatgctttaagaaatcctgcctctgtgcagcagaggagctggaggcagctccccaggcatccctccccaaataaaggcttatgtactggtg

SEQ ID NO: 4383 - DNA, 183 bp, Homo Sapiens
  misc_feature (43)..(43): n is a, c, g, or t
  misc_feature (159)..(159): n is a, c, g, or t
  misc_feature (175)..(175): n is a, c, g, or t
aaggaaaacagaaatctgtattttgagatggtcattgtacagnaagaagtggcccctctgcaacatgtcctcacagaaacgaaatggtgtgtagcaatcaacactagaaagtagaccttttgcaaattaatatgtccttgaccttttttgcccttttcngggggtgaggtggggntaaaaaag

SEQ ID NO: 4384 - DNA, 420 bp, Homo Sapiens
gcggccgccacactcacctcgccgccaagcagcactcgggttctgactcggtctcgggttccggtggcggtggtggcggcggcggcggtggcggcggctcctccatggcggcggcaggcgtgacggcaaaggcgggaggagggaccagcgcggcagcggcttctctcatccgtgcacggagccccgcatggccgcggcgggcagtaagctgcagcctggcgcggggcaccggagccccgaagtgcgggagtgactcgactccgcctccgcctctaccccgccgcaggagccgtgcgcgccgcggccatcttggaaacggcgaccggccgagcgccggggctacggtgggcggcgagggacaagcctcccagatcggcggcggtggcggcggcggcggcgggcgccggaatgcgaccggac

SEQ ID NO: 4385 - DNA, 281 bp, Homo Sapiens
  misc_feature (252)..(252): n is a, c, g, or t
ccctccctctgagacatccgaattgtgggcgagcagtgtgatttctctgtggctggccgtgcacactcacccccagagcacttatgttaacttggaactgtttagagagaatttttttgctttcttgggtcacatggctcagtagccattagccatagcttgattttgcaaactgggcaagggcctgggcacacctttccttccaccaggggcatgggtgtttctgggaagagtttgaagctagatccgggnatgccaaaaaagaagcttttttttttttc

SEQ ID NO: 4386 - DNA, 262 bp, Homo Sapiens
  misc_feature (52)..(52): n is a, c, g, or t
tggatggttgcagtgagccgagatcgcgacactgtactccagcctgggcgancagagtgaaactcccatctcaaaaaacaagcaaacaagacttcgcagtgcatagccctgtaacatgcacatattggatgaatgtacttgcggtggcatatgtcatgttgttaccaaagacacacaattcaaatgatgttatttttggcacaagttatgtttcaaggaaggacaaagccacccacttacattccatctcacactgcacaca

SEQ ID NO: 4387 - DNA, 3926 bp, Homo Sapiens
gacagtatcaacaacctgcaggctgagttaaacaagatttttgccctgcggaagcaactggagcaggatgtgctttcatatcagaatttgcggaagaccttggaggagcagatcagcgaaattcggaggcgggaagaagaatcattttcactttatagtgatcaaacatcttatctaagtatttgccttgaagaaaacaatcggtttcaagtggaacatttttctcaagaagaacttaagaaaaaggtcagtgaccttatacagctagtgaaggagctgtatacagacaaccagcacctgaagaaaaccatttttgatctctcctgcatgggtttccagggaaatgggtttccagatagacttgcgtctacagaacaaacagagattatgaaagacctttccaaaggaggctgcaaaaatggatacttaaggcacacggagtctaagatttcagattgtgatggggcccacgcacctggctgcctagaagaaggtgcattcataaacctgcttgcccctttgttcaatgagaaggccacattattactggaatccaggccagaccttctgaaagtggtacgggaactgcttctgggacaactattcttgacagagcaggaagtttctggagaacaccttgatggtaaaactgagaagacacctaagcaaaaaggtgaacttgtacattttgtccaaaccaactcattttccaagccacatgatgaactgaagttgtcttgtgaggcccagctagtaaaggcaggcgaagtgcccaaggtaggactgaaagatgcctcagtgcagactgtggccacggagggcgacctgctgagattcaagcatgaagcaacaagagaggcttgggaagagaaaccgatcaacactgcactcagcgcagagcatcggccagagaacctgcacggggtgcctgggtggcaggctgccctcctttccctccctggtattaccaacagagaggctaagaagtcccgcttgccaatcctaataaaaccatcccggtcattaggaaatatgtatcgtctccctgccacccaggaggtggtgacgcagctgcagagccagatcttggagctgcagggggagctgaaggagtttaaaacttgtaataagcaacttcaccaaaagttaattctggctgaagcagtgatggaggggaggccaacgcccgacaaaacgttgctgaatgctcagccccctgtgggagcagcctaccaggacagcccaggagagcagaaaggaattaaaaccacatcttctgtctggagagacaaggaaatggacagtgatcagcaaagaagctacgagattgactctgagatttgcccacctgatgaccttgccagcttgccatcatgcaaagaaaatcctgaagatgttctgagcccaacttcagtagctacttacctgagttccaagagtcagccttctgctaaagtcagtgtgatggggactgatcagtcagagagcattaatacctcaaatgagacagaatacttaaaacagaaaatccatgacttggaaactgagctggaaggctaccagaatttcatatttcagcttcaaaagcactcccagtgcagtgaggccataattacagttttgtgtgggacagaaggggcccaggatggcttgagcaagcccaagaatggttctgatggggaagaaatgaccttttcaagtttgcaccaagtgcgatacgtgaaacacgtgaaaatcctcggtccgctggccccagagatgattgacagcagggtgctggagaacctcaaacagcagctggaggaacaggaatacaagctgcagaaggagcagaatttgaacatgcaacttttcagtgagatccataatctgcagaataagttcagagatctctcacctcccagatacgattcattagttcagtcccaagccagggagctctcccttcaacggcagcagattaaggatggccatggcatctgtgtcatctcccgtcaacacatgaacaccatgattaaggcatttgaggagttgctgcaggccagtgatgtggattactgtgtggccgagggtttccaggaacagctgaatcaatgtgctgagctgctggagaaattggaaaagctatttctcaacggaaaatcagttggagtggaaatgaacacccagaatgaactgatggagaggattgaggaagacaacttaacctaccaacatcttctgcctgaatctcctgagccttcagcctctcatgcgctctctgattatgaaacatctgaaaagtccttcttctcacgagaccagaagcaagataatgagacagagaagacttcagttatggtgaacagtttttctcaagacttactaatggaacacatacaggaaattcgaactttgagaaagcgtttagaagaatctattaaaacaaatgagaagctacggaaacagttggaacggcaaggatctgaatttgttcaaggttctacaagcatttttgcttctggttcagagcttcatagttctctaacatcagaaattcatttcttgaggaagcagaaccaggccctcaatgcaatgctcattaaaggatccagagataaacagaaggagaatgacaaattacgagagtccctctccaggaagaccgtgagcctggagcaccttcagcgggagtatgccagcgtgaaggaagaaaatgaaaggctgcagaaagaaggcagcgagaaggagagacacaaccagcagctgatccaggaggtccgctgcagcggccaggagctgagcagggtgcaggaggagctgaagttgaggcagcagctgctctcacagaatgacaagctattgcagtctctccgagtggagctgaaggcgtatgagaagctggatgaagagcacaggagactgagagaggcgtcgggagaaggctggaaggggcaggatcctttcagggacctgcacagcctcctgatggagatccaggctctgcgcttgcaactagaaaggagcatcgaaaccagcagcactctgcagagcaggctcaaggaacagctggcaaggggggcagagaaggcacaggaaggagccctcactctggctgtccaagccgtgtccatccctgaggtgccccttcagcctgacaaacacgatggtgacaaatatcccatggaaagtgataattcatttgatctgtttgattcctcccaggcagtgacaccaaaatcagtttcagagactcctccactctctgggaatgacacggactccctctcctgcgacagtggcagttcggcaactagcactccgtgtgtgtcccgcctggtcactggccaccacctgtgggccagcaagaatggccgccatgtcctgggcctgattgaggactatgaggccctgctcaaacagatcagccagggacagaggctccttgctgaaatggacattcaaacccaagaggctcccagctccacaagtcaagagctgggaacaaagggtccacacccagcaccactgagcaagtttgtgagcagtgtgagcacggccaagctgaccctggaagaggcctacaggcggctgaagcttctctggagagtctcactccccgaggatggccagtgcccccttcactgtgagcagattggagaaatgaaggcagaggtcaccaaactacataaaaaattgtttgaacaagaaaagaagttgcaaaacaccatgaagcttttgcagctgagcaagcgccaggaaaaagtcatctttgatcaattggtcgtaacccacaaaatccttcggaaggccagaggaaacctggagcttaggcctgggggagcccatccaggaacatgcagtcccagcagaccaggctcctgagaagaactttcagccaataaagcttgtgcttcccccacaaaaaaaaaaaaaaaaaaaaaaaa

SEQ ID NO: 4388 - DNA, 3619 bp, Homo Sapiens
attagggataggaagagattttcacatggcagactttagaattcttcactttagccagtaaagtatctccttttgatcttagtattctgtgtattttaacttttctgagttgtgcatgtttataagaaaaatcagcacaaagggtttaagttaaagcctttttactgaaatttgaaagaaacagaagaaaatatcaaagttctttgtattttgagaggattaaatatgatttacaaaagttacatggagggctctctaaaacattaaattaattattttttgttgaaaagtcttactttaggcatcattttattcctcagcaactagctgtgaagcctttactgtgctgtatgccagtcactctgctagattgtggagattaccagtgttcccgtcttctccgagcttagagttggatggggaataaagacaggtaaacagatagctacaatattgtactgtgaatgcttatgctggaggaagtacagggaactattggagcacctaagaggagcacctaccttgaatttaggggttagcagaggcatcctgaaaaaagtcaaagctaagccacaatctataagcagtttaggaattagcagaacgtgcatggtgaggagatgccaaaggcaagaagagaagagtattccaaacaggagggattccaaagagagaagagtatcccaaacaacatttgcacaaacctgatggggagagagaatgtggggtggggatggatgatgagactgaagaagaaagccaggtctagataatcagtggccttgtacaccatgttaaagagtgtagacttgattctgttgtaaacaggaaagcagcacaattcatatgaatattttagaagactcccactggaatatggagaataaagttggagatgactaatcctggaagcagggagaacatttttgaggaagttgcactattttggtgaaaatgatggtcataaacatgaagaattgtaggtgatcatgacctctctctaattttccagaagggttttggaagatataacataggaacattgacaggactgacgaaaggagatgaaatacaccatataaattgtcaaacacaaggccagatgtctaattattttgcttatgtgttgaaattacaaatttttcatcaggaaaccaaaaactacaaaacttagttttcccaagtcccagaattctatctgtccaaacaatctgtaccactccacctatatccctacctttgcatgtctgtccaacctcaaagtccaggtctatacacacgggtaagactagagcagttcaagtttcagaaaatgagaaagaggaactgagttgtgctgaacccatacaaaataaacacattctttgtatagattcttggaacctcgagaggaattcacctaactcataggtatttgatggtatgaatccatggctgggctcggcttttaaaaagccttatctgggattccttctatggaaccaagttccatcaaagcccatttaaaagcctacattaaaaacaaaattcttgctgcattgtatacaaataatgatgtcatgatcaaataatcagatgccattatcaagtggaattacaaaatggtatacccactccaaaaaaaaaaaaaaagctaaattctcagtagaacattgtgacttcatgagccctccacagccttggagctgaggagggagcactggtgagcagtaggttgaagagaaaacttggcgcttaataatctatccatgttttttcatctaaaagagccttctttttggattaccttattcaatttccatcaaggaaattgttagttccactaaccagacagcagctgggaaggcagaagcttactgtatgtacatggtagctgtgggaaggaggtttctttctccagttcctcactggccatacaccagtcccttgttagttatgcctggtcatagacccccgttgctatcatctcatatttaagtctttggcttgtgaatttatctattctttcagcttcagcactgcagagtgctgggactttgctaacttccatttcttgctggcttagcacattcctcataggcccagctcttttctcatctggccctgctgtggagtcaccttgccccttcaggagagccatggcttaccactgcctgctaagcctccactcagctgccaccacactaaatccaagcttctctaagatgttgcagactttacaggcaagcataaaaggcttgatcttcctggacttccctttacttgtctgaatctcacctccttcaactttcagtctcagaatgtaggcatttgtcctctttgccctacatcttccttcttctgaatcatgaaagtctctcacttcctcttgctatgtgctggaggcttctgtcaggttttagaatgagttctcatctagtcctagtagcttttgatgcttaagtccaccttttaaggatacctttgagatttagaccatgtttttcgcttgagaaagccctaatctccagacttgcctttctgtggatttcaaagaccaactgaggaagtcaaaagctgaatgttgactttctttgaacatttccgctataacaattccaattctcctcagagcaatatgcctgcctccaactgaccaggagaaaggtccagtgccaaagagaaaaacacaaagattaattatttcagttgagcacatactttcaaagtggtttgggtattcatatgaggttttctgtcaagagggtgagactcttcatctatccatgtgtgcctgacagttctcctggcactggctggtaacagatgcaaaactgtaaaaattaagtgatcatgtattttaacgatatcatcacatacttattttctatgtaatgttttaaatttcccctaacatactttgactgttttgcacatggtagatattcacatttttttgtgttgaagttgatgcaatcttcaaagttatctaccccattgcttattagtaaaactagtgttaatacttggcaagagatgcagggaatctttctcatgactcacgccctatttagttattaatgctactaccctattttgagtaagtagtaggtccctaagtacattgtccagagttatactgttaaagatatttagccccatatacttcttgaatctaaagtcatacaccttgctcctcatttctgagtgggaaagacatttgagagtatgttgacaattgttctgaaggtttttgccgagaaggtgaaactgtcctttcatctgtgtatgcctggggctgggtccctggcagtgatggggtgacaatgcaaagctgtaaaaactaggtgctagtgggcacctaatatcatcatcatatacttattttcaagctaatatgcaaaatcccatctctgtttttaaactaagtgtagatttcagagaaaatattttgtggttcacataagaaaacagtctactcagcttgacaagtgttttatgttaaattggctggtggtttgaaatgaatcatcttcacataatgttttctttaaaaatattgtgaatttaactctaattcttgttattctgtgtgataataaagaataaactaatttctataaaaaaaaaaaaaaaaagg

SEQ ID NO: 4389 - DNA, 1931 bp, Homo Sapiens
ccatcctaatacgactcactatagggctcgagcggccgcccgggcaggtgttggctggaggggctgctgctgggaacacctggagtctccgcgggcagatctcatattttggattctggatatattataatgagtgacactttgacagcggatgtcattggtcgaagagttgaagttaatggagaacatgcaacagtacgttttgctggtgttgtccctcccgtggcaggaccctggttaggagtagaatgggacaatcccgagagaggaaagcatgatgggagccacgaagggactgtgtattttaaatgcaggcacccgacaggaggatcctttattcgtccgaacaaggtaaattttggaacagactttcttactgcaattaagaaccgctatgtgttagaagatggaccagaggaagatagaaaagagcaaattgttacaattggaaataaacctgtggagactatcggttttgactctattatgaaacagcaaagtcagctgagcaagttgcaagaagtttctctgaggaactgtgcagtaagttgtgctggtgaaaaaggaggagttgctgaagcatgtcctaatatcagaaaggtagatttgtcaaaaaacctgttgtcatcatgggatgaagtgatacacattgctgatcagctcagacacctggaagtccttaatgtcagtgaaaataaactaaaatttccctccggttcagtattaactggaacgctttctgtactgaaggttttagtcctcaatcaaacaggaataacgtgggctgaggtgctgcggtgtgtcgcggggtgcccaggcctggaggaactctaccttgagtctaacaacattttcatttccgaaaggccaacagatgttctccagacagtcaagttattagatctttcctctaatcaattaattgatgaaaatcagctgtatctgatagcccacctgcccaggttagaacaattaatcctctctgacactggaatttcttctctacattttccggatgctggaattgggtgcaaaacgtccatgttcccatccttgaagtacctggtagtaaacgacaatcagatatcacaatggtcgtttttcaatgagctagagaagttaccaagtctacgggctttgtcctgcctaagaaaccccctgaccaaagaggacaaagaagcagagacggcgcgactactcattatcgccagcattggccagctgaagacgctgaacaaatgtgagattctccccgaggagaggcggagagctgagcttgactaccgaaaagcttttggaaatgagtggaaacaggctggtggacataaggatccggaaaaaaacagactcagcgaagaattcctcacagcccatcccagataccagttcctctgcctgaaatatggtgcacctgaagattgggaactcaaaacacagcaaccacttatgctgaaaaaccagctactaacactgaagataaaataccctcatcaacttgatcagaaagtcctggagaaacaactgccgggctccatgacaattcaaaaggtgaagggattgctgtcacgtcttctcaaagttcctgtgtcagaccttctgttgtcctatgaaagtcccaaaaagccgggcagagaaatcgagctggaaaatgacctaaagtcattacagttttattctgtggaaaatggagattgtctattagtgcgatggtgacaaccaactaataaaatttaaagaccacactgcttatcgtgtctggggttcaccggaaataaatgattcactggaacaattctactgtcaaaacaaagggggtttacaacttgtcctaagtataacaagggatgtatttttagttgggaagtgaccatttctaggcttatacataatagcaataataaaggctttgaacctacagaaaaaaaaaaaaa

SEQ ID NO: 4390 - DNA, 250 bp, Homo Sapiens
ttttttttttttttttgtttttaccatatattccaggggttatgtgtgtggaggggttgtttttacatttatacagtttacattgcttgacccataagtaacacttgtaagattaatagggccatagttttaaagagtacttacatagccccaccatgcatacagagccttttttaatattggaaaaaaaaatcaaaaaaagttgaattttccatcactaggcaatgtaaatttgaccatctacatttat

SEQ ID NO: 4391 - DNA, 421 bp, Homo Sapiens
  misc_feature (372)..(372): n is a, c, g, or t
tcacaaagaccgggactgatggaaactccttgctattaaactttttttcttgaggaattttgcttttcaagtgcatatacactattaatattttttacccaagagagcattctaagctaatttatgcagtgtgactgtattaagcattaagcttccttcagagctggcctatcggagatgctactgccctctctacagatgtgtctgaaatgcctgcccaaggatggcccttagccacgttaacagctttatagcccatcctcattgcttactgccacccctcagctggggtccaaggcagtactattcagtttattcaccagacctgcctccagacatctacttctttcaaaaattagtggttttccatcnaggagcatgttccagagcatttcccagagatgtcccaaagaacactgtc

SEQ ID NO: 4392 - DNA, 561 bp, Homo Sapiens
  misc_feature (279)..(279): n is a, c, g, or t
  misc_feature (322)..(322): n is a, c, g, or t
  misc_feature (447)..(447): n is a, c, g, or t
  misc_feature (488)..(488): n is a, c, g, or t
  misc_feature (532)..(532): n is a, c, g, or t
  misc_feature (550)..(550): n is a, c, g, or t
cggcatgaggaaagaaaagatccctttgctatgagctcgctgtatattgataagtgtaagaattgtgttgcatgaataaccgctttgggctggatttgaagtattttgatgttgtgttttgcaaatattgaagttacaataatggcaacagaaaaggaacagatacacagctttacacttagcagaatgttacatttaaaatctgacaaggcgccaagatggtgactgtctcctctaaaccacgaaagagtaagatttgtgcaaccctcctcctcttcnacctccttcaggagaattaaatgaatcaagactttggaaagancggggaagagccgggacttgggcagtacttgaaacaggaggaatacaccagcctaaatgtacagactttgtagccgagcccactcgatcggtctgtgccttcacgtgaccaccatctgtggcctncctcgctccatccaaatttgtgtagggctgctcccttgganctatgcctaaaatataagctacaccagaggcctggaaactggtngtccaagtaacaaggccncactggttttt

SEQ ID NO: 4393 - DNA, 406 bp, Homo Sapiens
tcttataaatacagtgacgctccagcctctggaagcctctgtcagctcagcctccaaaggagccagcgtctccccagttcctgaaatcctgggtgttgcctgccagtcgccatgagaacttcctaccttctgctgtttactctctgcttacttttgtctgagatggcctcaggtggtaactttctcacaggccttggccacagatctgatcattacaattgcgtcagcagtggagggcaatgtctctattctgcctgcccgatctttaccaaaattcaaggcacctgttacagagggaaggccaagtgctgcaagtgagctgggagtgaccagaagaaatgacgcagaagtgaaatgaactttttataagcattcttttaataaaggaaaattgcttttgaagtat

SEQ ID NO: 4394 - DNA, 2099 bp, Homo Sapiens
gcgtgcaacccgacgatagagagctcggaggtgatccacaaatccaagcacccagagatccattgggatccttggcagatggacatcagtgtcatttactaaccagcaggatggagacgacgcccttgaattctcagaagcagctatcagcgtgtgaagatggagaagattgtcaggaaaacggagttctacagaaggttgttcccaccccaggggacaaagtggagtccgggcaaatatccaatgggtactcagcagttccaagtcctggtgcgggagatgacacacggcactctatcccagcgaccaccaccaccctagtggctgagcttcatcaaggggaacgggagacctggggcaagaaggtggatttccttctctcagtgattggctatgctgtggacctgggcaatgtctggcgcttcccctacatatgttaccagaatggagggggggcattcctcctcccctacaccatcatggccatttttgggggaatcccgctcttttacatggagctcgcactgggacagtaccaccgaaatggatgcatttcaatatggaggaaaatctgcccgattttcaaagggattggttatgccatctgcatcattgccttttacattgcttcctactacaacaccatcatggcctgggcgctatactacctcatctcctccttcacggaccagctgccctggaccagctgcaagaactcctggaacactggcaactgcaccaattacttctccgaggacaacatcacctggaccctccattccacgtcccctgctgaagaattttacacgcgccacgtcctgcagatccaccggtctaaggggctccaggacctggggggcatcagctggcagctggccctctgcatcatgctgatcttcactgttatctacttcagcatctggaaaggcgtcaagacctctggcaaggtggtgtgggtgacagccaccttcccttatatcatcctttctgtcctgctggtgaggggtgccaccctccctggagcctggaggggtgttctcttctacttgaaacccaattggcagaaactcctggagacaggggtgtggatagatgcagccgctcagatcttcttctctcttggtccgggctttggggtcctgctggcttttgctagctacaacaagttcaacaacaactgctaccaagatgccctggtgaccagcgtggtgaactgcatgacgagcttcgtttcgggatttgtcatcttcacagtgctcggttacatggctgagatgaggaatgaagatgtgtctgaggtggccaaagacgcaggtcccagcctcctcttcatcacgtatgcagaagcgatagccaacatgccagcgtccactttctttgccatcatcttctttctgatgttaatcacgctgggcttggacagcacgtttgcaggcttggagggggtgatcacggctgtgctggatgagttcccacacgtctgggccaagcgccgggagcggttcgtgctcgccgtggtcatcacctgcttctttggatccctggtcaccctgacttttggaggggcctacgtggtgaagctgctggaggagtatgccacggggcccgcagtgctcactgtcgcgctgatcgaagcagtcgctgtgtcttggttctatggcatcactcagttctgcagggacgtgaaggaaatgctcggcttcagcccggggtggttctggaggatctgctgggtggccatcagccctctgtttctcctgttcatcatttgcagttttctgatgagcccgccacaactacgacttttccaatataattatccttactggagtatcatcttgggttactgcataggaacctcatctttcatttgcatccccacatatatagcttatcggttgatcatcactccagggacatttaaagagcgtattattaaaagtattaccccggagacaccaacagaaattccttgtggggacatccgcttgaatgctgtgtaacacactcaccgagaggaaaaaggcttctccacaacctcctcctccagttctgaggaggcacgcctgccttctcccctccgagtgaatgagtttgcc

SEQ ID NO: 4395 - DNA, 2522 bp, Homo Sapiens
ggatccgcggtggcgcgaccctctgtccccgcctcggggcggagcccaggtcccagcctgcggagcgcgagacacgccgaaatccgcccgaggctacctgtgcgactccagccgccctgcaccggaatctggggagacccgccccccgccccaccggtctgcggccctccgccccagcgcaggtgcaggtgcggcttctctgcccctttcaccccaggcgcatccgccgcggcggccatggcgcgaggagacgccccgcgggacagctaccacctggtcgggatcagcttcttcatcctggggctgggcaccctccttccctggaacttcttcatcaccgccatcccgtacttccaggcgcgactggccggggccggcaacagcacagccaggatcctgagcaccaaccacacgggtcccgaggatgccttcaacttcaacaattgggtgacgctgctgtcccagctgcccctgctgctcttcaccctcctcaactccttcctgtaccagtgcgtcccggagacggtgcgcattctgggcagcctgctggccatactgctgctctttgccctgacagcagcgctggtcaaggtggacatgagccccggacccttcttctccatcaccatggcctccgtctgcttcatcaactccttcagtgcagtcctacagggcagcctcttcgggcagctgggcaccatgccctccacctacagcaccctcttcctcagcggccagggcctggctgggatctttgctgcccttgccatgctcctgtccatggccagtggcgtggacgccgagacctctgccctggggtactttatcacgccctgtgtgggcatcctcatgtccatcgtgtgttacctgagcctgcctcacctgaagtttgcccgctactacctggccaataaatcatcccaggcccaagctcaggagctggagaccaaagctgagctcctccagtctgatgagaacgggattcccagtagtccccagaaagtagctctgaccctggatcttgacctggagaaggagccggaatcagagccagatgagccccagaagccaggaaaaccttcagtcttcactgtcttccagaagatctggctgacagcgctgtgccttgtgttggtcttcacagtcaccctgtccgtcttccccgccatcacagccatggtgaccagctccaccagtcctgggaagtggagtcagttcttcaaccccatctgctgcttcctcctcttcaacatcatggactggctgggacggagcctgacctcttacttcctgtggccagacgaggacagccggctgctgcccctgctggtctgcctgcggttcctgttcgtgcccctcttcatgctgtgccacgtgccccagaggtcccggctgcccatcctcttcccacaggatgcctacttcatcaccttcatgctgctctttgccgtttctaatggctacctggtgtccctcaccatgtgcctggcgcccaggcaggtgctgccacacgagagggaggtggccggcgccctcatgaccttcttcctggccctgggactttcctgtggagcctccctctccttcctcttcaaggcgctgctctgaagtggcccctccaggctctttggcagcctcttctcgacgtctccttccggagctgagatccagcccagggcgaatggcgagcttggctcaggcctctgcggggtggaggcccctgggcctgaggctgccagcagcgggcaggagctgctcttcatccacttggagtgctgcggggaagaaatcaccaccggtcattctaaccctcacccaggaatgggggtgactcgcacaagacctcatggaaagggtgatgactagggaaaagagggtgcagggcacggctgctccccaccaccaggtctgcatttgttcatcatcatcaggagcagaggtgaccagagggttcagagtgggaggcagggccagcccaggccaggagcgcctcatcttcccaggcctcagccacccagggtaaaaggtgccagggaagttgtgggcacctgagaggaggaacagatgtggaggacctgagggtgctcaaagggccaggctcagcctcaagcagtgttttcattgccaacacttactgtacccactccgcagagccccgctgggcctgggccccagggccacagctagcctgcatgtgtgtactgcactttacagtttgcaaagctcttccatacccactctctcaccgaagcctaattgaggctcttggaaggagtcaggcaaggattgtgcttcccccattatacaggtgacaaaactgagtcctggggaaagtgactggtccgtggtagagccgggacccaatcccctctctctcctccctgttggtgctgttcttcctgcccaacacctgtttctcttttcctcaaggggtttggggcaggagcctgggcacttactccccgtttttgctgtttctccttctgaccctgctcttgggtctaataaccccatttatttgt

SEQ ID NO: 4396 - DNA, 421 bp, Homo Sapiens
  misc_feature (262)..(262): n is a, c, g, or t
  misc_feature (355)..(355): n is a, c, g, or t
  misc_feature (376)..(377): n is a, c, g, or t
ttttgagactgcatagggctcggcgtggagaggagaggaaaaggggtcctgcaatgtcccccagcagcctgtcattgtgtgtgaaactcctagcctgagagccccacctctggtcagcactagtgttgggagacttctgggagggattgtgactttcagctgggtaactggtgtctggctgaggccatcttgagcgcagtgaggaaggatctccagcctgagtgtgccgtgggccccccgaatacataggggagccctgcanagcagttttgaaatgagtagtacatctcacgaagaaagtctgcaagaggtcgaggtgcatgagaaagatctggccctgctgccctggcgcccncttgtgccctttctgctgtgnngggtctcattgcgtcagagtgcttagtaacatcagtggcgaggg

SEQ ID NO: 4397 - DNA, 280 bp, Homo Sapiens
ttttttttttttttttttttggacatgaaaccaagatttattaaaatactcttagcatatttacaattgaaagccatgaatgcaattctttgtaaattccaaaaaatataattctatcttttaaaacaaattaacagaggtatcaacagattaggataaatataatctatcacagagatagaattttttgaatagacaattgacgtttttctaatcaatatatattatgtacaaaaatacacttgatattgtgaccaagtactgtcaagggggaaaaaaa

SEQ ID NO: 4398 - DNA, 180 bp, Homo Sapiens
tttttttttttttttttttttttttattgttcaagcggaaaacaagctgcttttattacagtatgatgtcatgactcatttgtaacagatccagcctcagggacagccctgtaaggcagcaagtggggctggctccaaatgggtatgagtctcaaaatctttggtaaggcaaaactgaac

SEQ ID NO: 4399 - DNA, 571 bp, Homo Sapiens
  misc_feature (498)..(498): n is a, c, g, or t
  misc_feature (529)..(529): n is a, c, g, or t
gcaacagaaacaagttaaggaaacaaaaatacttatatatacacagaacaaaaataatgttctttttatgcaaatcccctgtgaaaataaaattttcaatgtttttttggtcttaacgcttcattttaacttagtaaacccaaatttaggatttacattggcaaatttttcagtgatttttaacgtgttacatttagtaaaccatagattttttaaaaactacattttgtaaggccacacataagtgaaaatacggaaggctttggaaacccccagatgaacttctatacatgtgaaaacacaagtctttgagtgtgcactaaaagtgtcacactcccaaaaaactccacaaaacattttgctaaaaagatatgactgcttgaaatagtctctctcccatgggggaaccacatttcccctttctggcccatacttgctactggctaccggattttgggagggaaattttttccaggaaggaccaaagggtcatatttngagggcaaggctaaaaaccttaattatacangggctactttactgtggtcggtaggctaaggaaaaattattt

SEQ ID NO: 4400 - DNA, 644 bp, Homo Sapiens
tttttttttttttttttggacatctcagatgtgactcttgctgccaggctagaatttaggctatgtgataattctcagctgtcctacaatgcctgcttcttgaaagaagtcggcactttctagaatagctaaataacctgggcttattttaaagaactatttgtagctcagattggttttcctatggctaaaataagtgcttcttgtgaaaattaaataaaacagttaattcaaagccttgatatatgttaccactaacaatcatactaaatatattttgaagtacaaagtttgacatgctctagaatgacaacccaaatgtgtcttacaaaacacgttcctaacaaggtatgctttacactaccaatgcagaaactgtgtttgttttcctctctaaaaaacaggatgtgtcaaaatgataaatattctaagattaaagtggcaatgctcagattcccaatcttaccagttctgggattcactctgccctcctagaagactgaggggaatatgctgtacttacatgtccatggaaccttccttcctcctagaatcccaagcgttatgcagattcattatagcacaacattcccgtcaggaagagaggtttgacacatgattaaggggaaacttgtggaaagaga

SEQ ID NO: 4401 - DNA, 506 bp, Homo Sapiens
tttttttttttcctatgagcaggttttgcatttttctccttgggttcttcactcatctttcctttaaatcaggtgagtttataaaagacagatcaccgccggtattccaacatccaaaaccacggcaaagagtcaaagcattgagaccaaagtccatttacgggtgctccccaggcaaagcagccgctgcttaaacccagcccctgctgctgtcagagagacgcgggctgctaatgtagccctgttcagctttcctcaggaagaaactgggtgttctctatatcaaacagtcaattattcttctaaagaaaatcaatattttagcctttcatttttaactaatcgttaccctgagataaggtcctgacaagactttgttgcttgttcctccacagtgatttgagcctggaaatggtgagagagagagaaagagagagagagacacacacacacaccctcacacacacagaaataagctacagactgctgacaagtctccgaagcct

SEQ ID NO: 4402 - DNA, 451 bp, Homo Sapiens
ttttttttttttttttttttttttttgggctttgaactgagtttatttaagatgcgtggagcgcatgagtacagggattgccattcgggaatgaaaacaacttctggaggtcttggcactcagggagggtaattactttcagaccagccctgttttcaagtgtaagtgatttgcggggagatttaaagttaaaaccataaacatttgctaaacaaaggaaagcatatcacacatctttcctcaggaaatggttttaaattacatccaaggtgtgtgctggccgcctccacttaaatccacaacaaatacaggggcttgccttaggaaatgtcgacctggcatcaaacaggtgcagacaaaataaatcacaaattgactcgcggcagcaaagaagtggggattttgtcctggctttgaaggagagagacatgaacccactcatgtttatctt

SEQ ID NO: 4403 - DNA, 1998 bp, Homo Sapiens
ggggtgggagggggagggggacctccgcacgagacccagcggcccgggttggagcgtccagccctgcaacggatcatggtgcagcaggcggagagcttggaagcggagagcaacctgccccgggaggcgctggacacggaggagggcgaattcatggcttgcagcccggtggccctggacgagagcgacccagactggtgcaagacggcgtcgggccacatcaagcggccgatgaacgcgttcatggtatggtccaagatcgaacgcaggaagatcatggagcagtctccggacatgcacaacgccgagatctccaagaggctgggcaagcgctggaaaatgctgaaggacagcgagaagatcccgttcatccgggaggcggagcggctgcggctcaagcacatggccgactaccccgactacaagtaccggccccggaaaaagcccaaaatggacccctcggccaagcccagcgccagccagagcccagagaagagcgcggccggcggcggcggcgggagcgcgggcggaggcgcgggcggtgccaagacctccaagggctccagcaagaaatgcggcaagctcaaggcccccgcggccgcgggcgccaaggcgggcgcgggcaaggcggcccagtccggggactacgggggcgcgggcgacgactacgtgctgggcagcctgcgcgtgagcggctcgggcggcggcggcgcgggcaagacggtcaagtgcgtgtttctggatgaggacgacgacgacgacgacgacgacgacgagctgcagctgcagatcaaacaggagccggacgaggaggacgaggaaccaccgcaccagcagctcctgcagccgccggggcagcagccgtcgcagctgctgagacgctacaacgtcgccaaagtgcccgccagccctacgctgagcagctcggcggagtcccccgagggagcgagcctctacgacgaggtgcgggccggcgcgacctcgggcgccgggggcggcagccgcctctactacagcttcaagaacatcaccaagcagcacccgccgccgctcgcgcagcccgcgctgtcgcccgcgtcctcgcgctcggtgtccacctcctcgtccagcagcagcggcagcagcagcggcagcagcggcgaggacgccgacgacctgatgttcgacctgagcttgaatttctctcaaagcgcgcacagcgccagcgagcagcagctggggggcggcgcggcggccgggaacctgtccctgtcgctggtggataaggatttggattcgttcagcgagggcagcctgggctcccacttcgagttccccgactactgcacgccggagctgagcgagatgatcgcgggggactggctggaggcgaacttctccgacctggtgttcacatattgaaaggcgcccgctgctcgctctttctctcggagggtgcagagctgggttccttgggaggaagttgtagtggtgatgatgatgatgatgataatgatgatgatgatggtggtgttgatggtggcggtggtagggtggaggggagagaagaagatgctgatgatattgataagatgtcgtgacgcaaagaaattggaaaacatgatgaaaattttggtggagttaaagtgaaatgagtagtttttaaacatttttcctgtcctttttttgtcccccctcccttcctttatcgtgtctcaaggtagttgcatacctagtctggagttgtgattattttcccaaaaaatgtgtttttgtaattactatttctttttcctgaaattcgtgattgcaacaaaggcagagggggcggcgcggcggaggggaggtaggacccgctccggaaggcgctgtttgaagcttgtcggtctttgaagtctggaagacgtctgcagaggacccttttggcagcacaactgttactctagggagttggtggagatatttttttttcttaagagaacttaaagaactggtgatttttttttaacaaaaaaaggg

SEQ ID NO: 4404 - DNA, 401 bp, Homo Sapiens
atcctaagtgaaaaaatcttttatgtataaaaacttgagtaactattatttaactttggactgttttatagaatttgcatagagaataaattggcacatatttcataattacctcagttatgaaccagccttcatcagccactaaagtcaaaggagagacaaactttcctttcttgtaatagaacctgcttgggatggctcctttctcgtagacagtcatgtgttccactgtgctcagtttgtttatatctcaaagtgtttcccaggggccggccaaaggctcacaacaggcccgcggtccttcacttgctgcaggtcattcaggctgatgtacttattcagctcaatcacttttccatccagaaaatgtcggtcattccgtgatccgagaaaataatgac

SEQ ID NO: 4405 - DNA, 447 bp, Homo Sapiens
ttttgtctttgagactgtttatttcctcgttactattgtggtggtaaaaaaaataaaatatgcttattaaacgtgtgttaaaacaatacacacctactcgcaaacgtagcaagagaggttgctttaagaagcgggaatcttcagcgtcacgtgaccgccggtctctacagtctgttcacactggccaatcaagagccaggaagcctcctggagggccggaaactttccaaggcgcccgccgactggctgtattggggaaggcggggccggggccccgggagagggaatgagtgtgagctcgtgagtgggcgccgccgccaccgcccccgccgccgtcgtctcggtagcagccttcgccacgccggggtcttcaggtgagcaggccttgctctggtccaaggactccccattcccgacgccgactgcttactcaccagtcttggagcc

SEQ ID NO: 4406 - DNA, 348 bp, Homo Sapiens
gcggccgcgcgaattcgctcaggtgacctcaaagcagaagctctgaattcacctctcatctgacgactgacagctgctgccaccgccagcctctgtcccttgcccaggcctgtcacacggctgcctctcagcaggggcagtagaatgaaagagggcatgtctaataacagcaccactagcatctcccaagccaggaaagctgtggagcagctaaagatggaagcctgtatggacagggtcaaggtctcccaggcagccgcggacctcctggcctactgtgaagctcacgtgcgggaagatcctctcatcattccagtgcctgcatcagaaaacccctttcgcgagaaa

SEQ ID NO: 4407 - DNA, 441 bp, Homo Sapiens
tttaactatagaaaataattctttatagggtagttttgtaacaggattttaccgtagcaaatgtggaataaagaaaaggtttaggtttaggaacacccattagggttttttcgttacttcaacataaagtaccctttaatacacgaagtacatcctttaaacagccaagagaaaggaggttgtacaatagagacgtcatgtttgctttctaaacatttgtttgactcctgacacaatggttttgctttggggtaacatgaaggttgccaaacttcaaagtaaaaaaaaagatattttctgacaaagcaaatgttcagttcagagttgcctgatgctgtcagcattccaagcaaactcaataggaagaggtgaagtcttcttcactgtataaccatcggcgtggctgcggtctactgcttcacattccattctccagggaaa

SEQ ID NO: 4408 - DNA, 379 bp, Homo Sapiens
  misc_feature (371)..(371): n is a, c, g, or t
taatcaagagcacactgatttggatagacacagtacgagaggtagaagtacacagaagcaagaaagttacagtgagaggacataactgtctgaagccagctctgattctgcatgaagaaaacaactctgtacgtatcatggatgtaatttgcaaaacagaactttcctgaacccattgccattcaagctcaagagtagctagttgctccaagtggatgggatatgactggagtaagtcagactgaatctgggagaacatcctacttactatctgccatcatccaccgtcaattatcagccttccctaagagggaggatggttctatctgcttggtgctggttgccaactccaggaactttgtccatagggntaagccca

SEQ ID NO: 4409 - DNA, 576 bp, Homo Sapiens
gcggccgccgcctcccaccgctcccgcgcccgctcccgcccccggcgcgtctcctccgggcccgcgccgcggcgggctcagtcctcagcggggcgcgtggcgagcggactcgactcggcaccgctgtgcaccatggcccgggccctgtgccgcctcccgcggcgcggcctctggctgctcctggcccatcacctcttcatgaccactgcctgccaggaggctaactacggtgccctcctccgggagctctgcctcacccagttccaggtagacatggaggccgtcggggagacgctgtggtgtgactggggcaggaccatcaggagctacagggagctggccgactgcacctggcacatggcggagaagctgggctgcttctggcccaatgcagaggtggacaggttcttcctggcagtgcatggccgctacttcaggagctgccccatctcaggcagggccgtgcgggacccgcccggcagcatcctctaccccttcatcgtggtccccatcacggtgaccctgctggtgacggcactggtggtctggcagagcaagcgcactgagggcattgtg

SEQ ID NO: 4410 - DNA, 490 bp, Homo Sapiens
  misc_feature (37)..(37): n is a, c, g, or t
  misc_feature (456)..(456): n is a, c, g, or t
agtggatcccccgggctgcaggaattcggcacgaggnaagatccccagaaacctgggagttcagggctgtctgaaagctgctccacagccaatggagagaaagacagcatcacccttatctccatgaagaacatcaacatgaataatggcaaacaaagtctctcagcagagaagggttctttaaaagcaactttggggtccccatgagtccaaggatgatgcagctgccctgtgactacaaggaggaagagatggaattagtagaggcaatgaaccacatgtaaattattttattgtttcatgtctgcttctaggatcttaaaggacaattagcattggcccaggatcttgggagcaagctaccaacaggggaggactcttttcctgtatggacaggttgttgtggaaatacttgcctgcttctccccacctcctcaagagccacaggaaagaggngggtgacaagagagagagcaaggaaagtgagagg

SEQ ID NO: 4411 - DNA, 409 bp, Homo Sapiens
  misc_feature (23)..(23): n is a, c, g, or t
  misc_feature (37)..(37): n is a, c, g, or t
  misc_feature (237)..(237): n is a, c, g, or t
ggtcatggcagcggctgggcgtngctgcttagcaggnggaaagatggcggtgacgggctggttggagagttctgcggacagcccagaagactgcgctgctgcaggacgggagaaggaaggttcactatttatttcccagacggcaaggaaatggctgaagaatatgacgagaagacgagtgaactacttgtgagaaagtggcgtgtgaaaagtgccctgggagccatgggccagtgnagcttgaagtaggagacccagcgcccctaggagcagggaacctggggcctgaactcatcaaggaaagcaatgccaatcctatcttcatgcgcaaggacaccaagatgagttccagtggcggttcgaactcccctatctaagatgtctatagtgtctctgtggacagaaggag

SEQ ID NO: 4412 - DNA, 5289 bp, Homo Sapiens
ccagccccttccgtccgccgcgctccgccgctgtcctccgccggcccgcgtgggaggacgatgggtcagcgcggaaaaagtgaatgagggcggcagcggtggcggcggtagccagcgcctgactcggcgggcccggagcaccgcccgcgtcccggcccccggcaccatggacgcgccgcgcgcctcggcggccaagcccccgaccgggaggaagatgaaggctcgtgctcccccacctcctggaaaggctgccactctgcatgtgcacagtgaccagaagcccccccacgatggggccctcgggtcgcagcagaacttggttcgcatgaaggaggcgctgagggccagcaccatggacgtcaccgtggtcctgcctagcgggctggagaagaggagcgtgctcaatgggagccatgcgatgatggacctactggttgaactttgccttcagaaccacctgaatccatcccaccatgcccttgaaattcggtcttcagaaacccaacaacctttgagttttaagccaaatactttgattgggaccctgaatgtgcatactgtgtttctgaaagaaaaagttcctgaagagaaggttaagcctggtccccctaaggtgcctgagaaatctgtgcgtttggtcgtgaattacctgcggacacaaaaagctgttgtgcgtgtgagccctgaggttcctctccagaatattctcccagtcatttgtgcaaagtgtgaggtcagcccagagcacgtggttctcctcagggacaacattgccggagaggagctggagctgtccaagtccctgaacgagctcgggataaaggagctctacgcgtgggacaacagaagagaaacctttaggaaatcatcacttggcaatgatgagacagataaagagaagaaaaaatttctgggatttttcaaagttaataaaagaagcaatagtaagggctgtttaacgacccccaactccccatccatgcactcacgttctcttacgctgggtccatccctctcgctgggcagcatctcaggggtgtccgtgaagtcggagatgaagaagcgccgagcccctcctcctccaggttcagggccacctgtgcaagacaaggcatcggaaaaggtatctcttgggtcacagattgatttacagaagaagaagcggcgagcgccagctccccctccaccacagccaccaccaccgagtcccctgatccccaaccgcactgaggataaggaggagaacaggaagagcacgatggtaagcctgcccctggggtctggcagccactgcagcccggatggagccccgcaggtgctgtcagaggcggaggagaccgtgtcagttggcagctgttttgcgtcggaggacacgaccgaggactcaggagtgatgagttccccctcagacatcgtctctctggactcgcagcaggacagcatgaaatacaaagacaagtgggccacagaccaggaagactgcagtgaccaggacctcgctggaaccccagacctgggtccccagaagagccccttgtgggagaagaatggctctgagaactcacatctgagaactgaaaaagctgtcacagcctcaaatgatgaagaagacctattaattgctggagagttccgtaaaacccttgcagaacttgatgaagacctggaagaaatggaagacagctatgaaacagacaccagctccctcaccagctccatccatggtgcatccaaccactgcccacaggatgccatgatccctcacggcgacacagatgcaatcccagtaacattcataggggaagtttcagatgatcctgtggattcggggttgttttccaatagaaacaacaatgctgggtctttcgactcggagggtgttgccagcaggagagactccctggcgccacttcaagctgagcacagccagccccatgaaaaggcaagggaggaagtacctgccctgcaccccgcttcccatgacgtcggaaaaggaatccgtgtggccttatctaacatctctaaagatgggaatctaatggaaacggcgcccagggtgacttcttttgcttcgaatcttcacacagacaacctaaatgcaaaagtgaaagacaaagtgtatggctgtgctgacggggagaggactcaagccacagagagagtgaattcccaaccggtgaatgaaaaggacagcaacgataaaaacgctgccttggcaccaacatcatggcaccaacgaggccaaaacccagggaaaagctacagacttaagcacggcctcacaacgtataaaatcattcctccaaagtcagagatgcgatgttacgacagagatgtgtccctctccaccggagccattaagattgacgagctggggaacttggtgagtcctcacgccaccggcatcaggatcatttccctgtcttcgtctgtgcctgaagcagaatctcagcccattgggaaagtcagagagttctggaggtgcaactctgtggaaaaacacctgggccgaccctcagagagctctgccaggggacccccctccacccctgtgcccacgcagacgcagaatccagagagcagactccaagcagaccccaagccaatatcgccccagcagaagtctgcccaccatgagggccggaaccccctaggggaggggagaaaccagccccccaccatgggcatgggtcacgtgagggtgccagcagctcacaccacagaagtcacatttctcaagcctcagagaagaacgtccagccagtatgtggcctctgccattgccaagcgcataggagccccaaaagtccatgctgatgtggtgaggccacacggttatgccgagaagggttatgcaggcaaggcgccagtgctggctgcaccacctgtcactgtgaaagatgacaggacatccagcccacactcagagacacaaggatggaaggatggtgcccagtggccctgtgtcactcctcccaacaaccacggggaagatttggcagtgggagcccctcctaggggggaggtcattggcccacacaggaagttgtctactcaggacagacctgctgctatccacagaagctcctgtttctcactggttcagtcttcccagagggatcgtgtttctgtgggacagagctgtggtttcagtggaaagcaaagcacaagtagccaggaggccagctcagcatctgagcccagacgcgcacctgatggtacagacccaccccctccacacacatctgacactcaggcctgcagcagggagctggtcaatggctctgtgcgcgccccaggccacggcgagccttcccaccctccaggagggtctggcacagaaagccacattctcctagaaagagaggaaaagcccagtgtgttctctacagatggaaatgaaacagacagtatttggccacccagcatttttgggccgaagaaaaaattcaaacctgttgtccagagaccagtcccaaaagacacatccctgcactctgccctgatggaagccatccactctgcgggagggaaggacagactacgcaagacggcagaacacaccggggagggcaggccagcgaaactgtcctacacggaggcagagggcgaacgatctgcactgctggcagctatccgcgggcacagcggcacctgcagcctgaggaaggtggcatcctctgcttctgaggagctccagagcttccgagatgccgcactctctgctcagggctcggaaagtcctctgctagaagaccttggtcttctgtccccaccagccattcccccaccaccccctccaccctcccaggctctctctgcaccaaggacggcctccaggttcagcacgggcaccctcagcaacaccgcagacgcaaggcaagccttgatggacgccatccgctccggcacaggggctgcgagactgagaaaggtgcccttgctcgtgtgaatgaacagaggccagagaattgcagaaacccacctgtaatatgcccacaggcgtcactcaaggagtctgcatagccaggaacatcaagttttggtgttactttcttgtctacaggccaaatgcgcacagttgattttcggtgtgttcctgtataacggcttgaaaggaaaggagaagatgctgtgtcgctgcgcagctcgtgtgccaaggaaatgtgttttgcctctgaatatcttaagttgctaataaacgattcttgttggcaggttaatgggactataaatgctggagcccagcactcacacttaattatatttatgggcaaagtaaaaagaatcatgccttagactgattttggacctttgagacttttaccacatacagatggatgaaactacttactgatttaagatcttttgaattttagaaaaaacatatgaatcagatggaacaatctgaatgtgatatgctccatgatgctgtgtgttttggtagtaagaaaaaaaattgggaggcttttcaaaggtggctttgttaggtagtaaaactgctggattcttcttcctcaaatatttggggctaacacttcacagagggtcacagtccatgatctgaccaactaagcttttaaaaatcaactattaccacccagaaaacagtcctacgtgatcatgtggccagggcatgcccgagtcctgcaagggtggcgggtggctgaggtcacaccaccactggagtggatgggcagtgccccacatggacagccattccccaggctatgaagtgacataggcctcccccacggtgcctgtgtacggagcctgatgacttcactgggagccttctggaatcctgcagagggtcaaggagcagggatgttggatgcccacctgtcaagagttcagatcaaagttgcgctgagagcatcacaattttggttcagccttgacgcgtttgtccaacagctcattggctccctttgtatgatatcgtggtcttctcacatggtgcccagtcaccaatatttataatgaggtctaactacagcagtagtttttcatatatatctctaaaacattttgttatattgaaaaaagtaatagaaatcaagatgtgttgatgaaataaaatgtgtatctgagtgagaaaacaagtatggtgaggtcactttaatgtttcacagcgatctcagatctaggcctcaggtagaatggaagctgttctgcattcactgattaacgttgctaaactcttggtgaggcacgagctaccagccaattgctcttcatcacagctatctgtcttttagtgccacaaataaaagaaaatcaaatctt

SEQ ID NO: 4413 - DNA, 453 bp, Homo Sapiens
accatgagcctgactggtagagactttagcaatggggaaataccgtagactgttccatcaggacaatgctgggcctgcagtccccaggggcacccacttacttagccaaaccccagacgtttcatttaaaagcagaagtgaaaggaagaccagtgcacgcgttactttggctaaaaggaggtgagcggcactctgcccttccagagcaagcatggagcaacaggatcagagcatgaaggaagggaggctgacgcttgtgcttccctggaaccctgatagctgcctttgggtcatccttccagtatgggtacaacgtggctgctgtcaactccccagcactgctcatgcaacaatttgacaatgaggacttactatgggtaggaccggtgaattcatggaagacttccctttgaggtgctgtggtctgtaaccgtgtcagggtttccatttgga

SEQ ID NO: 4414 - DNA, 3850 bp, Homo Sapiens
ctcgtggaggctgagattgcttcacctgtggtatcagacatcacaacatggggctcaccaagcagtacctacgctatgttgctagtgcggtctttggcgttatcggcagccaaaaaggtaatattgtctttgtgacacttcgtggtgagaaaggacgttatgtggcagtaccagcttgtgaacacgttttcatctgggacttaaggaaaggagagaagattcttatccttcaggggcttaaacaagaagttacttgcttatgcccctccccagatgggctacacttagctgttgggtatgaggatgggtcgatccgaatcttcagtctcctgagtggggaaggaaatgtgaccttcaatggtcacaaagcagctatcactaccttgaagtatgatcagctaggaggcagactggcatctgggtccaaggacacagatattattgtatgggatgtgatcaatgaaagtggtctgtaccgtctaaaggggcacaaggatgccatcacacaagcattgtttctacgagaaaagaacctgctagttactagtgggaaagataccatggtgaaatggtgggaccttgatactcagcactgctttaaaacaatggttggccaccggactgaggtatgggggttggttctgttgtcagaagaaaagcgactcatcactggggcctcagacagtgaactgagggtatgggacatagcttatctgcaagagattgaagacccggaagaaccagaccccaagaaaatcaaaggatcttctcctggaatacaagatactcttgaggcagaggatggtgcctttgagacggatgaagcccctgaggatcgaatcctttcatgcagaaaagctggttccataatgcgggaaggaagagacagagttgtaaaccttgcagtcgacaagacaggcaggattcttgcttgccatggaactgactctgtgctagaattgttttgtatcctttccaaaaaggaaattcagaagaaaatggataagaagatgaagaaagctagaaagaaagcaaaattacattctagcaaaggagaggaggaagatcctgaggttaatgttgaaatgagtctgcaagatgaaatccagcgggtgactaatataaaaacttctgccaaaatcaagtcctttgacttgattcattcacctcacggagagttaaaggctgtcttcctgctgcagaacaacctggtggaattgtattcactgaatccatccttgcctactcctcagcctgtcaggacaagcagaatcactattgggggtcatcgcagtgatgtgcggactttgtcattcagctcagacaatattgctgttctttcagctgcagctgattccattaaaatatggaacaggtctacactgcagtgtattcgcacaatgacctgtgaatatgcactttgctcattctttgtacctggtgatagacaggtagtcataggaacaaagacagggaagctgcagctttatgacttggcttcagggaatctgctggagacaatagatgcacatgatggagctttatggtccatgtccctctctccagatcagcgtggctttgtgacaggtggtgcagataaatctgtcaaattctgggattttgagttagtgaaagatgaaaatagtacccaaaagagactttctgtgaagcaaacccgaactttgcaactagatgaagatgttctgtgtgtcagttactctcccaatcaaaagctattggctgtgtctttgctggactgtactgtgaaaattttctacgttgatactttaaagttttttctgtcactgtatggacacaaactgcctgttatatgcatggacatctctcatgatggagcactcatagcaactggctccgctgataggaatgtgaaaatctggggtttggactttggggactgccacaagtctctctttgcacatgatgacagtgtgatgtacctacagtttgtacccaagtctcacctcttcttcactgccggaaaagatcataagattaaacagtgggatgcagacaaatttgaacacatacagactctggagggtcatcaccaggaaatatggtgtttggctgtaagccccagtggagactatgttgtatcatcgtcccatgacaaatctctgagactttgggagagaacaagggagcctcttattcttgaggaagaaagggagatggaaagagaagcagaatatgaggagagtgtggccaaagaagaccaaccagcagttccaggagagactcaaggtgacagttactttactggaaagaaaactattgaaacagtgaaagcagctgagaggattatggaggctattgagttgtaccgagaagaaactgcaaaaatgaaggaacacaaagccatttgtaaagctgcagggaaagaggttccacttcccagcaaccccatcctaatggcttatggcagtatctcaccttcagcttatgtattagagatttttaaagggatcaagtcgagtgagctggaagaatctctacttgtgctgcctttctcttatgtcccagacattcttaaactctttaacgaattcattcagctgggctctgatgttgaacttatatgccggtgcctcttcttcctccttaggattcactttggacagatcactagcaatcaaatgcttgtgccagtgatagaaaaattaagggaaacaactatttcaaaagtcagccaagtccgggatgttatcggcttcaatatggctggtcttgattatctcaagagggaatgcgaggcaaaaagtgaagttatgttttttgctgatgctactagccacttggaagagaagaagaggaagaggaaaaagagggagaagttgattctaacgttgacttagaactgaaatgtggtatcttttttttttcaactttttcctttaaaggactcctaaactaagcacagaagagttggcgtcatcttaaaaataccaaataacagaagatcgcattgcagatgatatcaggatgtggtttccagctttgcctgatggaattccaacatgagattatgggctgggctccatttcttggacttaaaatgcattattagtttaaaaactttctgtgctctcaaagcttgagccttgcagctcaagcttgttgttccctttatattctagcagggaataaataattgttttaattaggtatttgtttcattggagttgaaattaacatttcaaaagtttttcgtatttttttatggcagatgatttgtcatttatttatattaggttttactgcctattgagacaaccaggtgcataattgattgccctttggccataaaaatgcagtgtcatggatcttagagctaaaaaggactgtaaaaattacccagaacagcgtcctcagacttaaccttctgcaagttatgtctgtatataagaagattctaattgctaactgtttatacttttctgaataaaatagttgtttctaattaaaaagtagccaagctaagatgcctggctgggcttctgaggaattaatacacttcgtgtgtgtgtgtgtgtgtgtgtgtgtgtgtgtgtgtatgtgtatgtacacatacatatatatagttgacacttgaaaaatgcaggtggtaggggcactgacccacccctacgccccgcacagtcaaaaatctgcatataacttttgattccccaaagtcttaagtactagtagcctgttattgactgggagcctgactgatgtattatatatattgtatactgtattcttaaagtaagctagagaaaagaaaatgttacttagaaaatcataaggaagagaaaatatatttactgtgtttatcaatact

SEQ ID NO: 4415 - DNA, 272 bp, Homo Sapiens
ttttttttttttttttttttttttttttttttacactggcaacacataactttattgggtttcttgagctctgtttataataataatatgaacacacaaggtttaagataaatgtttgaaaaggaaataattcattgatcccgctttacttagcatttaccatatgcaaggcaccatgttaaacactgagagatccacaacaatacataaaacaacattccaaattcatgctgagcacttttttttgaaacacaagaacaaatctgaaaagt

SEQ ID NO: 4416 - DNA, 131673 bp, Homo Sapiens
gatcatttttattagctgggtacaccctcttcctcccccccagatttctaatcttaatggaactgagagttaagaatgattttttaatgtctcgttggatttttagactgttaatgtaccgaatccttctcattattactttattgattgctcattgaccagcccccttcaaatcgtattaaccaccctctgccggtttagattaggagagtttaaaaagcacctttcattactccccccgcccactcccgccatggagttgagactaggcagcttaatgggagctctaatggggcagctaagaggagaggggccacggtccctgcagattgcattaatagctcaaagggggccaatacagaaaattagccgtaaacgagctctggagatcttcaaatgaaagagccatttatcacgctggctaccttcactccactcgtttgctctctctactgggaacaactcatttcctcttaactaaattacttcagaaatgtcagctaagcccagatagcaaacataacaagagagggagcccataatctatggggtgacataaacacaggtgaaaaattagattggttaaattttagaaggggccttaccataactggagaaagagacatagagatagagacatgcatcatttatgcctaagtcttctagcttcataaacacagactcagagacccccaaacctagaccacttgccaatctgttactaatgaggtagaatttttttttatctgcctaaaagcccattagaaaatatattaagaaactaagccttcttctaggtgttgaaatttagaatatttagttcacaagactttctcacctcttttacaaaattcatctcttggaaacatctctcataattggggagatggtgagcaaagagactagggtgcaggggaaggggctaatgaactcaccacaactttaagtggcttatactgagttagaaaagtaaatcaacctcgtattcttattttgcctatggctctctaaagaaaaaagacataggatcttttcttcatgtaataaagcaaatatgtcaaatattaaataatgcaactgacctaccatttcatcatattcataccacaccctctgaatcaattaaagtaactgggatgctacttaaatattttaagctgcacattttttaaaaagctgtacatttggggggacataaaatgtactcttctgtttccaaaaacagaaccatcaactttagtcattattctctttttcttattcctggagacaaccttgcacataaatattcacatttcactgacaaacatatacaagctctgaaaccaaagcatcccacatctaagaaaatcttcagctctgttttgctaggcaagctaagttacaaatatttttattggactggctattaataacatttctgattggtcatctgttgggcatgttcccctgccagcccaaatgatgttgctaggatacagaaccctgagctaagtggttctagctttccatgaaaagggaggaggaactaaaacaaactgaaaaaagccaatggagaagctcctccccgaccccaccctaatcaaccagcaattaaccgaaagaggagacccaagagaaaacaggaaaagtgagctgtcagtcagcacagttgcaaatttaagcaccgagcctgggtatcctagcaaacccaaaagctggcattaaaagccaaaacaatattatttgaagatgagagagagagagagagagatgtttgaagcaaccactaaaataaatagttatgccccaaaccttactatactttaggatattcattccaaggccaaatggcatcattgcaagtacagcttcccccacccacctttcaaagctactcttcctgactttgtaaaagaagacaatttagaatacctcaccctgtttggaatccttattccacaaccctcctactatcccatttgagtctggatgaattacttcccaaagaattttttcttttaattgtttttgttgaatgtcaagtggctcaagtgaatcataaatgattgaaagctgaggattgttgacactaaatatagagacagaatttcttcgacatccatgagaaagggttacagtattaaaattgtatcgtcaaatgccagttcctgtgataattaaagattgcactgtttacacatttaaactcctaaatttgtggcatttgagtgacattcaggccttttagcagctacactaatcgccaggcattctctcagtgactgtcagagaaaagcagaaaaaattaagcagctgcaatacacccaaaatgagttattgtaattacatttaattagtttaattagttaattattttgcttacagctgtacaagagactgcaaacatttgttaatatcacatgccctttaacagtatggggtgattccacagtcacactaaatcatgaatgcatatgtaggaagatttagaaatgtgcataggctgtctcagcttctcaggatgcgcatatttagcaacaaatttggcacaatgaaaaaataaataaataaaaacaactcataaaacatagagaactgggaacaaaattatcaccaaaaaaatcaaatacaaaacgaagaaagagctatctcaataacataagctttaactcagcaaactccagttatcattgaaataattgtagcaccttcttgaaaccagtgtttaccagccaattccacacatgatgatagctcaattatttaagatgtatcaagaatggctaccaaatatgccatgagaaaaattgcaacagtctgtctcactcatctgaatttgtgtctgatgttttcattctcccttgcccaacttccatcttcccaacatgccctttcccctaatctgacagccattgtcctataattgtgaacaaacatttatgtcttgtcaaataatgaattcccccaaagtgaaaattcatcataaagacgttaatgcatgagagaactttgcttactttttggggggaattatccataccttttttaatgacagactggtccaatagattcatgccgctgttattggcatcttcaactgactgtgaatataaaaacatcactattcaaattgacaggatattaaagaattgcacacataaatcatgttattccaaactggagtttctgttatttccatttatattaattcacaaagggctgttttattattattattacctccaaatagacatagaaatgaaatttactcaaattataaatttttccaatggaagaagtggagaaagaaaactttgagagacatctgggatgcaacattggtttagttattatataaaacatagatattagacagataaacctttatattatttgctcttatgaattgtaaaaatttggcaacagctgacagattttcaccaatattagtaagagcaatttgtgttttccattctatcccagtgcatcttaaccccagagccattttacaaatacataatagtttacattatgggattttaattaaagtctgagcaatttggaatggaatgcaaacagcaacacataggaacatgtttgcaagcctctaggactgcacacccattacagcccatacacgttcctgtaaactatgagcttcttgctgcacaatgacagtctcttggaggaaccttcacaatttaccctccctcccagtcctgctgatgctgcttcccagcaaggagcacacctgttaggaaggcagtaactacagacaagcagacacacacaaaggtctagatcctcccagtcagcacctaggtaatcgcaaggaatgttcatcttctgtgccacagtttcattccagagaaggaaagtttcaactctgagcactggtagcacttctgagaggaaatagctgttggagcaagtttcttactgtcagaatacacatgaacagttctggctgtgcatcccagggcgtccaaaagcagtagattccctttctctccctaccaagaaaataaatgctaggtctttctaaaatctacaactactttcttgacccttcaaaacctaagttgggaccaaattgttacccactttatagagaagtaaaaagcaaagggcttgagagtgaggagctgttttcacagcactcacaccgactcatgctgcatcctcacagtgtgagttcatcacaagaaaaagactgtctaccccaaacaagcaaaactttagaaatgagatgatctaatcgtacagggggcatgttaatttgtttcttttcatttttaatagtcactcttttgttctcagaaaagtgagcaaaattgttattctccataggaattgttatccttgctgcaacatgccatgcacatcttaggaaatagtaaaaaggtgttttaaaaatatttcatgtaacttgttcataactcctcaggggaccctgccacacacaaacacacacgattcacacctttctatgatcatgtgtatacagtgacaatgtgtccaggcaggacagaaatattctcctgtgccttgggcagccagaccctgacttacactggcctggacccgggagccctcacaccttaccctcactcttgtacgtaaatatgtataaacgcctcatcagcgacgtggggtagttgtggtagttaatgagaaggctcttgtctgattttctatctaattacggccgcctgctgggtttttgtacaggatattcacgcagcatgctggcgcttaatcgtcacagggaggatcgtaaagatttaattaggactgcatgcggaagcgcagaaaaacaactcagactcgtaattactagacttctttagttaaaagtgataccaggggttgctttaagacactcgggtgtgtttgagtgtgtgtatgtgtttggggggagttggcttaacatccttatatgtttatattcatgggtggtagaggtgatgggaggtaagagagcaaaggtgggaagaagaaaagaggtgtacatgacaactaaacaaatcccaaactaggtgtcctttcactccctctgtctctctctctgtaggtgttttcctgagtttttaacacttgtagccccctccccaactagacacacacacacacgcgcgcgcgcgcgcgcgcgctcatgcacaatgggtgaaatgtagcatacccagaacccaaacagcgatttgctagtttaatagcccctgtgagtaaattgaaatagaaattgacagggttttatagtttcatttaaaaaaatattagaagcatttggtgaattagctctcctctttctcttctctcatggtgggggctgtggccctgagtgtggtgcatctgggtcacacaacaaaaccctcgacccataggcagggcagcaccctcagtgtctgccagctccctggctcaaggggatctggaacacacacgaggtccttgagatcggaacaagtgactttaaggtccaggcctaggcactctctggtccttttaaagactggaccagtgcaggcccttttaaagactggaccagtgcaggccacccattcgatagctgtagggagagcgttgaaatcccaacctgcttgtgtaactttagcccccgcaccccagcttcctaactcggaagtggatccttctgtgttgagcagatgattggaagccttcggattcgaggctgtggtcctggaaacataacccctggtctttgtcacctgccctgcatcagtcaacttcaccctggccttgggaggtctgtcatcaccgcggaggcagagaccgtccctgtctttgctgtttccctctagggacaggagcagggtgtgtcccttgcactataggggtcgtcccaagaaggtcccgtgggcctcccggcaggtgacgaaatgagataaagcaggggaggaacagggtgggggttgggtgagtggagagcctgcaagtggctccggtgtgctgcctgctgcttttctcctttcagctctctacctctgtggtctgtattcccgacagcaacaacttggccccgaggtgctccgttcacataaacactaaatcctttccgacgctttgacaagactattctcccaaatgtgcactgatctggccctgtttttctctcagactttgaatttcaccaaacacaaaaagacctctctcaattatttctttaaaaacatttaactaaagaaaactgctccttcttttgggggaaaaatttctgagttccttcgctagagtcacttggcctgtagggtggtggtaacagggccggcattagcatcatcaacagtaatggtgatgagttgatccactttcattatccagcactttgaaccatactcagaaaggttaatttaaaaacttttcccctcgagacacatattaccccaatgcattaaaaaaaaaactattaaatacttcctttttcatatgatattcagaaatgagcaatatctctagccaggaacagtcaagctcagttaaatcaacaaaaccatcatcactcttattactatcagtaaatccaggcacaaatcaggtaattccgtcttttttaaaaaaataaataactgaatttcttttaaaacaataaacaatcatagaccacacacagacagcatttgatgctgtcaccacattttaactgtttaaaactattttttttcagcaaggtacagaagaatgactcttgcaccctcttctctttcccattttattttcctttgcttcagaggtatgtcaaaggatgcataataaatacaactatgccaatgaaactgaagtgtcaattacatacctgtaaactatatttatcttttctgccaactatttaacttagggtgaaaaagcagacctgctcagaatcacccaaacagtttttaggaatcatttctttgatgtttctttgtttagtttaaccaagtattctcaaccaaatcaggctccattgtgtagactgcagatgggatagtgggtgggtagggggagtgttttgagccttttgttttaagaaataaacacgtgatgcctctcaactgggatgatggcagtggggagagaagagtgttaatataggcggaggccaggagagggaggtggagaatattacactacagtcacttaatgaaccaaaaagtgaaaagaatttccaaaatggtatctaccatcatggactcctgaattatggcgttctgagtttctccttcacatatattctatttctcagatgaggactgcaactatctcttggaaaaaagctctgtggcttatgagacattcaaagcaagacctggcttagatgatcagagctcattgtcatgcttagcaaaatctttgcaaattcagcagcaacctctggagcatacagaggcccctggaacttcattctgaagctctagcctctaggcagccaggtcttcacctgccaagtcagcaggacagccccactatggggtgtgtgtgttggtaaagaaggggtaccaagctggcttccacaaagcactagagaatatgcaggagatggtagctgaggcaggacaaaagcattcgcctttattctaataatcttaaggtatcaaagcaaatacatatttttcttcttcaagatttaatttctcgtggtttggatgatcataattagacctctggaaatcgccactatagagccatacatacagacacacataaacagttctatatgactgtctagtcctgttctaaacatgggaacaaactccccaaaaagagacagagctgccctctcctgacctccccccctccagaagcattccttattcgtggtcttttttgtttgtttgtttgtttgtttgtggttacctggacgtcttccattccgggatggccgaggccgtgcagcgagaggctgtcacccatgcccgcgtccaggccgtggtgcgccgaatgcagcagcacgtccggccggcggaccgagtggtagtccctccgggggtcaaggcccgagagctggggcaaggcggcccgaggctggggcaggagagagccggcttccgaacccacttcttgccgctgccgttgcccccagggatgttgctggggctggtgcagtgggttcagggagtaggggtcgttgacgtgggagtaggggtcctggctctggtggtaggggagcggctggtaggggggtgggaagtagggcggctggaagtccgacgacggggtgtgggacagcggcggggcgctcgagtagggtccttgggacaccgagcccagctgggagagccgcgagctgtggctcgggacaccatcgtgccggtcctgggagcggagagaggaaggggaagagagccagagaaggagacagagaaagagagatagaggcagagagagacagagagtacagagaggaagaaaaaaaatacaagtgacaaatggagaagcccggcttttgtacgctcttcccgggacaagggaagcaaggatctgaaacttagacccccaagttgactcagagggccacatgatttcagcaatttcaaaccccaggcttggggagaaaatgggaaaggaatcacccacttaactataacattttagccgctttttggggagtgcaaagcaggcaaaaggcaggggtacaggaacagtgtgtatggagggagattctaaatgccttaattaaaattgtaggagtcttacatatggtgtttgctcctctgggtgtttttaactacttttttctaactcttccagaggtacaaatcacaacaaataaaacttcatagtatttgctgtgctgctccccctgattaaaaaccaacttctgccttcgctggaaatgcagctggctgattaggaggagctttccacacaacctgatcattccaagagctccaaggaatccacctggtctgagttcccagtcactcctccctctccaggagaaattaaataacttaaatagtgtttcattgaaatggatctcattcgaaatcatatcctaagccaatgatgaattaagttgagttgtggttcataggagttatttctaagactgtttttctatatctaatgctgttatactcaggatgtgaaaatgaaggaactaaagttggggtggggggaaataaaagcccagacaacttattcctggtcctatctggagtgtgaactaagtgaaagaagaagggggaggtgtgtatatgagggaggtggactttgtttctccctctcttctctggaaacatcatggtaaactccccatggttctttttgcagaaatagtcacctaaatttccaaacagcaatggcaaataaaaagtttttcttttcggcctctcccctcccagctgactcatggagctcagacggagaacacacaatgcagagagaagcagctgcagcctcgtccaattatggtgctaaattaccaagccaaaggcgctcaaaggaagacagagagagacagagagtgtgagacacacacacacacagagacgcagagacagagagacagtgagaggagggagcatgcaattctggtaacacgtgaatccaaactcaccatggatgaataggtgtggactaacatctggaaaaaaaagcctggttactgctcaaaatcaaacaatgattaaaaaaaaaatcaaggagtccagcagagaagcgagctggacacaggagctgagcttgatgtgtttccaggacaagccatcaaaaaaaaaaaaaaaaaattacacccgccccccaccccaacaagattggcgatgcctgtcacacacagacagaactattcatctgtctctttgctgtctttttggcctcttttcttctgccgttcttcggggctccagatgcagtcctctttcacccgaagctgggctcagactgctcggccgccccttcctccctccgcttgcctacaccgcctcataataattgatattcatgactattaatattacacgagtactttaaagggagaatagaggacaaatggagcgtgaagcagcagcgagcgcagagctcccctactattgtaaatgacgttcattcagtggagaattactagatgtaatcagacgagggggctggcaaaggcagactggggaaaaagtttagcaggaaagaggcagaacttcaattaactgtgccggggacacgagtaaagcagcccctgctcctttggataaggcagtgagggagaacagtgctgggaggttgtatagaatggaggtgtcctcctacctggagagagacttccctaatccggaggacttggtcgccttgggtgctttgtgtgaggattacaaaaacaaaataaaaagggttgcttcatcatttggaggcgagagaaaggcaaattggtgggcctggttatttacagtgacttttgcagacttttgctaaatgtggaagattatgctcatttgttaaaggacagaagcgagatggaggcttttcattcctgtgcagccttttcctgtttagtgctcacatagtttgcgatttttacctcaatttaaaacatacgccatcaatcttcaaatacactaaacttatcctttccaggcaaagccaggggcaacagaaaacctttttggatgtttcaggaacccgttcaactggcctgactgccatttctgttaaagttcaaccttagtccagacttaaataggctccttccaccgagctgcggattctgttttttgagcagaaaatttaggcagataggaccacctgtaatattccctctctctccctgtttatttctctttctctctctccctcccctcttttctcttctctcttccctcccttccactccacccctccctcttcctctctccctccctcctttcttctctccctccttccttttccatttagctactttactttctgtaaagaacgaatgttaccctggttactttttagaacccactgaaatgcctctgcatgcatatagcttgagctgttttcaccatggccccgtgcttgctaatgtcatgcccactttgggcgctaatattctttaggacagttctagcgccttggactttaccattatcccgcctgttaaggaaagaaaaggaggccgaaccgaaacaatccccaccaggcgcgtaggcgcggctcttcgttacagtcgatacacaaccacaaagagaaaaggaaaaccccaagcatcattcagcaacaagaccaatctctctcctctctgctctctcgcgctctctcctgcttttctccctctcctctcttatctcctcctcctctctcctacatacctccacacatacacacaccccaacattaggattcgggggggggcaggaggtgtgggcgccaggcgctgcctgtgggcgctcgtccgagcccgagtcccccaggagcttgccggccgcgcctgtgagtcgcccactcttaggatcttcgaggcggctctgcgccgggctttcaggagctgtcccgatccggaggggtcgcgtgtctttctcggctctttggggagcctctgcatccctccacctttcgtctgacctagcggcccgcgcccgccacccgggagtctgcttctcttccttccttttctctccaacttttcctcttagcaatctccatggcccgcttcgcccgcctcgacttccctccttttctaaatccgcttcgcctttccgaagtttttatttccaacctcgacgtctcagcagaaccttcccttcctcccttcccctggcaaccacctggggctgtcccagaccattccgcttaaaagcgaggctccgcgggcttcccggtccccagcctggcccgccgcgcgccccgcgcctcgcccgcctcggccgcctctcccacctcgcccgcctctcccacctcgcccgcctcggccgcctcgtccgcctagtccgcctcgcccgcgagtagcggagccgtctggccgcgtcagccctcgcccgagccggaaaagggctttggcgagcgcggtccgggccccggaggcggctggcgtcctcctggctgggcgcaacttctcctgccccgaagagttgagctagcctcagtgctagagacccgtacgcattgaacgtgggcagaaatttccgtgaaagatgcccacacaggaggcggctgcgatttctgttcggacgcagtgaccctcaaggaagcaaaacacaagaaaacagaaactaataaactgctacgacttctattttgctctatccatccatatctccagccatctacttctttcccgctaattctctgtcctctacttggaaccatttgttatcaatttcagaaattttattgaaaataaaaattaaaagcccgagtctgttacaaatgaggcttgaaaacccaattctcttccacacttaaaacgagaaaagcccctgactttatcagaatctcgattttctctgagagcgtgcccacattcagtagcaccacattccccatcagagcttaaaagggtggggtggggtggggggaggcgaggaaaagggaaagaaaaataaaataaataaaaacattcctaaattaaagttgtcagatttcagccttaaagtcccttttcagagcagcgaagtcttccctagccagcttttctaaaagttaaaaaaagctgagaaaaccgaccggaaatctacgagtaaatagcttaaaaatatatatcatttggggtatcaagaagctcaaattctctatctgcaaagctctaaggtgcatctgggggtgtcgactcacctcatagatatcttcgtacttgacattctccacaagcttccagagcatgatggcagcctggtctctaggaggtgagtgcattcatgtgaggagcagatgtctggcttctcaggactccgctgtctgtaatgatccatctataattggaaatgggggatacacaccaaatccgacgctcctctcccatcgcaacttatatctgttgtctcaaacaataggctggacaagtaagcctcagcaaagagaaaaaacattattgcacacacaggagttagatgcaacccacagacatatatactataaaaatcataaacccgtatttacacccagacacccacatatagttatataagcacctctgggtcacacagtctgcagactccaaatgtgcatttaacaaagagttgttcagggtgattaatataatatatacattttataacttctatatcgaaaatgacacatcattgtagccactaactgaagtctttgcaattcataatgagaaaccaggggccatcagtcccctattttctatgtagattttaaagggggacacttaccaagatttttaaacacaaaagctccctcctattcatgtatgttccggaagagagtattttgaaaggctggatatgggggattttaaggactatctctgtgttgatggctacacaacttttttttttttaactttatctctgtcaccatagaacaaaaaagctagccaccgttgatgaccatttctaatattttctggtcattttacctaaaacctttggaaacttaaatacacctcagtttgtgctgcttgttattttaggtgttgtttgtatgcattttcaacggattccatgcaccattcctcttggctggagtctccattttatcaagtttttttcagatgttggaagcaacgtacgcacacgttcagacaaggttaattttgagccttttttgcagaggccaaggacattttatatttgcatctgttgtgtatgacttgtaagtggttttaatcatggagagtcaagaaagggccacccgaatctttgaaaaggtttaagcagaatgtcttcaaagagatagtgaaaaatattttagtgcatgtggagtttcttcttttttttgtataatttttcttaataagatgattcatatagtttttaaaaaggaaaacatcatcagcaacaagaacaatattaaccagacttagaaaatgggcaccatttaaggcgcagggattctgaattttatcatgaaatgaatactcatctgttcccctgttccccctttcccatcccctctgtttttctactccctttcagggtgcggagagcttctcatagccggaacagacgcccagaagaggatctctgcgcctgggacagaaaagaaatgccaggagggaccgaggagggatggggcaatttggggtggaagttattaagcctggtgagagtgaatctgcaaagggtgattgtctttaaatccaggactgctgtgtgcagctctgcgcgaacagggatggacgctgtttgagtacagggctccggacaaccttgttggacgtcgattcaatcaaaaccaaggagaagcttcatgaactgcagaataaacaattctgcagatttttaatttaatttttaaagataagtcaaaggaaaagaacacaaagaaggtgcttcagaaggaacttcagaaataaaccccttatttccggttgaattttttatgtttcgtctttccttttctcctcttcctcctttttgttttccttttttctttccttcatttcccttttcgttccttcctttctctctccattcctttcttcccctttaaatgttaaccttaaatcatacacaatctatacagatttttcactaggagcatcagcaaagattttcttctttgcttccagagctagttaggagatgagaagggatttttcttaatcttattgtgtggtgggacttgaaacgggttccacaccccctgacttctagaactaaaatcagtgccagatcaataatctgaaagataaatattatagacttggaagttcagattctccaggcacaagacatttaattaatggaaataattgttttctccctttcaaatcaataattctgtcattgttattacctaaagatcattacaacccaaataaaatgcatttggaaaaatctcactttttttctctaaatgcttttaacaccttttaatatctttttggtatattattgcctagtctaaaataaataaactctgagatttaacaaaacaaaacctgcaagagataattttacacataaattaaaataatataaggtattgtgttagtataactattttatagccttatatatgaataatttcaaactttttatgtgtaattttattttatgctagtattaggtattttttaaagtggaaatatcttgagatatttggttaaaatttaagttctttaggaaacctgaaaaataacaaatctggttttattaagaatgaagcataaacctaaaaatatacacatatatatagagaaataccttcaaaatacataaccataattaaaatcctagttattttttttaacgtgggcgttattcgaaaagtcctagacattgcaaggtaaaccgttcccacggaccgttccctgtcattgaacgggcaacagcgccctctgtcggaattttatagacgcaaaccctgcaagtctccttgatttctttttcggcaaaggtttctttccgttcttgaaaacctggtattgagaggaacatttttaaagttcacttcttatgatatttactaattttagaaacgatcgttccagcatctaaaaagttcaaacgcccgaagaaacgcacaataaaagctcagccgctacggagaaaatttttcctaacttgaacctacctctcttgcttttactttctattacctttcgcgttatcactcaatcacatgacgtagggaaactattcccgcaagaactcagtaaatggaaacacaaaggcaaaacaaactctggatttgaaggaaattaaacgagtaaaatatgcattttcctcgttattttatcttgccttatgtccatatttctttttcaggttacgcacatgctctcctaggtggaaccgcacttgagacatcccagatagttaacactcgtactttcctctttcatttgcatttatttcagtttaaaacagcaaagaaaagaattattcataccctctttttttttcagcctcatatagagggaatattattcagtaaatgtcggagtctataattaaaagcaaatgcacccagcatgaagccctctgctggtgattttcgaagtatgttcaggactgttttttaaaaaatgtacagaaaaatatcattattaaatcaaggtcaactaggagcactttcatgtcttctttcatctttcttctaaaaatctaattatgaattatctaaatttatttgacttccttccttccactagccctcacctttgcacctgtgggttaacactccatgaactatcttcctttgcagatgcccactgtaccaccttttctttttccattacacagtctccctgggtttcccctttccatctacccaacgcacaaaaataataaaattagaaaagtcaagaattagaattattgtgccaagtttgcaccctggcctttctcattctaggcggtggggcaggctatttaatagcctgaggttcagtgcactgaactacaaaatggaaatgattgtgaaaatttattaaaatagtatctgtgggtaaatatatgtggtactattgcttcataaacaatttaacttatcatcattgtctcaaaacacttagcggggggtcaggaaagtggaggcttctaaaaaccagggatttgcaataaactcctggttagaaagtggaggtgggaaacccaatataggtcttcagactgtgtactcaacgctttgcccacagtctcatgatgctgtcttacttctttccttctgaagttaagaagacagtatttttggatcattgagtatgtccagggttattttttatagtcctggatttataagtaggcaaaggaaagaagagaggaaggaaaaactgtcttacttcagcatcctcagatattgccccacctcttacccatcagaagcattattgtctgctgagttgaataataagacacgacatccatataacagatcttgataagttaaaaaatgataaaacatgacagctccattttttactgttgcagtctggctcctaattttcctaccatgtttctgtcttaagctttctcatgattatatttttggggaagattcagtaggtgtttttatcatcaatttggaaacaaaatactgttgaatgtctgaaactacaatttaagcacctgccttcagatttctagggctttgataccatataggtttcagtgacttggtatgaggaaacaaaataggagggactaatgtttgcacaggagtgtttttaaaaaatgaaatgtgggtggggttatctttagactgactcttcataattatcgagattgaggcaagcactaaacaggaaagagcatttcttactttaatcataatatttagttgatggtacatttgtaaatttgtaaaagatactgagttgaaatcacttgtgagaataaaaataactgtaactgtgaaaactcaccctttccctgggacttttgaggagcaatagtaatttcattatagattttagatgtcctgatccccttaagcttttctgtttaactacgggggtatgaagtggctaaggggacagttttgaaattcctatctcttggaggtaaagaggttaaggaaaggaagatgaggggctgaagcaaatgatgcaaacagccatgcaacaattgttttcaacaccaatgggcatttcacattcaaaatgtgagaggtgtgtgtctcctctgccatgactaatgcaggaggacaggtactttcatcattgtggatgttttccatattattgctttaagaaggagaaatcttgaagggtgagaatactaaacaatttggtttcaaaatgcaaccagtagaccagtacacatctgtgaggaaaaaaatttgcaaataaagactttgaaagatgtagagcagaaatataacctttaaagcatgaataaacacatacaatgtatagcatcagagctgaagtgtctcataaatacaagggacatttgggagaaattagcattatattggaactacttcctaaaattcacgatttgacattctgataaaaatagggaaggatcttcattttatgcctcttttttatttctttgacataagatgagtttttcacttaccagttatattccctttggcaagtcctctgacctttccagatctcagttttctcgttgataaaatgaggagaattcggccagaagctcatgcctgcaatcctagcacttcgggaggctgaggtgggtgtttcacctgaggtcaggagtttgagaatagcctggctaacatggtgaaaccccgtctctactaaaagtacaaaattacatgggcatggtagcgcacgcctgtaatcccagctacttgggaagctgaggcaggagaatcgcttgaatctaggaggtggtggttgcagtgagccaagatcacgccattgcactccagcctgggggataagaacaaaattccgtctcaaaaaaaaaaaaaaaaggagaatttactaggtgatatgcaagcttcttccataggaatggactttatgaaactgataaaagcatcaagtagtaattaattaatttttttattttaaatattactcttttgagacagggtctcaccctgttgtccaggctggagtgcagtagcgtgatcacatgaacactgcagcgtcaccctcctgggctcaataaatcctcccacctcagcctccccagtagctgggactacaggtgcatgccaccacacctagctaatttctatttttatttttgtagaaacggggtcttgctatgttgaccaggtttgtcttgaactcctgacctcaagcaatccttcctcagtctcccaaagcactgagattacagatgtgagccactgggaccagccaaaaaaatttaaatgaaagtgttctttctgagcatgttgcagcaagcctcatctttctggagccctctgtgagagagtttaaaataattggttccaatcttttagtaaatgataatcacaaaaattttttaggaatacgatcttagaagaaagcaaacaaagaaaggataagaaaaccgtgtcttaatttgtaggagctgctataaaaaaaatacttcccagctgtggcaggaagcaacatgaccattcattcctattaattatgctgccattaggacagaatgtaggatgctgttaaattcctaatcttatgtgttgtatttctgaccattttctctctttctcttcttcttttttgtttgtttgcaataaaaataagtttttatgtatggccaaaaagaataccttagaatgggtagtttataaacagcaccattttattgctcacagttctagaggttgggaagaccaagattagttaaccagtagattcagtgtttggtgagggcctgttccaatagatggttacctcacatggtggaaaggcaaaaggggcaaacaagctctcacgcttttttttttttttttttgatggagtcttgctctgtcacccaggctggagtgcggtcgcgcgatctcagctcactgcaaccttcacctcctgggttcaagcgattctcctcctcagccaccttgactagcaggactgaaggtgcctgccactatgcccagctaatttcttatatatatatatatatattttttttttttttttagcagagacagggtttcaccatgttcaccaggctggtctcgaactctcaaccttaggtgatccacctgcctcgctctctcaaactgctgggattacaggcatgagccaccgtacctagccctcaggcttcttttataagggcgctaatcccattcaccaggactctgccctcctgacctggtcacctcccaaaggcctcgtttcttaatgccaacacattaagagttggatttcaacatatgaattctggagggacacatacattcagaccatagatatagcttgagggaagagaatattattttaataactagtacttaataggcactttgaaaaattcaaggatgtatgtctacaagaataacatctaatgtactaaaagaatttgcagttataatcttgacaattatggttagtaatctttgataaagtatgcagagtgaaaccaatgtccaatagcaaaggctggaaaacacttcattcttcagaaagagcgatactaaggccaggctcagtggcttatgcctataattccagcactgtgggaggctgaggcaggcgaggtctggagttggaggtccggagttggagactagcttgaccaacatggtgaaaccctgtttctgctaaaaatacaaaaatacaaaaattagccaggtgaggtggtgcccacctgtaattccagctttccagctacttgggaggctgaagcatgagagttgctcaaactcaaggggtgggggttgcagtgagccaagatcattccacagcactccagcctgggcgacggagtgagtctcggtctaaaaaaaaaacaacaaaaaacggtgatactagatggatactagaaactacagatggggaatcatactattgtttccctaagaaaatgatagtttagtttgtcaaagtgcagttagtcaattctggaagggaatgaagagatctcagaactagcatggattcaggaagaacagataattccttatgttctaatttccttttgctaaaaattcactagactgaatattggagacacagtgtatctggagctcatgaagacatttcaaaggtttttcattggctccattatctgggttgagtgatgttatggtatttggagactgtctttctctctgatgaaggatatgagctttggagtaggacagatgtgtgtgaattccagatctgctacttactatcttggacattaagaaaattgcctctgcctctgcctctgcctctgcccctgcccctgcccctgcccctgcccctgcccctgcctctctctccacggtctccctctgatgccgagccgaagctggactgtactgccgccatctcggctcactgcaacctccctgcctgattctcctgcttcagcctgccgagtgcctgggattgcaggtgcgcgctgccacgcctgattggttttcgtatttttttggtggagatggggtttcgctgtgttggccgggctggtttccagctcctaactgcgagtgagctgccagcctcggcctcccgaggtgctgggattgcagacggagtctcattcactcagtgctcaatgttgcccaggctggagtgcagtggcctgatctcggctccctacaacctccacctcccagccgcctgccttggcctcccaaagtgccgagattgcagcctctgcccggccgccatcccgtctgggaagtgagtagcatctctgcctggctgcccatcgtctgggatgtgagaagcccctctgcctggctgcccagtctggtaagtgaggagcgcctcttcccggccgccatcctgtctaggaagtgaggagcgtctctgcccggcagcccatcgtctgagatgtggggagtgcctctgccccaccaccccgtctgggatgtgaggagcgcctctgcctggccgtgaccctgtttgggaggtgaggagcatctctgcctggccgccccatctgagaagtgaggagcccctctgcctggcagccaccctgtctgagaaatgaggagcccctccgcctggcagccgccccttctgggaagtgaggagcccctctgcccggccgccaccccatctgggaggtgtacccaacagctcattgagaacgggccatgatgacgatggcggtttcgtcgaatagaaaagggggaaatgtggggaaaagatagagaaatcagatggttgctgtgtctgtgtagaaagaagtagatataggagactccattttgttctgtactaagaaaaattcttctgccttgggatgctgttaatctataaccttacccccaaccccatgctctctgaaacatctgctgtgtccactcagggttaaatggattaagggcggtgcaagatgtgctttgttaaacagatgcttgaaggcagcatgcttcatcgtcatcaccactccctaatctcaagtacccagggacacaaacactgcagaaggccgcagggtcctctgcctaggaaaaccagagacccttgttcacttgtttatctgctgactttccctccactattgtcctatgaccctgccaaatccccctctgcgagaaacacccaagaatgatcaataaatactaaaaaaaaaaatctgaaaaaaaaaaagaaaattacctaacctccctgagcctcaattgctatgtatgatacatatttccttattaaacatatttcctacatgaaatatgtgcatgacaatagccattgtgtgggaatagtcatcatgattaattgagataatacatataaaatgcttttcatgacctccagtataaggaaaccactcagtatgtgttgtatctactgtttccatctcagatttgcagttatttgaataattatctcccaaagagattaattgattaataataaacaatttaagacagtagctttaatagttagtttgccacaggactttgtccttagtctcattcttgctaatataaaagacttgaagaatatttacaagacatgttagttactttctaggtgctaaacatcagggaaaatagtacactggattacagaatgaggattcgcaaatattttaacaggccaatactctggaacaaatcccaaaagctataatttagcaaagataaaaataacaaaaatatgagcaagaagtgggggcctcatagaccgacagaggaagacatgaaaatacccacagatttttgccactcagggcccttatggtttctggactgtagtaaccacatcagcatcatgcccaacaacttactgagaatgaaaaatctatagagtaagtgagatcccaggttgcattagtaaacttggtttaagcgcagaaaagttgcaatcctacagtttttttatgttggtaaaactgcatttcaggacttgtgtccaactggagtggcttgcgctatgactatcactgataaactaaaatgtctcagaaagcactcaggctaggtacagtgactataatgtcagcactttgggagtcggaggcaggaggattgcttgagcccaggagttcaagaccagtctaggcaacatagtgacacttttttttctacaaaaaataaagaaaacttagctgggcatggtggcttgtgcctgtagttccaactactcaggaggctgaggtgggaggatcacttgatcccaagaagtagaggttgcagtgagtcaaaattacaccattgcactcagtcaaaattgcaccattgcactccaacctgggtgacagaataagaccatatctcaaaacaaaaacaaaaacaagaaagcaatcagattttaaaaagttctgaaagtcatgccaagggagaaagagttgagaaaactgaatttttacactaacacagagaaaacttgggaatgtgaatgctgtctttcaatatttgatgatggtcttggggaaggagaactagactgaggaaaaaattgtcatttgtctcgttcactgctatattgccagtgtatagcaaagtggctggctcaaatgtgttcaaagcattttaggcaaaataattctcttttgctctaaagatacagaataagatcaatagggagattctactaggaggcagatataactcactgtgggaaaaaaatttctaaaaatttcaagcactagaaaaagcatctttgattatggtgaactgtcaggctccgtaggatgcaggcagagtttgtacgacctcagtctagaatggggtaatgctggggcaggaggtctatctatataacactgggcaggaggtcctttgcaacaccaagatgctgggattctactacaggtgctcagcttgatattgcattgtgagttcagcagattaatcattgtaaaggactggcattgagagatacatgtggaagattccattatttctgcatctgtaaaagtattatctgattggggaattgtacacatttctgagcccatgtttccttgtaatgcataagttatctgatatcaattagtagaaacaacatcacagtaattatactcaacagctttattggtctgtcagtctgattgttttgcttttgtcattatcacttttttccatatttaataggatttatgtgggtggctttatagaatgaagaaaagcaaatttatttatttagggtatggatgaagggccttttaggcctttatttgcaataatttttgaggaacagttgtttgatccctaaaagaaataaatgctttgcagaacatttctccaatgaacacactcaaagccaggctccctttgagggagtttcaaaaacctttaagtgatttacataagcacacaagtaaagagaagcaattctttccaagtccctccttaattgcaaaggaatgtgaaaactctttataaaactttcactagtatttacaaagaaagtatgaagagtgttcttttcctgctgtattataaaatatttttattaactccatcattacaacctaaattaaatttaaaaaatattttaagacccaactaagcatgggcagtcactttttcatgctctttcttactggctgtcttgataattttggacaatgcactgtaacctctgcctcctggattcaagcaattctcctgcctcagcctcccgagtagctgggattacaggcatgtgccaccatgcctggctaattttgtatttttagtagaggcggggtttctccatgttggtcaggctagtctcaaactcccggcctcaggtgatccgcccgccttggcctcccaaagtgttgggattacaggcgtgagccactgagaccggccagaaagttttttaaaaataaaaattgtgattagtgattggtaaattaaatacatatatatgtgtgtgtgtgtgtgtgtgtgtgtgtgtgtgtgtatggattagttcattttcatgttgctgatgaagacatatccgagactaatttataaagaaaaggaaatttaatggactcacagttccacgtgtctggggaggcctcccaatcatggcagaaggtgaaaggcacatcttacatggcagcagacaagagagaaaagagaaccaagtggaaggggaaaccccttacaaaaccatgagaacttgcgagacttattcaccaccatgagaacagtataagggaaaccaccctcatgactcaattatctcccacctgggccctctcacaacaagtgggaattatgggagctgcaattcaagatgagattttggtggggacacagccaaaccatatcaataggggtttctatttgcttcatttcaggctctgagattctgcatttcttaggagaaactcttccatattctgctagtggtgactttctcccatgaagtttcactctgagcatttctaaatcttgatttgtacacttgccaatggaagcctatctccagggtcacatcttttaccacctcttaggttttggctcttggtccaaggaaagcaaagagcattggtctatgaaccaatgtgaaggctagccttggcctcgactccacgcactacctagacttgcctggtcttttacctcagaatccagaagctagatgttgtgagtgattgttcaagcatattgaatgacagcttttctaagcctttcttctgtggaaatacagctcagggagagagcagatcagacaacaactagtaattggagatgatagaaatgatctaggatatacagctttacttggaagcaacttttctggttttcacaaatccataatggaagtctgactatggtttctccttaacctggtgttttggggcaacgggtctttcttattaatgaccttgatattgtttttgcaaatactttttatttcagttctaactagagggacggtcctagaaaatgattaacacaattttagagaatgtgatgacagtggctccaaagtgaccttgtacctaagcaactcaaaagaaaaaaaaaatgactttggctaaaaagagagaccagagttccagggccctccaagtcacatgagatctgaaaagaagcagcataccagctctagccttttatccaaatattatctagtgccttaaactattatttccaaccaacacttatttttttcttcaaaggaagaagaacaccatttattttggagtgattattatattaatataccctataccatcaacttatatttgagaataaatgcaattactcctatgtgaaatggtcacattataggcacttcaattaaattagtaatttgtggatttaactgggcagaaagacacaaaggaccaccatcattaactctgccctttactccacatttattttatgtacactgattaggattctacctgttttgacaacagcaacactgctttactttttattatggtcttttctactctcgaaattgcttccttctgtctagtagcctaacagtattaactaatagctgccacctattgagacctcaccatgtctcctgccctaaatgaagcacagtactttactttgctcacttaatttcatcttcacagggtgtatgaaaaatgcactcttacttgagtttttcagataaggaaaccaagcccaaagggattaagtaaatttcatcaatttttatagaacttttaaatgacagaaataggatttgagcctaaatttgactgcaaacctgactccttagcggtgtaaactttcaaggctcagagtcagctttactttgacttccacaggccagtggtttggacgatggcaaaaccagatcccatataagagagacagaagaaaaaagtagaataaaagaaggaggaaagagaaatcaaatagaggaaaggaaagaaagatgaatagagaaagtgtaaaattttaaagaaagagaagaaaacagacacagcatgtagtaggctgctgattctctgaatagtggtactcaacatgcaggtgggtaatcttgatcccctgagcatatctggaaatgtctggggacatttttaaattctcagttggcatggaaggtggtgctgcttctggcatttagtgggcagaggccaacaatgctgataaacattaagcaatgcatagaatagcttctacaaaaaggaattatcagtatgtcaatagtactgaggttgagaaactctggtctagggtttgcttgtccaacctcccctagcaaacaccaatcattaaaaaaggacattttggagagagaaatgagatcttcatcatctaggatataaaagaatatgaaagaagacttagtactggtaaattcttttgtttccctgcaatatctgagaaaaaattctataatgtagttttagagtggcacacttcatatttttaatacaaattgaatatgttactcaatataaattgcaatttaatgtcagtgaactctaaggaagcagaatggggttgaataatcagttctaactctcctctgtgaggacttcaaaatcccagtgttggaagagagaggaccataaggaaccattataccaggcctgtcattttacaaaggagggagtcagggctcagaaaaatgaagtgacttgcctaaggccatagatggctgggttgagacaaaaccccagttcttcaaccttctaattctcagttctttccctctatcaaacttggttctgcaatttactactaacactaaccatcagaaatgacttaagcatctttttctttaacttatcaggtctatttgttaaaagcacacaagacgcgtgcacaaaccctgacactcagacataacaacttacagattcctttcaaagttttgtaatagttaatacaatatcccctctttcttctggggaaagaaaggtaatgataagaaagtactgcatttgattaaatcagactataattttgccatgatgatagttgccaagcctttgtaactcacagtagtagtaacactttgaattcaccatttctcttaatttaatgcagttttcaaatatgtctttctcatcagtgtaacttaagcatgggaaaataaagcacaaaaattaaaatcagatacatgaatgaactatgcattaatatacaaatatttattagatgccaactgcttgtgttgagcacctcagattgtggcagtgacagctaacacttaagtgattctctgtgccaagcaatggtgtaagtgtatgtgttatgtgtattaactcatgtactgtactaaccatggtaggatctggagatgacaagaaactaaaggccaaatcctctatcttttgagaatatgtatttaattagagaagcaatgcatgtgaggctgatgcctacttgtacatagaaatgtctgatgaagcctaaaaggaaaaccaataggagataaagctactattagtaagagcatgattttaatcagagagggtttctgggagaaggtagatgtacaactaaaactgaaaggaagcagaagagagggaaaacagagaggcacaggaggattgggtgtcaggaattgtgaaagtataaagaacccttttctaactgcaactgagaaaccatattaatgatattgtaatatgtgtttgtttaactgctattttttcatagttatattctaaggcaaagttctaaaactaattaaatgactcaaggtgaattgaattcaacttgacctaccttaacatgatacctgaagcctttatctgcaagccagaagggaagcttcccagaactgggaggggatccaagcagaggatccggggttcttcctgagtgtgaaaatgaatgttatttttccctccaggctgcttctaaggagttagctcacacttccaaaaggcatgtagtagtctgtctcttcagctagccaacaatttcatttggtgggagataaaaacaacaacaacaaaccactatttattttcctgggtaactggaaaggtgtataggatgatagattaattcactcactgatatagtcaaatatttcttgttcagaggtgcaactcactcaaatattatgtatagagtgaggtgataaaaaagcagcaataggctgggcgcggtggctcacgcctgtaatcccagcactttgggaggccgaggcgggtggatcatgaggtcaggagatcgagaccatcctggctaacaaggtgaaaccccgtctctactaaaaatacaaaaaaaaaaaaaaattagccgggcgcggtggcgggcgcctgtagtcccagctactcgggaggctgaggcaggagaatggcgtgaacccgggaagcggagcttgcagtgagccgagattgcgccactgcagtccgcagtccggcctgggcgacagagcaagactccgtctcaaaaaaaaaaaaaaaaaaaagcagcaataataccacctttgttttaatatcagtttattattctaaaataatgttttagaggaattgtaataaaatcctaaagcctagatataaaaatttcatatgtggttgactacagatatgttaaaaattattctaccacttaaatttacaagaaaaaaaaaacaccattaaaaagtaggcaaaggacatgaacagacacatctcaaaagaagacatttatgcagccaacaaacatgaaaagaagctcaacatcactggtcattagagtaaggcaaatcaaaaccacaatgagataccatctcatgccatctcatggtgattattacaaagtcaagaaacaataagccaggcgcagtggctcatgcctgtaatctcagcactttgggaggccgaggtgggtggatcacctgaggtcacgagttcaagaccagcctggccaacatggtgaaaccccgtctctaataaaaatacaaaaaattaactgggcatggtggcgggcgcctgtaatcccagctactcaggaggctgaggcaggagaatcgcttgaacacaggaggtggaggttgcagtgagccgagatcctgccattgcaccccagcctgggctacaagagtgaaactccgtctcagaaaaaaaaaaagaaaaaaaaagaaacaatagatgctggaaaggttgtggagaaataggaatgtttttacactgctggtgggaatgtaaattaattcaaccattgtggaagatggtgtgacaatttctcaaagatctagaaccagaaataccatttgacccagcaattccactactggatataaatcattctattacaaagacatattcatgcatatgtttgttgcagcactattcacaatagcaaagacatggaatcaatccaaatgcccatcaatgatagactggattaaaaaaatgtggtacatatacatcatagaataccacgcagccataaaaaggaatgagatcatgtcctttgcagggacatggatggagctggaagctattatcctcagtaaattaacacaggaacagaaaaccaaacaccacatgttctcactttgaagtgggagctgaacaattagaacacatggacacagggaggggaacaacacacactggggcctggcagtgggtaggatgtgggggaagggggagcattaggaaaaatagctaatgcatttggggcttaatacctaggtgatgggttgataggtggagcaaacccccatggcccacatttacctatgtaacaaacctgcactttctgcacatgtatcctggaacctaaaataaacatgtatataatatattatatattctactgatcaatcagaacagttttggggagagggtctacatctagttgaacaaatccagcagaggcttgcttgtaattgttgctttgtagagaaaacagaaagaatggcatggttaagagactattttgggtccacggaataagaggcataatttgtacattatgctgttttgaaagaaagcctgactctatttttacttactgatatatgctggctcttggcttttacctctttgattttttttttttagtgggtctcacttgccccattcattggatcattattaaagtaatctttaaaagaacattattagaagtttttgacatttcctgtccaagggatttgaggtcagtaagaaattatattaaaaatcatactttaaaagttctgtataaagttaatctgtaattaaaatcagacattccagattaacctctgttataaaatgaaacaagataaatgaaatatggtgaatgaagataaacaataagtggtgataaataaaacatgattcttttcattacttaggtagcttgggtttcatgaggaatggggaatggctctgaaaatttaaattttggcatagtttgctattagaccatgggaacattttagctttcattctctatgcaaataatggcaatactatactttgggcattcatgggaaaagagacaagattaattttaacaaatactttaaaatctttttttatcttttgattagagtgaagaaacacaaagcaactttaggaggtggttaaaaaaataacataatgagcaatgttctctctttcaaaatctagaacattggatgggaactaagtttcccctttagctcaccagattctgggtttacgcttttatatacaaagaaagagtgagaacacaactggttagatacaaaaagtggaggaaattatggaagcctagaaatgcggatatgataatgagtgaaaaaaaatacctggcatcattttcttaataggactcacctttttcttgcaaacaatctagatcttgaagtaaataagatggtttaatttagtgcctgaaatagaaacacacatggttcatcactcaattacaataatagtgtaaggaaaaaatgtttttgcttgaatagttttagcatattacaagaaataaacatgaaattagattctgttatgcatttttggtagggatagcttggaattatgtgttgtcaactgcatcatatcaaaggcaaatgatgtaaacctgtgccattgctggtgctattaatgttgattgcttcgttaacatagtgtctgctaggtatctccattataaagtcattctttttcctctgtggggaggaagcacagaactaatacaatatcagagatacactacaaaatacctgttaataatcataaaaggaggactgagaaactattctatattgaaggagattaaaaagatgacaactgaatgcaagatataatctgatattttcttttgctgtaaaatatattattggtatatttggagaaatctaaacaagtttgtaaattataagtaatattttattaatactatgtttctgattttgaaaattagggtgtggctatataaaaatgtatttgaatttaggaaacacacactgaaatattttggggtaaagaagtgttatgtctgtgatttattctcaaatggatatataaagcaatttaggtagaatgttaatatttagagaatctgagtgaagtgtatgttaacacactcttcagcaatttataaggccaaagaaaagacccagttgtgacagctggttcttgttttgatttcttgtctaatcctgggaaaaatacttagatcttgttctttaactatcactatcaccatttttcactttgttctgttcccatttgtaatgaatttatattcagactttgaaattcagtttctttatagccttagtgaattcatttttactaggaataaaacttgctgaaagattgtcttttccagcctctgatggtcatatggtcacataaccagtgaactgtaagtgcaatgtggtgtgaggctctaggaaggctgttcaaagggagcaactcatctgagacgggtacatttagttctttgtctctttctcattcctcttgtctgcagtgtaggcatgacgatgccatgtattgaaacttaaagatggaagcttgtgttcagatagtggagctgaaggacagaaagaggcctggactactgatgagtgaagtcactacaccaaccctggactgcctgcttctgtacttcttttatataagagagaaataaactttttctcatgcaagccattttgattttggatttcctgttaaacctattctttttttttttttttttgagacggagtctcgctctgtcgcccaggctggagtgcagtggcgcgatctcggctcactgcaagctccgcctcccgggttcacgccattctcctgcctcagcctcccgagtagctgggactacaggcgcccgccactacgcccggctaattttttgtatttttagtagagacggggtttcaccgtgttagccaggatggtctcgatctcctgacctcgtgatccgcccgcctcggcctcccaaagtgctgggattacaggcgtgagccaccgcgcccggccgttaaacctattcttaactcattgacgacattactctgagagtcttaacacagtaagatagtttctccagccacctactacatttaggtatcaaaagtatattaattgtattttcccagtcttccgagtttggactgctttatggaatgaccatgattgaagaccaagctattcttctttggcctgaaagaggaaagttgaatcaaaagttttgctttacttttagggtcttcccaaataggtagagatggaggatccagtggtgtggtgatgacaggtttcttcagagcatacatacgtttctccccttcttccaagactttaggattttgctaggtctataaagggaaggcttcttatcattggaggaggctgaccatgtcaggacatgcttattcataagagaaatttatagcagaaaatcagcatctagtatacactctccaaagacaggactgtcagcatctctctttcatgcttgagccctccactggctctctgttacatcaaaacttctcttaggactttaaagccacccagatgttttttcacgccttttacttggtgcattatttcttccatttcttattaaacagtcctcatcattgtacaccagttatgtatcaattcccatcgctatacttttcttactctgcctaaccttaatattacttgggaataagttcaagttttacgtttttcttaaatcaccctctcattactcaggtgctcattgatttctctgactacaagctggagtcaacagcatacagcttggtaattaatcatcactgtatgtttcacagcacagccatctccttgagcaagattaagacttctttgaggctcatcctcagtatatctcatggatgtctcttgcatgcttttgtgtatatgatgttctgtgtctatgctgctttatcaaatttcaatccacctaaatgaggcaagtaaaaggtattttttttaattttaggtttttaattattatgggcacatactaggtgtatatatgtatgtatggggtacatgtgatttttggtataggcattcaatgatattgggtaattgggtgtctgtcacctctagcatttatttctttgtttgaggaacatttcaatctcactcccttagttattttaaaatatgcaataaattattgttgactacagttagttacccctttgcatgatcaaatactagaccttattcattcaaactatatttttgcacccattaaccatcctcattcatccccactctccctcatcccgctaccaagaaccctcatgggctaaacctaactttgaacctggactgccctgcagcagtgtgatcgtagcttactgcagccttgaactcctgggctccgttgatcctcccgactcagcctctcaagtatctgagactacaagtgcaggccaccaaacctggctaattttttatttttgttttttgtagagacaaggtcttgctatgttgcccaggctgttcttgaactcctggtctcaagtgatcttcccaccttggcttctcaaagttctgggattaaagacatgagccactgcatccagcctattttcgttttaaacaatcatttaacaggaaggaaagctgtgaggtcaaaataagtaaaatgggtaacaggaaataagttagaagataaagattagaaccaaaatcttcttttttcccagctatttctcttcctgttaagcaacacaagttagaatgtaagctcagtgaggtcacagtctaggtttgctgatgttgttgtttttgttgatatatccccagtatctagaagactgcatggcacctactaggtcctcaatacatatttattaaataactaaatgagggctttagaggctagacaataaattttgccctttattataaaagaccatagatatataagctgattttcccatatcttcaagaaagtgtcttacagttagatagaaggaataagttctagtgtaccatggcaaactatagttaacaacagtatgtacattaataattgatcgttattgatagatggtggaactcctagatggaaatattaacaggggtaggaattcggtgctttttttttctttttcttttttttctttctttctttttttttttttttgagatggagtctccctctattgcccaggctggagtgcagtggcataatcttggctcactgcaacctccacctcctgggttcaagtgattctccttcctcagcctcccaagtagctgggactacaggcacgagccccgacgcccagctagtttctttgtatttttagtagagatggggtttcaccatattggccatgctgatctcgagctcctgaccttgtgatccgcccaccttggcctcccaaagtgctaggattacaggcgtgagccctgtgccaggcttagagcttttttttttttttaagatatcacatgcagctggaatgtaccaattagtgctgtggaaactgacttgaagctaactggaattcccctcaaatgttccaacttaaagtcgtacaagcctattttaccagatggtttatgaatgaactatagaattttgtggctcataagtaatgtatagtaatgacaccttcccatttgctatttacttacacaggtagaagcagcagacacgtgaagaaagatctgaagaatattttgatcctttggaggaaccacatcaagcttttgaggcaaccaagggtgtaaatattctgtactggaggtcacattatggaatggttaaggggctaataggggctgaagacgttctgtgggttgaggagagggaaacaaaagacttcattcctaataccattgaaacttcagggaggacatcttgtattgcccaagaaaactctgtaagtcaggaatgacaactgtaatacactgtggtctctgggtctgatattgcttctaaataatgatccatgagaatatattcattttgaactattctgtgcattgtgtacatgtagattctaggcccagaattatgtagataatggggttgccccattacttaagatgtaagagtgggaggtagaaaaatctcaccctaacacccactctagttgtgcacacaatatcagtccagtagggaaaggggaagccaacttagggctccatcaaacccacctggccgtggataggcgagagaaaagaagcctgggaaagccatgggaaagaaaaggttattcagtgaagaaaagggtatttttctctcctttccaaagctccatggggactccattttctcccagctggtcacatttttatgggcctccaccttcctatcaattagccttccggtctcctgcccctccatccttcggttagcctggactctggtagtgcttgagctacctgaaggaggtgggtgtgctttttcatgcctctttctctcccctgattcattttctcagcagactggccaaagagaggtccttgaaacccactagccccacaaagtcctgaagcgaccttattctgtgtgattagctcaccccaaatgagttgttatttaggggtgaactgcctagttatttccatggagatttttgccagtgtcagaaataaattttgatattgaatttaaatatgctgcaataaataaattaagaaatgtgattaaagccaacagtccttggcacacacgtatacataaccataaatactgatctgaaattcataagcatcttctagcctatacagatcccatttttaccaagaaggcaaaaggcaaaagagaaagagaaagaaacagagagagagagaaagagagagagaggcagggatggagagagagagagagggatagagagagagaaaggaagagagaaacacacgatgggcatcggggagggagtgggagcagaaaataaaatcaaaaaatcaaactcggtcctgggaatgtgggcttaagatgtataatgtgctttcctctgtgctcaaccatagttttctgccctaaggtggtagttttcaagctttaggatgctttaatggggggtatgaatttaatacaatttctaagtctccaccttcagaaatactgattcagtttattctgtaaatcaggagtagagtctagggattttcattttactaaagacttcagaaaattcagattcaagtggtcctgtgaaactttgtagggggtggtgtgtgtgtataaaatttccttttgaataaatgtggccatgctagaaatccagggttgattacttggacaaaggaaaaataaaacatgtatgagtcatggaaggaaattgaaaatattttgtatctgtgtgctgccatgatatctaataatctaatagggaagatgtaccatagttatttttctgttgtgctttttcaagcgatgtatgtgatttgatgaggtgtaccatcatctgagttcacataaaaggcagtctagaatttctcacaaaactttccagaagtgaggctaagcagatggcaagctatatcagaagaaaacacagcatgatggaaatggcaaacccatttgaccatgagggactccgggatccggttttggtgcttctttgggtaaacctctgaagttctttgggcatcatgattcttacctctaaaatgaagagtgtgggaaagatggccttttggttcacttctagagctgaattctccagaaagactttgtggttgcctttttgagtaattcattgctgtcagaaattggatgaaggtcaggtagtctttgagtatcaagttgttaagccttaaaatactagcaacaattttattcagcaccttctgtgtaccaggatctctgctttatgcttcatatgcatttgccccaatccttccctgaattcagtttggtttctctgctatcattttatgtattaggaaaatatgattcggggaagataggcagcgcaatgtaaggtttaagaacaagagttctagagcctttagacctgggcctgaatcctgactccaccactcaataactatatgactaagtatgtaaaagttattgaacaatctccatggcttagttttctcatttgtaaaatgagaattataacagtttttccctcatggggttgctatatatggtacacgttatgcaagtgtttgctctgacagttattaaatattttgttagagctgagatttgaatccaagtctgtttgaatatgaaacccatgctagttcttagcccagtgattgaaaccacattgctgagccagtgtgtttgagtccaaataaagattcagtgagtcaagatgcatcatttagactcaaaaatgaatgtcaaaagtaactggcaaggaaggatacaacatgttcccaaactgggaccaattaagattttaagccattatatttcacataaaccttctggaaactttgaattaaatccatgattcaaataaagttatgagattaaacataacatccatactgtaagaaaattcacatacacacacacgtacaaaataacacacagtgtttatttgtcaccctcaatatgcttgtagggttggaggaaaaatttctactttaaagataagagaaccacagcacagagcagtgaaatcatttactgaacgttgcattaagtgctctcatagactttacagtccagaagggctcataaatggacacagaaatgtaataaagaattataatgttatgataaggtcttcagttacctatccatttattccttctttatttatctgacaccaattctcctgttttctaacctagatccttccctttactaagaagcttcattttattaattatctgcacattagttaggattaatccttccatattccccactcattacatgcttgtcacttgttattttaaaaatattgtcctatttttactttgcaggtttgaggaagttcaactttgttctataaatagatctaacatagttgtagagcacagagaaccaatcttgtctctgaataatattctgaatctgtagattgatagatcagtctatctattgatctatcacttatctggtacattggctggtaggtgataaataactagttgttgaatggatatgggagcaactttttccttcacttgctccagcaatcccgttgatgaatgataactcacttcctcttccagcagagggcagtagaatacactctgtagcacgaaggctttgggaaatactggtgctattttgaaagtacggtattcagatatgtttgaagatagagaataaggtgacagttttttgtgaaaaaaaattaaagaaaaagagacattatattaattcttgttataagtgaaacaaaaaaaatttcatttaatatttttcttcttcagggaattggtagttggtatgtgactcaaaactgctcatcaccagagaagcctatactttgcaattgcctttgttaattccttctgtatttaaataatatctatactatgtttcctttgtagaatgggttatagggaatataaatatgtccctgtgattactagtttatttaataaggtaaatggcttttcggttttcttctagagccgaattctgcagaaagactttgtggttgcccttttgagtaattcattgctgtcacaaactggataaatttcaggtagaccataagtaccaagttgttatggtataaaatactagtaacaattttgctagtagttactaaaatatgctatagtcagataaatctgtgtcctgtaattattagtttatttattaactattgaattaacattttaaaagtaactttaaagaaacatttttagggcagagatctttttctagagttccacctgcatagataatttttttccaaaccttgtttgcttatgccatacttggaaatatgttaggatatgcagagagttgtctcagcacttactctttgatctcaccacctgcttgatcatatttcatatgcagacactcacatgtacacatctctatcatccacaacatccacactgtcctcgttcctccttttattatagttatctctgtctgtgccaagtttcaatttggaagtcagaaagtaaaggaagtaagaaaatctaaatgttctcccagatcacaactctttgaggtatcccagtattggagactgccaggcaatgccagctatttataactcagctactttctagccatgatgaaagtaaaactggaagttgaggaaccagtgggtagagaagagtgggccacaatggaagagatagaagagttttctgagaaaagcaatatatacagtaatttttaatagttgtcctgtataagatttcaagtccatatcatctcaaatactgctttttcttgtaaaggattcagtggctatattgcatttcatttctggttcacttcaactcaaaattctctaaatagctcctcttattgtaagtatttgagtggtttgctataacaatctttatcattacagcaacaatttttgctgctgtcccaggcactgtagaaatgagaggtgaggttcctgcttttaaagactttacagtccagttgggctcataaatgaataaggaaatataataaagaattataaagtccctccatttattctttacttatttgactaatatatttattgatgacctacttcgtgtcaggtaccccaatctcatggagacaggaaataaatcactaaacaaataaatgagataatttcagatagtggtaagtgctgtgaaaaaagtaaacaaatataacgcagaggtagtagaagaagagtgtgctcttatcacagctaatcttggtttaggtggtagttttagttggtaattaagtggtaagggatgtcagagaatgcttaccaaagtatctggtatgtaaactaagacctgaaggattcataggtgtgagaggggaaggaggtgggtgaagagcattccaggcaaagagaagagtatttgcaagacctagatggcatgacttgtcctgtcaagttgctaaaaatgatccagatctgcccaggagccctcagtgagtctggtgggtgataaggctggagaggctggcaggccaaaaacaaataaagggtctctaagccttgttaaacttttcaaattttggcccatgagcattgggaaccaatattcattaaatggaattgcttaaagctctaagaaatattttcagaatatgttttaatacagggcaccattttctagtttgtaaaccctttcttttggaatgccagaaattttattttattttttggcaaaacccctgcattatgcatgcattttccaaataatgcttctaatttctttcatttatttatcaatattttggtgacacttcacatcagcactgttttgggtgataggaatatatcattgaacatagattaaatcctcccatatatgtagatttatttaaaggcatgaattagcagagaattcctcagggaatggttttgtcaagaaatgtgaaggggctgagattctacttgcaaactaacaagttagcctgccacagtttcacataagctgacagaagacacaagacttgtagttcagagaccaacagctttattactcatggtagcagaagtagccagagtgtaagcctttgtgccagttcccagttttcacagaactatgtgaagagggtcagttgacacctatacatgcagtgggttgtgttaaaagagagcaaacctgaacttatggaacacgaatattttataatgggtaataaacagaagcatgcctatcctctgctctggagggggatatcatctctacctactaaggctataagcaatcccgccctttgctcaaaagggagacactatctctatcttccgcgatggtacacaataaaaacatctttgaaaagacagttcagcacagaaatagtcagtgcaaaatacatgtagaaacacaagagacccacggagaattgtctcctaacagatttgcctttgttttagttaaagtacaagctacaaaagtattatgcggccaaaacaagactgaacattcatctgtttcttttattaaaaaccgtttgttctggacgtatcctgtagtgggtctgcataggtgagattttgtgaacagttggccttagtgcattagatctgtgcagcttgattctgtctgcagacgttttctcagattggatgataattgagggttccatatactcacttttatgagtgcttgaagtttgatacatctttcagtaaacttcaagcctgccttttctgttaatgttgaatttatatgtttatatgtaaagagaagaatcaagtataataaaatatggtcaaatacatttctccttaaacattttgtaatttttttaattttgaaaattgttaaggcttcagaagctgtcttggagaattttctggccaaacttaacagatatttaggagtggggatccttttaaatggctacctaccagggcctttaagtggctttcaattgtatatataatattttaattattatttttaattctagaagtccagttaatttgaaatttaatgttataatattttttcatataacatatttaatccataagtcataattattaaaatgagaactgctatacttatgaaacataagcaaacactcactttttggggttgtgtgtataaaagtattttcaaaatatgatagcagacaagaccaatggtttagaattttttttttttttagaaattctaaaggcaaggcataaaatctttttaaaaaatcacacttggaagattaattttgttttaagttattgatcaatccaaagcaacattcaacttcacatatcaattttaacaaatttccatatattacagtggcttaagtctaagagcagaagttaaatctcttgtcctttactttctgggtaaacaattgtattgtaaatgtagatgacttttacctcaaggatttagatgggagtagtttttctcttttttcaccccctctaaaagaaggcagggttggcattttgctgatgccaatgatgtttatatttctgagggctgggcaattgtttcttcttcacctggtcccacttgcacatatctgttttcctaaaaagattttaaaacatttatttccaagctccccaaatcgcctacctattctgcaaccagaaggaaattggaagaaaaaaggtgtgagataagagagccaaaggacagacattaagagccttccaagaatgacaggtaaattggatttcatcactttctagattaaaactcctcactcgctgcttattgtatttatgatgaaatacaggatgtagagtgaggccacatggccctggacacttccgcagcctcctctccacctgtactcctggctcacccactccttcatggcaatctcactgacctctgacagtttctacaaatcccaagctctctcccttctcaggggcctcctcaggaacagtgcatgctgttccttcattgggggatgctctttcctttccccttggactggttaattcctccctcaggtcattgtcccttcaattagagagggtttgccctgcccctccatgtctaagttaaatatctgccatatttttcttcataaaagcttttaacataatttgtacatttgttagttttgatgaaattataactgaatgagcatttactgcgaatcaggcatatgctatgtattttacagggtttatcacctttaattctcactatgtcatttgtcccacttcacttaagttttagaggggttatggaacttttccagggtacagagctaggaaagtggttgagcctaaattctaactgaaacagtccaactccaacatgttcctcactcctaattctttgcaaaactgccctcaaaatggctttctccatgctgggccctctgttaagcaatttgcatgcacacattcagttaagcctcacgacagtcctagaaggcagtactgttagtattatcatcctcattttacagataagaaaatcaaggcatgaagagtaatttgcctaacattatgcccaatttgaaagcatatatctgtgggacctcataggacagttgcaagccaaggtcacgatccaggaaacttgacaataggctctccttttaatcagtcttgtacgtgggccctagtgctgctccctccctccggttccatggatgcaggggccattttgttcagcaccacatacccagcaccgtgctcagacgagtaattccatatgtatttgttgaatcagtgaaaagagagtgttggtattttcaatcgtggctgaaaattttgtttgcgcaagcctaaatatatatatatatatatatatatatatatatatatatatatatatatatgtatatatataaattttgtttgctcaagcctagctagctagctatctacctatctagctatctatctatgcagctggggctacaggtacatgtcaccactcccggttaatttgttaacttttttgtagagatagggtgttgctatgtgttgcctaggctggtctcaaactcctggactcaagcaattctccttcctcggcctcccaaagtgttaggattacaggcatgaatcactgtgcccagcccaacatatattttatcatcaaaaattattttacaaaaccctacagatatacttgttatgttaaattataaaacagccttcaccacccactttcgtcactggtctggtgtctttggctactatatggggtatttccagcagatatatcatcagctcactcatagaagaggtgagaagtcctttattggcccctcaatttttctaagaggatgtcaacctatttccagcacagcagttttaaattggcacttgtcaattacgtatctctagatagcaaactaccccaaaacgtaaggaatgtaaacagcaaccatttataatttttgagtctctgggttggctgggctgtttggctgatcttgtttgagttctcctgtgcttggtcagacttgctcatgcatctgtggtcgtctgagaggttggctgggaactcttctcttttccacaaaatcccttctcctctggcaggctagtctggatttgtcctctaggtaatggggatgggggatgagcaatgatttttccagtctctgcttgtattgtctgttactatctcattgctaaagaatgtcacatagctaagttcagagttggtgtagaagagtaccaccagagggtgtgggtaaaggaaggtggaaaaaaaaagtgtaacttgggacaatatttacttagaaggacaatcatgaaatcagagcaacctggtatgtatcagaggttcaactgagagtaacagccttagaagccctgatgggtggatattagtttctctaaatacaaccttgcattaacccaagcctgtagaaagctgaagaactggactgttgttctgaccaaaaaggctcttgtttttactgaattgtattttgacattaatgccttttgtctaagaaacagtctttctccttgttggatctactgcactggcccttaaaaggcaaggcatgggggtcgggggatgtggaattttggctctcaggggacatttggcaatgtctggagatgtttttggttgttacagctggaggaggagtgctattgtcatccagtgggtagaggccaagtatgctgctaaacctcctacaatgcatgggacagcctcccatgggacagactccctctagtcaaaatgtcaatggttccaaggttgagaaactaatctgcagaaaggatattgttgatgggttttccagatactctttcgaaacactttttttcccaattatgtatcagaaatagttgtgctgaacaattgttttggtttagtcttcagcacaaacactgtgaatggaataaatggtcaacttttccattttgcaatggctgttgggatgctcatagtcaaatttgttacatgcctgtagaaaatagtcatatctctattttttttgtttcttttagagttgaagtcttcctatgttgcccaggctgtagtgtggtggcaattcacaggtgtgatcatagcacactacagcctcaaactcctgggctcaagcaatcctcccgcctcggcctcccaggtaactgggactacaggctcacaccactgcatctggcttttattttttattaggctcatttttggctccattttattgccctgccattaattttccttagtctttttcagctatttctaatttatggtatttcattatttttataagttcctagaagctgtcttaaatcttacgtttaaaaagatctaggggcataaatgaatacctactagcataaaatatttctagtctgtgataaagggcttgctcaaaaataagtacagaatgagaattgctatttgtagccactggaaatgaacagatgctctcagatctaagacctcaaattaatttgagtcttaaataaacaagactaatgacaacaaaagattgaataacatttaaagtttgaatgctgaacttactcagcaccttctattatgcatctaatgtattgactggcacatagtaagttcttaatatatatttgttgagtaaataaattaatgattttaatttgattccattttgataatgacaagataattttttcaaaaagttccagattcaaaaaggtctttgttgactaaatatgatgggttactgatggttagaattttagctttgatcaatttgtgaagaaatctggaatttctgaagttattattatgtgttcgaggagatacatgtctccgtaacaattaaattcatgtattcatactggatagatttagccagacaataggggagaaacttatgagcagtgtgctcttagcatagtactgcttttcctcatgatctaaggaagtcataagcaatcttctccaaaaccccttcaacagaaccattacaataatatcttgttgcagagtcattatagctttctaacctctaggataaaagaccataatttccagtggaattctgtcattcattaagaaaacaaaaacctataaaatggaagtgaaccactgtaaaatggaagctaattaattagggtaaacatttataaagccagaaaggaaatgcagcttttccttatcccctccactactcccaggaaaaaacaaacaaacaaacaaaacatcttgactgtactggtaagtaggctccaataaataatggaaacaataaacatatttatatccttttcaggatataatgatggtatttgaggatctaataatttaaacaaagaatgctttgctgtagatgagacaatagccatcagttttattttccattactattttatctaaatcttgatttttaacaatttacctgtagaacttatacattggagactgagcttgatactgactttctgtgttaatacacgagatattttatacctgtcattgtgacactgtgtatctgaaaacacttctagggtgtccaataatttatgcttgcttttatttctcccaggtaatcatacatattttctctacataccttgggctagtccttgaattatatattccattccttcattttcccatcatttatgacaaatgaatgaacatgtgacaaccatgtgccaggtagatacttgggctagtggttgagaatgcaaccataggcaagatattaatacatgattttctctttaaatcctaatgacatttaacaggaatgattccaccatttattataatattaacagctaacattgattgggccctcactatgtttcaggcattattcttgttttacatgaaatattttatttaatatttatgacaacccaatgatgtaagtgctataattgtcctcatttgatagttgtaaagactgagaattatttgctttataggagagatactaaggcaaatgattattttaaatgtctttaataaatgacatggtggggctgggtgcggtggttcacacctgtaattccagcattttgggaggccaaggcaggcagatcacctgagatcaggagtttgagaccagccaggccagtatggtaaaaccccttctctactaaaaatacaaaaaattagccagtcatggtggtgggtgcctgtaatcccagctactcaggagactgaagcaggagaatcacttgaacccgggaggtggaggttgcagtgagccgatatggtgtcactgcactccagcctgggtgacagagcgagactccatctgaaaaaaaaaaaaaaaaaaaagacataactgtgatgaatggtggtgtgggaacacaaaggagagaaaagaaacatagtttagaaaatcagagttgtctgcatagtattccatggtgtatatgtgccacattttcctaatccagtctatcattgttggacatttgggttggtttcaagtctttgctattgtgaatagtgtcacagtaaacatacgtgtgcatgtgactttatagcagcatgatttataatcctttgggtatatacccagtaatgggatggctgggtcaaatggtatttttaattctagatccctgaggaatcaccacaatgacttccacaatggttgaactagtttacagtcccaccaacagtgtaaaagtgttcctatttctcctcgtcctctccaacatctgttgtttcctgactttttaatgatcgccattctaaatggtgtgggatgacttcatgtcctttgtagggacatggatgaagctggaaaccatcattctcaacaaactatcacaaagacgaaaaaccaaacaccgcatgttctcactcataggtgggaattgaacaacgagaacacatggacacaggaaggggaacatcacacaccggggactgttgtggggtggggggaggggggagggataacattaggagaaatacctaatgttaaatgacgagttaatgagtgcagcacaccaacatggcacatgtgtacatatgtaacaaacctgcacattgtgcacaggtaccctaaaacttaaagtataataaaaaataaaaattaaaaaaaaaaaagaaaagaaaatcagagttgtctgcaaaaggcaaaattgtaaacatgaactcccaagatttcttatccgaatccctgggactgggaatataatgtgatatcacacttgtgattatattaccttagatgataaacattttgcaaataaaattatagctattaatcagttgccttcaagttaatcaaaagagagattagctgggtgggcataatcttatcatatgagtcctttcaaagccgggatttttttttccctctggctggtagaagaatagaaagtcagagagatatttgttggttggatgcactgttgctggctttgaacacaaagggtactatgtgacaaaggcctgagagtggcccctcagagctgctaacaagcccttatagccagcaaagaaataggtacttagtcttacaaccaaggaaatagattttgccaaccatctgagtgagactggaagtggatttttccctagagcctccagaaaggatcccatcctggttgctaccttgagttagccttatgagcatctaagcagagaacgcagttgagcgtagctgagcttgtgacctatagaaatgtgcactaataaatggatgttgatttgggccactaagcttgtgataatatgttatgcaacagtagaaaatgaatacagctgcattgaattggtgacttttgtgctgattgaatcataagtaggagctggatggtgatggtggaatataatgttccaagctaagagaaccatattggcaaactcttagattgtgaagagtttcaggaattccaagaagcttaatgtggctagacaatggactgtgtgtgtggggaggggatgatgtgggggaaacagggaagcaagataaagctgaaagggactggagaagagagcaaggccaagtcagaatgatatattgtcaattgtatagaagtttgactttgtcataagggcaatagcaagccatgaagaggattatttgggatgtgcaaatcatatttactttttacaatgaatctctccagtgaggagaatggaataaaaagcaggactggaggcagaaaatccagttaggaggctactgcagtaatgcaatcatgagttgctagtgcccggaactaagtgattggctatctgatagtcatattcactaggtcctgacaaattaattacttactttatttatttatttattttgagacagagtctcgctctgtcacccaggctagagggcagtggcgtgatctcggctcactgcaacctctgcctcccaggttcaagcgattcttgtgcctcagtctcccgagtagcccagattacaggcaatcaccaccacactcagctaattttttgtatttttagttgagatggagttttgccatgttgccttggctggtttcgaactcctgaactcaggcaatccccatgccttgacctcccaaagtgctgggattacaggcgtaagccaccgcacccagccaagttaatttattataatatttttatattaatttatcagaatctagtgattaactgtaagagaggatagagataaggatagttaagatggttcacaagtttctgtcttgcgcaactgtatggagttgtctttagcaaacatagaaaatttgggatgtgtaattagttgagggaggttgattaggattccatattttaatgtgtgttgagttcgaagatgctatttttcataagatgataataaccattgaaaatggacaacatggatctggagtgcggaagaatattatggatttataattcattagcattgtgccaagacaggcaagctacagtagtaaatacaccctcccagcctccctcatcccaatttcagtggcttaaaataatatatgtttaggtcaaaataatgtgtgcttcttctccatgtggccattccgggatccaggtactctctatcttgtgtctctgccatctgtaaaacagtggctgtcaactgtgagtgatttagcaatgtttggagataatttggctccttataattgtgagggatgctactgaagtctactgcatagaaaccaaaaatctactaaacatcctgcagcacacaagatagctctcataataaagaattatctggccccaaatgtgccagataattctttatcaatagtgccaaggtggagaatccttgctctgaactttatcatataactcatgtagaagaggacagaacacagagaaaagtgcatgactgatttttactggtaaatcctggaagtagcaagtatcactcccactcttcctctggagataacttaatcgcatggctgcaaacaacaagaagtttagtctaggtcagagattggcaaactatggccctcaggaataatccaatccgctgcctacttttgtaaatgatgatttatcagaacacagtcatggccgtttgtttacatattgtctatagctactttcatgctacatcagcagagttgagtagttgcaacagagaccacatggcctgcatagactaaaatatttactattgggccctttatttaaaaaaaattgccaatctctcatatgggaatatacggcaggacaaaggaaaactggactttgttagatgacaattggtctctgccatgagaaaagacatgtaattgaaattatggtagaacattatgttgcccagggagaacgctgatggtgagaaaacaaaagacaatatttaaacccacagttaggttttattgacagtaagacatcatgactcaacttggaaggaagactaaacataaatttatatcatacctctgtgcctgttttccaaatagctcttgatataaaaaaattaaggaaatgcaatattaaagaatagctttgaaaacttacaataggttctaactggcaataaccaacatggccacattaaacttttttcttctgactcttatggggatttatttagttatttcaatttttcttaagtgtcttggtcttattaaattatgatgcaaatgggaagtagctgaaatagataatttacttgtgtagtaggtgtgtctgccaatttggctatatgaaaaatgtcactttattttctataatgtgacttaatttctatttttgagccttcatttggaaatgtggcagaaattagctctcagtacactcagggtcttcctgggttacatatgtgtcccagggtttcatggggagggcttatgtagcaccagacatggaggaacatctggcctaggtcttcatctgttgatgctggcttctgtattttgtgatgctaggcctggaagtctgccaactacatttctcataaccctttgcaagctggattctaatttggttctgcaatggggcacagatgggaagtggaaggaaggaagaaaggggggaaaggatgttccagcatatttccagttcctgctatcatccttccagcagaagaggtaggttaaggctccagcttccagcttcttttgcactcccagaattaggacgctctaccctctcaaaaaatctgccagcattaatcttgaggtgggttctctcagagagaggttcaagcaacacccatgggtaggggtgtgcttgcttcaaagttcctacattcacgtaactttacttccttacttttgtttccccatttctggggatggtagctgctttttcaattacgagcatttgggtgactcagtgtctcatttttgctctttcggccttctaacacttgtttaactcattctctttgaaatccctgagtagggggaaggtctgaattcctatctagtctttgattggcatgtctcaggtttttcttgtgtgtccttatgttcaacctatgaggaatctgcatacttgccagctatctggattgctcttgggtgaacctgaaatattcaagtgctgcttcctttgttcctcttgcatccacatcatgctagtctgtccctgccatcttgaaataaactccttaggagaaatgtgagtctgtctgagtgccacctgcctagatgcacatcacatagacagctctttgcttctgtactgtgctgggctttcttcctccgctgggcttttctctgggatgaggacataattccacctctataacaagattcacaccccaacctcacccccaggacatggccctatctcagagatgcaatgctacactaagctttaaacaattatcctttggccgggcgcagtgcctcatgcctgtaatcctagcactttgggaggccgaggtgggtggatcacctgaagtcaggaattcaagagcagcctggccaacatggcaaaaccccatctctactaaaaatacaaaaattagctgggcgtggtggcacatacctgtaatcccagctactcaggaggttgaggcaggagaatcgcttgaacccaagaagcggaggttgcaataagtcgagattgtgccaccgtctctagcctgggcgacagagcaagacgccatctcaaaaaacaagcaaacaacaacaaaaaaaactccttcttctttgttctttccccaacctatggattattttctggtctccagtgtgtgtggtgttgtgggggaggtttcggagcgggtggaagtaataaggtcctgactgagatgcttttaaatctcaagtcccctctagagcctaagattttgaaactgaaaatttttatgaaagtttctttaaaacttttgttgcctccattcttctgggtcacattccttccctgaggcagtgcaggcaacatgttagctgccccaaaatgtggaaggaaggtaggaataaccagaaatacaaggtgtgtctgttagttttcaaaatagcttactgccccaaatgtttttaagtctcctagaatcctaaagccctttttcccgatctctagcttcccatttccctgatcacaactctcctcctcaatttttcactctcccatctccccccatctcctgtttcctagatcctggtctggcttgtgctgggcaccctgtgtgtattttcatcatgacacataccatattctaatggctattatcttcataggagaatatgagaagcttgacatcaataaaaatattctattccactctgtatcttcagtctctaggacgaagtctggcatagaaagggtacaataagctgaagacaaactgatctctagataaaaaatgatttgtccaaattctaagtattaaagacagtagctaatattcacatagcactaacatgccccttttctgctctaaacagtttagatacaccaagtctttgattctgacagtaattctgtgagtaggtatctattatcatcctcattttacagatgggaaaatggaggaggcacagagaggtgtggcaacttgctcagagtcaggcagtagcaagtaagagagccttgatttgaaccagatagtttggctttctagtccatactcttagacactataggtcatgacacctctcacatactgacttggtttttgtaaggagatggcacactcattgtgtaaagaattcaaatatgtatgtgtgtgtgtgtatatatatatatatatatattttaaattccactgctctaaaatgcttccaaagaggcatagaagcaagaaaatacaggaaaatgttttgtattaccttactcattattaacaagaatagtttattgacacatttatcttaaaagcactacatgacagagggctgaactcttatcactgtcacacttggatcaaggtactcataggtcccaaagggtcatattttgttctagacattgaagagaacatactctcaaaaaatgggaaaaaaaggaactgaaaagccaggaaggattatctctatttttaaggcatctaaaaagaaggcagaagaagaatcgattgggcatttttgcattgctctgatctttccagagaagaaacagagtaattgaattttcattaatttttctagagccaccactcttaagtcaaatggtaactcgacatatccatgatagtggcattaaatggattattgaaacagtcttaaaacaaacatatctttgtataaaagttttactttccattaagttttaaatataaaactgttatgctgtcattattaatttggggtaagtatgagagatttgaatacgttttctggggaagtaatagtttatctgaaaaagcatttccattatttatcataatattaaaaatcagaaagatttttttcaagctatcttcttttactttttatttatttagattttttttttttttttttttgatgaagtctctttcttgtcgccccaggctggagtgcaatggtgcgatctcggctcactgcaacctctgtctaccaggttcaattgattctcctgcctcaacctcctgagtagctgggattacaggcatctgccaccacgcccagctaatttttgtatttttagtagagacggggtttcaccatattggccaggatggtcttgaactcctgacctcatgagccacccacctcggcctcccaaagtgttgggattacaggcgtgagccaccacacccggtccaagccatcttcttttaccataaactacaataaaggtaataacttcacttttgttgaaatcctaataactaactagttttctttattgttccatatgaaatatatctatctgaaactaatgtgtcttcttggaaatgttttcttattcaaataaaaataattatttataaattacaatggaggaagcaaaccagattaaagcactgagtactgaaaaaaaatcaaaattaaaaggtcctttggcccattttggacaaagaacacacacacattcatttattcatttatttaaaaagtggtgagtacctattatatacaaggcaaaagttggtatgttaacaatgtctattagaatatgataatgattctaaatatgaccagtccatcaattcttttatatcctagtggctggttaagttaaatgatgggcgctgtccatttaaggctcttaaaacaccctgaatcctggtaaataaaatgcactgtagttatatttttgtttccaaggctagtaagtaataacatcccattgaggtgtttagaatgccaactagtcacagctaaaggtgaaaaagtaagctggtaatataagccagatctaattttttgtctgattattgttgaacatttgacatggtatataactacataaagtacctagcagatatgcatatcaaaatgccatattaaatacatatgtattgttaataataaatagaataaaagcaagttaatgtggaaatttaattgaggaagtaattgtccacattatctgtacataactttcctattacttattaaactgaaatattgatcatttttatttcatgtgtatattttacaatatgggaaatatcatgtaagattaaatcatatattttgtgagaaaatttggaactgcggcagaattttggctttattctattttatttcaaaaaaaatttaagccatgaataatagaaaaattttaaaaatggaactaaacacatgaaatcacaattcattatttcacatttctttattttaagctcttctgttatggaattccttagtagtgttttctgttaattaaatttaggctagaaaatctaatttttcattggtatggttctacttttctgtacaagattgaagatcaaggtcaaataatttttaagaattattgttaggtaaaaacagtttttgtgatctttacatgaaaactcttgagctatttcccctcaattaaaaataatactaatatttcccatggggttataatatgatagaggcttttaaaaagtaattaaatatgttaatgagaggagaatgttttcatcttaaactgtcaggagtccacacattaataaaagagttctttttttccttttacatagacaatgacctacatttttattggcctagaagtttgagaattgttaatagtagaaaggttagtacaatgtgataccaatcaggtttcttgacacattcaggtttatacggaccaaactttcattcaattagccccttgcctttgcagccaggaacctcttgttttcagtgtcttaactaaaggacaatgaagttataaaaacaagctatgaaaaaagaaagcatcttaaaagcaaaagttttctctgatcactgtttctgttctctttattgaacacagacctgaatgcttttgtgcctctaaaggtttagaatacagccatcgggcaggtagaagaagcacaaaagcagaaaaaggaaggctctcatcttaaccatacaatcattggccaccagcacttccaggggcctctcctaggtccctgttcttttctcccatctctgagaagcaggacttcccagaaagatcactgttcctattcccatgcttttccaggcaaaacaatgccattgctttccatcaggagcccaacagaggcaaagctactctttcctatatccatcctgccctgacccactaaatgcagtgggtctgttttcttgaattgctaggttggtgatgtgaagagaatggatggaagagttcatctcttatcccttgggtaatatacttttccagtatcttcttagctattggggtggggtaaaatggacctgggattaggtgggaatgtcatagatatgagagagtttcctggaatttttaaataccgccaaggcactggtagttaagcgggctaggggtgatcaaaatttttagatctgttgtcaactcacagattcataactgcccttttcagttacccaaatatttattaatagactaatttccagattgatctatttagtggaatgaggcactcttcagttaaagggagttaagtcgagaaagactggagctgtaagtactggtggtggattccagtttggttatgctttctgatccctacctacatagttgggtaagaaagtgcatcagttagatgtgaaaaagcatgtgctgcctctccaaagtccagaagtgcttaaaaactgtgatgtatataattcagacaataagttacgtgcacaaaggagtttatcataacataaaattaaaaggtgacaatttcatcacacagttacactgctgttttcctttttttttcttttttttttggttttgtccttttttgtttcatttttcatttccatttttgtttttttatggagggttggggaagggtagagatttggtccactgaagattagtcaccctcaatgatatatatattagaaaaaatatcagcagcaagactctctggaaatagattctgtttgatgtagctagtctgtcttttctgttttgccctctttcacggcagcctctgaagttttccgcaggggagctttctccgagttggcatgtccttggccagaatccgccgctccgccgttcttgtgagtagtgtgtttttccaagtagttcagcatttcactgagaactgtttggaaagtgcttagagctgcacatattgccggagtcccaaagccatgagtgatcaaactggaaatgagaagtgataggaaaaaagaggtgaatgatttgcagtatcatgtgaaatagcaaatctctccatataattcagaacattcaattaaacaggtattcattgtgttcctaaatgatgctaagcattgtggaagatacaacacagttgaaggtattgctcttgactatgtaagaaatgtaggaccagtttggaagacttgtcgttaatagagttgatatgcactaattattatttatatatatattttattatactttaagttctagggtacatgtgcacaacgtgcaggtttgttacatatgtatacatgtgccagcttggtgtgctgcacccattaactcatcatttacgttagatgtatctcctaatgctatccctcccccctccgcccaccccatgacaggccccggtgtgtgagttccccttcctgtgtccaagtgttctcattgttcaattcccacctatgagtgagaacatgcagtgtttggttttttgtccttgcgatagtttgctcagaatgatggtttccagcttcatccatgtccctagaaaggacatgaactcatcattttttatggctgcatagtattccatggtgtatatgtgccacattttcttaatccagtctatcattgatggacatttgggttggttccaagtctttgctattgtgaatagtgccgcaataaacatacgtgtgcatgtgtcgttatagcagcatgatttataatcctttgggtatatacccagtaataggatggctgggtcaagtggtatttctagttctagatccctgaggaatcgccacactgacttccacaatggttgaactagtttacagtccccccaacagtgtaaaaatattcctatttctccacatcctgtccagcacctgttgtttcctttttaatgatcgccattctaagtggtgtgagatggtatctcattgtggttttgattgatacgcactaattattaccaagtctaaatatttaacacatgacttgattctccacctcattaagaagtagctggaaaacacacctttagattctatgtgtggaaacatcttgctttcaagaatggcatatatggcatagactacacatgaagaaatcataattggctgagtgtgcctcatggctagctgtccctctgacttcattctccttttccatagtaatgcactttaatctgggcatatggccatccagctggagactacatttccaagcttcttttgcagtgagttttggacatgggacttaacctacccacaatgtaacataaagagaagtgatacatgcaattcccacttgcttaaaagggtagctatgccctatgtagataatcgcttaggtggcagggacaaaacaagttagaaggaacctattcatctccagactcctaaatgagagagaaataaaaccctgtcttatgtaagccacccaacatttaggtcccgaaaactaactaattaactaataacaaaaactaataagcaaatataaggaatgttatggtaacctcagcataggtagttcttccaaccacgacaaatgtcatctttggttgaacaaacacataactgtagatttagtcttcttgtgaacagaagctacccagattgttcacttatgttaactgtcccgaagtgacactaccagtttgcttcctacgtctcataataatatagaaaaacatccttgtcacatagtatgcccatgttataatatatatatatatacaacattgtgcatatgtgtatagtacatttaataaagccattaactgctaaagtcctagcttgtaactgttattatgacattagtagtttttgaatcagatataccacccttcataatattttagctacctatagttttctttcttaagttacataatctttaacagcaaaaataataatattttataataatacaaatgaaggatttggggtttaaggcagcctattaatatgcctcagtggaggtaatagtaagatctaccatgtggggttgttgtttttattagtctacgcaaagggctcagaaggatgcagatctaaacaaagtcttagataaatgatagagattgttggctgggtatattttctgggtagagggtaaaatttctgcatgtccctcattattccataggttgttaccatctttcttccctgagcctccatcatagttaacatatattaaaaagaaaaaaaaattcccatctctgattatgtgggaaacaacaatggccaatgcttgggcaattatctgcaccaaagtttgtggtgtaagacatcatcactgctcaactactatatccacacctctgctacaaggtcttgcattgccaaacaggaaaaataatttaagctctatttctacaatgagacaactagaggggaagccaaataatttgaaatctatctgggatcttggacaacaaatggaattgttggagtggtggaagaattaatcatggtgatacccacaaaaagaactgggtaaagccaaccattaatgtccagatatttgaccccaggcacaaactgtctcttttctcatgttttattcctgtttagagctcctttttaaattttcttctatattggcatgtcctctttgttgtgactcacctcttcatctatagcagaatatacaatattatttagtttcacagggtattattgaagttaatatctaatttttgagttctgaacatatgtcaagtcctgttctaagttttttatctgtatcacttcatataattctagttacaacactaagaactagataatattatttccattttacagacgaagaactgagtcccagagaagttaaataatttgcctgagaaattggatattctgtacttatgttcctcccaggctgagggtacatttttctctgagaaatcacattttctgtgggcagttttagctcagttcctctgacttaactttgtacttgggcagccttgatggctggtaaaatcagatgctttttactcactttcctgcctaagagcagggtttttaaaaatcaagcacaggtaggtagttatatataaatgcttttattatccactttgagaaaagagctgtttccatatttaaagattcctcttaagctggtatcacttcttgactgatgggctttcttgttccaaaatatggatctgatcattagcagtctgcattgtcatctttgccttggattgagaaccaagtgtaccaagtcctcacactggctttgacgtcaggcacttcgtgatttggaggaagttatttagccttgtaaaatgacagtagtctaacaagaacatctgctaggttctttccaactctaagcttcaatttaagagtataacatctttatggtgttattaaaatcaaggacatggacacaggttatggaagttgaaaaaccacttcagggctgggcgcagtggctcatgcctgtaatcccagcactttgggaggccaaggcaggtagaccacaaggtcaggagtttgagaccagcctgagcaactggtgaaaccctgtctctactaaaaatacaaaaaaaaaattagccgggtgtggtggtgcatgcctgtaatcccagctactcaggaggctgaggcaggagaaccgcttgaacccaggaggcagaggcaagatcgtgctattgcattccagcctgggcaacagagggagactttgtctcaaaaaaaaaaaaaaaaagccacttcgttcaacaaagaactctaaaatcaattgaaggatattcaatataaaaaaaagtcattttgactttcatgacctgaaaggtcatctttcaatatgaaaaacattatgtaaattttgttaattacctaatttaacattacctgcatattaaaaatatgcatagcacactgcacagaatgataataaatgtaaggcaaagattcttttctagcagttttcagtgaaatttatgaaccccaaataattaaagtaatctaatgtactacaataatgtaaaaagaagtgtgcaatcacagtatgttttaaaaagttctgggaacatcatgctattcttttagccccagtcatccagaaaaataggtgtgtatctcattcacagtgacatacagaaaaggagggggctgggttcagtggctcatgcctgtaatctcagagccttgagatgccaatgtggcaggatcacttaagcccaggaacctgagagtacaaagagctacgattgcaccattgcactccaggctgggcaacaaagcaagtctctatctcaaaagaaaaaaaaaaaaagggagagaaaaaagaaaaggagagaggaataatgtagaatctccaaaaaaaaaaaaaaaagaaaattagaaatagaaggtctgacttttgatcctagacaggaaaaaaaaaaaaaaaataagactaaggtcacctgcaaggtaacgaactatagtcaaatcttcaaactctttgacaatagagatgattttcaactttggaaaatatttttcagttacaggtttgatatttaagttacccttggcatttgcatataatttcaccagattactgatgagagcgcatttcacatgcaaatatcaccagggttaaatggcccatgatggtttgaaataggcagtcaaaatatagaagttacttaaattctaaattctaaaactctatcctcaatgaggccctggagacaacttgcattgtgttagataagtcatgtctatgctacatttgtaaaagaacagtgactatagaggattcacaggtcatatcagttttcttaatgtttcctaggttgccttccttcaccctatgtaatcacgtgctctattaccttatttttgcaaagtttatctcaagcttatctctttttaatacccaaacatgaccgttattcctatttctgtgtgtttgtgtgtcctccctctctcagccaattgaaattccactcaaagaaactcacaatttctttgatgatactgatgaaaaagggattagtttcctcatgcctgaaaaacaggtgtgttacttccaaaggatagaaacttgccaaagtgatgagaggacttaaataaaattcctgggagaaagaagtaacaatccccaaacaaatgtaaaactatagcacagaggggacaatgggaagaaaacaggtgaggctaaactctctgtcacaaagtgaggaagaggaatgggaataacattggtagcatcagagcaaaactgacaatccaggtatatcagatttttactacaagtggtaaatcatgttcctcaacataataaagaccatatatgacaagcctacagctaacatcatactcaatagtgaaaagctgaaaacttttcttctaagatcaggaacaagaagacggtgcccactcttaccacttttattactattttacatagtactggcagtcctagacagaactattaggcaacagaaagaaataaaaagcatccaaatcagaaaggaaaaagttcaattgtttctgtttgcagatgatatgattttagaaaatcctgaagactctgtgaaaaactgttataataaatgaattcaataaagttgcatgatacaaaaatcagttgcatttctaagcagtaccagtgaactatgtgaaaaattaagaaagaaattaagaaagcaggccgggcacggtggctcacgcctgtaatcccagcactttgggaggccgaggcgggtggatcatgaggtcaggagatcgagaccatcctggctaacaaggtgaaaccccatctctactaaaaatacaaaaaattagccaggcgcggtggcgggcacctgtagtcccagctactcgggaggctgaggcaggagaatggcgtgaacccgggaagcggagcttgcagtgagccgagattgcgccactgcagtccgcagtccggcctgggcgacagagcgagactccgtctcaaaaaaaaaaaaaaaaaaaaaaaaagaaagcaatctcatggtatcaaaaggaataaatagtatcaaaaagaataaaatacttaggaataaatttaaccacagaggattaaagatctgtatactaacaattataagacactaatgaaagaaattaaagaaggcacgaatgaatggaaagcgataacctgtgttcatggattggaagcattaatttttttaaatgtccatactaaaaccaatctatggattcagtgcaacccctaccaaaatttaaacagcattttcacacaaataggaaaaacaacactaaaattcattgggaaccatgaaagaccctaaatagccaaagcaatcttgagaaacaagaacaaagatgaaaatatcatgctactgatttcagattatattacaaagctatagtaatcaaaacagtatagtactggcataaaaacagacacatagaccaatggaacagaacgagtctagaaacaaaccctcatatatgtagtaagctaatctttgacaagatcttaatgaatacacaatgggaaaaggatggtctcttcaataaatggttctagaaaaactgagtatccacatgcaaaaaagtaaaattggatccttatcttacaccatacaccatacacagaaatgaacttgaaattgattaaaaactgaaacataataaaagaccaaaactataaagctcctagaaggaaaaatatttttggcattggtcttggctttattttttggacatgacacctaaagcacaggcaacaaaaccaaaaatagggaaatgggattaggtcaaatgaaaaacacttctgcacagtaaaggcaacaatcacaaaatgaaaaggcaacccatggaatgggagaaaatattagcaaaccatacatttggtacaaaaattagtatctaaaatatataaggagctcatgcaactcaataggaaaaaaaaaacaaataacctgatattaaaaatgggcttaggacacaaacatacagttttccaaagatgacatacaaatggatagtaagtatatgaacagatgctaaacatcactaatcagtgatacacaaattaaaactacaatgagatatcacttcacatttgttaggatggctattttcaaaaagctgagaaataagtggtggtgagggtgtagataaaagttaaccctgcacactgttggtggaaaagcaaactggcgcagccattatgcaaaacactatgaaagttcctcaaaaacttaaacattagaatgacaacatgatcctgcaatcccatttctggttatatatctaaaggaaatgaaaccagtatctgaaagagatatctaaactccatgttcattgcagcattatttctaatagtcaagatgtatataaaattatttagccataacaaagaaggcaattttgccattttgacaacatgaatgaatctggaagacattatgctaactgaaataacccagacacagaaagacaaatactgtatggtgtcatttatatgtgaaatctaaaaaagccaaaccataaaaacagagtagagggtggttgtcagaggctaagaagtgacagaaatggggcgatgttggtcaaaaggtacaaactttcagtaataagatgaataagttctggggatctactgtatagcatggtggctatagttaagaataatgcattatatatttgaaaattatatatattcaagatataattaagagagtatatcttaagtgttgtcaccacacacacccaaaatgtaactatgtgaggtgatggatgtattaacttgattgttgtgatcatttcacaatatatatcaaatcatcatatcctgcatcttaaatatattttatttgtatttgtcaattatacctcaataaagctggtaagaaaataaacaggtctgagatggaaaactattattatcaatgcatacttcacctgacattatctgccagcagttaggtattagtcacctccaggaggcgtctagcctggggaagaaggagtggggacaccagtttctgcagtgatattttttccttaaacagttttatttacgtttattttaattacaatactaattcctttatttttatttttatagattaaagggatataaatgtagtttcattgcatggatatattgcacagcagcgtatgtaataattgaattaatgaatagctaaatgtttcttggtttcatttgggaatctttgatgcccagatttgtagggttttgtttcaaagttttgttccaagaatgagaaaaaggaatagtgcagataggcctaatgtttgcagggaagagtattctgttagcatatgaaagattaaataattctttgctttcttttcagagctcaatctttaaagctggcaatagtataataaataaaattgagacctttttttaagtctagaaatcacctatttatggacaaagaaaacacaagcacatgtttcagagacaatgaagttgttaggtaatctttaatctttgagaaatcctggaagatgggacataaagtagtacaattaaacagagagacatgccttaatagttaaagcaggaggaaaaaagattttagaaactctgggttattaaattatatttaattagtctaacacatttctgtaatgggatattttcaaaatttgaatttatcaagattgaatttgcatatagtaatatttactcttttcaggcttacagttggttgaaatttaacaagcccacacagtggtgtaactaccaccattacccaaaaagcttctcgtgtgtttgccagtcaattcactctcccaagccccagctcctggcaatcactgctctcatttttgttcctataattttcacgtttccccagagtttcatataaactgaatcatgaagtctatagactttcatgactggcttctttcatttagtataataattttcagattcatttatgttgtatttatcaatatattgtttctttttattgctggtaagtattccattgaatggatttatgacaatttgttcacaatggattattaaaaagctgaagtgttagtatttaaaaagtagaagtaatcactgaaatgctgcatggatttagtaagatatgtaataaagtaagtgtatttccttttataaatgagttattagagcagtagcaatataattgagtgcaggatttcagcaatgcatctgacaaagtctccccacatactgtaagaaaagttggaggggaggaggaaggtaagctagataacagcaaagtaagggaaattcacagctggttgtacaatgacacccaaagtgtggatgtaagggcagttgtcaaccttgaaagatgtctcttgtggagtgctgcaaggctgtcattaatcccactctgctggacacattaattaacaatgtgattgaaggcatcatagatttttagcttaatggctggtattaaaataaagaggaaagtttctgcattgtataacagaaccaaagttctgaaaaaccttagtgtgatagacagcttaattgttgggccaaaatcaatgataggaaatttaggggagattaaggaaaacatgtccacttgggtaaaaagcaaattagtgtcgcaatatactaagaagaagatctgactgaagggctattcataggaaagagctttacgaaatcagtaaagtctaaactaaaaaggcaaaggtcaaaatttgaggtttggagcatagctaggcggacttagagactgcatctaccttggactatattctcattcattttctctttctttctctctctctgtctctctctgtctctaactagattacagctcattgatttcattttcctattactaatttcacactgaggagcagaaaggctctgacaactgactgtgaacaataccatcacctgctgagaaaactcagactagtgtagtttatggcacctgatgttagggaaaatgtaacttatatttaacagtcatcttcctaattttattcatggttttaaaagctcctattttgctagacctcccaattaacattctctaaagcacctttcttgcaacataaaccatctcctcaaattggctcagttcaggaaggaggtaactgtttactgaattcagaggtgaagctctacttttccgttttcctcttaagtgtcaggtttcttccctaagtgtttacatttcaatgatttgaagaataccactgggtagagtagccattcctagggagattttgcactcgtgtgtgtagtgtgtttgtgtgtatgtgtatgcatatatgtgtgaaagagagagaaagagtgtgtgtgcacctgtggacttgtaaaatggcatcttcttcttgaccagtggccttgacctgaatgttttactgatatagtctataactttttacatggaaatgtattgcaaccattcaaactgtattctcttaacagtgggtgtcaaaactatagaaactgaggctcacaaatgaaagagaagaggtagaatagaggatggaagaaaagagactgctgttggaaagaaaatacactttaatcctttcttctttttccctgtgtggttttactaataaggtggtagcaacaatccatttttaacttggacagtgtttatacttagaaattgcttgacattaatgatgaggacctatcagaaaattccatataataggaatttcacaaacttctctttgcaccttataatccctggttaagtgcatttcttgctcatggtcaaggccttacctacatttatctttaaaatctccaaagcttcagttcttacttagaatgtaagctagtataggaatctgaatgttagaggaataagagctattttactttctctaatctaagtaagtatagtttacatttcactagcttaattgtatgctagataaatgctacaaagctgtgtccatattattctaattgtccttcaaaaatgctttatctttactttaattgatttgtctaaactaatttaaattagaccagtaaagcaattttctaaaacatagactgaagcaaccttctatggaatcctctcctgaattcttcctatcttggcaagagttgcgcctggtatccagcacctttctacctactaagcaaacactgattcaatatgtgttataaaggaaatgaaagtctctttagtatttgtcactgaagattagatcactcagttgtgtctgccaaccatagataaatttttctagctttcttttggggtacaaaaagctggaggtaatagacactatcatgctacaaactagaagactgaaaatcaagagaaaatagcctgccatcatcatttaagcaatttgactaaaagctaatttcattttgtaaagtttcaactttttacctgaaaaagcaagcaagcttttttctccctcacctttttttttttggtgtgtgtgaaggttgaaatggtgtttgggttattattcctattattttgttatgttgcattatttcaatgggtgtttactatcactaatctttttatttctagaattgcatactgatgtcactcagttctgcttttagccctctgggaaggatgcaaacagtaagatttaaatggaagacaaatctccttttcctttcctctaagattattcagttaccacaggcttaggtccaagtgcagtctataatctcactacagtgttaggtggctactagataagtgccttctactcatgagaacagccagtagagagggagtctggggaacagaccctcaacaacaacagcaaagaattgtaggtcttctccgcccaaccttacttcctctcacggctctgagtattagacactttatctctaaagcagcacaacttctaaatgtaggccatggagagagacccttaccatggggcatgtaactgggtcttatcctccagaactcaatggcatctattctctgtagcctaaatgattcagaaagcagatgaaaggtgaaaccagttgatgatgcttattttctacatagattatcttatctcatggtcccaagtacttttaaaatggaatttaattaagatacacaattaaagtatctagttctctggtggtgaagaatcattgacatcaactcattaagcaaaaccttgacaacactctcaaatgttctgtggtttcttcagttggtggttctcaaccctagatgcatagaagaaatcactcacaaagcttatttcaaaaatagtaatgtatgtgtcccaccccaaagaccctgatttaattggtttgggatgaatccaaagcatcagtattttttaaacaaccctcattccatttaaatgcagagaaaaaaatcagtatgtctccttacaaccaagaaataatgcctaactattatgtctgcattcctccttgggaaaaagaggatgataaacttctgcagcatttcccacaagaccttctgcggaatcttagttttatgtaatgttaatatgtactctgagatttaaaaacagttttcatgatcaagttttagaaactgtggctaggtattacctcctttcaaaaagggttctgggagtctttggtatgccaatatgcattgtcatacttcaagataggtataataattagggtttctttaaccaaaaaaacacttggccatgaaacgctttcagagagcatctcataggactgactagtgctctatgaaactcaatttggggaagtatgtttatgactaccctgaatctctgtcagattgggagatgtgtgctcatccactgccctaaagtcacattccttctgttctcctcagccacttactttgaggtcccaaaggggaatgaatgggtccttgtgactccattttacctcagttcagctcattagcaaagcaggctaaaataaaaatcattgcacatacattagaagagactacaatcaattacatccaagtcagcttcttgaaagtgataacatttgatgcctgcaccataatttttacatatgagaatggagatttttataggggtacattaaccatcttgttacatttctccctatcagatgtattttctgtttggaatagaggaatgaaaatgctaagctttttaaaatgaattttatcgaactgttgatgttttaagatgagcaagttgagaaaacataaaaagcagatatgagatgatatagaaactcagcataagtaatgatttaaaatgaatcagtaaattcagaatggagtaaaatattattggtctaaaaagaaccttagagatcacccagcttaactgcattgactcatgaacatgcagaggtcacacgggtgcaatgcctattctaaatccacacatctagctggtaaccaagtggagactgagttagatcccctgacaattaattccaagtgcttcccaccatgccatattgtctctctgtggatttctctccagtcaatagctcaacaaagatagacaatatttaaataaaaattaaccaaactcttccacaatgtatgtgttccccaaagccaattattcacacatgtagttattacagggtcatgtttgcaacttttaattagaaacaattacctctggcttctattgttttaaccactagtctcttatgtgctaaatctaaaaatccataaaaattcatcaaaagccctgccatggatgctttaatgtatgtgtctcctgacaaagattcattgcttgagtaaactttaggcaggcttctgaaccttctcctaggcccatctttgcatttccttgtaaaaatccagttttagcaaggaagatctcccctaactcatatctgctaacccttgcttttgagattacagatttaattgaaatttcattgtttcttttctcacactaaagaatgcttggtgaagaaaactgcccgccgttgatgaccttcccagccacttttccatctcaagaaaatttaacaaaataaaaacaaaaaacaaaaactatgcacactttaggcttcttggagaaaactaaacatgctcacatttaagtagagacaaatatctgctcttcagcgtgttgccaagaatagagcaatcagaaaataccagttgagttgactgtaaggcatgtcacatgtggaaccctgaaggaaatgggaatgaataacccttgaagagaaaactagggaagacatgagaactgcctttagaaagtgggagggaaccaggatgaaagtaactctgtaaagcccacaagaagtgggacattgggaaatggaaggaaggcatttctaatagagttgtcaaagatagagagcagtctattattgagagtttccaagcttgagatggatgataacttgacagagacgttggagagaaggtctaaatattgaaggagagtaggaaatgttaggggccttccaacactgagaatcaatgaagaaaatttaatcaccagcaagcacacaaatgtctgggactgtctatacattccttatttcccaaggcagtagtaagagggtatatttctaagaaggtaggctgtcaggataatttatgagttaaataggagaattaagcacattgatcattttacttccctagtccatcgtccaattaaaacatcatggccctgagaatgaaccagtggagaatatacacaggacccaattgagatattattataatctacatttatttacatatatttattgcatacatactattcgctatgtactatggataaaaagatgaaatttccttatttccccaggaaaaattaccagtatgcttaatcttctattgtagcatcactcttgtatattataagtttatatatttatatatataattatatatattctatatatataattatatatattctatatatatagaataattatatatattctatatatatagaataattatatatattctatatatagaataattatatatattctatatatatagaataattatatatattctatatatatagaataattatatatattctatatatatagaataattatatatattctatatatatagaataattatatatattctatatatatagaataattatatatattctatatatatagaataattatatgtattctatatatatagaataattatatgtattctatatatagaataattatatatattatatatatatagaataattatatatattatatatatatagaataagtatatatattctatatatattctatatagagagaataattatatattctatatatagaataattacatgtattctatatatagaataattacatatattctctatatagatatatatatctatagagaatatagagaatatagagaatatctatatagagagatatacatattctgtatatatagaataattatatatataattattctccactttagaagttctaaagaatgggataatcctctagtcatcttttcactacctgccattaacatagtagaaacaataaataataattctactagaaataacgcaaacaacaaaacttcagcctcccaaggtacatgctgagaaaaaaagttttctcatcttttggacagggtgtcttccctggactgagccttcaagatagtctaatttcttactacactgtcaaatgtgcttttgcttgacttcagattcaaggagattatgagaacataagagaccaacaggggaaaattttaagatttcctgaaatctcaaagaggggaattcctaacatttcaaaaaagttagggctctgggtttccatctgagctgaggctactctgaccgtgaaaccccatgccaccttgttctaatgccaccactattcccaggaactgtgagtctatggggtcttctgcagatgtcaatcaaatcttttcccccttctcgtttgtgttgtggtgtctgctgtgttctctacaacaatacacactgttgatggtactcagtaaattataaataatgaataagtctgccttctgtcattttgatggaaacaagaagctttccaggctgtgaattgtgagaagggtcactgctatgcatacggcttcccagaacacactgatatgtcaactgccatggaaaactagaagtagttatttgtgctttgtctggacatattaaatctgctgaaagtaagccacagttctcaaggcaccaaatcagccaacctataaggtatacttttaagtggtctgcattaggaaggaggtttaactaaatagaatagtaacacaagttgatggtgttaattagagtattctttatgcctatctaattacactccctcttcacttctttcccagccagcattcagtaaaaatggtggaaaatcacactctgacaattgtctgctttcaaagtcagatgtgatatgtctccttcgtaattcatctttctcttgagctaatggttctatcgaaattacagttgtcactgtcagcggaaaattttaaaagggacacactcggcctggtacagttgctcacatgcctgtaatccagcactttaggaggccaaggtgggcagactgcttgagcctacaaagctgaaacaagcctgggcaacatggtgaaaccctatctctataaaaaatacaaaaacatagccaagcatggtggcacatgcctgtagtctcaagaatcacctgagtccaggaagtctagggtacgtgagacatgattgagccactgcactccaacctaggtaacagattgagaacctctctcacaaaaaataaaataaaataaaaataaaaaagacatgctgtatgctaacacatgtttacccagattattagtagaatcatcaatgtagaatatttttatttttaattttaaaacttttggtagagatggagtctctttatgttgcacagcctggtcttgaagtcttggcctcaagtgatcctttcacctcgggctcccagtagaatgtttttaatatattagtatacaatacaaaacttgatagaattctcagtaacactttaaaaaggaattggagtttttcttctcccaaagggggaaaaaaagcttatagttacggaatatcgtagaactgtggttcttaaacctacctatcagaatcaacttgagagttttaaaaataacatagatacctgagtccagccctagaactactgaatcaaatctttaaatattaaatatgtcctccaatccttgagttttttttttttttttacagtttcaagagcgattctgatataaagccaggtttaagaaatatacttgtaaagagcagagtatatttcaaggctaagcaacaagctgacttttgctatcctattgttaacatattctgttgatgcctttttaaataaatgtgcagtaaagaaattacacacatttaaattcagtctacatcaggaaccttcactttgggtttcaattggaaatgccaatcatgtatcttttgtttaaaatgataaaatttaagacatgcaatggaatgaacttggaccctcaccttgcaacataaacaaaaattaactcaaaatgaatcaaagaccaaaacaagacatacggctgtaaaactgttagaagaaaaaatacaggaaagctttactgcattgtatttaacaaagatttcctggatttgacaccaaaagcacaggcaacaaaggtaaaaaataaacaaattaaacgacatcaaaatttaaaactatgtaccaaagacacaatcaacagactaataaagaaatgtacagaatggaaaaaatttgcaaattatacatctaagaagaggttactatctagactatataaaaacctccagcttaataaaaaaaaataacctggtcaaaaagtgggcaaagaacttaaacattttttcaaagatgatgtagaaatggctaagaagcatatgaaaagatgttcaacatcactaatcattagagaagtgcaaatcaacaatgaaatatcacctcatacccattaggatggctactatttggtgaagatatggagaaatagacaccccgtacattattgtgaaaatgtaaaatggtatagctgctatggaaaatggtagaataggccctcaaaaaatgacaaataaaatttccatatcatccagcaatttgacttctgggtgtatatccaaaagaactgaaaccaggattttgaagagatattttcacacccatgttcatagcagcactagtcatgatagtcaagaagtggatgcaacccaattgccatcaatgaatgaatcgataaaatgtggcatatataggcacatacacacttacacacacacacacacatacacacacacagaaatattgtgcatccttaaaaggaagaaaattttgacacatgctatgacatggatgaacatggaagacattacactaagtgaaataagccagttacaaaaaggcaaatactgtatgattcttcttatatgagatgtctagggtagttaaattcacagaaacacaaaacagaatggtagttgacagaggctggggagaggagaagaatgggagttgtttaatgggtacagaggcagttttacaaaataaaaaagttgtggagattggttatacaacaatgagaatatgcttgacactacagaattgattagaaatggttaagatggcaaattttatgttatgtatttttaatcacagtttaagaaaaagatatagtaggaaatttgctataaagaaatctttggttatgcgatttgtatcatcctactacttttggtatgaaatcagaagattttatctacataaataattttgactacaattaaagaaaaataacaattctggcaaacatttaaaaatcataataaatgggaaatcataactttctaatattcaaaatattcaatatataaataatatcaacattttatagatgatactattgtaagtaaatatatagtgttagaaagttttaagatatggttatgcatgaaattgtgattaagaaactgaagccatatataatcttgtgagttttatacctccaatataatctcactttctttttcactaggggtgagggtggccatttaccatatatttagctgcactctgagtaacaccagcttgttcccatattctgtatggggaggtaaataagagcatataaagcccacaaagaaaatgctcagctcatgttttgaagtgagttttctctaaagagttctgtggcactaagttggcaactgactaatgtattgacaaatcagcaagttgtgcctatgctaaggaaacaaatgttttgcctatttatttcacactgtagctgatgtttgactggtgctctattttgttttgagcataaaaaggatggcttactatctgatgaaggcctcagcatctgtaattggaaataatctagcatacatgacagagtctcatttctctgtactttaatagtatgctccttctcagagtaaaattgtcatttaacacacttctttaaatccggaatcaaacctcaatgaaaattaagttctgagttgatcttttgtaaaaattataaatccttttattatgcgcacaaacaaaaatgtgaaaaatatttgtgtagatgtaatgctggagacaaatttaaacttggatcggtggtgaaggtaaatgatacgtcatttactaaatgcttcctttacattctttatctcattttagctcacctatgaccatataatgaaggggctcttatcccatttgaagctgaggaaataaaggtttggaatgagtgggtaagttaccccaaacaacccagcttacatatataagggctcacagatacaaggatttgaaaaggttttgactccaaaaccttttgctcatagcatctgggctttttattttcccccagttttattacacttctatcactagctcagttgagtgataggagagaagtcctgtgaaatatatcctacattttgtgcatttttggaagataaatcctaagttgagtcttcagagatgtgtgtctattacatcttgaggaaacttgtgacatattgtaaaatagaatattctatttaacagtctctgatgttgcagcctaaatttcaacttatttaaacacttgttattttatataatgaagtgccctcctcaacagctttacaatttttgacaggtattgaaagcattttaatatttaatgtgtattagtctttccttatcattgtttaactaaatgataataacttagaaaggatacaatatgcctatcatgtaggcattaaaattctagagttttaaaaatgtaaggcacctgagtaattacatgttctttctcacttccatatggggcacaaactaaccagataaatattttcttcattccaaaaacacatcagaaaatgaaatttaaaatatgcttccaataatacatttcttttttaaattttattattattatactttaagttttagggtacatgtgcacaatgtgcaggctagttacatatgactccaataatacatttcatgctcttgtgtggtctaacttaagaaccatttgcagtttctaattgcatcaaaatttttaacatacttctggaaaaccagtcagtgatatcctgttaatttctgtcacggcatctttccattaaacaattgtgtcaccaagataaaaaacaatttaaaagatttcagaaccctcatccaaaagtgctaagtattatttgaaataatattgttcatttttgtaaagtaatgatttcctaacaatgcataaagatataaaattttccaatctaaaatgcttcatgcattgttattctctcaatttgattttacaagcttggaattttaaaaaattcagtcaatcactgctatggttgaatatgtgtgtcccctccaccccactccaaattcatatactgaaacctaatctccaatgcaatagtattaaatagagtctttaggaggtgattagcttatgagggcagaaccctcatgaataggattagtgcccttataaaagagcccaggggatcttgtttggccctttcatcatgtgggagaaaatggagacggtgccatctctgaagcaaagagcaagcctttgtctaattaactctgccggcaccttaatctcagacttcccaggcctccaaactgtaaaaaatatatttctgttgtttataaattacccagtctaaggtattttgttatagcccatctgaaaggactaggacagtcaccatataaacatataagtggtatctctaaatagaactgtgataggaatacaagcatctgggttagtaaagaatttgagcaaactggaaaaccagtcttacctgaaatgtgttaaatgtctctggatgtcaaggtctagaattggagtgggtctggaggatcccagtggtgatctatcttggctcaagaggtcttggaattctttacagatttgtctaaaataaaagaatcaaatttaaaattgaaattttcaaattgagctttaatttcatcccatgatatttaaccaaaggcttgttctctcttttaaaagaagtctagataacatttcataaagcaacctcaaaagttccattcatagcatacagttgagtttcataatggtgactttgctctcaacggctataggataatcatacaacatttcaaacaaataacaatccatgagcactgataagaccaatgtttatttttaagatgactattcataaattaacctcaggataaggggaaccccatatgaaatgatcactatgatctttttaattgaaatgtgattttttaagacataatatctgtaaacaaatttaattaaagttacagtcttacttcagagccattattcaaacagactttggaaaatccttttttcccaatattgcattagagttcatattcttatgagctaactttatatgctaatatttgaagcagataatcaccagtaatttagttcactagcctcacaaaaaatggttatattatgttccatgtaagccaatttcttgcaaaaattaccctcaaggtaacttttctgctgcatttctttgctttaaatggttatggtttttggtcattggtttcagtttaattacagtgttacaatgtaacagtaaagactttgtgatgtacactccaaatgatataattctaaagaagcagaatacactatacaaagagatattgtttttgtttttgtattttaacaacaaaacactaaattagtccagtctctgaaaagtaaaggattgccaaagaattgcttaaaaacatccatcatctaaagtgaggtgactccataaatcaagggataatatgacagtaattaggttttttgtctgtttttacaatgggcagtcgcaaaaatgtaataatgtagccctgactttgattatcaatgtaaacaaagacaggtatagaagtgtcaaattatttcaagtgaatatgaacccggccattattctgctgcaaggcatttgtgtcatcaacaaatgactaccaaaaagtgacaaaatatcttgaagtacaaataattgatcactgagttaaaaatcagtggggacttcttaatcaggtatctaaaatttattgaattccatcaaagatcacttatgatattttaaatgaacaatgagggtctggtttaatgccagtgttcaaatattgtgtcatttcacagaaattgccttattcatgtttgcagaacacaggtgaaagtaaaaaggagtcagagataggaaaaacaaagtccttatctgcttcagtgaaataagatacttcacatccccttcctaaagggccagttggatctctgagatacagcatctgaatacatgcttttaacaactgtgtgtttctactttcattcagacagtttcttctgaactcctcacattttctgttgtgagactcagttgctttatgaaatatacctgttttcaggtgtattgcccatattttaatcaatgaatgcaacttaatctaagtgtttggtgccattttgaggagtatatcataatcttttgtgctttgtgttatttaatatagatttgttgtctttgtttatggaaatttctaactaaaattttaaatttagcctcatgctatcatttccaaattactgtatggtaggtcatcattacgatccattcttacaaagaaagattggtgttgtttttagacttttgtttttagcagtcttttagtttttctatcagattaaaataaattttaaaacattaaaataaagattgaaacattagttattgtggcataatatcagaattaattggataatggaataaacttttaagttgacaaatcaactttgttcctgtatgaataatacagcaagttataataaaattgacgaagaaattagagaaagctaaagaggtggaaaaatttaactcatgctaaataattcacacaggaggatctaccaggagtaatattatattatattatatctcccccttttatatttaattctacagcttaactcactcactttcaagcttagacttgaaaacagatgacaatcctgtagattccctgtaggcaattatcatcatcatctcattatggcacttacagaattatgattttatgactactttccttcttatttaattttttatttataaatctacaaaaagaaacaatcttacatctcaaggcaaaatgtcatattatgaattatgtaacacaagatgatcttcagtgaatcatacattctaactttatcacttacatcattgtccttaaggacgtaagtttttagctgatgtctgaaatccaaattctatgtttcacccttagatgattaacagtatggtaacactaaaagttgttaactattctgctttaccttaatgcagatcaaatgttagacatatttagttctaaattcaatcaaaaggtttaaatatgttttctattaaccaaataaacacgttttgtctgattcatttttagaattcaaaaaatgtttcagtttctattctttcgcctaaataaatgtctaaattacacaaaatatttaatcaacaaaacactggaaataaggtggcatgagaagactaatgacacttaattaataggccctttatacaattgtatacttggcaatatacttaaagacaactgaatctgtaatccatggaggtaaaaaagaaatatgtaggccaatctgacaatgtagattagcaattggatctctcattcaataaattttagatttcatatatattttttataatgttgtccaagtcttatgaataaaggtgaactgaccaggatgtaatgaatatccatataggctacttaatattaacttttaccattttaattgatgaaaatacctcatgctttaccattggtgtaaaattagaaacttctcagaacacatgttgggtccattcatatgttgcacaaaaagggtattatttccacacattccctagtttatctagttatagtgattactggttatattacgtatgtttgctatgactggagtctctgatttttatttcacatagtccaataagaagataggatgcatataagtaacaaaaataaaaaattataaagctgtattataattttcaggtgtttattcctatttactcttctgtaagataagttaattgaaatgagtggattcaattcttgcttgacatttaatggtctgcaaatgtgcagctatgagcagacagataaaataaaattacatgttctcacaatgtttaatgaaatcaaagttcaaaatatcacctaaaataatgtatgttacttagatcccaggtaaaaggaaaatactactacctggtcaaatacgctacccgaaaatagatgtctcagtataattttgacaaatatggatgcatttcttctagcatttctcccgcaaattcttctagcatttacttctattaaaacacaatctcggtgccaatttgaatgtgcttggagactgctgcacacttcaacagaatgatgggaatctccaagaaaataggaattgtatttattgcattgatgatggtagtggtgaatacttccaaaaccattcctgggggaaggaggacaagatgaagtgtttctctggattaaggagtgaaggtctttgaatatgcatgataaaaccacaaccaagtcattttgatgtaggaaaaatgaaggtgctttctcttggaaatttgtattttgggacaacagtaaaattcacatggatatgtgcattggtaaacctgcatgatcctgccagctaggatgatatgctatggaaacacctgggagatattacctaaattctagtactgtataattctcttgatctgtaacaagtctttatctttctcctacggtaatgcaaaggattcaaactaactatatgtgctttcagctccttttggagaaactgaaatatgactgaaattatttggaaaaaaaatttagtcaataagttatttggaaaaggaaatgagtacatggtaaagataaagactcccagaagacaaaatatgcaaaaggttcagatttaggtcttttctactagcaagttttcaggggcttccacttcacaaaatttattcccagattttaagtccaacttttatacctgccttataagtttctttctctatctcttgatcttcatactctctttctgctattcccttcctcttaatcttgttttgctttttctctattccttctgccaccaacttttgcttttcttctctttgggacaagatgagataatctagtactttcagaacagcaatagataaatataatcctaagtccaaacagtgccagccacagcaagtgtgtaaacttcaattaagggactcaagtgtcttggacaaacctgtgagatggcaagtatcccatatactccttaaatttgtaaaaagtcctatgttacataagaagctggtagaaaagagaatatttagttttggttttatgcattttgagccaatttaaatctcagccagtatgttgtaaaggcattaaataattacttgttatcagtttctaagaagtgatgtttttaatactctctgccctagattttctcttaaaaagttttccctaaggctgggcatagtggctgatgcctgtaatcctagccctttgggaggccaaggagtgcagattgcttgaacccaggagtttgagaccagcctgggcaacatggcaaaaatgcatctttataaaaaatacaaaaaccaggtgggtgtgctggctcatgcctgtagtctcagctactcgggaggctgaggtgggaggatcacatgaacctggggagggtgagtctgtagtgagccatgatcgcaccactgtactccagtctgggtgacagagtgagactctgtctcaaacaaacaaacaaacaaacaaacaaaatacttttccctgaataaaaaattagttcataaatgacagtttaaccagctgaaactatcagttctaaaatcttaatatagaattaaaaattatttaagattcttaatggcctatatgtatcaataacttatttcaataatgagaggataacaagaattggttactaccagaaggattttcctctaaaacttttgaacgtaacctgcagtgctatctgcggttctgctggatttttacacaataaatggtagtattcccactaattatcgacgaactttcaagtgtcaaggaatttataagtcatcttatgcaagcttccccctttcctattgtattgtcaaatttgtctacatcgttttcctcattattttaatttgcattttaattgggctttttacaatttccagaagctttgaaatacattataccttaaaaaaaaaagacaataacactatgaggcagtacaaggatgatttacttactcatacacaagagaggatggggacactcatggtgatccttggtcccagaggtctccctggtacctctcaccaacgtgtgacctcatcttctgtcacattccccaaacatttatggtgttttgagattttaccctcatttattaaggcaaaatgagtgccttagaccaaattacatagcaaccaaagacatatttgcctgggatctacatttcctaaacatgtttttctccaagggatttctgcatattctggagaagttttccaagaactttcatcagtttcaatgacagccttatcactaatcaagggcagtttgtaaaccttgcctgggcaccaaagggtagaaagtccttgtttaatatatctagctgcttgtgtgtgagaccttccttgttttagagaacgggtgccttctagactgttttcctcatttcaaagaaaatgaaaaaaaaatactgaagatgaaagcacacagaggtttccccattctgcttacttggtcgccaggatcatcttttttcttgctgtctgttctttctgttccatatgttgtctggcaagatgttctcctactgctttggctggaaactctgtttcacaagtgtagccaaaatcccgagccaagtgcaaagcctcccctgttggcagataacacaagtgagtttctcaccagtatccaaccttaataacagtagtgtcttgcattttgctcaagcctcactcctggctgtggtcagacaaatcatttttcctacttaaactattcaagaaaaaagacctttttggggggaggaggggaggtaatgaggaagaatgaggggaaattgaggaacagagaagtgacttagcaggcagggataggtggaaaattgaggggaaaaaaacagaaacacaatccagaagtgttgattcccctcatggctctggccattagaccagactgacttcctaggttttacacatgattcccaagcaaaatggccccatggacaagtcattttgtggctgctgagcctacaacctattcttagtgtgtctaaactattcagatgttttttccatgagacctattaaaatacctgcgaagggtccatataacttttcgaggaagtcggagaactttggaaaatcatgaataactttgttctttcacaaaatcctaaacccaagtaaatttttaagaaatggggtacgaatggcttcccagcaaagtaaaattaagtgatgaaaatcaatctggaaaacaatgttatttttaaagctcagtcaaggcaaatcttacctgtccactaaacttttatttaaaaaatcaagttttctaaacaaatgtagtacatatataccatggaacactatgcagccagaaacagaatgagatcatgttctttgcaaaagtagctggaggccattatcctaagtaaactaccacaggaacagaaaaccgaatactgcatgttcttacttataagtgggagcttaacaatgagaacacatggacacaaagagaggaacaacagacactgggacctacttgagggtaaaaagtaggagggtggagagaatcagaaaaaatatctattgtgtagtatgcttattacctgggtgatgaaataatctgtacaccaaacccccatgacacagtttacctatattaaaacctgcacatgcacccctgaacctaaaagttaaaaataaaatcaagtttgtactgtgtatctgttaatactaagcatctactcacctaccttattcaaggcacagtgctaggtagaagtaatggggactataaaagagtaccaaagattgcctgtctccaggaaaatgatagtcataacaataatagtagcaacaacaacaagtatcttagtagcactttgtaatttttattgcacctatatgaatattacctataatcttttcatgtttgttgttattatggtgacagtatataatacaagatattatattacaagtaccaggaaaaaatgaaatagctgataatatgaagaaaagggagggaaagtttatagatatacaaaatatacaaaagagaacagttaatatcaatgaaaatatccttagtaaagatgctagcactttgggaggcagaagcgggagaaccccttgagcccaggagttcaagaccagcctgggcaacatagaaagaccccatcatctctacaaaaatttaaaaattagtcagatgtggtggtgcatgcctgcagtccctagccactcaggagtctgaggccggaggattgcttgacaccatgaagttgagactgtagtgagccgtaattacactactgcactccagcctgcgtgacagagtaagactctgtctccaaacaaaacaaaacaaaacaaaacaaaacaaaacaaaacaaaatatactatttttttcattctcacaaggtgagacctcctgttctaggccttagcaaaaaagtctagtttaatataaaaggtattgcaataagcaaacatattagtgcggttaatgttttgtaaattctgatcatgcccctctccacacatatttcacatgagcaatggcacgtctttagttgcaattttaatatctgtgtggtggaaaacatcattgttttttcttctattttaaatagagagatgatgtaactaaatggaagggatctctatattaatctgaatagtgctagtttaatggggggtcacagtttaaggtaagaaaatatgtgaatatttggcagaagaaatggcacaaagatgtgtgtgtgtgtgtgtgtgtgtgtgtgtgtgtgtgtgtgttttaaagtcgttgttatgccatacaggacactcactattgcttgaaaaatgatagaagggagattatttgagaagtttcaaatttggaagtaaaaatgttttaaaccttgacccatcaaataatgctacagcacctgaccagaggataaactcatgtggaccttaggcttcaaaagtatcttgtaactaacaggataataccatcagtggcatcatctttgtacagcaagtcaagttacatgtattaatatagctgcacattgttattgttcacaccaaaacagatatttaaataacattttaacagagtctatctatctatcatctatctatctatctatctatctatctatctatctatctatctatctatctatctatgtgtgtctgtctatgtgtccatccacccatccatccatccatccatccaatcctttttctttactgtttgcacaatagtgggagaggtaaaacagggcaaacaggaggatggcagcacgcctcttgaattttgtgctaaaacctgattcctgcggatctgtcccattttatgcaaagctctcaccgtgtggcagttttaaaaacagtttgagtgggacagctgctatttacatttacactgacagccagatccttccttccctcagttctgtttactgctttctcctgcttgtgatataacattgttacaggatgtatagcaatgctacattaaaagaagtggcaagtgaagacactctgatatgtagttaaaatgtgtatatcatgccacagaagctttgtgtgtgagggcccaaaaatgaatgaataaatgcatccattaattaaaatacacatggtattcagaaacaatgacaaatctatagttaagtcctttacaacagatgtcttagtcaacaggtttaagaaaactagacattttacagtcagaaaagcatattaacatgactgtaaggagtttgactgatttgggaaaataaaaatccatgagctcctctgcctctgtggtggcacaaaatgtctatatgaacaatgaactgaagtgcaagaacctgtggtggaaagagcaatccaggaaagccccaggatgttttccgtttgatttccaaacagcaagtatggctgccatcacctcactcctgggagagaagtagaacacccttgttcttgttcttttttttttttttcagagctactttaagctatccctttatttcaatgtattgcagcacttggccatgcaccttttttttttaatttaatacaactgaagcaacacactaaagttgaaataccttcattttattccatatcatttcaataattacatattttagaagtaggatagaatggtatttctgtctttaggtcttaggccagcatccttagcaaactaacacaggaacagaaaatcaaataccacatgtcctcacttataagtggaggctaaatgatgagaacacatggacacatagaaaggagcaacacatacaggggtcttctggagggtggagagtgggaggagagagatcgggaaaaataaccaatgggtactagccttaatacctgggtgatgaaataactggcacaaccaccacccacaacacaaatttatctatgtaacaaacttgcatttgtacccctgaacttaaaataaaagtttaaaaaaagaagtagggtacatgggtgtgtaggtggatcaggttggtgcttggagaaaagtattccaagagcaaggctttaggctgtatgtgccacgtagtaaccccacctactaaaaaagtgaaaaccatgaaggatattcatcttttcaatagtaatacttatattaaatacttatattaaatacttatattaaatacagatatttaatacttatattaaacatatctcttaaaaagcaggcacaaataaatttcagaacatagcaagaacgtaaaagataaatttgctcgttgattttagagaattcatttttccacactccaaagcaaaaagtaaaaaattaggaagaaatattaggaaaaatttaagtgacattcattgatgttgctctgaaatagaaagttaatggcaaaatgttttttaaggaaaaactgcacattgtgccaagatcctgagttttataagaagcaggtttaaatgcattttaacaataaaaataaatatacctgactttcaatctgttatacagtcattaagaatttttctttctttaggccgggtgtggtggctcatgcctgtaatcccagcactttgggaggccaagcccagtggatcacgaggtcaggagtttaagaccagcctggccaagatggtgaaaccccatctctattaaaaatacaaaaaaaatatttagctgggtgtggtggcgggcacctgcaatcctagctactcagaaggctgaggcagagaattgcttgaactcgggaggcggaagttgcagtgagctgagactgtgccactacactccagcctgggcgacaaagtgagactacatctcaaaacaaacaaacaaacaaacaaacaaaattctttctttaaaattatggtattttttaaaaaaattactttacacaactaaaaaattaatatttaacactaatttttactaagcagtacttgtacattgttattcaatagataattctcatcaactgtcactctaacaatattgccttaaaaacaattgagtttaacttagtgttgcaaaacccaatgttattaaatgaaaataacaatttgtatgtgttaaactccagtcatatatttatgatttgaattttattttcacatatagggaaatagcacattcaattctatgggattattccaagaactatctattagaaagcaaatttgcgaattaagtaaattcttatactatcaagctttagcaaaccctggagctgaagcacaaagtaagtatatctgatgccctgacttacagatttcccagactcttcggaaaggaatgcattctacagctctatacatcatacgatctatggcctggagaggtgccttataatatagtagttttactagtttgatgttgcttttgtcaaacaccaacactttgtgtttcaaagtgaaagtttcattccccattcaatatcctgcacttagcacagcatctgattcacaataggtactcagtagacatttgttaaatgaaaaagctttcagattatgttaacagtatgttaattatgacaatagtcttgtgaagcatcccctcctagaatatagggaagaactagagcaaaagagacttgttagaaagaattaaatatatacagaaaaacctatgaaaaatagaaaaatagagtatatccctctatcagtggagccatttaataaaatagactatacttgaaggcaggctttctcaacccttgctactcccataacctagaaatttgctttaaaaaatgtttttcaccaatagcaaagacttggaaccaatccaaatgtccatcaatgatagactggattaaaaaaatgtggcacatatacaccatggaatactatgcagccataaaaaaggatgagttcatgtcctttgtagggacatggatgtagctggaaaccatcattctgagcaaactatcccaaggacagaaaaccaaacaccacatgttctcactcataggtgggaattgaacaatgagaacacttggacacagggtggggaacatcacacattggggcctgtcgtggggtgggggtaggggagagggatagcattaggagatatacctaatgtaaatgacgagttaatgggtgcagcacaccaacatggcacatgtatacatatgtaacaaacctgcatgttgtgcacatgtaccctagaacttaaagtatcatagaaaaaaaagtgtttcaccccgtatcaattaatctctggtgccagggcatctgcagtttttgaatgctcctaaagtaattctctcaaaccagagttgagaaaccactgtcctaagataaagagaaagcagtaggtgaggatgaactgcacatcttccaaaaatgtaaggattctatgacttatacaaaagggaaagcagccactagcgagttaatatgaaactataagagcctctatctggctggattcttgcatgatgagatctcccttatttggctaatatggtatgaactctatagacaaaagagaaaatgtggtagtagaagtagagatagcattgttagggaaacaaagacttcagcctattggaaaagcatatttgttaagggtgatttaatataagatgaagcttgcacttaaagttagtagggaaaaggtggattatcaatagaaaatgttaagccaacaaggtggccacctggaaaaaaacaaataaaactggatctgtagcatacatttggccatgaaacaaaagtccagatggatcatagatttaaacatagaaaaatgaaaccacatagtaattagaagataacatggtattttttatgatcttggaattaaaaaggccttgtacagtgttgcaattaaaactaaaagccatgaaataaaatgtgaaaatataattatattaatgtaaaaaagttctgcatgcaaagacctcaataaacaaagcaaataaacaaaaacccataacagccaactgaaaaatgaaagtaagtcatatgaaagacatactaacatttaataagccaattttcctaatagagactgaaaacttacaaatcaataacgaaagtacaaatattactccataaatacaaaataagtaaatagaaaagctcataaaagtccaagaatattctgaatctccttcataatagagggtttttttagtcaatcaaataagcaatgataaaaaaattgatagcctcctgtttaatttagagtacaggaaagtactataatgtcaatgcttcttaccctcattgctaataggattataaatttgcaaccactattaaggagaatctgccaataatcaatcaaaactataaatgcaaatcattttttgaccctgcaacgccattcctagacatttattgaagatatgtacttgcatatctgtggaactatttatataagtttgaggttcttcattgaaccactatttgtaatagccaaagactgaaaacacctaaatgatattcagaagaggactggttaaataaattgtaataaattcattcagtgaaataccacgactttttaaaagaacaaacaacttgtaagcactgaaaaaaaagaatgaacactaagacaaactcaaaaaattgattgcaaaatagtatctacagaatgctataatttgttttaaaaatgaataaaagagatacacacatatatccttggaaggaaaaagatcaactaataacatttgttttcttctgggaggggaactgaatgactggggaacagagtgaaaaggaagtattttactgaatacttttctgtaacttttgaatcctgaactatttgtttgtattatttatttaaacttatattaatcaatcaaaaagtaaaattactctttgccttattcttagatttaattctgaactcaaatgtttattgtagatggaacgtgggtaattccaagttttccattgttattcaataaaagttagacatcactaagaataattacagcctgcaatttgattaaaatacctacaaatttcaataaatgtaagcaatgggggccacagctctttcctataatctagcctttgggaggccaaggcggaagggtcacttgagccaggccaacctgggcaaaaaagtgagatccccatctccaccaaaaaatcaaaaattagccaagcatggtggcatgtgtctgtggtctcagctactcaggaggctgaggcaggaagaccccttgagtctaggaggtagaggctgtagtgagctgtgttcatgccactacactccagtctggacaacggagctcttaagactgtctctaaaaacaaaacaaaacaaaaaacaaaaaaaggaataaagcattagttgatccattaagttttgaaaggaagaatcatagaaaaaagaaaagaaagacactaagaagagaattcaaacgttatttttagtgagcatcactatgtgcaagagagaataatgagctagatcaaaggtggcaagggaaaaactgaggcaaattggtttggctatatttgtctttatgtggcacagtcaccatgagtaggaacaggagtttatggacacccaagcacatagtcaaacacagtgacgtatatatagtatcctattccttctgcctctacatgcaaataccatccccaccacacagaaatgaatgaaatcttaaaatgcagccctggggagtgatattagaaagcttgcaaataattttaaaagatatactctaatatggtatatatttatccataatattgtgtgatactattttaggttcattgaaaccaatttttgaatactgataaatgttaagtttttagataatagataacaataagttttatctaattaccaattactgaagcagagtctcctagatagaaattattctgtgcttagaataagacatttatgaatgatacgaaacctaatagtctaaaaactatgcaaaactgtctccaagaagacactgtgagtgccagaatgtgtgtatgtaaaagggaacagcagagcttttccaggtgagactgtctgactaaagtgaacatcaactagagctattaatacaagaggtcaacgcactacacttttcatatcaaatatacttttagaagaaagctgaaaacctttctcccaaaggtgggactaatgtgggaaagtaatgtctggagaaggccagtgaaggagctatttgggaaatgaggtccatgagttgctcaagtttcatatgacttttagtttcatatgtcaccaccaccacccaaaaaaagcccattgttggtacctgtgtaagagcaatgagaatattagctttgttctaaactctatgagaagaatgacttacaatgagcattccctaaacagatgttatccctaataattggcaaaatgattccggttttcaagcctacaagtctcatgcagtcaatgatacttctttccaaagtcacagaataatcacatcaagaaaactttcttagtagaccttatctataggaaagagttcattgacaaatcggttgttttcccttgtttcttgggaatgcaataatttaggctcaagattaaaggtagaagggaaataccaccaagtggtaggatttctttctactgccttttggaagtttggccagagtggaataaaaaggttttgtaggggaatcttgtaactaataacttaatgaactggcatcctttaaaaagtacaatggatactattgataattattccagaagagattaaaccaagatttaatgtccccctaactttgagggattaagtagaagcagaaggttcatcaggttttaaaaaccctgtactagtgaacaaagtttttgaagcttggacataagaaagttcaagaaacttgttcagggttcctagcaggaggggaggaccaatctaacgtgaaaaacaggctcaaagattggtaaccctttttctatccgtgagttttactttagttaaattcagaagtaactcagcaatgaaactgttcatgatatatgccacaaacacaaatccaaatggaaaatatgccatgatgctgcaaaccagaagatctgggttctcatccttgctgcacccaattgtataatcctgtgcataacagctattctcactttgcttttagttttctcatttgagaataatgactttattctgggcactatggtaagtgctttgcaaacattctgatttaacccttgcaacaatcttatgtgaagggtgttattttttaacaccaccttataaataaggacacttatgctcagacaagttatgtgtcttcccttacagcaagtgtagaagtgagttcagacaagtttgactccagaaaccacacattaggatacatgtactaatttttatttagtggctctatgaggggcctattgtgcaaatgtttaatctatgtgaatatagttaatcctgcaaaagaaacataggtcagatgttgtgggtagatatgggtgccagaccataaaatttttatcttttctttatatatgatagagttgtttcggagaagactctgccaagctagagattacattttctagcatatcccactgtcatcctcacaataaggtgtggtcacgtgattagttcttatagaatgagaatagtagtaactgggtaattttctggctagagtggataagaagcagtatacttccaccattatgcctttccttatctgtgagctaaatgaataggattcctaagacttaggcagagtaagctatggatggaagaattctgggtccctgggtctgcgaatgagacactgacaataaaaaagtccctgataatgaacattcacatcagactgcgatgagtgagaaattagcttctattatgttaagccaaagacattttgggaactgttataacagctggcattatcctcatcattatagatatgatggtctttatttatgaattaggaaaatgaagctcagctaggttaagtaaccagtccaaagtcaggccctacttcaaaaatgatattattctgagggtaagaggtggtgggaggagtaccaggcaaagggttaatagattttgcaagtggcacaaaacaactaatttacatgagctaagatgtccaagatagggtctgagagtatatattttgaaatgaaagacaagagcaacagttactaaggatttaaactgagaaagattgatggagatcatacacaatatttggaactggttccctttcttttgctgatacatatttataccctccattgtcccacactgtttaaacacacacacacacacacacacacacacacacatacacagaaagagagacagagagagagaatttgatcttctatcataacaaatttcagctcaaggtatttatatttacgagcttaaataatctatactttcagaaccctgagtgttggctgagaaggttacacaagcttttgcaaatgcagcaaaactgtcccaggaagcacaccactcaggcagacagaattcccttctggtaatactctgcgatgtcattcatcttggaacttcctagataagaagggagtgatatgcaggaaggacaaggtcattgactccttgtatttatttgaataaccaccaactctgcaaacatacttctgaagtaaaatatggaggaggcatccacagaagttgccaattcaagaataataaacatataacaagggtgttaaaactagaattatgatattagtcaaattccttgaatgttttctagagagaatagtttccactctagaagagaattatttccactctagaagagtataaaattattccaacatctcttcaagaagatcagttaagcaaatccaagccactgtatttttcagagactgacatctttctgatattgtagatactagaatggatgagagcaatgtaattagcaaaggaaaatggaaagaagagacttgtaataaaacagcatacaaggagttatatctaattattacctatagatttaaaccacttagatgaagacatatgagttgaaaaagaaattaaatgtggtattgctttcgtgggactcaattcaaatatttctatctcattcaaaattaaacaatctatgttatgtagaccccccaaaatccccagtctaaatatctgccttactaaaatgttcacttttcaaacaactttatcaggtggaaaaacattcagttagtctaaagttcttcatcctattagttcgtaggtacaataatatttgtaacagaaaagttgtgaattattggaatatagtataaatttgcatcaaataaccctatcttatacatccctaaaatgatttctaagaataatggctctaatatgtggatttgaaaacaaagctaggagctattcatacagtgactccatttaaaaggaatataggaaaaatgatttttaaaataattttttaaaagtaaaaaccaaaggcaagcatagaaacctagggatatgctaatgaaacctgttatgtcagtaacaagtgttgtttgtgaaaaacaaatgttcatttgctaatttgaatccccatcataaggcacttatgttcattgattggctcttcacaaagattacatcatctctgtgtggaaagccttccagggtccccacacactattccttcattggtagtctatgaaaatatcaacaatggcaaggctgtattcaaatcttccccacaaagaggcagagtcaagtactgcaaagtcgtagaagtttaaccttcatgagatttatttctaagtctgctctgtgaggaatacaatcaattagatatttttttctcctatgctcaatattatgccaaaatgtgggggtatgattgaaccccagtaatgtattgggccattaggatgtttgagaaactactcatctggtcatagctagactactctataacaatttcagcaacagtttctagagatagttgagaaaagttaagttactaactgttggtaattaaaatgcacatataagttaatatagaaaatccagaagataaaggagagatttcagtttaaaaatgatgaaagaaatattcgtattctttcccacaagaccatagaaagaccatataagaaagccaatggcctgttttagatactaaaaatctagtttttgaatttttgaaaataaaaatgtctaaaaagtttctggctcttgcaaaaatatttgattgagggagaaaacattactcaaaaacacggtcaatccaagaatttataaacaagaaatagtaagtatggtgaaattcatacaggagtaaaactgtagaaatggaacaaacattagacccatgttggatcaagttgccaaaaatgctgataaacatcaatgatttcaatgtcccaggaggtttgatgaatcagagttgggttactattattctgtatacacctaataccatctgcagagttccaggggccatgatctaattcagaacatggcatcttgctggctggaaaggagtcatcagctgttaccaccaacccaactgaaatatggggataaaaatataaaagagagtcatcaacaatgaagtcactcttcatgtcagctcagggttataatgaagcctatttcaatgtagatataatgtccttgtatgtcaaagattatgttctcctcataccccaatataacttgtaatttttaaaactgtaggtcatgactcatgactcgacagtgagttgtgaaataaatgtagtgggtttacaaggaacattaaaagaaacaaaatatggaatcaaattaaaatgtcagagaatattgtacatagtactaaaacttcaatgtgtgtgtgtgtgtgtgtgtgtgtatgaaagtgggtttgagggtcttactatgtcaagagcggaagggcgcaaaagatctctttgactctaaatctgttttctaaggtttcatcaatgtgcctggaattcaatagtgaaagatttatttctctacatcctgaagatactggggatttcaaaagcacacaattaagataagatgctcctcaaaaggataaaatcttgtttcattagccaaggctgatagctatctctgagcagaggccacaggaatagaatacaagtcgggcacttttgggataggagaggtatgcagaaagagtaggatggcaagactccagagatcatcctaggattccacatatttgacctgcacccttgaagctagtacagattgataattcccatgcaggatatcccagtgctcttggctaccataaaaatcagtaagaattgtgaacatagtttttgtgggtcttccgttagtactgaccagtactttcatagacagcttggagaaaagtctttactgggattgataattttcacaccaattagaaatttcatgagcattcatacacaatcatcccgggtggtgaaaagggttccaaggaacaattaaatcaatgatatttaaacaccactatacatcagaatcacctggggagctttaaaaactttagatgcctaagccatcaccccagaatgagtttcagttgatttgggaatgagacctaggcactttgtaagaaatcttttcaattgactcttctgtggagttgggtttgagaactactcgagtcctaccacccatatgattcttgaatcccctctattatcctgagcaactgttttgttatatttttaaacaatgataactataattttaacccacatttttacttaaaatgtgcagaaatctgtctccctttggaatcaatccattagtcatttttttttctactttgctcttccccaatgtgggtgtatgataggttaaagccatctaccatatgccagcctttagtaccagcacacgcaggcaaacacaacacaagacctagaacatggtaatagtaacacagtaaatgtcagttgtcagtgttattgttgtggttgttattattgtgactactatcagggaacacagcaaagatggctgttaagagcaaaatcaccaaagcaattctgccaagacaaatgtcaagaacacactacttctcagtgttgtacaataaatgctacgtattgaaaatctgaaaaaaagtatagatgtttggttttgtgcttcattcactacttcctacagtgccatatagacaaataatggatgtatgaagtaacacaggtgtgttcaaggtgaggcttggcaaaaggcccctgccttttatattttaaacaatagcattccacatgatgaaaaaactttcctttgacattcaaaaagttccccacaatgttaaaaaaaaagcctttcaataataactctccttaaaagaagactgaataagaatatgtaaagtttagaccttaataggagaaaaaaaggaaagaggtaagttggaaataaaacaacttctgggaatatattcatttccatttctctttctatactactggttaaccttaacctctctctgactgagctgagcttatccacccatacagccttgaaagttcaccatgtctttagagaggtctactaggattaatacaatatgctttcaggctcagtatcatgcctagacccctgtgaactcttcataaagggttatttctcctgtagatcatgttgtactgaattacaatgggttaagttagattcacttaaactctgaaataaacaataatgcaaatgacaagagcgctgccaatttcatgttgctgttatttagaggctatttggagaagtacccaaaacctccattgtcttatttcctattactaccaagattagtaaattaaatgatattttatgaattatctaaatcttaagtctaatttaatcatcattgtcaagataatttaggaaatttaccttaactgttaactgacttgcttaatggtacagacaaaaataaaacagcataatttaagaaacctgagtttcaaagacacgccaaccttccagcattattttgctaaactgaaaagtcataccttcaaccaaggaagtaaggagggtgacattagctgctttccgtcttcctgctggtaagtttaagccaagcctatccaatttctctctcaggcagcggcccccattctttgattttgctctgtacaaaaacaaacaaaaactaggttttgaaatttcacattctgatgaaaattatgagacgacttgaccacatggggaatacactatcagatggaagacatcatgactaagggttgagggtatggtatcagttagcagaaattctgtgccagaatatagctttgtcttaccttctcaaaatgcctcccaagagtgaagcattgaggcactcaggtggggagaggcgcctctttacctcagcaatggtcaccttgtatttggaagtagaactaagaagggacaaacggccagggacagagcaaaataagtctgtggggttgaccacacaggtgccaccttgggagaaaaaaagtatataacatgttagtgacagtgaaagaagctaactgcatgagaggcagttaacatcaaaagactattctggatttgggaatacatgctaacagttgtacttatatatcccccagatcatcgcagggagctgctctaaatgttctttcaaatactactcagggtcatgtcttttcaatgtttgtgaaaatgtctgtgagtgtacaattgttagaaacattggcatcctacggagtgtagactgactcaccagtgctaattttggcaacatccacactaagaaacacttcaattaatcaaaaacctgaattccaatagttaagctcacaaagactaggtattacttatacatggttgtatgtttatgtacacacacagatgcacaatgtacacaatggatggaaatgttttatccacaattactgtcttttccaaagtgtttgaaaactgccatcttttcctcatccatctgccaattaaaggcaaaacagtcactcaatcccaggcactgctaaaaaccagttactcattgaaagaaatttctaatccatacaggtgatgataggttaaatacctctattgtatgccagccctcaatatcagcacaagacccagaacatagtaatcataatacttattaaatgttagctgacaataatattgtttttataattgtcattgtaaatgtaaattgtaaatgtcattgtcattattactattagggagcaaaacaaagataattgtcagtagcaaaatcaccaaggcaatattgccatgctggggttcctggaacagaagctttctgtctccaagctccagaaagccccctgagcttcaatctcctccaggaacaacagtgtatgttccctatcctcaggcagtcgacaataactgaagaggacttgacgatccaaaggtgatcatctctgagaagcatttcccactgtccaattcctcccccactgcaagactttggagccaatgtccaccctgctagcatggtgactatacagttccgggatccaaaaccgcctaatgcattgagcaatctaaaggcagagtttttaagggtccgaggcaaattcaaagttggcttttttgatcatgtattttgtttcttcagctagggtcaatcttacaacccatatccagaaaagggacaagttctatgagagaaaagaggttttaaaaaagtagatgggagaagaaaaatgggcagaagagtgttgtctaaaatatttttactttgtaacttgttagaagcataaaatctcagacccacctccaaactttttgagtcagaatctgcattttaatgagagcctcagatgattcacatggtcattaaagtttgagaagcactgaactaggacttaccacttgcctcccaggtatctcctacccttaactagcacatatggaatattataccggtggtagaaattctggcattcagattctggtattttccctgggctgggttgcaaaagaacctgggaggacatttaaaaaggcaaagggatcccaaacctgaggagacagaaaaagttaaccttgccccactcttaaaacatttctacccctgtaccttctggaattcttcctgactgtcttttggtcacccaagttttccttgcaagtgctggagaccaagatctttctccctaagcattctaaagtccctccaaaaaacaacaaaccaacaaaaaccagaagagtaatcagtgggaatgtcagggtagccaaccatcttcaggctagaagttaggtcctgtgcactctgccaaaacctccatgacagtgtctgaaaacctgttcgcagttagaaatctgagagttcaaaatctcaatcgtcaaattaaaatccatttcttgacatcaaacttgtagccaatacaatggcaaaccatgtaaacacctgctttaggagctaaaaacaaattctcctgtacttccccctcttcatattctcaccgagttttaagccaaaatacaacaataaaaatgttcccccagattcctggacctaagactaccatttcacttttgttatcggtttcactctgtacttagagatgcaaaatgcatttcaaaaaaaaatcttaaatgacttcttaaaattttagatgaacaggaaagcaaggtaggtattaatgaatctgtggtgtagagtcatactgtgagaattttgatcctgattattttaggaattagataagtctaccccaaatatattaaacaaagagaaatcaatgtctttatgcaaaattcacatagccctcttctaaaaatggatctctactcacagtcactataaatcataagcaaattgatattctgacataaactttcctctcttgcatactagccagtatacaaatgaggacacaaggaatctcacacagttgccagttagcttcaagtttatgataagtgagagaacagagcgtttgagtatatgtatgaattattttcctggatgctaagggtagggaataccacaattttagaactttcttatctttactaatcttcagtggattagaaacctaatttagggagatgtagatgattatcatttttaaaagaagttgttagatcaggctctccccaactggaagacttttggcaaagtgaaccttatgtgttgaaagccagctgctcccagggaagccactgagtctgctatctacccacgtgctaactccctgggcccagagtctccctctcctacatctaggttgggcttctggcttatgctcaagtagacatttattaggtaagttacacaagctgcatattaagagtatgctttatgcacacacaaattgcctgaaggatttattttgtattcaggattagccatcaactctagagtcttttattttttatgtcacagcatctttaaagggaatttctgttgctttgatacctggcattgctgcaaccttggggaactctctagtcctggctaaagatttggcaacttgtagagtttacagcaacttggggaacctgatatctttcttcttggtgatttattctttagagaggtggaaaaaagtagtaggtcaatatcaccagggttttgcctttagattgaaggtgctgagggagtgatacttctttaagataatccagactacagatggtaatgatgagatctcaaagaagaatgttatgaaacgttggcccacaccaagccatttacagtagtcatccccagtgttactacttgaacttcctcatggtgcttgtgttgcatgtcagctcatattgaaattatgtgataatcattctagattcagcatcacaattaagaatgtctttgattctatagccagtgtattcatgcagaacttctccagagttcatcccttttccatatacagttcacagaagcaatactttcacaaagttcactatttttaaatttggaatttggagatagggctctctattttcagtgatgctgcaaattctgatgggtagctatggtaacagtggtaagaaatcagaaactatctgctcaaggtcctttgcctaggacatggctttcattaaaagggataactttgccatagctacaggaagaagtcagccagagacttctggctcaggtgtgacaaaactagcacaaaatacatggatgcagatcctccagctgccatatcttgttagatcttattcggtttgaagaagcatggggtggctttaccttggctgccttggcataacaggggacatctggccagtgtctgcagacagtgtggggcagtggaaagagtaccgggctacaagtaagaatttgaccaactatcgactcacgcaactttgggcgaatgactctgggtctagtctgtccatctaaacaatgaagatgctcacacttgctctacttatctccccaccttgtaaggaggtgcaatgggaaatggatgcacgcacgctcggcaacctgattataggccacccaaccccgccacttttttttaaaaaaacaactaccccgttgcagggtgtgaactgcggggtaggacaagacaggtccccccgccgacacacacacacacacaccccgccaccgtctgtgctgcaactggatgggaaagacaagcgccggagcctgggtgagctttttctcttctcatcccaggctactggggcagaggaaacagcggcggctgtctccaaggagccgcgggtccctggagcctctaaatctgcctctgagccatactcacggcctccgcgcctcccccgtctcagaacgcacccagctgtggcgagaggtcccgcgcgctctccaggtgcgatcaatacttcctagcgggcttccgggcgctgggccggtgcgcgcatcctctccaaagccacagcgccgccccactcgtcgtagcgtcggtgttgacataattagaccaaatcttgagagcaaaataaatgatctgttcgccttacagccaaacagatgtttacaattcaaatgaaagaaatacaaacggcagggatttttcttctccccttcttcatctccagtgatcgctcttttttttctgacacattaaaaatgtgtaagcgattacaagagtttcctgtccctgtttgttctgcggttgcatttctgcgaggtgcgcctgtgagttgggtggggagaattattctctgctgcttcctctctagcctctcacccttcctaaccctcctcccccatgttacccctccccccatgttacctctccccccacggcagcagatattaattgtaatcaaacagcaaaggatgcggacttaattggaatcaagtaggcctttgatgatgtgtaaggagcgaattgtttggggggagggtataacattacaggtatagctggattaccagggccgaatgagcttctccttttgtagattccaggcagaacaaaagagaggtgtgcgtgaagagactcgctggtttaatgtggcggtaggtgtgtaatggtgtatattagggtgtgtgtatggcgggggttggggggagattaatccccattccccagtgcaaaaagtgttttggtttctgctgattttcaaagcagttaaagaaattagagaaaaggctgtaggctgtgggaaagctacctctttccctctacaacccccaacgcccacaaagatttccaacaaatcatgcttctggatgctttggtacaagagttttagatttcatataaaggagattgaatttcaaacctgcagaatctgcactggggactaaggaggcaggcgaggcttgaggtgtatctctggctctatcttcacccataatggatgaaccatagagatgagttttggctagcgagagtagtgattccaggtaatccatctggaatccgaagagtactgacaaaggaagaagagcaaggcttcccacgctcctccaattgtactccttcaggagctgctgaaagaatccacggctttctccatcccggattccaaggctctgggccttcctgaaacccagagaagcagaggaaatcgcttcctcctgccaagcagcctgctgccggccttgaggccggctaaagggaaaagcgatcaggtccttctactctgttatgggcagactgagcaattgaagctaaggttccatttcaaggaattttttttttaaagaaattaaatcagatctgacaatgtttgtaccgcggcgtaaatgcctttgccttggcgtgccagtcacctctaagcgctctgacaaactcaaactctcttaaaacgtgcagagttcagatcatattaattcctccaaaatgttttgattcaaagtagtttgtattttgtgtagccacgggcaatcaggaaagcgctcctgcctgcccatggccgggtccgctccctcttcgcgtggcccagaggctaccgcagtgtttaagcttctgaaattagcctggggctgcaaggcagaatgatcacaaagcgaaacaagggcgcttcccctcttcacttttttcattttttcctctcccatcccccgcccccccctttttagttgccatctcgatttcacaaaacagaccagggccaaaatgtcactttccacccatgtaaggaaaagctaggtcttctcatctagcccacttctgaggtccacagcccactacccacttgtacccccaccctgcgattccaatatggatccatttattatgagcttcatcatcaccatcgtcatcaacattgttcacttattattaaatactcagagcaggaaatgaaagggaccggtgtctggcaaaggggaggcggccataagggagcctcagaagattcaggggggaaaaaaagagtgagattttctttctttttttaatgattaaaaacacagacgactcctgtaaatagaagcctcatttcttcaagagatgccttttgaaacccgatatctgaatattcaacgaaggcaaagctccactctgtacgtacaacattaatatgatctctgcagaatttgctactcagtaatattaacatatcaaagcctacgcccgaggcgaaagaagctatcgatacgcgagcacagggtaaagtaaagattattggttctgatggttggagagccggagctgcgggcaaaatcgcgtacaccattaaccgagagtcagcacgcagggagctgcgcctccgaggcagtggcaaatattttatctaggtggtaattacctagctgctgccccctctttcacgcattctttggctatcgggccttcattacaggctaaaataatgtaattgccacttaacaaaatgagtcagggcgacgctattttgttctttacaagttgaagtcaccaaatgtgaagaacaactgagaatgcccaagccctccacgccactgcaaaccaggacaatgtccctgattaactcatgtaaagtacatagtcacccatatttcttcaagaacatcatttggggtctttggaagtggaatctatttttttccctcccatagtacattctagaaaccattagaaatgtaaattaatccgggaacttagcagaaaagagaaaatggtgaaaaattgtgctttgcaataaatcatgtttcatgtggtgggtcaagcatgagctggaaaagaaacagacattcttagcttttagacagtatcgggttatatgaagtatagcagtatagcagcacttgagttaatgtcttcctgatttttggtgaacacaagtagtctgagctgttgatattaggggtcctgtgtactaccatgacaattgagaaaataggcttctttagggttttgtaaaaggaagttctgagatgaggggctgggcaggctgcagcaaaatatacgccctcttttgggaatacacttccctgctatccacttgtaaattgacatgaacattgattgtttcagaataaacagacacgtatagacacacaccctcctctccaaggctcaactaggttaactggcctttctctaagacacgtggaaatggaataaactcagcagctaaaatctgaattcctatgaagaggggtttagtcaaacaagacagacgtaaaccccaaattacattccctttctctctggagcttcactagtctcatatgacatcaatatttggtttcaagtagcagattcgacgatgatttttagttgaaacgaatagggaccgaattctacaggaataataaagcatcacctaaggaagataatttctgtggctctgataaggtagctaacattttggagatacctaagagctttggcctttcttgggaattgagtgagggggtgagagggtgtcccttaaatctctccccagaaattcaattgattccaaagcctcttcctctctaactccctcctcggcctcaagtaattccaccctctgtcaggtatcttacgctcagatgcagtttccaagcatttcagaaggtgatcttggtcaagtgtgaaagcgaatgcaaaattgcagtagcaagaggccggctgtgggagaagcgggctcccgtccctaattagtggcgctgtccttcagcaccaccgaagtctctaagcgccctgagtgttcttgcctcaccttatttttacccgtcccaacagacccctgatcagcacatctcacctggtcccctgttcactgtgtaaatcttttttgcctcctccaacacagtgcattcaatattcatcagtcttgggcctattttattccatttcaataggtctgagtaccagcgtggctggcaagcttaatattcctcatttaaaaaatctttgtggagttataccacgtatatgtgtgtgtgtgtgtgtgtgtgtgtgtgtgtgtgtgtgtgtgtgtgtgtgtgttttaatctccatagggtgaaacaagaagtgttgagcagctcttttaaatttaatgtaaactaccagcatccactaaaacaataaccaagttccaaaaggaaagcaccctttgttttctttcctcctcagtttaaatggagtttacattggacattgggatgtaaaatctgcagtttaaacatgaaagaagcaactgatttctaccagcacatctctctatctggaaaagcaaatctttcaagaagctttcaaagggatggagaagggctgaaggacacttatttggtcccatcagaagagactcagtttttagtgttctgttactgcagacaactgtggccctgaagcaggaattagtcttggtgaatagaccacatcttattaattcgtatgaagttaggataacagctggtccctcttgccttgtgtgctgctcgggttactcagcttgctagaaaaataaacttcagaggctttgggtacagttaagtaggggaagctagcaaaatctgcactgccttaaggctctgagaatgtcatagttcaaaaccttttgtcaaaatggaacatctgagatgcagccccctttagtgcccgagctgaaagcaacagctctctcctctcctcttgccttcccccaccttccaattccatgggtaactctggattcagatgtttccctcaacagatgggaacaagaaagctttatccagtacagttaacaccacctcctcctcccaccttcccttaaagaaagaaatgtcctggacacttagaaaaataagggcagctacaatattggtgtttcattagcctcccctgaagcctcaatgatctagcctttcacagaatccctaaaagcctgaagctaacaccatcatctcaaacacccaggctgtggctagcacatttagggcttaaaaagaccagaaattctgctggaggatgtggtattagtgctgggggaagagggtgtgagaaacttctttctttctttctttctttctttctttctttctttctttctttctttctttctctctgtctttttcttttgtctttccttctgcctctaactttgattctgtcactgttctgtgaggagcaacaaatatctcctatcacaagtcttatgggcatagcctgggttcaaaccttgatgaaagaaaggaggctttttaatgtggatatgccagtgttggactagaataattgactaagcataattgttttcttaatcatcagaaaaggaatctgagcacaaccagatcttctaaacaaagtaagagataggagaagaatgtctagggttaacatgttgttacttgttacttacctcttcttatcactccaccttggccattgagaacaagcccacactgggcctccacagagcccttaataaaagaaacagaaataaaattacttaaatggatactcatatgcatgaccacgtaggtaaagtcttttagactagcccatccctgaactctgtttcagtagacatttgaaagcaagcattgagctgaagcaagcttgccagcaaacacaattttttaaaaaattgcaagaaaaaccacaatctaaaagttgtataaatcttaaggtatgcattttacatcaccatacaatattacacttcaaagtgcctgggagtctttcatcttggcataagagaatgagaagccctttgagtccccatcaaggcacacagcgtatatacagacagtgtacactcagcactttctgagtagagcaaattacacctagagtgtcaagtctgggactgtgggtttcttgaggacacagaggagctacttcatatgcaggatacaagatgtcttatggaggttctgttttaccccaaatgtaggaacatcctgtaatcctacccaaaatgggccgtatgaaggaaaaatcttcaggttcactcactgtaggccttcaaagtcctaatggattgaggaatccctagagctggaaagatggaaagagtttgctgatttttgattaggaaaaataaaaatttctccctgtctgtcgttttcttttttcccaaatcaaaatgtgttaaaggctcattttcctttacaaacaaacgaggtattggacatgaaagaggccttgaagggtgttaacctacccaacagcccgtgaagagttaagtaaatgcggagagagtcggtgcataataaaaacccactttacaaaacaacctttacaaccctggctccctttcgcctccccattttcaccatattgaggcaggcctgtaagaccccccttttcaacctactcacaagctctttcttattttaaatgttctgccttaaagtgattatcaaatcaatatgaaaaaaaaaaaacttggagactgagcataaattaaagcggtgatgggaaaaggtgtgacagtttcctttgttggccatagcaaatctttttaggggactcaaagatggaactgaagccacaagactgtttgcatctgttaggcagacttagaccgccctccaaaccattggactttcacttaaaattctgtgcagggaaaagtatatttacatttgttgcatttgaaatgaggcatatgctgatgaatgttttaaaaaggaagaaataaaaggagagagacgggtttctcccacacactccctccccatttcttgttttaaaagtagctatgactctttctttttcattctgccaacttggagcaagaacagtggaagaaaataacttgtcagatttacaaacttgctacatagcattcatagattaaatagataaagatggatatatattatgatatatacatacatggatatatctatgtaaaggtataaacgtatatcacacacagtactatatttcttctagtatcttggactgtgtcccttagtatgagtaattttgcttcagtatgagtaataaaagagaaaaaggacattcgtatatggaaaaagagataggctgaagaaaagctttcaaaatatctgaaatgtagatgataaatggtctcaaagctctccaaagcagtgaatcactttccctcccactctctggcgcacggttacaatgtttattttcttagaagaaacgaatcttggtttcttcacttaacaaactttttcccctcataagtaaaacatgttgtttggtcggatgacattgcataaatgaccagttgaatggcactaagtcgaaaattggataaactacggtgtccttttgcacgggattcgctctttgtctagtgcttgcaaatgttctaatccgctcttttgaaaaatgctcggctttgtgcctagcacagaaaaaaaatttgtacagatacaaaaaaatcagcagcagacgcggctattaaaaggagtaaataggttttagttgagctaagcactgaatggcagatttttttccctcttgagacataaggggatccttgtgaaaaatgtaaaaatgccctgagcgtataaaattattttgtgaatataaatgtagaaagtcaaggtttatggaaccaaatcttttttcttgtgcaccggtcttactgctatggctctttgttgggactgtaagggctttcactttaatttaaaaataatctcttgctcaaaggtaaatgaggaggaaagattttttgtgcgcaacaagggatctcttacgtctccaacttatgttcttagaatatttccctatttgtcctggagagtgtgaagaaggtggccagctttgtgcagacacaaaaagtaggaactcacaggtagaactgcacttttagctaaaaggagctaaaactatgggtcttttgaattattttctgggtatttgtgggctcatttgtttgaaatatgcctatggcaacataattgcataattataaattctatctttggtaaagaatgtgcaaacacgtgttaagaaataaagtagaagagagatcatctgattgagtgatggcctccacagtgtctgaatacctgccttctttccttccttcttctttttctcccttccttccttccttttctccttccttccttccttctttattttttccctctttcattaccgttactgcctcatttttatctttttaaggaggtgcattttacgtaaaatgtaatggctggaagagcaaaaataaacttgtaaattacctaactgggctgcggttttgagtgcacgtcaggcggagagaattaaactcaaccctacaccctggcaaagtgcactgtgcggattatttccttggggtagaactttgagactttcatttgcgattctttactttccacagatatctagtgtatttggtgaaacttttgttcaagcttagggtcccaacaatttccttagaacaagcctgtttgtagtaagatctccacaagctcagtctgagacaaacacctgggacgcctcggaagaccctgtaaagtgcggagattgagggtacgattggtcatcaatttattggatcttactctgagtccggttggcccaaccccagactcctcgatctcctccacctcatcccctcagggtcacaaatgttgattcacaaaagacttctgtgaggacaaaccaaagatggagggccgcagccgcccggactcccgcacttccaggtgaaatgcttggatccaatgagaggaagagaacgggcacactcctcctctaattgttttgataactttccataagtggtgtgtgtgtgtgtgtgtgtgtgtgtgtgtgagagagagagagagagagagagagagaggagaagagagagagaaagagagacgctttacagtcggagcattaatggggcggcagggggagggcgaagaggggagggagcagacaaattcgctgcatgcttatttacctgcaagtcgtctgctcccgcggcggccagccccaggctgggccctggcaggagtctttgatctgggtgcattccatactgagagccatggctcatgagggacaggtcatggcggcggtaggcatcgaggcagcccagctcccgcctctgctcgtccaggcaggacgacttgagcgcccgcgcattgtgcaggttaataaagtcggtgggctccccgtggtggatctgctggtagtactgttgcgagtggtggagagagttcagagagtaggcgtcgggggtgacggccgggtggctgtgctgaaactcgtaatggaaggactggtggtggagcggggtgtactggtggttagtggagaagtagggggacgcaaactcggtgccggtggtggagtaagttaaaggagaggaggaggaataggcgacagtggaattggctactgactccagacagccaagctgcatcaaacggtagctgtttgatccgtcgtgacgtatctggaaggaagagggggaaaagggagagcagaaaaacttgaggtttgtcattttgcaaccaaggcgccgctctcccggagccaggagctttctctggcactccaaggaaagcgagcgcgtaggactcgggccgagccgaagccgggtctcagcgtcttcaccagagagcctttgcaaacaggcgaactgggggtgggcggcctcgtcctcacagtcgagagagcggaaaaaaaatcccccaccctatataggtgcgggtgacaccacacacgcacacacacgcacagacacacacacacagacacacacacagcccctgcccaacttgtgcagggagcttggcgttgggatccaggtttgcaactgactccggggccgcgggtagcagaggaacgagtccacccgaaaagagcgctggcccggggcgccttgccactctaactagaccccagcatcgaaattctgcgcctgtctatgccgagatgttcggcccgggctgctcaaaatcattgtccatatattttaaaaaatccagtctgtgcaaatcgttcaacttgctcccttccttagtcattcgagggagggaatccgactccctcttttctgcttccctttccttgaataagcccattccaaaaggggtgcgttttccccatcccccttgtgcatctactgcttccccaccagtcccttttctttgcttttctgagaatctttctttccgtctctatctctttctcttcactccccccttttattattaagattatgttttcccgctcattatggcaaatgtttcttaacgtggcagagagttgccctccctggcgacagatgtcataacgaactttctcccctttccttccttaacttcccccgaaagacagattataattaaacgtaacggtccaatatagattagagacaggggaggctgccaccgccgccgccaccgccgccaccgccgccgccgccacacacacgcgcgctcaaaaaaaaaaaaaaaaaaaagtaataatacctcggcatcgtggactagtcccggaaaggtagttgacatgttgggtttctccgaaagcttacgatgcaatttccccctccaaaaaaagaatcgggaaaaaaaaatccaaacttcttgtattttccaatttttaaaggaaaaaaaaaatgttctataggtagatatctaaattgtaatggttttgcccggatcagatagctccttgcctcgtacccacttaaaaacctgtaggaacaaaattttccctctgcacaaaagcagctccctggaacagattttgtacttgctgagtatttctttggctgatgtcgtaggtcccttggtaatatagaagttttgaaaattaagcatcagcactgagaactgggaggacaataggcagaagagatttatcccaggagacaaggaataaatattgtatcttcgcctaataaggaactggaggttctttcaacatttttatccattttttccaacctttatcatgcttttctataccgactgaggtggggacttatctctgtggagagtatttgcacacattttattgtgaagctagagctctagctccaatatatgtatattagagatagaaatatatattaattaaagcttccttttatatggggaagtgttcattcctattggttccactccctggatgctgaaagctgctttttccaacaaccacccgaatcaattttgcccagattggggtgtctgccttcgcccaagtggaaacaatgctggtctttccatatttacattgaatttgggttctttccccttttttgaaaggcaaaatcaagcggtggcttacacttttcagcagctttaaaaataaataatggtgatggacagtcccaagtttccatcatcaggaaatggtgtaactggcaatgcatttaggaaaaatgcaagggaataaagatgtaagacaagattctacatttaggtaaactgttgtctttcactccccaaaccaaaccatatcccccctcttttgtgtttttcttcttcccttttggaaacactgctggtggtggtggggtgtagaccgttcagcagtagcattaggtttttgaacactattacccccaaaataacccttaaatgcttggaagttatattttataaatagagggcaggaaggaagcagtgcacacatatttccatctcttcagtggatttcttgactttcaaacagtttttgagctttccttccttcaaaattcagcttcctccaccaagttgtttagtgcctggagggggtggtggtagctataaacctgaaatactgaggctttgctcctcagtgtctacattataagaaagaactggctggccccacagactcatctcatagatagaaggggtaattcagtcttaattgccatttcatttggtttgcttttaagtgtttaagctgagaaggtgtcttaataataagcctcaggcaaacaggcatgtggctttttttttttttaggttggggtttgggagggtttattaggatctgctcatgcaggctaactggggctgtcactcagagctctttgctttatacaaatggacaaaggcacacgacaagaattgaaatgcattgtctgaaatggagatacacgattcttcagccccacatggggtcagcagccaacacttgttccctatttcaaggtgtgccagtgctgcccccctcccacccctccttgaaattccatattttggcctaatgaagtaaggagactgagagaccaatgatgacaaaaaggaagaatatccaacttaatctttaagtaaaaggggtaaaatgagtgctgttggctctaggggttgaatcccaaaaatgtttgcagtggagtctttgtttaccaggtctgagtggggcctccatagcttacccacggagaaaataactaatcatctctgggagatggagactgcccccacgaccttaactcaggcacccctgcccctgggaaagtgcagaccattccctggaagaatatgtaggacttgcaggttatcttggggaatgcccaggtgcgcttttcctggtggatgatattggcttcccagttagtcccggtcaaatggaagaggatagcccttctcagacatgttgcaatctcctttccaacacccctactgtcagatacaccttcattgaaggtgacggtaccttctcttcccagtttaggtccaggcagcagacacaaaaccctctccccggggaacaacaatgaggaagctcaggaagatgtggccgcctgctctgcctgctggcccagagtgtttgttccacatgtttgtccctgtctggaataagagccacacatagcccccctcacccctgccaccgcactcagaagatatagctttatgatactctcggtaatgagctctggccttgaactgagtacaccccatggaatgacctccagtagcctggaccctgtgaacatcaggacatcaccaactaactggcaatcatcgcattccaccccctaaccccactttcatggttcactttcctgagtgacttttaggtatccaaacaaagagtgtccagggtttaacttacatgcttgttgaactcttgtggacatgaggggaaactaaagatcctgaagagtgagaaaagaccctttcatttgtacttaaggaaaatgaagcaggaaggataaaatggctctcttttagttttgagatttcccttgccagggcccttgactaccttagaaagcatccctcttaaccctatgtcttggcttcccacaccagcatctgaactgcagggaaacttcatttggccaactgctccctcccacttcattccaacttaaaaaaataaaaaagctgttttcccctgaaagaaacaaagttgaggaaatcatccatgccatatgcacatattggtcagcgctcccttccatctgctctggggttgctcagcgcgccccttttctaaagaaactcattgaggcaggtgtgtggtgtgtttggtgcctgtgtgtgtgtgtgtgtgtgtgatgtgatgtgtgtgtgtgtagcgttcatttctgtcagacacccccccatccaattaatagtcttgagcaattaataagtgtcgtctgacttgacccaaagactgggctttttagcaaagttgattcctctttctctgttttacttcttttccagagagtgattggtcactcattttccagcgggtggcataattgaattaactggccacagcactctggtgactattgcctggggccccctccaacagggaacccgtggtgtgcattccagcctcagtcagaggccaggccggcgtcagtcactcaaaatagccggcaagagcatggtggacacgctgctggccttgcaccccaaaagctgaaaaggttgttcctcagcacttagttctcctgttcttccttctggttccatgctccacatgccaggaaggaatgtcttatggcagtcactttaggaatctgcaaagaaatctttatatatatatatatcattattgtcttggttagaatccagagctggaagagttttggggtagttgcaaattccttcctgggcttctaggccagcgttatacaaatcactccaatctcaacatccaatctcaaacatctttacagttttcacccaatctcaaacatcttcactgaaagagtttgccactccactgtgtgtttgaggttggtgaacaattacaaacgaactcatgcctatccctagctttaataaacatgtatttcttcaggtttctttctttttttctctttcttttggtacttagggtttcctttgctattgcaaattgattttgtttttttattgcttgaatacacttctcccacaaaattgcctatataatactgagcaaagtggaataattattggaattattttgggcattttgaaacaaaaatattttcttggatgtatttagacacatgaatcaaccagaatatcttctttgctctctcccttttgccctccctccccttttttttctttctctctttcttcttccttcatttcttctctttttctttccctgttttttttcttttattccctccctccttgcttccctcctttccttcctttttaacaaaagatagatagagatgggattgaatctcttatacttatgccttttaggcaaacatgtgtgtacattgtctaagaatgaaatttagcatgttctgctccagtgggaggtgcagctgtataaccagacatgaatttacacaataggaaacaatttccatggtcacaaagaccctgtctttgaaagaacagtggggcactaaggatcccatataggtgaatgatgttcattccacaaagcaaaacaagatatgtaggtatgaaaatcagcacctctccttactgcttccagcttctgccctttcactccttttttggatgaacatgaagagcagaggtgccttcagagaatccatagtaaccaaaggactcctgcgacttatctagtggtgttttattccatctgccctcgggcccccttccaccattttgagaatccccaaccgtctcagtgcctccacttggtaggcttccgagaggcactcagcctggggtcttctagagacaaccacagagggaaccttcagggcccttttacagcagggtctaagtttcacagtcacttcggattctaatggttcagaaacgtcttctagtccaaggacctcctgtggtgtgattcttccaagctcctaacctctcctagtcactcagtcactgctcttggggaatgcccaagagctctggtgagtgggtgggggcaatacttcaggtggtggaaaagaagagtatgctgggttcaccatgccgtaaaccaacccctagtttattcatttattcttcactagtcgagatgaagacagaaaagtgctccaaacaccagggcaattctgggcagagacagcaatcgaaaacttgatccagttgtatggatcggaatattcggagagaaaaggcatggtaacgggcattcatgtgcagacgcgcgaggtttcccctcccagtgattgcttcctttccttctggcctgtgctgatgccgactctgggtctctttcgaaaggtccctcccttttccagttatcaaatctgataattcttaataaatgatcaagtaatcaaatttgacaactcttctacttctcggtattctacacccatcctactttctatgacagaagtgccacgttgcgtaaaacgttacctaattgcaaacaagaaaaggaggctttttttttttttttttttgagacacggtctctgttgcccaggctggagtatggtggcgcgatctcggttcactgcaacctccgcctcccgggttcaagcgattctcctgcttcagcctcccaagtagctgggactacaggcgcgttccaccacgtccggctaaatttttagtagacaccgtgttagccaggatggtctcgaactcctggcctcgtgatcggcccgcctcggcctcccaaagtgctgggatgtaattacaggcgtaagccaccgcgccgggccaggcaggccattttttaaaataactttaggatgtttaggggaaattaacatttctgacagactctgcagtcattttagtttaagggttgtcattgatttttttaaactcctttttctttctcttcttcttcttcttcctcttcctcttcttcttcttcttcttcttcttcttcttcttcttcttcttcttcttcttcttcttcttcttcttcgtcttcttttcttcttcttcttcttcttcttcttcttcttcttcttcttctccttcttcttctttttcttcttctttttttttttttttcaaaacctcctccttcacgaccctaccccgccccctgggctgtttgtcaaaagcctaacacggatctgtattccgccttagccttgcagccgacaggcaacacggattccatagtcgtacagagaaaatgcatttgcaagcaattaaaaagcctcgcgaacgtattagtggaaaattaagtgggagaactccctcttctgaagtcttctgtttgataacaatggaacttggagccgaggccctcatctgagacggcaggctccctgcccttctgcaacagctgccaagctgtgctcaggcagggcgcaaactcacccgccctctgcgcgaagctctggcgcatgcagagcctgcctcgccagccctaccgcgtcaggggacgttcactcccaggcagcagaaccggagaccgggagggcacgatgccctggaggcctcctggctggttgcacgccttcaggcaggaagccagttcttctggctaaggcctttctcccatgggaaaattgcctctttcggccaagaaatgtttgagttccgaaagaggctgcactttgtcctctttttcttctttcagttgtttaaccttgtagcaatgtaaggggctttgcaagtccgtctgccagccttctgattgcatatggagacttagtttaccaacgctttaaaaagtattgattcatttgatcctgagaacactccccttttctgccattcaggacatatataattattatcctctttgtataaacgaaaaaataacagcaaagtagcagcaactaacatttattgagctcttatcatacgtgccaggccccgtttcgagcccttcataaggattgtatcatttcattctttcaacccttggatggtaggtattagtgcaaatgcattccctttgcaaaagatgaggaaacggaagtgtttggcggcagctcatcccaagccccactccccctcagcaggtctgtgagatggggaaagtgagactcaaggaggtgtgagtgatccctgggtcacaggggctctggccccaaatccggaagttttactttgtccccctccatcttctggtctttactgttgcgtctaaacttttccaggattttaatttcctctttttacccctccccctcgcccccacccaccatctccatccctctccaaacgcctaaaagaaaacacccagacggaggcctggtctaggcttcttttgcagtacaagtcatcgtcacaccttccaggggaagtcgcctggactaccgcggcctcaaattcagcctcccggatcttaccgctagctttccaggggaccgacaagggtgcagtgctcccagggttgccctctcccctggctggtccgcctctggttctcttcagagtcggtggctccacctggccagtcgtggatctcggacgctgtggcactcagcagggaaatcaggccgaagggaccaccagctgtacctgccagtctcctgcgccctcttcgcattcagcggcaggcagctgcggcttggtgaattccgcgaattccgcgctggccccgggaccccctggtaactgaggttgcacgaattgagccgcaaccatagggcctaggcaccaaccctacttgggcatcttcttgggcatcaattctacttgaacaagttacttaattttctcacctgtaaaatgagaaaaataatacacttagctggtccagctgttgtgagaagtaagtgaatatatatatcactgagatcaacgtggacaaggaatgcctttataaatattggctattatttgaaaagagggagagttgttaaggaggcaactaaagagtgacaatatcagtggagactcttgcttccctagggcccgttttgcgagccttggacagatgttaccaaagaaaattctgctggaggagactccagaagccatcagattctaccttctactgccgtatagggtcacacagccactggagctacagagccagggctggagctagaattcagatgcttgtgtcctctcagccccaagtcactggttcaggattcagggaatggacagctcggtagtccagtcctttttttacatgtctattttgtatttcctcatggcttaactaacattttggtctttaaattttttttaatttcattgtttcttctttcttcccctcccttcatgtctttctctcttttctctctctctctctctcaattctttcctccctctctcattctccatccttctctccctctttctctctccccacatttacccttagcctctccttccattccaccctgtcaatgtattcaggggtaccgcctcttctttcctggaattctgctccgacttaactccctcccttctaatttccaaaggtttctgtttcattttgccttaacatcctgtgcatggtctcagtgaagtgggggtgtggaggtgtttcttcatccacaataattcatgttctggtcaccttggtacatagctcctctcctaccttctaaccaacccctgtggatctgttttgttgctgaccccaagctcctgcctcttctccttcctactagccttggggagctttgaggcaaccaaggcctccagttacttttttttttttttttttttttgctaaaagagctttgtctgtttcttctgtcaattaccccagtagcctctcagaggccacgtttatttttccattgaccttttcttccttatgtactggaacaatgccttattattttatttatcttaatctctggtgcaatcgtccttttttcttcaacttggctctgctagtgtttgcctttacactttctcgacttcattatgtaatcttgctgaatctccacactctgtgcatgctgtttagacctcacgtctgtcttttacttacccttgaagagttttgttttgaaactcctggcccattcatatttgtcttattcctttgtttcctactatctcgttgctgcctgtaatgcctatggatagtgtccagaaatttgcacaatatctgctttattacagatctgacccaacagaacattccattaaaaagatatattttcctaatttggccctgacacttttggtgaactgtgataatgccccttcctcctaagctagttctggttgtaggcatcatagggacattagataattgctaggatgactttcactcctttgatttccttttgagcaagtggaggacaatggagtattcactgactgccactgattggctctgggacctcagacacttaaccacgctgctctctttcacagccaggctgtattaaatgaggacaaataggtatgaaacaactttggaactgataatgtactttaaaattatttagtatagtttattgctgcaactcacattctttctggtaggtcaagtctcttcgttggcttaatatcaatcctaatagtgatgaaaagtattgcttttcttctatgacctctcctttccaacactcagctgtggtctgtctgtcttgatcatagatatttctactgacatccttgttagagcactgtgtttcaaaagtctagattcagattgtgataccttttcttcaggcctcgtctccattttggtgtcatgaaaagccttgaggaaaacaatagccaccctactgaatcccctctctatctctcaatgtcatctgcaaaggatggacattgtaatcccagtaaaagactacccccacccctactctttggtaatcctctcttgatcagtttccactcctactctcaaccacccatcccttttccagtctttgtttttagatagagggcctttactaaaaaacatactgaaaaaaaaaaaaagacacaattcactccagtgattcttggaatgtctcccccttaggggcatcctggcaacctggcttggaatagttcatgtaacggaaagttcattttaagttcagtgaaatggggcagtgtaggtttttgctttgctatctttaggtgcgaaaatgtcacctcttgcacccttttttttttttttttttgagacagaatcttgctctgtcacccaggctggagcgcagtggtgtgatctctgctcactgcaagatccgcctcccgggttcacaccattctcctgcctcagcctccagagtagctgggactacaggtgcccgccaccactcccagctaatttttgtagtttcttttttttttcccccatcatcaatatttattgagcatttacagtgtactagggacaatacagaaaacattgtccctgctcttgaggagcttacattctaaaagaaaaaatacacctcttttaaaatggcatttttgtttggtgttttctgcaaagtactgaggaaatactttgtaaagtgagctttgggtataacttagccccatcattatttagagaatagaggaagaagaaagagggaggattttaaaggcagacaatgacagaccattcaggataggtagggttttaaagggagataaacacaatctcatcaactaaggagagatttgctgcagtaaataggatgagggaaatagtctgtgggatgcaagcaaaggaagcagggtgccttaaacattgagtggagccagaaagatcatgcggcctctttccaagtacatggctaccaagtaggaatggttggtgacaagatagaaggctaaaaaaggaaggtaatcttgtgcacctgacaaataggaagaataaaggatcaaaatcaaatgcaagctataagagtatcaagaaattcttaaaaaccaaaaagtgatttggaagcacaaaacttgtagttaatgctacccaatgtcatgacgaggtttcaccatcttggccaggctagtcttgaactcctgatctcgggtgatccacccaccttggccttgcaaagtgctgggattacaggcatgagccactgcgcccagccatcttgcacccttctttacagagaaattgtgactaaatctagcattggaacttctcgctagtacaagacactggaaacaggtgtagactgtgatgtattaaatatgtaccatatattagaaatatctgtaatgaatgcagacattctgataaataatacaatgtaaggctctttgtatgattgaacactatctacttctcatatatttatgtgccagcagataaagagaacaggtttctttccctagttaaatacgttgaaacagcattagtcatttaggagtgtgttccaacctgaatgctaagatttagatggtggcaaaactaagcacatgtaggtgctctgccctggcacattcagtttttacttagagaaggaagctctcccgttaattatctggactctgatgatggaggacagggagtagtggagaatgttagaaatgcatcattttaatgtgcttttcatcgacaaggtcaaatgtgtttcagatgcagttgacagcaaaattcaaaatccttgaaatgtagaaattttataccttgacaatatacttgttcatcattataatgtagattatggtggctaaaattgcccaatctttaaggagtgaggatttcaaattgttaattctaacaattttgactctttttttcaaaatcagaaaaccaaaggtcacttcacagactgtgttttcccagagaacatggaatcttttcacacttccacagataaatatgactactgccttattagaaaatgaatataggaagttcatcttgtctttccccaagatggtatatttacatgaagatgagtttatgttatgaggagaatgccaattgggtggcttggaatgacatttagggatttatgatgccatagagtctagtctattttttaagaagtgattgattcactagatatttaaaaatgctaaagagtagggacatatttcacttacttgattcaactgttcatacaatggcaccttagtgcagaatatagggccatctcaacacctaattacagtaccttacattatagggaaagaagataatgaaaagataaaccaaagaaaatccagagctccctttaccagcagcaaaacttgcaaaatatctttttattctaatgagaaattttctcacccaatgtgagtgtctaacagatggacacaagcaatatcaaattgtctatgactgtgctgtcttatgcagtgatggtagccacatgtggctattgaggactgtcatggactgaattcctatcttaaaaccctaactccaatgtgagtgtatttgaaaataagtccttgaaggatgttaactgaggtcataaggttgggtcctaatcccaaaccaaagagcactagtgttcttaaaaaaagaagaggagacatcagaggaaggtcatgtggggaaacagcaaaagaaaaattgctatctacaagccaaggatctctcctctgaagaaaccaaatctgctgagaccttgatcttggattttcagcttccacacctgtaagaaaataaatttctgttgtttaagttccacaatctgtggtattgtgttatggcagttctagcagactaatacaaacacttggaggaaacaacaacagtatcccctgatattaggagttggcctagtactattggtgagaacttagttttcctgcaagctggcctggcactcacagttaggtctttgtgctctcccgttgagcacaatcttatagaacatcaatatcaggcagggcctctctgtgaccatgatggatgaagatgaaagtaataactctagtaatgcctgcacacagacaaaacatgaacattgtttaagccacaaaataccaaacattctcctcctctggccaataggagtgactgctacttcttaaccatttatagctccagggccattcaagtatttacactgtataaaaagtttgttgaggtacccaaccagagttcttcctgttttctgaggtaattcaatacagtgtgaaccactgcttttttggacaatttctgaaattatccaaccaaagtccaaatcctttctaacactgttttactctgatgttcagtggtttcccatgacatgtgccctttcttgatgaaagttgtaaaccaaatttcaactacagctgtgtgcttggtggtctttggttagaaagcattggcaatttgaaataaagctagtccaaattgagatatactgtaagtataaaatacacatttgattttcaaatacttaatatgaaaaagagaatgtaaaatatttcataatttcatattaattataatgataatattttggaaatgctgatagaatgtattattaaaagtcaatttgcctgttcttttttaatgtagccactagaaaatttaaaattacatatgtggcttgcatttcatttctgttgaatttgcattgttttataatgtcccagaatagccaataattgaccatcctgaccatgcatacacagcatacagcttttttcaaagaagttaattaatctcattaggagacactatactgtgagtaacaaacaactcacaaatctctgtggtttaacacaacaaaaagttatttctctcaaacacacaattcactgtgagtctgaatacctcaccagggagctgttctccatttggcagcacagggatctagtgagatatttatttctgcatcatcataaggtggagggtgctggacggtcttctgcaagtaaataagttattggttccagaaacacattggccagatctagtcatgtggctctgcttaatcatagggcatctggagagtgtaatctcttcccctattcccagaagaaggagagaagtgaaaatgaaaagcaattgcaatatctgccataaagagaaaaatgtaaatagaaatacatgctctagatctctagtttaacacaaatgtgtgacatatttgacacatgcctaatgtattttgcttaggaggcctggactcagagggtatctacactgacactgaagatgcaattttttaaaaacatgcttaagtcttctagttcatagttgtatggcaacaatttgaagttttcagctacttagatgaaatgtgtagttaccaagagctcgcaattctttacctccccttctcatgctaagataaactttcaaaacaaagttaaaactgtgttttgaaagtgttatgtaataagattaaatagaaaagaagaaggtcttcaggatc

SEQ ID NO: 4417 - DNA, 390 bp, Homo Sapiens
cacgaggtgtgcttcaatccagggaaagtttcttggacccagtgataaaaacttccttttagggatcaatgaaggagagaaggtcttggaatcaccttcagtctttggagacccagctgcctttgtggaagggaggagacggtcatgacacaaagctttatcctacacagaaacacccgtgacccactatgagatggcccagatgtgggacccggtaccatgctctaaagcgagtgattaggcagcagctgaagccacccctgctgatgatgagcaagtgcctgctgcaggtccaaacacagcatccaggggctttgcagttcctaaggagtgatgaggttagaggatcacttccgcatttgattttcaaggatggcgtcaagacggggt

SEQ ID NO: 4418 - DNA, 309 bp, Homo Sapiens
tttttttttttttaggagaacaaaatatatggtatttattaaacacatgtgacataggttataatatcaaagtagagcatgcatgaacagatgattcattcgtttaacaaaaacaccaattgatactgagaacactaaattattaaatttccaagacatataaaattctctttaagttaaagtgaaaaaaaaaaaaaaatcacaagttgaataaatacagtgatttcagctggtccaatgaaagcataaggcacaaattaaaccaagggactagcgcatcaaaatgaagcttgtctggcccacacaagt

SEQ ID NO: 4419 - DNA, 4343 bp, Homo Sapiens
cgcacctgctgcaggtgctcccggccgccccggaccagcgagcgcgggcactgcggcggggaggatgctgcgcgagcggaccgtgcggctgcagtacgggagccgcgtggaggcggtgtacgtgctgggcacctacctctggaccgatgtctacagcgcggccccagccggggcccaaaccttcagcctgaagcactcggaacacgtgtgggtggaggtggtgcgtgatggggaggctgaggaggtggccaccaatggcaagcagcgctggcttctctcgcccagcaccaccctgcgggtcaccatgagccaggcgagcaccgaggccagcagtgacaaggtcaccgtcaactactatgacgaggaagggagcattcccatcgaccaggcggggctcttcctcacagccattgagatctccctggatgtggacgcagaccgggatggtgtggtggagaagaacaacccaaagaaggcatcctggacctggggccccgagggccagggggccatcctgctggtgaactgtgaccgagagacaccctggttgcccaaggaggactgccgtgatgagaaggtctacagcaaggaagatctcaaggacatgtcccagatgatcctgcggaccaaaggccccgaccgcctccccgccggatacgagatagttctgtacatttccatgtcagactcagacaaagtgggcgtgttctacgtggagaacccgttcttcggccaacgctatatccacatcctgggccggcggaagctctaccatgtggtcaagtacacgggtggctccgcggagctgctgttcttcgtggaaggcctctgtttccccgacgagggcttctcaggcctggtctccatccatgtcagcctgctggagtacatggcccaggacattcccctgactcccatcttcacggacaccgtgatattccggattgctccgtggatcatgacccccaacatcctgcctcccgtgtcggtgtttgtgtgctgcatgaaggataattacctgttcctgaaagaggtgaagaaccttgtggagaaaaccaactgtgagctgaaggtctgcttccagtacctaaaccgaggcgatcgctggatccaggatgaaattgagtttggctacatcgaggccccccataaaggcttccccgtggtgctggactctccccgagatggaaacctaaaggacttccctgtgaaggagctcctgggcccagattttggctacgtgacccgggagcccctctttgagtctgtcaccagccttgactcatttggaaacctggaggtcagtcccccagtgaccgtgaacggcaagacatacccgcttggccgcatcctcatcgggagcagctttcctctgtctggtggtcggaggatgaccaaggtggtgcgtgacttcctgaaggcccagcaggtgcaggcacccgtggagctctactcagactggctgactgtgggccacgtggatgagttcatgtcctttgtccccatccccggcacaaagaaattcctgctactcatggccagcacctcggcctgctacaagctcttccgagagaagcagaaggacggccatggagaggccatcatgttcaaaggcttgggtgggatgagcagcaagcgaatcaccatcaacaagattctgtccaacgagagccttgtgcaggagaacctgtacttccagcgctgcctagactggaaccgtgacatcctcaagaaggagctgggactgacagagcaggacatcattgacctgcccgctctgttcaagatggacgaggaccaccgtgccagagccttcttcccaaacatggtgaacatgatcgtgctggacaaggacctgggcatccccaagccattcgggccacaggttgaggaggaatgctgcctggagatgcacgtgcgtggcctcctggagcccctgggcctcgaatgcaccttcatcgacgacatttctgcctaccacaaatttctgggggaagtccactgtggcaccaacgtccgcaggaagcccttcaccttcaagtggtggcacatggtgccctgacctgccaggggccctggcgtttgcctccttcgcttagttctccagaccctccctcacacgcccagagccttctgctgacatggactggacagccccgctgggagacctttgggacgtggggtggaatttggggtatctgtgccttgccctccctgagaggggcctcagtgtcctctgaagccatccccagtgagcctcgactctgtccctgctgaaaatagctgggccagtgtctctgtagccctgacataaggaacagaacacaacaaaacacagcaaaccatgtgcccaaactgctccccaaagaattttgagtctctaatctgacactgaatgaggggagaagggaaggagattctgggattgccagttcttccagcagccatgctctgaaaatcaaggtagaatccatggaaagggaccccaggaccccgggaccctagacgtatcttgaactgccatcgtcatttcaaatacatctccctcagggtttccaggtggccacccccaattattcattccttaccaacctctcaaatcctcttggctttctctctgcagtgtggacactgttggctagtcctccccactccctgagggtccagtaagttagcttagaaccttcctggaaacatttcatctgagcaggtttccccacgtgtgggatgctccttttgcctcatctgtctcagggatgcaggctcccccgcatgcatggggatttctccccagaccagcatacttgtgacctgagagttcaatgcgtaaagatgcccctggtcagccatatccatcttctcttgcctggtccttgattctctggccgctccctgaccttcctccttccactgccttgactttcttcctttttattcctggtgccatctgtccaggcagctagacaagaacttgttcgccagcagccagattcaggccttcccaggggcataataagtgaccagcccctcctctccggacatcagatccaacacataaggaccctggcctaccctccagcccaacagccagttctgggtcagctgccaacttaggggtggtttgattatcccattgaaattcaccagtgcctttgccaaagaccctctcatttggacatacccagattcattccctggctccaactgaaaagactcagtttcaatcgttaaaagttcctttagggccagaagaataaatgaattataatcccattttgaagaaccgatttataaccaatgaaaaggttataatgtaatttatattcttggaggaacaagattttcatttgggattatttccttcaaccattcaacaaacatttgttgtatgccactaagcgccaggcacggcgttgggctctgcaaacacagtggttagtagcagtctggacctggtccctactggcatggaacccatcactccccaacatgcaaagcccacatttaaaggccagcctctgccccttcagtgatgcgctctttagaaatgccagcccactatattcagaaatccgcagggcacaaaacttccagcaagtcactgttgtggtgaaatgggcagtgggggtggggggtcttctttaaacaggcccccttcccatctacctagccagtacccatccaatgagtccccagagcctccagaagctgttgtctcctctctggggacagcagctcctgcctttggaggccaaagccccagatctctccagccccagagctgaaaacaccaagtgcctatttgagggtgtctgtctggagacttagagtttgtcatgtgtgtgtgtgtgtttggttaatgtgggtttatgggttttctttctttttttttttttttttttagtctacattagggggaagtgagcgcctcccatgtgcagacagtgtgtctttatagatttttctaaggctttccccaatgatgtcggtaatttctgatgtttctgaagttcccaggactcacacacccgttcccatctcacttgcccacccagtgtgacaaccctcggtgtggatatacccccgtggactcatggctcttccccacccccactttctataaatgtaggcctagaatacgcttctctgttgcaaaactcagctaagttcctgcttccaccttgatgttgaaatatcttatgtaagagggcaggggatgtcgtgaagatggcaagaagaacacagtttcaaatttctggaaaagagcctgtggtggagatctaaagatgtttagggaagagctcgactaaagaacaatgaaataaatggtccaaggggaagtc

SEQ ID NO: 4420 - DNA, 469 bp, Homo Sapiens
cacaccacctgagtccaaccacctgagtcacaccacctgagtcaaattctgaagatgccttcaagtgcctctcaagtaagattttcaagttggggcagaggaactccaacccttctaggcatgaattaaacccatttataaggcaccgttccagagaaggtctggttctgggccactgcatctctaggccaagctcaaaagcactccttattccaacctcaaactcttctctggaccttgactccaatccattgctcaacatgggctcaagaaacacctccaagctgaacctcaatgtagctccagattctcatgggaccctaatcccagacacaaatgagaccatcactttggcttcacataatatctctgagtccgtttcaaaaggagcctttagtaccacctggagcacaagttcaaaggaaaccatgaatgtggcttccagcggccactccagatctgatttgag

SEQ ID NO: 4421 - DNA, 610 bp, Homo Sapiens
  misc_feature (451)..(451): n is a, c, g, or t
actgatatatatctttttattatgcacagataaaagatttaaaactgtggttatcaaaactatacatctaagcatcttcacaaaatagctgacacactgaacagagaaaagaatacaacaggggtgttcaaactggccacagggattttaagggtactcgttttaccctcatagatgatgaaaaccagcaacaaaatcaggctcattcaggaaaaaccagaagagagaagtattgtatttggaaactgataatagtcctttttagaaaaacatctgtcagtttcatgaacaacccccagataaaacaaacatgaaaaaaatcacataggactcacccaacaaaatgtgctctgttaacacaaccagcagtacaatcatcattcaaaccatgaggtagttacagtacaaaaagactggcacgcgtgtgagcaccccacacacactcacaatnatgcccactaagaacacaagcaggaaatggatttacaatcttattacaaggcaaagaaaaaaaccattttttttgtttagaaaatgctatagaaacagtttagacagaagaaatctctggctttttaaaatacaaaataacagctggtaaacaccacat

SEQ ID NO: 4422 - DNA, 556 bp, Homo Sapiens
  misc_feature (314)..(314): n is a, c, g, or t
  misc_feature (418)..(418): n is a, c, g, or t
  misc_feature (433)..(433): n is a, c, g, or t
cggccgcaagtgtttttgttttttttgttttgtgattttttttgtttttttgtttttgcccttcatggtccgagaaggaaacggtggaaggtttcacatggttccaatgctgtaggtcgccgcgggcccgatggtgtgatggtacgggtcggcagctgcgtagactctgccgtaactgtcgctgtaggctgccgccgctgcagcgggctgagcgtatctgtaggctgcgtagcctccataaatctcagcaccataaaatccatcctgatacacgaccgctccgtaagtcgggatggggggtgggggtggcgcancccgaaatgtattatacacggcccggccccggccccgaagatgtgcgccccggtaggcaacggctgtgccggtggtggggtaggggaaccccgtcactgcatanaattcaggcccgtanactgcgccgaccactggatttagcttccagccgttggtgtaggggttccccgtcttcttgttggtcatcactcgggccgtggcattattgaccttggagccccgctcgttaaaaatcctcgtg

SEQ ID NO: 4423 - DNA, 163 bp, Homo Sapiens
ggctgatgcgctacctgacaatgttctgcaggattcaggccccagccaagagctggcccggagcagccaggagcacctccagcgcacagtcaaatatggggggcgccggcggatgcccccaccgggtagaaatgaacggctttccgtgaaagggacaatgcga

SEQ ID NO: 4424 - DNA, 434 bp, Homo Sapiens
tttttttttttttttttttttttttttttttttttttttttctggcgaaaatcacattctgtattcatacaaaaactttgtttttttttgacaaactggccccataaaaacaaatttccaaagggacaggaacttaaattgggggagatgccccatgtcttgggagacttaaaaaaaaaaaaaagaccccagcttttatcttcacaaaacaacatgggagtgggggcaatgaggggggacaggacagggccagccaggctggtagctggcaccagtcttttcatcttgaaaacctcattgagggttcctgggattcaggggcccaaaaaaaagttcagggctacaagggggcaggcttccttttgtttctttgggggagcccacaaaaagttcttacatactgtccagagaggcctaagggtactaagttccag

SEQ ID NO: 4425 - DNA, 711 bp, Homo Sapiens
aaaaaaagtcaataacaaaaaacccagctcaagaacccattctacgccaaactggaaaggagaagagagcaacaggaagattccagaaacggggggccccagtttttgaagaactttatgaacttttcaaagattattttcatatggcagcaagtgatacggaagactgctgtcagggacacctgatatggaaatcaaatagatttttaattaattgaacataagatttagggatttttccagaactcgaaagggtcaacagccctccagaatgtcgggctgcagcctgaggaggctgatgtttggagctggtgtgggattggcgaagcccagtccgggctccctagtcaggaaagacgggggacggccaggctgctggaaggcccccgggggcgcggggcgattttttctttttctgagcactctggataaatccctaagcaacgttgtttctcaaatgtcattaataatgtgtgttgcaaactttaggtttttttcttttctgaaaatgtatttcctctttgaatccaccctagtcgcgtagcgtagggctagcggtcgtcacagacaccctagtagaatgtagcactcagcacccttgtctcctaccttgtgttcactccaatgatacaatagaatatccctcaatgtattgcaaaaaaaaaggcgatataacatgggcatgtaaccaatgtggcggtgcagtttcgg

SEQ ID NO: 4426 - DNA, 496 bp, Homo Sapiens
cacgaggcctgtcacctgaaaacaccaaggacttcgtacgaatggtccgaaagatcccatagctgggattttgttcctgtgaagaattaggagaaactggaatatggcagctgacagatccaccaatccttcctcttacccatggaccaactgggggcttcaactggagagagaccttgcttcaagaataaaccacaccagtgaacaagaaggaaaggccttttggagtgtgtctttctgtgtgtttaaaaacagtgggaaaatccacaccacactctaagtggacagctcagaataatttagcatatttcctttcacacttaaagttcttaagatgagactgtgtaaatgagagaaagacttgattcagaggaaaaaaatgtgttctctccggactcttgcctagctcacaaggctttggagaattgtcttcctaaatcggggcacctgctacagaagagaatgtttcgttccctctgggtatgcacagctaagg

SEQ ID NO: 4427 - DNA, 5356 bp, Homo Sapiens
tgcaatgcgtgttttactatctaaattaccaagaccatggattgtggatgagaagaaagatgatggttatactgccttacatctggctgcccttaataatcacgtagaagtggctgaactgttggtacatcagggtaatgcaaacctggatatccagaatgtgaaccaacaaactgccctacaccttgctgttgaacgacagcatacccagattgttaggcttttggtccgtgcaggtgccaagcttgatattcaggataaggatggggatactcctttgcatgaagctctaaggcatcacactttgtctcagctacgtcagctccaagatatgcaagatgtggggaaggtggatgctgcctgggagccatccaaaaacacgttaataatgggacttggtacccagggggcagagaagaagagtgcagcatctattgcctgtttcttggcagccaatggtgctgacctgagcattcgaaataagaagggtcaatcgccacttgatctctgtcctgatccgaatctctgcaaagcactggcaaagtgtcataaggaaaaagtcagtggtcaagtgggttctcggagtccttctatgattagtaatgattctgaaaccttagaagagtgtatggtgtgctcagatatgaagagagatactctttttggtccatgtggacatattgctacctgttctttatgttctccacgtgtcaagaaatgcctcatctgtaaagaacaggttcaatccaggacaaagattgaagaatgtgtggtatgctctgacaagaaagcagctgttctttttcaaccctgtggccacatgtgtgcttgtgagaactgtgctaacctgatgaaaaagtgtgtgcagtgtcgagcagtagttgaacgaagagtgcctttcattatgtgctgtggagggaaaagttcagaagatgccactgatgatatctcaagtgggaatattccagtattacaaaaggacaaggataataccaatgtcaatgcagatgtgcaaaagttgcagcaacagttacaagacattaaagagcagacaatgtgccctgtgtgtctagatcgtctgaagaatatgattttcctttgtggtcacggaacctgtcaactctgtggagaccgcatgagtgaatgtcctatctgtcgcaaggctattgaacgaaggattcttttgtattaactaagacacatggtgtattttgttagctaatgtatctagtcatgagatcttaataggcttttgatctagttggaagttctgatgagttaatttctaatatcatagtttctttactagagtataattgggctgtaaatgtaccagaacaaaaaaccctacaaaatggtgttggaaattgtgttttttgtttttgttttaaatttgaaacatcaaattcatgtaactcataggataatttacctttggcttctaagaggaaagtcctttaaggatatccttttttaaaaaattgcatttttctcttataatttgtaaatttgttggatctcaaaagacataattctttgtgatcagttatccttcatttcatcgtggttttacacagtgagttgataacaggttctctgagaagtcatgcatcaaataaaagaggcaggtcaaacaattatgtcacatggtaaattataaaatgacagtacaagttccagatagttaagggaataccgaagggatgattctttttttaagataacaggaagttacccacatgtttgtttctgaattcttagagtaaatggaagcatagaatgagggaataatgactttgcatttctcttgttttctagattcaaaaggaacattgtttaacttgaatcagattaccagtttcaaggtgactgatagacaagaaaaggaaaaataagcaataatagtgggcaactgaagagaaaaaaaaaacgagtatctattaactggccactaacagttgcctttcttacattaatttatacactattttgttcagccagtgtttttaaaaaaaatctatgaaaagtgtacttccggttttctgtgattacttatctgggcttgatctgaccagtgaaatgacattgccctatttggacctctgaggttctatttagctttgcagatgtacatagtatcccagtgatctgcaaaattaatgccttttccaagaaaaaatcttttcttctctgtatcagttaattctgacagtgttagtgattctgtcttcattataggccttatttccattatctctttctttatagtattttttgttataaagaaaacagtctttctgtgtatacctacggatgagggtattatttaaactgccaacaatatccaagacatggtcaataacctaattataaatactttagaaagagtgaccaggacatgtatagaaatgtctgcttacctgtagactttaaaaacaaacaaaaaaaacaaacaaaatttttggagcatttaatcattttttttctccttttatctcctttgtaatcttattgtctcctgagtaaatatacacataaatgtttggggattcattgctgctagattatatcaggtgtttacatagtgtctactatatgctgttgataagctttttcctaaaaatagttatcctcttttgtagtttttttccctcctttaaatctggctagcttttcttacttcagtttttatagaacaccaactaaatttgaaagtatgaagtctctagccctcttacactgtttctggctgtttaatccttgctgcctttgcaagtcctggtgaaagcaatggggagctttgctggctggttttgtagtctcaacaattccatgtctgtgtttagctgagtaactgctatcatttagaacagtaaaatttttatagatttcaaatttgaaaattcatgtacactcagttatctaataaggggccaccgacgctgtttttaaaactattttgaagttataaaaaggtagaacatctgactgatgatgttcacataaagagacagacagactatcatgttgcagacatgaaaacagcatgtcaggtttttcctttccttccatgccatgggctacccatctcttcccactagatcacctggtgaggagggagcacctggctgactcatgcagagtttggccaatcagagaattgtgtggtctccagctctactttccttaaacaaatcctttctgttttctgagctgcagtgctaaaacagatccctaaaaggtaatagcatcttccagactagtttaattatttcctttataagaatatgacataaatttttattatagaaataatgtcattataattttagtgctagtacttgtgggttttctgtatttgtatcaccttgaaatttgttccatgaatagaaaatacttctttattcatgttttcaatcacttagaattattttaaatttattttgggtttgtgagagataataagattaagaacttcatcatttcagtgactttcctccaactctctgaatctgctacctcttattatatgtcccttagcagtacttttccagttaggttcgttaccctcctcattagctaaacctctttatcttgtgcctcaaaagagcttttacttttcttagaaacatttataaaaaagaaaaaaactgacacgcattcattcaaaaaagtatttattgggctttagggattagatacacaacagtggaaaaatggcatcttagcacactcagaatttattgtgcagcagttgtgtattttaaggaatctgtagttaaaaggaagagatccaaaggtcctgataacatttcctaacgtttcagaagagttgtcattgagtagtgtttggatttcctctctgtatccctcaccctaccattttctcctttattcttctaagattgttagcgttgttactcaaaacatacacatacaacataccagatggtgctgttctaatggtatttgttcacgtaatttaacgttcttactgcttatactatatacatatttaattttgttgggagcaagaaggttttcaagaaaagataattttgtattagtgtaggaatatattagacaaatgtttagttggtcaaattatgcataagatatttgtaactttaaacattgcaaattgaccagctagctatggaagcataaaattaattgataattaatgttggaaatacatttctaaaatttatatttttatggtgttagcctgtaagagcattttagcatattgaaatgcatgctgcttaagatgtgtctggttcaaatatcaaaacttgctgggtcatttttacatagtagaaacatactgtctatgtgttgcccaattgctgtttgtccactctgaattctggaccctttttggactaagaattagttaaattcatgaactaagagaattagagatggggtagagtaggatcaggacagtggggttacaacagataggaaaggaaagtcagcatttgagtgtagagaaaaaaagaggatcatacagatgtcatcaaattataggctttaatacaggttgctttttttaatccaaaaggaaaagcacttatcctatcagaatgtctaccatgttttatagtaataatttgtgtaaaaaattgaatttttgaatagttttttgtattttttgtgatgaaaaactcataacataaaatttaccatattaactgtttctaaagaatacagttcagccatgtgaagtacatttacactgttgtgaaacagatctccagaactttttcatcttgcaaaactgaaactccatacccattaaacaactcccctttttgttttctcctcagtggaatagaattttgactccatataaatcaagaaacacctaaattctttagttgtttgtgtttgcaagatctaaggtcatggtaaacattaagttcttaaaatttttgggagggacagtgcacctctcctctgaattgttagcaattaaattgagtaggttttaaatgtctattcattggaagggtttgttatttcattttgagccagaggggagaggcacattttaaatatcagaattagattagctttgagtttgtacaattgggaacataatagattttcataaattatgtgtgccttgttggaagtgtcaactgtctttatgtctgcttgtaaaagtttcaaaatatgttttccctcaaaaaggcaacgttacttcatttgcttgaatattatgataggaatgcttactgatattacttgatagtcatatatagcctaggaaatttaacatatatataactatagcagtattaataatgatagttgtacttctttaaaacattaaatttgaggaaacttt

SEQ ID NO: 4428 - DNA, 415 bp, Homo Sapiens
  misc_feature (15)..(15): n is a, c, g, or t
  misc_feature (314)..(314): n is a, c, g, or t
  misc_feature (390)..(390): n is a, c, g, or t
aggcttcaagaaatnctttggaaataaaaagttaaatgtttacatttcatgtggtatttcaggtcttcaggttctgattagcttacttttttcctttgtctttggctgatttctgctttgtagataaataataatagccctgagatgtttctaacatttaaataagaaaaaaatcaaatcgaagtcagcctgctgggaaaagtgatcacatgggcagttgcagtaacttgtatgggaaagagaaaatgcaatgagcccagttactgcacttgccactaccatgctgtccatgggaagggattaatcagcagttncagttgttcacaagccgcccttgagggaaaacggcagccaaatatttttaaatggagggttttggcagttcccccngggccagtggagggtttcttttttg

SEQ ID NO: 4429 - DNA, 531 bp, Homo Sapiens
taaaaaaagggtgtgaggctcgagcacgccagccaggccgctagcacctcgcgcgcgccgcgtcagcgaggacccgcacgagctgcccggctctgtgcctgcgttgtttgaaactgtggaacccgttaggcttttggggaactacagtcccagctggctccggagcccgtgcgtgccaggggcgagtggccgtcgcgagacggctcctgcctttcgtgtctctgcagcgtggagactggaaccggcaatttcaaaggacgccacgttcaatcgcagcgctggcgcgggcggaggctaaaacacgggggtcctgagactgaggaaaacgcgccaagttcccctcggtggcggagtgctaaagaccctagcggttcaggcgttcggcgagcggggccgctgcttgttgcgctcctggctctcccggggcgggcgcagatgggcgccgctcccgggatgtagttggtgtaggtgcaagacgggagcgagcggcggtcggggttcccgctcttgggagcggatggtcactccccc

SEQ ID NO: 4430 - DNA, 3171 bp, Homo Sapiens
ggcacgagatgacaccaagcaaagcctacttagtttagatctccagaaattggctggtggaaaaaaatcaaacatgaagattgcagttttgttttgtttttttctgcttatcatttttcaaactgactttggaaaaaatgaagaaattcctaggaagcaaaggaggaagatctaccacagaaggttgaggaaaagttcaacctcacacaagcacagatcaaacagacagcttggaattcagcaaacaacagtttttacaccagtagcaagacttcctattgttaactttgattatagcatggaggaaaagtttgaatccttttcaagttttcctggagtagaatcaagttataatgtgttaccaggaaagaagggacactgtttggtaaagggcataaccatgtacaacaaagctgtgtggtcgcctgagccctgcactacctgcctctgctcagatggaagagttctttgtgatgaaaccatgtgccatccccagaggtgcccccaaacagttatacctgaaggggaatgctgcccggtctgctccgctactgtctcctattctctactcagtggtatagcattaaatgatagaaatgaattttctggtgattcttcagaacaaagagaacctaccaatttacttcataagcaactgccacctcctcaggtgggaatggaccgaatagtaagaaaagaagcacttcaatctgaggaggatgaagaagtgaaagaagaagatacagagcaaaagagagagacccctgaatctagaaatcaggggcaactttacagtgagggggacagcagaggaggagacagaaagcagaggcctggagaggagaggaggctggcacaccagcaacaacgccaaggaagggaggaggaggaggatgaggaggaggagggtgaggagggtgaggaggatgaggaggacgaggaggacccggtaagaggagatatgttccgaatgccctctcgatccccgcttcctgctcctcccagaggcacactgcgcctgccaagcgggtgctctctgtcctacaggaccatcagctgcatcaacgccatgcttacccagataccaccgctgacagcaccacagataacaagtctggagctcactggcaattccatcgcctccatcccagatgaagcatttaatggattaccaaatttggaaaggcttgatctgagtaaaaataatatcacttcttcaggcataggtccaaaagcattcaagcttctgaagaagttaatgcgtttgaatatggatggaaataatttgatacagattccttcacaattgccatctacattagaagaacttaaagtcaatgagaacaatcttcaggctatcgatgaagaaagtttatcagacttaaatcagttggtcaccttagaattggaaggaaacaatctcagtgaagccaatgtcaatcctttagctttcaaacctttgaagagcctagcctacttgcgtctgggaaaaaataaatttagaattataccgcagggtcttcctggttctattgaggaattatacctagaaaataaccaaattgaagaaataactgaaatttgtttcaatcataccagaaagatcaatgtcattgtactacgttataacaaaattgaagaaaataggattgctcctttagcctggataaatcaagaaaatctagaatccattgatctctcctacaacaagctctatcacgtcccgtcctatctacccaagtccttgctgcacctagtactccttgggaaccagattgaacggatccctggctatgtgtttggccacatggaaccaggcctggaatacttgtacctgtcatttaacaaacttgctgatgatggcatggaccgtgtctccttctatggggcatatcattctctgagagaattatttctggatcacaatgacttaaaatctataccacctgggatacaagaaatgaaagcactacattttctgaggctgaacaacaacaagatacggaacattcttccagaagaaatttgcaatgctgaagaggatgatgactcaaatctggaacatcttcatcttgaaaacaattatattaaaattagagaaataccatcttacacattttcatgcataagatcatactcaagtatcgttcttaaaccacaaaacatcaagtaattccaagttttcctttgctgtttataaactttactcatgtatttgtagtagctgcatttgtcattaataagagagacataatcctcctgttatactcagtatcattatatgctagtcaacctgattcactaacacacagatgaacaaccaaaatatacctaaaaggtatagtctctaggagttttattaatagtaaaggtaaaatctctcagtttcctacctctagaaagaggccatctcactagaataggatattatgcatactgagctagaccagaagagtctggaacaaaataaacacagcctttataatcaacttgaatactggtgttagctgagaactctgtaagtccctttaaaaattatgtatcttttggttcaagattaagaagcataatgacaacaaaaaaagcaggcagaatttatgaataagtgttgtttattattaaaacaataatttgttaatttcttataaggtcctgtgctataattactggtataaatataactgaatattggggtagctttcatttcttccattaattacatgtgtaaaattaaaacactactgtaatgttaatttcctggttttgaaaatcatattatggttatgtacattgttaacattaaggaaagctggcagaagggtgtgcataaattctatactctttttgaaacttttctataattctaaaattattttttaaagttaaacagtatattaagattaccttcactattcctcactcaagattaagacattttttgaaaagcagtagagtttgcttaaaatacaaattaattattcttgactataaccttgtaaaggtaaatctaatgtataaatttttgaaaaattttgcaccactggtcatagcatctatctcctttgccttaatttactgaaatacatcattttattcggttcaattgaaataaagctatgtctttactatgtattggccctaccaaaatcatatattaaaattttctaacat

SEQ ID NO: 4431 - DNA, 1427 bp, Homo Sapiens
accggcgtattcccgccctgcttttcgcccgccgttccgtggcgggaactgaggcgactgtggggacatcagtgatcgtaagtctcctgggcccgttattctcagattaggtgacggagctaagacttcgagaccatctcgtcctttttgtatcgcggaaacctgaggaacgagccggcggcggtgacctgcacgagaagccaggctaactgggtgaagtaccatgcaagcatttcttaaaggtacatccatcagtactaaacccccgctgaccaaggatcgaggagtagctgccagtgcgggaagtagcggagagaacaagaaagccaaacccgttccctgggtggaaaaatatcgcccaaaatgtgtggatgaagttgctttccaggaagaagtggttgcagtgctgaaaaaatctttagaaggagcagatcttcctaatctcttgttttacggaccacctggaactggaaaaacatccactattttggcagcagctagagaactctttgggcctgaacttttccgattaagagttcttgagttaaatgcatctgatgaacgtggaatacaagtagttcgagagaaagtgaaaaattttgctcaattaactgtgtcaggaagtcgctcagatgggaagccgtgtccgccttttaagattgtgattctggatgaagcagattctatgacctcagctgctcaggcagctttaagacgtaccatggagaaggagtcgaaaaccacccgattctgtcttatctgtaactatgtcagtcgaataattgaacccctgacctctagatgttcaaaattccgcttcaagcctctgtcagataaaattcaacagcagcgattactagacattgccaagaaggaaaatgtcaaaattagtgatgagggaatagcttatcttgttaaagtgtcagaaggagacttaagaaaagccattacatttcttcaaagcgctactcgattaacaggtggaaaggagatcacagagaaagtgattacagacattgccggggtaataccagctgagaaaattgatggagtatttgctgcctgtcagagtggctcttttgacaaactagaagctgtggtcaaggatttaatagatgagggtcatgcagcaactcagctcgtcaatcaactccatgatgtggttgtagaaaataacttatctgataaacagaagtctattatcacagaaaaacttgccgaagttgacaaatgcctagcagatggtgctgatgaacatttgcaactcatcagcctttgtgcaactgtgatgcagcagttatctcagaattgttaacgtgaatatatctggatggggggttttgtaaataatgaagttgtaataaaaataaaatgaccaaaagcacctttaaaaaaaaaaaaaaaaaaaaaaaaaaaaaaaaaaaaaa

SEQ ID NO: 4432 - DNA, 363 bp, Homo Sapiens
tttttttttttagttagaaattacaagtttatttttatattttgaaaaaggcataatagaaaacaaaaataaacaaccaggcatatcaatatttgtgacatacacatacacacaaaaatgaatataggaaataacacgaagaaaaagcatagtatgttttgaaaccaacgtggggtatgaacagatttttgatgaaatacaactaaaggttttaagtgtctatgtaatgttcgagatattacgatcactcttatcctactagcaaaaattagcaaactaggctttaaaacatgattcctgttgttttagcaggatttattttggtaatgatcctgcttccttataaacaactacttatcattg

SEQ ID NO: 4433 - DNA, 668 bp, Homo Sapiens
ttgaatttaggtgacactatagaagagctatgacgtcgcatgcacgcgtacgtaagcttggatcctctagagcggccgcctactactactaaattcgcggccgcgtcgaccgtaaaccttgatggctcatcttgctacaattacgagttgaaaaacactacttacgtatttgtatgacctattagtcagaggaaatcatacatatgctttgtaaatagactttgcagataactaaatagactgaagaaatatgttgcatttgatagaagcaattgcataaatatttggtttctatattagagtctgtgagtaaagtcaagtaataaacctaagtaggtataacagatttttaaaccttgaaacttgctttgatggtagagaaaatcattgaagatttacatactgtatataagatgtaaaatgtacgctgcttattaccctcaattttccagaagcaatggtatataatgcagttgaaaaaccaaaaatcttggaaaactaagacgggtcttgtttaaaatgtctctcagctttggcaaccttcaaatcttaatcaactatttaaagcattactgtgtcttgtagcctgcattccacaacagctctgttattcaggtaaaagacttgaactgagccgtttgggacctatacttgtatattttcattgg

SEQ ID NO: 4434 - DNA, 649 bp, Homo Sapiens
ttttttctgtgcagtcaaatgcatttattttgtagcttaagcaagacaggtggtgaacaaattcataatgaaaatgccacccagaggttaacagcttgccatgcatgcaactgtgtgcgcaaaatcaagttgttttaataccagtgtgcagctttgattcctccatgaaattaaagctgtgttgctcacttgtttacataactcaggccaccctgaatatctgctagtggggaatttacaacccactgaccatctcagctcaaagccagatgactatcacctacacatctgccaaggtaatagcatggcaaatagtatttttcttgttctgtagccaatggcacagatacaccaacacagagatacccagaaggcacctcctctcattcagctgacaacttcctaacatttcttgggggcagagtaccatatgtgtggcggaaaaaaaagtctcatcttaagaaatatacggctgtctccaggttagagcatgggtggttggaattctcagaagagctgtttcagcacaccaccagaacattggccacatgactgtgtaagagagtctctgacatctgggtagcacagatccctgactaagctggctcattagggtagtgaaggtcaagattagaggctcagagtcgag

SEQ ID NO: 4435 - DNA, 5505 bp, Homo Sapiens
gaattcgtaaggttgaggagagttgatgatgccaagtactgtggtggtcctgaacaattaaagagggattctgggaagcagagtgtggacagttccaactccctgccaaggggaagctcataggcaaaggaagctcactccagaggggatatggaagttccataccctcttttgtctgaagagccgaagtccctgttctcaggtcgttaggaagttaaaaagtaatttggaggttatcagaactgattgaattgagtttgaacctcacctatagcaacaatgggccaggctgcttgactaatgccttggcgtcaatggtacagttttctccctcttgagctgctggcagggacctgggctgacatgtctcagaaggcccttagtcaatgattagcttatctcaaggccccaagccagggcagctgtcaaagagggtccccactgcgttctgcacctagatcctcattgtgaaatgaagtatgaagtgattgagtgaggtctctattgtctctgacattttacaattccaggattctgccttcttgtcagagaagtgtataggcaagcagttgggcaggtgagagggctccgggtgagaggctcagagactgagggctcagcctctgcttgaagagtcatcatctgggaggctctgtggcctcctcagatgagttcattcacactcataccccaaaatggagtcaacaccccctccaccatctcagccttctcagcatctaaagccccagcatcgatgcctctttttttgggttaggggtcagagctgttgtggaagggcatacagtcattcttcacttgcctttgactgtgtactctgtgcacatggaggtaggagcagacatgacttcaacaaggtcatgcccccttggcaagcatctttgagaccagagaggaagacagactagggaaagaatgaggagataagcacgggctgctgtgaggtccaggggagcaggcaaaggtaagagaaaaggctttaggatactaactaacatatatggagcactagcatgagccaggcactattctaagtgcttttcaggtgttatctctttttgcctcacggacagcacctacaaggcactgtaattatccctacttcacagatgagggagtggagccacagtgaggttaacttacttgaccaagggggccaagtaggaatggaggcatttgttgagtcttctaaagatgaggaaagagtggaagtgagattttgtaagtgcttgattcatttctaccaactgaactggcaaataaataaaagcatgagtaaatgggggtataaatagtctgtcagctatgggggtgggagtgggctcaaggcaggcttagagagaaggtgcaagagctgtctgaaaaggtcagagcaaagcatgaagctggtgagcagctgtgaccatagctggaagcttctctctgagctttctcctggttacctcctcctcccctacgtgaccagtcagccaagtgttaagtccaggggaacattttgctgcttccaagtactgtctcactagtgttatttgccataacttgcggccacagggcaaggtccaggtgctcagacctttacatcctggactttccaaggcctcccaaagctctctggcacccagggaacagtgtgcgtgtcgagagcttaatccgcaggagcatagccatggttctctggggtccagtgctgggagctctgctggtggtcattgctggatacctgtgcctgccagggatgctccgacaacgcaggccatgggagccccctctggacaagggtaccgtgccctggcttggccatgccatggctttccggaagaatatgtttgaatttctgaagcgcatgaggaccaagcatggggatgtgttcacagtgcagctagggggccagtacttcaccttcgtcatggaccccctctcctttggccccatcctcaaggacacacagagaaaactagactttgggcaatatgcaaaaaaactggtgctgaaggtatttggataccgttcagtgcaaggggaccatgagatgatacactcagccagcaccaagcatctgaggggggatggcttgaaggatcttaatgagaccatgctggacagcctgtcctttgtaatgctgacgtccaaaggctggagtctggatgccagttgctggcatgaggacagcctctttcgcttctgctattacatcttgttcacagctggctacctgagcttgttcggctacacgaaggacaaggagcaggacctgctacaggcaggagagttattcatggagttccgcaagtttgaccttcttttcccaaggtttgtctactccctgctgtggccccgggagtggctagaagtgggccgactccagcgtctctttcacaagatgctctccgtgagccacagccaggagaaggagggcatcagcaactggctgggcaacatgcttcagtttctgagggagcagggggtaccctcagctatgcaggacaagttcaacttcatgatgctctgggcctcccaggggaacacggggcctacctctttctgggccctcttgtacctcctgaagcacccagaagctattcgggctgtgagggaggaagctacccaggtcctgggtgaggccaggctggagaccaagcagtcctttgccttcaaactcggtgccctgcaacacaccccagttctagacagcgtggtggaggagacgctgcggctgagggctgcacccaccctcctcaggttggttcatgaagactataccctgaagatgtccagtgggcaggagtatctgttccgccatggagacatcctggccctctttccctacctctcagtgcacatggaccctgacatccaccctgagcccaccgtcttcaagtacgatcgcttcctcaaccctaatggcagccggaaagtggacttcttcaagacaggcaagaagatccaccactacaccatgccctggggttcgggcgtttccatctgccctgggaggttctttgcactcagtgaggtgaagctctttatcctgcttatggtcacacactttgacttagagttggtggaccctgacacaccactaccccatgttgacccgcagcgctggggttttggcaccatgcagcccagccacgatgtgcgcttccgctaccgcctgcatcctacagagtgagcttggccaagccagctgcaaacctggccagaggagttctattgcatctctcacctgttctcacccctctgcagccccaagaccccactggccacccctccctctggtcctgtggcaccccctacctctgttctgcctgtcctcgctctctccccgcctagtcatctgacaggcttatcattctctttaaaataccatctctcagagtgggttctgccgaaccctcctctcacaggaagtccagaggaagggggagtatctgtgggcaacttggtttgggagatgatgcctgccttgagaagtcctgagtacagagactggttccccccagacacgagtaacatggcatcttgcaaacatcagcctccactctcccagcttgctttagttttttcagcaacacttatcccacatcctatggaattcaggttctagaacagtgtcatccaacataaatatgaagcaagctacatgagtagtggggttttttggttttgtttgtttgttttgagacagagtcttgctctgtcgccgaggctgcagtgcagcggtgcgatctctgctcactgcaacctctgcctcctgggtttaagcaattctcctgcctcagcctccccagtagctgggattacaggcacctaccaccttgcccagctaatttagtttcctggtaaacacatttttaaaaagtaaaatgaaacaattcatttttataatatactttacttaatccaatatatccaaaatattggcatttcaacgtgatcactattaaaaattttaacgtaatagtttttaccttccctttttcatcctgtcttcaaagtctggtatgtactgtacttttgcagttcttcccagttcagactagccacattccaagtgcttaattgccgtgtgtggcaggtggctgccctattggatacaacaggtctagagaaatgataccttttttttttttttgagacagagtctcactctgttgcccaggctgcagtgcagtggtgtgatcttggctcactacaacctctgcctcccgggttcaagtaattctcctgcctcaggcttctgagtagctgggattataggtgcgcaccaccacacccggctagtttctgtatttttagtagagacggcgtttcaccattttggccggcctcctcggcctcccaaagttctgggattacaggcatgagccactgtgcccagtcaggatgtctttaatgtaggaatcattcaagatccctcctcagtgcccatgtctcccccacctcagggtgctgtcaaccctcccttggtttccatgatcattgctgaactcagagctttcttctatccccagacccacatgggagtctcccagcacctctgactcagcttggccaatgcagaacttggcatctgaacccctgcctcttccctgaaccactcctcctcctgatttccctgctctctctgctcagaacactaccattcaccccatctcccagagacactctccctcctcctctttcaccttcatacaagcaggcccccgtcctatcagtacacccccctgtgatgcctctgaaatatgtaccctcctcccctctcctactgtcattcttatacctgtgatctctgcgtttctcttctacactgctgccagaggcctttttgccaaaagcactgctgattgtcactcttttactttcctggttcccctttgacttcacacacttgacgtttacattttgtcacagttggtcccccttgccttcacatacctgatgtttaaattttgtcacggttggtctccaaacttctcaactttgccagctttctccaatgaaaccatcagtagagacattgctgttcctgcccatcccagtgccagctactccttcctggaagccttcctggatttcacgcatcccatcctctggccagaaatggcctccgaactgtgcagctcctgcggcaccatttgtatcatagcatatctgttatgtgtcgttgctttctgtgtcttggtttctgcctgctgcccacttccctagactggagcctactggggcatggtattttattcatttctgacctccaattccctaagtggagattaaatgttagaaacctgacttccagtctcggctaatttactttcagtcctcaaatcatttcctggcctcagccctccaatctatgaaatgaggacaatcccccttcccagcgtgcttatcagtgctacaagagggtgagggggtggctgccatagctgcagctggctgatggcagggctccagctggagctgggacaggaggaagaatgactg

SEQ ID NO: 4436 - DNA, 318 bp, Homo Sapiens
  misc_feature (89)..(89): n is a, c, g, or t
  misc_feature (240)..(240): n is a, c, g, or t
atcatagatttgctgagaagaaggtatctttaatggtagtacctggcgggtgggcagggcagggtggcgggaagcggcggccgggcagngctcggacgtgggctaggcgccaggtgcaggtggcggcggctgcgactccggttgctgtcgccacagttgcggctcagtagagctcctcctccgccgccgcctcctgccttcccgctgggcctcccgcgttgcctggagaggagaaccganggctcggcttccacttggagtctcccaggtgagctccagcctgcgacgtcggcaggggcgaggccaactttccgcgcc

SEQ ID NO: 4437 - DNA, 1130 bp, Homo Sapiens
ggtcgccgcaccggccgcctccggcccgccgccgcccccagcgccgccgccgccaccgccggggcgcccaccgcgctgccagcctaccccgcggccgagccgcccgggccgctgtggctgcagggcgagccgctgcatttctgctgcctagacttcagcctggaggagctgcagggcgagccgggctggcggctgaaccgtaagcccattgagtccacgctggtggcctgcttcatgaccctggtcatcgtggtgtggagcgtggccgccctcatctggccggtgcccatcatcgccggcttcctgcccaacggcatggaacagcgccggaccaccgccagcaccaccgcagccacccccgccgcagtgcccgcagggaccaccgcagccgccgccgccgccgccgctgccgccgccgccgcggccgtcacttcgggggtggcgaccaagtgacccgctccgctcctccctgtgtccgtcctgtgtccgcgcgcgcgggtgcctttcccgccggggactcggccggtgtgcttcgtgctgtagttatcgttagttcctcttcccgagatggggccgccgagagaccccagcgcctttgaaaagcaaggtttgtgctgcgcttccagttccgaaaagcagatgtttaagcccttggactgagggtgggatcgcagctccgaagacggagaggagggaaatggggccctttcccctctattgcatccccctgcccgactccttccccgcacccacgtgccctagattcatggcagaaaatgaccaaatcctgtgtatttgttttatatatttaataactgttttaaatgaaagttttagtaaaaaaaatacaaaacaaaaagattaaattgctattgctgtagtaagagaagctctttgtatctgaacatagttgtatttgaaatttgtggttttttaatttatttaaaattggggggagggcatgggaaggatttaacaccgatatattgttaccgctgaaaatgaactttatgaaccttttccaagttgatctatccagtgacgtggcctggtgggcgtttcttcttgtacttatgtggttttttggcttttaatacagacattttcctccaaaaaaaaaaaaaaaaagg

SEQ ID NO: 4438 - DNA, 803 bp, Homo Sapiens
gcccatagtttattataaaggtgactgcaccctgcagccaccagcactgcctggctccacgtgcctcctggtctcagtatggcgctgtcctgggttcttacagtcctgagcctcctacctctgctggaagcccagatcccattgtgtgccaacctagtaccggtgcccatcaccaacgccaccctggaccagatcactggcaagtggttttatatcgcatcggcctttcgaaacgaggagtacaataagtcggttcaggagatccaagcaaccttcttttacttcacccccaacaagacagaggacacgatctttctcagagagtaccagacccgacaggaccagtgcatctataacaccacctacctgaatgtccagcgggaaaatgggaccatctccagatacgtgggaggccaagagcatttcgctcacttgctgatcctcagggacaccaagacctacatgcttgcttttgacgtgaacgatgagaagaactgggggctgtctgtctatgctgacaagccagagacgaccaaggagcaactgggagagttctacgaagctctcgactgcttgcgcattcccaagtcagatgtcgtgtacaccgattggaaaaaggataagtgtgagccactggagaagcagcacgagaaggagaggaaacaggaggagggggaatcctagcaggacacagccttggatcaggacagagacttggggccatcctgcccctccaacccgacatgtgtacctcagctttttccctcacttgcatcaataaagcttctgtgtttggaacagct

SEQ ID NO: 4439 - DNA, 447 bp, Homo Sapiens
gaccccggattcagataagcacggtggctttttaaaagggtatttatgacttttatttttgggtaaggcattatggccaggtgcatgcaggtatgtctgggttacgtgtgaaacgtacatctggtgaactgtatacttggctcaaacttctcaaaacatagaggtgctcgtaaggattgtcacttggagccttttgtagacacaaggctgaaagtgagcatcatttcagaaatgctttagtatgcacacttttagctgagattttgatatatagaataataatatacacagtggagaatattcaaagagtggctgaagggagaatacagagcccggagggccaaaatgaaacttctaggatgtcttctgaattttcagcacatggtgggaataagtgaacaaatttcccaacatcgtgcaatgctttatagcacaatgatctagatt

SEQ ID NO: 4440 - DNA, 423 bp, Homo Sapiens
agcggccgccctttttttttttttttttttttttttttttttgttttaaagttttatttgcttacaaaagaaaatggaaataggtttgcgaaaacttatctgcatgtacaaagtaatccccgtagataaggagaggcaacccctggaacaaactgctggataaatcgttcattaaaattatatctctttgcatcagagctggtggaaaatcattatttcacatgagttaaaaccactgaaaaactaaatctgtttcttaaacttccaaatttcgaaagctttaattccaatgcgtttttttgggttccccttgaaaccagttcccaagtgatctcagagttggacagatcaattaaacaagaggtagtttctccaatattggccctttttttcttatcagcaaggttattcctatagcaagta

SEQ ID NO: 4441 - DNA, 375 bp, Homo Sapiens
gcacgaggaaaaaagaaaaattgaagaacataacttttctacttatgaaatagataattttttaaaattgtttaaactcctggaaattaagtgttattttttattactgcagttgagagataccttttcagaggaaaacaagaggctaaattccatgttaagagctaagtagtatttttttcttaacaattttgccaaaatttcttctactggaccaaaaggaaataaatctacaataaatctactttctaaatattatttaagatgggaaatgtcttttataggtatattctgtataatacccttaattagatgaattatcccttatcattccaaaaatgaaatgctgtgttaaatatctccagggcaaagtgg

SEQ ID NO: 4442 - DNA, 548 bp, Homo Sapiens
gtacctcattgcaatgttacttaaattagccttctgcctcgcactctgtgctaaactggaacagtttactaccatgaatctatcctatgtcttcattcctttatgggccttgctggctggggctttaacagaactcggatataatgtcttttttgtgagagactgacttctaagtacatcatctcctttctattgctgttcaacaagttaccattaaagtgttctgaatctgtcaagcttcaagaataccagagaactgagggaaaataccaaatgtagttttatactacttccataaaacaggattggtgaatcacggacttctagtcaacctacagcttaattattcagcatttgagttattgagatccttattatctctatgtaaataaagtttgttttggacctcaaaaaaaaaaaaaaaaaaaaaaaaaaaaaaactcgagggggggcccggtacccaattcgccctatagtgagtcgtattacaattcactggccgtcgttttacaacgtcgtgactgggaaaaccctggcgttacccaact

SEQ ID NO: 4443 - DNA, 498 bp, Homo Sapiens
  misc_feature (365)..(365): n is a, c, g, or t
tttttcagcttctcctacagtatcacttttacttgtttattttttaattgctgatacagatgcatccataataaatatttggtttttgtgatgctgaaacacagtcccaattacaaggcaacttagaagttaaaactgaaactgaaatataaacagcttaacaccagaaggaagcaaaactatatatgtctttttgcaacagcagttccgaaattgtttttatacactgtaacaacaaaggtaccaacttccttatttcacaaatttaagtttggtttatatattttattgacatggttactcaatgtccacatcattccatctgcatcgtcttcctacaaacagtttttcttctactattcggntatttctcctttttttgtttcctatttcagaatcaaatttattttacttgcaaagtcagtggaatatggtttggaaccagtagggcctctaacttaagcccagaacctgtcaaagagaagtgcagtatcattg

SEQ ID NO: 4444 - DNA, 313 bp, Homo Sapiens
  misc_feature (91)..(91): n is a, c, g, or t
  misc_feature (189)..(189): n is a, c, g, or t
  misc_feature (295)..(295): n is a, c, g, or t
gcggagggaggccgaggcgagagctggcgctgtaggactagaacgaaaggagtgaggcgccgagagcccagataccattttggcgtgaganctggtggttggcaaggccgcgggagtgggaagcgtccgccatgttctgcgaaaaagccatggaactgatccgcgagctgcatcgcgcgcccgaagaancttgcctgccttcaacgaggatggactcagacaagttctggaggagatgaaagctttgtatgaacaaaaccagtctgatgtgaatgaagcaaagtcaagtggacgnagggatttgataccaact

SEQ ID NO: 4445 - DNA, 460 bp, Homo Sapiens
ctatttataatgtgcctgggaggactctggccttgcttggtgtaccaaacagccccatttggagcagggactggtgggagggagtagtgaacctcttcttaaccatgtaaatgtaggattatacagaatcctacagaacaggattaaccatgctgcatactagggcacaaatacgaacaaagtactatcctgtcttccaggaggtttccgtctggcggtaaaccaacatgtaaagaataattacaaagcaatgttgtaagtgctatagcagaagtcctggaacagaggcgggagtagctatcagctacaaaacaaaccattgaagaaagcagccttatttggaatatcagtcaataacagtggatttgtcaattttacctttaaaatgtaacatctaagtgaagattttaaaagttaaaaaaaaaagcatatactcttcccccaaaccctactcctcaaa

SEQ ID NO: 4446 - DNA, 5577 bp, Homo Sapiens
cagaagggtcttgtttcccaaaaaaacctggttgcctgcccagatctgaggaggcagtagtaacagcctccaggaaccatgagcaaactgtgctgggtcccctgtcagggaacctcatgctcccagcacagccgccccatgaggggagtgtggagcaggtgggaggagagagatgccgagggccacagtcatcaggcccagtcgaggccaagcaggaggacagcccgttccagtgccccaaggaggagcggccagggggagtgccgtgtatggatcagggtggctgtcctctagctggcctgagccaggaggtacccacgatgccttctcttcctggaactgggctgacagctagcccaaaggcggggccgtgtagcaccccgacttctcagcacgggagcacagccaccttcctgccctctgaggatcaggtcctgatgagttctgccccaacactgcacctggggctggggacccccactcagagtcacccaccagaaaccatggccaccagcagtgagggggcctgcgcccaggtaccagatgtggaggggcggaccccaggtccccggagctgtgaccctggcctcatagattccctgaagaactacctgcttctgctgctgaagctgtccagcacagagacaagtggagcagggggagagtcccaggtgggggcagccaccggaggtctggtgccctcagccactctgacacccactgtggaagtggctgggcttagtccccggacatcgaggcgcatcctggagcgtgtggagaacaaccacctggtgcagagtgcacagaccctgctgctgagcccctgtacctcccgccgcctcaccggcctcctggaccgtgaggtgcaggctggccgccaggcccttgctgctgcccgaggctcctggggtcctggtcccagctccctcactgtccctgccattgtggtagacgaggaggaccctgggctggcctcagaaggagccagtgagggtgaaggagaggtttcccttgaggggcctggcctcctgggggcctctcaggagagcagcatggctggtcgactgggggaggcgggtgggcaggcagcccctggacaggggccctcagcagagagcatagcccaggagccctcccaagaggagaagttcccaggggaggctctgacaggcctcccggcagctacacctgaggaactggctctaggggcccggaggaagagatttctccctaaggtcagagcagcaggagacggggaggcaaccacacctgaagaaagggagagccccacggtttccccccgggggcccaggaaaagcctggtgcctgggtccccagggactccagggcgggagagacgctcccctacgcagggcagaaaggcgagcatgctggaggtgcctcgggcagaggaggagctggcggcaggagacctgggccccagccccaaggccggcggtctggacacagaggtggccctggatgaaggcaagcaggagacactggccaagcccaggaaagccaaagacctgctgaaagccccacaggtgatccggaagattcgggtggagcagtttcctgatgcctccggtagcctgaagctgtggtgccagtttttcaacattcttagtgactcagtcttgacatgggccaaggatcagcgcccagtgggcgaggtgggcaggagcgcaggggatgaggggccggcggccttggccatcgtgcaggcctcccccgtagactgcggtgtgtatcggtgcaccatccacaatgagcacggctcggcctccaccgacttctgcctcagccctgaggtgttgtcaggattcatctccagagaagaaggtgaagttggagaagagattgagatgacccctatggtgtttgctaagggtctggctgactctggctgctggggggacaagctctttgggcgactggtaagcgaggagctccgagggggtggatatgggtgtggccttcggaaggcctcccaggccaaggtcatctacgggctggaacccatcttcgagtcgggccgcacgtgcatcatcaaggtgtccagcctgcttgtgtttgggcccagcagtgagacttctcttgtgggcagaaactacgacgtcaccatccaggggtgcaagatccagaacatgagtcgggagtactgcaaaatcttcgcagcagaagcccgggccgcgcctggctttggggaggtgcctgagatcatcccactgtatctgatctaccggcctgcaaacaatatcccatatgctaccctggaggaagacctgggcaagcccctggagtcttactgttctcgggaatggggctgtgctgaggctccgacagcatctggcagctctgaggccatgcagaaatgccagaccttccaacactggctgtatcagtggacaaatggcagcttccttgtcacagacttggcaggggttgactggaagatgactgatgtgcagattgctaccaaactccgaggataccagggcctcaaggaaagctgcttccctgccctgctggaccggttcgcctcctcccaccagtgcaatgcctactgtgagctgctggggctgacacctctcaagggcccggaggcggcccacccccaagccaaagccaaaggctctaagagtccatctgctggcaggaaaggctcccagctgagtcctcagccccagaagaaaggcctccctagtcctcagggcacccggaagagtgctccaagttccaaggccacccctcaggcctcagagccagtcaccactcagttgttgggacagcctcccacccaagaggagggctccaaggcccagggcatgcggtagcctctgcagaggctgggggcctccacccagcagcagaccaaccaggaagcagcttgaactggatggagactttccaaatatggaactaactggagaaggtgcacgaaggagacaccacttggggacctctctgagcaggctctcgtgaatcagctcgtcatcagatggctttggtgcatggcacatagcccactggcctcttctggtgccactgtcacccagggctcccgggcctcaagcagtccccacctccgagtgcctggcaacctaggccctccttgaagtttacactttgccactgctggaggctcccctgagtcctctgcatgagttctgcaccccaagcccttgccccagcccagtccagcagcagatgttacaatctgagtgaggacatgcaggccaacttttaccctcctgcatttgcctggccctgatctcgcctgtcctcagggatccagacttcctctgctggtctggcctggtgactctcagggtatcttctccttccagctactttcgctcactgatctcagcttatcctgcaactaaccatccttgagcccagatggggctcagggcccttccagagcctgtcatgtccttgtgcagtggcctttgatgtgtgttcacgctcttcccccttcactcactcgcctgcttcccatgctcccttgtaccccctcgccacatccctgtcttggggcccagctgcagcctgctgcctgcccttcatggctctgcacatggccctttgcttgagggctccccactccctgcccaccaatacccaggtgaggaacagaccctctggcctctcaccccacttcagtgctctcttccccaacttctctcgggctctttgctcatgaggtgagagctggtgtgagggttgtgtcagcagctgtagccagagagaggtgttgactctgagagaccttgcactccatactgaaaggaggtggggtcacagtgaatttcacatcccctctcaaccaggagtggagggctaggtcccttccccatggggagtacacttgggtgttctaggagggatgcagtctatccatgcacttgggtggaggggagtctctgtgcctgggaattaggacccctgctccaaccatcgctcttgatcctggggccccagctctgggtcctcatgtatgggctcccaaggacccagcagcctggatccttccagagcatccctcctggaggcctgggatggggtaggtctgcagctagcctactccctttggaatgcaataaaggcagcattgtgtgccctgcttgccctcatctggtgtggttggaggtctgtggagtcaaggtccccctctcccaggcaggctctctgagggcattctgtagtcccaggcccactggaaaaatgaatctatattttggttcctggaccgaagttcagtcgcagccttctgtggccacagaaagacagcttgtgctgcttgcacaactgagctgctggtgtgtaccccttagcagggtgtctggggacttacgcctttggaattgctcttcattcagaagaggaacacaaaggaagccacccaggaaggaagcacagagctgggggctctggaaacgccctgtgtctctggctacagcaagaccagcccaggagcccaccagcacctgcctctcagctacttgctgaccatttcctgcttctcaagctgcagagaagcttttcattcccacccccacccggaacctccccttgcctaacatttcccctctatggtaacatctctgacttctctacctcctctgtgctcaggtgactccacatcttctgccccagtgtgtccccacctctcccagcctgtatacccagattactttggtgaactgagagctggagtactgttcattcatttattcattcacccactcattcagcagaccttggcattttcacatgatttatctcccactctgattcacatatgtttgaccaaggcactgggcagctgccaatttcccgtcccttctgtagtcccagatgaatggatacagacctctttggggaaggctgcaaggaaggttcacaacatgcatctaagtgttaaaataagtttttccttcaaaaatacatttgacttcctctccatttaaggtctggaaatcaagtgggagatcttgactttaccttggcacttgagacagaactgttggcccagaagtctttagttaaggtcattactaggccatatcttaggggcgtctggcctttttcattcctgggacccacagctcgaggtctggtttccatgccctatcccttacgatgagcgccctattttgttccttctgtctatctctgttgctgagatcagggagcccacgttcacagcagctctttcaagcagcctcccaggcctagagaggaaaatcagcagagcctcgtgaatgtatttctcgtggcaagaagggagctcatcttctgggtcctgccagagggcagtgagggggttgatgggctgggtgcatgccagggacccaatcaagcatttttatcttctgaaatctttgaattcctgcctttcttggatgtttggtcttttgatataatttagcatgggccaacatttggtccagatttgtattagccaagccctcctaaaatagtaataacagtatctggcgatttgagcttttacgtagaatgtagaatctctggtgagtgaacatatcaataaagacaacctgaacc

SEQ ID NO: 4447 - DNA, 264 bp, Homo Sapiens
tttttttttttttttttgagaaaacacagctctagtttactgaggggacctgagtgcattgccttctctcgtcaccactcccacggccactgcgggattctcactcctaaagcacattgcgtggccagagggattccaacgccatcacactcctttgcagtgcgtcccccgggtgggaaggggtgtcccagtgcccagctcggtcttgcttccctgggacccggacactgttggccttgtcctgggctgtttcccctcgtgccg

SEQ ID NO: 4448 - DNA, 365 bp, Homo Sapiens
ttttttttttttttttttttttttttttctctccaataatatttttattaaattccatgggggccttctctcaaaattagtaatgaaatgctgaaatgtccattgattagtgagggcaatgtatgtaagccaaaaaaatgcaataaataagggttatgtttttttttgtcaaacccaaaagggagatctttgaacaacagtgcttcaaattgagaattcagtcccaggaagggtttttctgccccacaaactgggggggacaaacactgggtgtaacactttatcttcatccccaagccccaaaaaattagaggcagagtctttctgacttgggtaccagtttaagtccttattaagcagcaaaa

SEQ ID NO: 4449 - DNA, 608 bp, Homo Sapiens
  misc_feature (43)..(43): n is a, c, g, or t
aatcttttttttttttttttttttttttttttccacaacatcnccctttttattgatattaatcacagttatgaggtcttgtccatcaaaaagcacaatttgcattatgtagaactacatacaaagacataaaaataaaacatacatacaccaaccaccacaccagttaatctcaaccaatcaaacctctgaatgtgtcttcaattttgatcatcagtgcttcggaagaacgtacatagacccagcccaaggttggcctttggggtctgatagcattcacagagcaggagattcacccttggaagcaattgaatgtgtaaactctgagagcagacactgacaatgcaatgcctgcatacctgactcctgggctgccttccttctcagcagagcccactgaaagtctcacgtgtgcctttaaccaatgaggatggcaggccttatctgtgtttgaagtggacaggtcattgctacccctgttggagaagctatgtaagaaggagtaggctggcttctggtctagttcgactcattctttatagggacatttcagaatgatgagttggctaaaatttactttaaaggggaaatgtaaaattacctcttct

SEQ ID NO: 4450 - DNA, 3332 bp, Homo Sapiens
gcgccgagccggtttccccgccggtgtccgagaggcgcccccggcccggcccggcccggcccgcgccctccgcccccgcctccccgggccggcggcggtgggcgagctcgcgggcccggccgcccccagccccagccccgccgggccccgccccccgtcgagtgcatgaggttgacgctactttgttgcacctggagggaagaacgtatgggagaggaaggaagcgagttgcccgtgtgtgcaagctgcggccagaggatctatgatggccagtacctccaggccctgaacgcggactggcacgcagactgcttcaggtgttgtgactgcagtgcctccctgtcgcaccagtactatgagaaggatgggcagctcttctgcaagaaggactactgggcccgctatggcgagtcctgccatgggtgctctgagcaaatcaccaagggactggttatggtggctggggagctgaagtaccaccccgagtgtttcatctgcctcacgtgtgggacctttatcggtgacggggacacctacacgctggtggagcactccaagctgtactgcgggcactgctactaccagactgtggtgacccccgtcatcgagcagatcctgcctgactcccctggctcccacctgccccacaccgtcaccctggtgtccatcccagcctcatctcatggcaagcgtggactttcagtctccattgaccccccgcacggcccaccgggctgtggcaccgagcactcacacaccgtccgcgtccagggagtggatccgggctgcatgagcccagatgtgaagaattccatccacgtcggagaccggatcttggaaatcaatggcacgcccatccgaaatgtgcccctggacgagattgacctgctgattcaggaaaccagccgcctgctccagctgaccctcgagcatgaccctcacgatacactgggccacgggctggggcctgagaccagccccctgagctctccggcttatactcccagcggggaggcgggcagctctgcccggcagaaacctgtcttgaggagctgcagcatcgacaggtctccgggcgctggctcactgggctccccggcctcccagcgcaaggacctgggtcgctctgagtccctccgcgtagtctgccggccacaccgcatcttccggccgtcggacctcatccacggggaggtgctgggcaagggctgcttcggccaggctatcaaggtgacacaccgtgagacaggtgaggtgatggtgatgaaggagctgatccggttcgacgaggagacccagaggacgttcctcaaggaggtgaaggtcatgcgatgcctggaacaccccaacgtgctcaagttcatcggggtgctctacaaggacaagaggctcaacttcatcactgagtacatcaagggcggcacgctccggggcatcatcaagagcatggacagccagtacccatggagccagagagtgagctttgccaaggacatcgcatcagggatggcctacctccactccatgaacatcatccaccgagacctcaactcccacaactgcctggtccgcgagaacaagaatgtggtggtggctgacttcgggctggcgcgtctcatggtggacgagaagactcagcctgagggcctgcggagcctcaagaagccagaccgcaagaagcgctacaccgtggtgggcaacccctactggatggcacctgagatgatcaacggccgcagctatgatgagaaggtggatgtgttctcctttgggatcgtcctgtgcgagatcatcgggcgggtgaacgcagaccctgactacctgccccgcaccatggactttggcctcaacgtgcgaggattcctggaccgctactgccccccaaactgccccccgagcttcttccccatcaccgtgcgctgttgcgatctggaccccgagaagaggccatcctttgtgaagctggaacactggctggagaccctccgcatgcacctggccggccacctgccactgggcccacagctggagcagctggacagaggtttctgggagacctaccggcgcggcgagagcggactgcctgcccaccctgaggtccccgactgagccagggccactcagctgcccctgtccccacctctggagaatccacccccaccagattcctccgcgggaggtggccctcagctgggacagtggggacccaggcttctcctcagagccaggccctgacttgccttctcccaccccgtggaccgcttcccctgccttctctctgccgtggcccagagccggcccagctgcacacacacaccatgctctcgccctgctgtaacctctgtcttggcagggctgtcccctcttgcttctccttgcatgagctggagggcctgtgtgagttacgcccctttccacacgccgctgccccagcaaccctgttcacgctccacctgtctggtccatagctccctggaggctgggccaggaggcagcctccgaaccatgccccatataacgcttgggtgcgtgggagggcgcacatcagggcagaggccaagttccaggtgtctgtgttcccaggaaccaaatggggagtctggggcccgttttccccccagggggtgtctaggtagcaacaggtatcgaggactctccaaacccccaaagcagagagagggctgatcccatggggcggaggtccccagtggctgagcaaacagccccttctctcgctttgggtcttttttttgtttctttcttaaagccactttagtgagaagcaggtaccaagcctcagggtgaagggggtcccttgagggagcgtggagctgcggtgccctggccggcgatggggaggagccggctccggcagtgagaggataggcacagtggaccgggcaggtgtccaccagcagctcagcccctgcagtcatctcagagccccttcccgggcctctcccccaaggctccctgcccctcctcatgcccctctgtcctctgcgttttttctgtgtaatctattttttaagaagagtttgtattattttttcatacggctgcagcagcagctgccaggggcttgggattttatttttgtggcgggcgggggtgggagggccattttgtcactttgcctcagttgagcatctaggaagtattaaaactgtgaagctttctcagtgcactttgaacctggaaaacaatcccaacaggcccgtgggaccatgacttagggaggtgggacccacccacccccatccaggaaccgtgacgtccaaggaaccaaacccagacgcagaacaataaaataaattccgtactccccaccc

SEQ ID NO: 4451 - DNA, 271 bp, Homo Sapiens
ttttttttttttttttttttttttttttttttttttttttttaaagatcataatgctatcatttattgaagaaagaaagcaaaaaaaactaacaattgtgatgggggaggagagacagcttggcaacattccttttaaagttaagttagcataaagaaaacaatatttagtaaatgaaatagattttcaaggtaggaaaagtagtactcaagaatgtatttttggatacaaaaattcagttacacaatcagtagcattcaaaattagttat

SEQ ID NO: 4452 - DNA, 3725 bp, Homo Sapiens
accgttaaatttgaaacttggcgggtaggggtgtgggcttgaggtggccggtttgttagggagtcgtgtgcgtgccttggtcgcttctgtagctccgagggcaggttgcggaagaaagcccaggcggtctgtggcccagaggaaaggcctgcagcaggacgaggacctgagccaggaatgcaggatggcggcggtgaagaaggaagggggtgctctgagtgaagccatgtccctggagggagatgaatgggaactgagtaaagaaaatgtacaacctttaaggcaagggcggatcatgtccacgcttcagggagcactggcacaagaatctgcctgtaacaatactcttcagcagcagaaacgggcatttgaatatgaaattcgattttacactggaaatgaccctctggatgtttgggataggtatatcagctggacagagcagaactatcctcaaggtgggaaggagagtaatatgtcaacgttattagaaagagctgtagaagcactacaaggagaaaaacgatattatagtgatcctcgatttctcaatctctggcttaaattagggcgtttatgcaatgagcctttggatatgtacagttacttgcacaaccaagggattggtgtttcacttgctcagttctatatctcatgggcagaagaatatgaagctagagaaaactttaggaaagcagatgcgatatttcaggaagggattcaacagaaggctgaaccactagaaagactacagtcccagcaccgacaattccaagctcgagtgtctcggcaaactctgttggcacttgagaaagaagaagaggaggaagtttttgagtcttctgtaccacaacgaagcacactagctgaactaaagagcaaagggaaaaagacagcaagagctccaatcatccgtgtaggaggtgctctcaaggctccaagccagaacagaggactccaaaatccatttcctcaacagatgcaaaataatagtagaattactgtttttgatgaaaatgctgatgaggcttctacagcagagttgtctaagcctacagtccagccatggatagcaccccccatgcccagggccaaagagaatgagctgcaagcaggcccttggaacacaggcaggtccttggaacacaggcctcgtggcaatacagcttcactgatagctgtacccgctgtgcttcccagtttcactccatatgtggaagagactgcacaacagccagttatgacaccatgtaaaattgaacctagtataaaccacatcctaagcaccagaaagcctggaaaggaagaaggagatcctctacaaagggttcagagccatcagcaagcatctgaggagaagaaagagaagatgatgtattgtaaggagaagatttatgcaggagtaggggaattctcctttgaagaaattcgggctgaagttttccggaagaaattaaaagagcaaagggaagccgagctattgaccagtgcagagaagagagcagaaatgcagaaacagattgaagagatggagaagaagctaaaagaaatccaaactactcagcaagaaagaacaggtgatcagcaagaagagacgatgcctacaaaggagacaactaaactgcaaattgcttccgagtctcagaaaataccaggaatgactctatccagttctgtttgtcaagtaaactgttgtgccagagaaacttcacttgcggagaacatttggcaggaacaacctcattctaaaggtcccagtgtacctttctccatttttgatgagtttcttctttcagaaaagaagaataaaagtcctcctgcagatcccccacgagttttagctcaacgaagaccccttgcagttctcaaaacctcagaaagcatcacctcaaatgaagatgtgtctccagatgtttgtgatgaatttacaggaattgaacccttgagcgaggatgccattatcacaggcttcagaaatgtaacaatttgtcctaacccagaagacacttgtgactttgccagagcagctcgttttgtatccactccttttcatgagataatgtccttgaaggatctcccttctgatcctgagagactgttaccggaagaagatctagatgtaaagacctctgaggaccagcagacagcttgtggcactatctacagtcagactctcagcatcaagaagctgagcccaattattgaagacagtcgtgaagccacacactcctctggcttctctggttcttctgcctcggttgcaagcacctcctccatcaaatgtcttcaaattcctgagaaactagaacttactaatgagacttcagaaaaccctactcagtcaccatggtgttcacagtatcgcagacagctactgaagtccctaccagagttaagtgcctctgcagagttgtgtatagaagacagaccaatgcctaagttggaaattgagaaggaaattgaattaggtaatgaggattactgcattaaacgagaatacctaatatgtgaagattacaagttattttgggtggcgccaagaaactttgcagaattaacagtaataaaggtatcttctcaacctgtcccatgggacttttatatcaacctcaagttaaaggaacgtttaaatgaagattttgatcatttttgcagctgttatcaatatcaagatggctgtattgtttggcaccaatatataaactgcttcacccttcaggatcttctccaacacagtgaatatattacccatgaaataacagtgttgattatttataaccttttgacaatagtggagatgctacacaaagcagaaatagtccatggtgacttgagtccaaggtgtctgattctcagaaacagaatccacgatccctatgattgtaacaagaacaatcaagctttgaagatagtggacttttcctacagtgttgaccttagggtgcagctggatgtttttaccctcagcggctttcggactgtacagatcctggaaggacaaaagatcctggctaactgttcttctccctaccaggtagacctgtttggtatagcagatttagcacatttactattgttcaaggaacacctacaggtcttctgggatgggtccttctggaaacttagccaaaatatttctgagctaaaagatggtgaattgtggaataaattctttgtgcggattctgaatgccaatgatgaggccacagtgtctgttcttggggagcttgcagcagaaatgaatggggtttttgacactacattccaaagtcacctgaacaaagccttatggaaggtagggaagttaactagtcctggggctttgctctttcagtgagctaggcaatcaagtctcacagattgctgcctcagagcaatggttgtattgtggaacactgaaactgtatgtgctgtaatttaatttaggacacatttagatgcactaccattgctgttctactttttggtacaggtatattttgacgtcactgatattttttatacagtgatatacttactcatggccttgtctaacttttgtgaagaactattttattctaaacagactcattacaaatggttaccttgttatttaacccatttgtctctacttttccctgtacttttcccatttgtaatttgtaaaatgttctcttatgatcaccatgtattttgtaaataataaaatagtatctgttaaaaaaaaaaaaaaaaaaaaaaaaaaa

SEQ ID NO: 4453 - DNA, 508 bp, Homo Sapiens
tttttttttttttttgaaatatgcagaattgggtttattggcatagatgcttatgatatattgttaattgaaaaagcaggtaacaaattaatatacagtattatgttaattatgtaaaaaaagtatacatattcatagaaaaagtttggaacaatctcagatatcatctgtaggctatttctgtttgaaaataaccaaatagatttttgggttgactcaacaaattatggttgagtcagtcttactttcctattttataaatgttttttacatcattgggtatttaatcattttaaaaatctactcaggcatcatttgtataatagtaataataatttaatcccccttatttctcatgtctcatgccttatccatcatccctcatatcctactcttagcccagattttccttgacagctttattttcttggagggcaggtatggggaaccaaatttgtttccttaccctagctctagccatttccacaaaagcttttatagataatgt

SEQ ID NO: 4454 - DNA, 4437 bp, Homo Sapiens
gcgcggcggccgtggttgcggcgcgggaagtttggatcctggttccgtccgctaggagtctgcgtgcgaggattatggctgctgttcctcaaaataatctacaggagcaactagaacgtcactcagccagaacacttaataataaattaagtctttcaaaaccaaaattttcaggtttcacttttaaaaagaaaacatcttcagataacaatgtatctgtaactaatgtgtcagtagcaaaaacacctgtattaagaaataaagatgttaatgttaccgaagacttttccttcagtgaacctctacccaacaccacaaatcagcaaagggtcaaggacttctttaaaaatgctccagcaggacaggaaacacagagaggtggatcaaaatcattattgccagatttcttgcagactccgaaggaagttgtatgcactacccaaaacacaccaactgtaaagaaatcccgggatactgctctcaagaaattagaatttagttcttcaccagattctttaagtaccatcaatgattgggatgatatggatgactttgatacttctgagacttcaaaatcatttgttacaccaccccaaagtcactttgtaagagtaagcactgctcagaaatcaaaaaagggtaagagaaacttttttaaagcacagctttatacaacaaacacagtaaagactgatttgcctccaccctcctctgaaagcgagcaaatagatttgactgaggaacagaaggatgactcagaatggttaagcagcgatgtgatttgcatcgatgatggccccattgctgaagtgcatataaatgaagatgctcaggaaagtgactctctgaaaactcatttggaagatgaaagagataatagcgaaaagaagaagaatttggaagaagctgaattacattcaactgagaaagttccatgtattgaatttgatgatgatgattatgatacggattttgttccaccttctccagaagaaattatttctgcttcttcttcctcttcaaaatgccttagtacgttaaaggaccttgacacatctgacagaaaagaggatgttcttagcacatcaaaagatcttttgtcaaaacctgagaaaatgagtatgcaggagctgaatccagaaaccagcacagactgtgacgctagacagataagtttacagcagcagcttattcatgtgatggagcacatctgtaaattaattgatactattcctgatgataaactgaaacttttggattgtgggaacgaactgcttcagcagcggaacataagaaggaaacttctaacggaagtagattttaataaaagtgatgccagtcttcttggctcattgtggagatacaggcctgattcacttgatggccctatggagggtgattcctgccctacagggaattctatgaaggagttaaatttttcacaccttccctcaaattctgtttctcctggggactgtttactgactaccaccctaggaaagacaggattctctgccaccaggaagaatctttttgaaaggcctttattcaatacccatttacagaagtcctttgtaagtagcaactgggctgaaacaccaagactaggaaaaaaaaatgaaagctcttatttcccaggaaatgttctcacaagcactgctgtgaaagatcagaataaacatactgcttcaataaatgacttagaaagagaaacccaaccttcctatgatattgataattttgacatagatgactttgatgatgatgatgactgggaagacataatgcataatttagcagccagcaaatcttccacagctgcctatcaacccatcaaggaaggtcggccaattaaatcagtatcagaaagactttcctcagccaagacagactgtcttccagtgtcatctactgctcaaaatataaacttctcagagtcaattcagaattatactgacaagtcagcacaaaatttagcatccagaaatctgaaacatgagcgtttccaaagtcttagttttcctcatacaaaggaaatgatgaagatttttcataaaaaatttggcctgcataattttagaactaatcagctagaggcgatcaatgctgcactgcttggtgaagactgttttatcctgatgccgactggaggtggtaagagtttgtgttaccagctccctgcctgtgtttctcctggggtcactgttgtcatttctcccttgagatcacttatcgtagatcaagtccaaaagctgacttccttggatattccagctacatatctgacaggtgataagactgactcagaagctacaaatatttacctccagttatcaaaaaaagacccaatcataaaacttctatatgtcactccagaaaagatctgtgcaagtaacagactcatttctactctggagaatctctatgagaggaagctcttggcacgttttgttattgatgaagcacattgtgtcagtcagtggggacatgattttcgtcaagattacaaaagaatgaatatgcttcgccagaagtttccttctgttccggtgatggctcttacggccacagctaatcccagggtacagaaggacatcctgactcagctgaagattctcagacctcaggtgtttagcatgagctttaacagacataatctgaaatactatgtattaccgaaaaagcctaaaaaggtggcatttgattgcctagaatggatcagaaagcaccacccatatgattcagggataatttactgcctctccaggcgagaatgtgacaccatggctgacacgttacagagagatgggctcgctgctcttgcttaccatgctggcctcagtgattctgccagagatgaagtgcagcagaagtggattaatcaggatggctgtcaggttatctgtgctacaattgcatttggaatggggattgacaaaccggacgtgcgatttgtgattcatgcatctctccctaaatctgtggagggttactaccaagaatctggcagagctggaagagatggggaaatatctcactgcctgcttttctatacctatcatgatgtgaccagactgaaaagacttataatgatggaaaaagatggaaaccatcatacaagagaaactcacttcaataatttgtatagcatggtacattactgtgaaaatataacggaatgcaggagaatacagcttttggcctactttggtgaaaatggatttaatcctgatttttgtaagaaacacccagatgtttcttgtgataattgctgtaaaacaaaggattataaaacaagagatgtgactgacgatgtgaaaagtattgtaagatttgttcaagaacatagttcatcacaaggaatgagaaatataaaacatgtaggtccttctggaagatttactatgaatatgctggtcgacattttcttggggagtaagagtgcaaaaatccagtcaggtatatttggaaaaggatctgcttattcacgacacaatgccgaaagactttttaaaaagctgatacttgacaagattttggatgaagacttatatatcaatgccaatgaccaggcgatcgcttatgtgatgctcggaaataaagcccaaactgtactaaatggcaatttaaaggtagactttatggaaacagaaaattccagcagtgtgaaaaaacaaaaagcgttagtagcaaaagtgtctcagagggaagagatggttaaaaaatgtcttggagaacttacagaagtctgcaaatctctggggaaagtttttggtgtccattacttcaatatttttaataccgtcactctcaagaagcttgcagaatctttatcttctgatcctgaggttttgcttcaaattgatggtgttactgaagacaaactggaaaaatatggtgcggaagtgatttcagtattacagaaatactctgaatggacatcgccagctgaagacagttccccagggataagcctgtccagcagcagaggccccggaagaagtgccgctgaggagcttgacgaggaaatacccgtatcttcccactactttgcaagtaaaaccagaaatgaaaggaagaggaaaaagatgccagcctcccaaaggtctaagaggagaaaaactgcttccagtggttccaaggcaaagggggggtctgccacatgtagaaagatatcttccaaaacgaaatcctccagcatcattggatccagttcagcctcacatacttctcaagcgacatcaggagccaatagcaaattggggattatggctccaccgaagcctataaatagaccgtttcttaagccttcatatgcattctcataacaaccgaatctcaatgtacatagaccctctttcttgtttgtcagcatctgaccatctgtgactataaagctgttattcttgttataccaaaaaaaaaaaaaaaaaaaaa

SEQ ID NO: 4455 - DNA, 487 bp, Homo Sapiens
ttttttttttttttttttttttttcattacttactcagttttatttagggggacacaacagggaaaaactcaaacatggttggacctttatctacagacacagcagcctggattttcagcctttcattccttttaaatgaaagtcagcaggctcaaaatgcaaagcttggctaagtcacttctgtggaaatatgaaatatagtagggataaccaccaagggctttcaaattcttgggttcttctaaggatcctttcctaacaccatgatttgttctcatctttggggaaatgaaaccaagatggtcttaatttgtaaagccctttttcctctgttggcagtcttcttacaaaggatgcagcaaaaagaacacatttttctttcaaagtttggaagaaatatagtcattaaaaagaatttaaattatgcctagagcaccactttacagaataccattaaattgtaattacgtgcttttaaaaagccaa

SEQ ID NO: 4456 - DNA, 312 bp, Homo Sapiens
ttttttttttttttttttttttttttttttttttttttttttttttttgggaagagtgattaagaaactttattacagaaaatgaatgcatccaacgtccccaaatacatttgtgacaagaacagacacacacaggagacacagacaatagtcactacatcacagccttgttctttccgaagataaaatgtcattcaagaatggggtgaggtggttagagggagtaggtactatccttttaaatgggggaaaaaaaaaaaaaaaaagcaacaggttggcatcttaagaacacagacagtgggcccagaaatc

SEQ ID NO: 4457 - DNA, 343 bp, Homo Sapiens
  misc_feature (221)..(221): n is a, c, g, or t
  misc_feature (241)..(241): n is a, c, g, or t
  misc_feature (248)..(248): n is a, c, g, or t
  misc_feature (256)..(256): n is a, c, g, or t
  misc_feature (294)..(294): n is a, c, g, or t
  misc_feature (326)..(326): n is a, c, g, or t
atctgtatcacaacgtcattaggagttctttcaacaattccataaatatactgtttactagaccttccctgtaaatgttcccaattcccatcctgtctcagacagtcaatagtcctgtgtacagtgactatttgcatgatttctcattgcactgctgcattcaggcactccagggcatgattaaacagtcattaacagtgcctctctggtacagttgatgntgcatgcattgatctttctnctctgcngttttaanatagcctttaattaaaaggaaaaaaataccactactcngcaatgcaaaagtcttcaaaattcttggctcnccgggtattaatcactt

SEQ ID NO: 4458 - DNA, 17201 bp, Homo Sapiens
  misc_feature (16617)..(16617): n is a, c, g, or t
tcgactcgatccgtccacctcagccttccagagtgctgggattacagatgtgagtcacagtgtccggcccagtcctccttctaatgaacaccaaacaaataaaaagaaaacacagtgtcaggttggagtaggaggtgtaaatacagtggggtaaaggaacagaacacagtgtgcagtattacagaatggactctctgaagaggtgacatttgagctgagacctgaaagaggtgagaaagccagtgcagacatctaaggaagggggcccaggcagaaggaactgtaagtaccaaggtcctgaagcaggaacgaccttggtctgtgcaaagtgcagcagagaggtcagtgcccctggaaacctagcagcaacagaggcaggacaggtgaccagggccagatgttgcaggaaggagtgcagagtttattctgagtgggaagggaaggctttggagggttgtaagcagggggtgacacaagctgtttgacatacatggctcagagctgatgggagcccagtgagcgagtagattcactacaaggacagcatgtggccccacgccacctcttctttggaggtttcttctagcaggctggggatgaccagccgtgtgggtgcggggaggagctctggctgcccaacagctttgagtttcccaggtgacctgccccagtagagaaggacattgccagggcagttatcttatcaggcgcacgctcacctgctcctggagacacgctcaccccataacataccaaggtccccaccattccactggcccagcccctcgctgctgctgcccatggaggtccctacctgagggatgaggagggagtccccaggcctcctggcatctgtcacccaacaccaagatcaagccaagacccttggacacatcctttccccatgttgcaccttggtttccccatctagggtagggacggggaatggttgagagctgtaaagtctgtagctggatatgtgagtccctgtgagcctcagtttccccctctgcacaacaggaatgatagttctgcctgcacagggttttttgcaaagacccgtgaggtcacacgtgcagagcctggcatgtgtgtggtgctgctgcagtgaagtttgggtttttccattggtggtgccatagaagagctaggctctggggtcaagccctggggtcaagcccgggctggaaccctgtccctaattcttagacgttgaaatcttctgcaaagtccctgatgggggctaagaagagaatattgctttacagggctgctgttagatgctaaggaaaccatttgagtgacacacagagcacacccagcccatagtgaatagtcagagttcagtaaacattcagccaccatagagagtgttgtaagcatggcagggcatggtggctcacgcctgtaatcccagcactttgggaggccaaggcgggtggatcacctgaggtcaggagttcgagaccagcctggccaacctggtgaaaccccgtctctactaaaagtacaaaaattagctgggtgtggtggcatgtgcctgtagtcccagctactcaagaggctgaggcaggagaatcacttgaacccgggaggcggaggttgcagcgagctgagattgcaccactgcactccaacctgggtgtcagagtgacactccatctcaaaaaaaaaaagaaaaaaaaaaagagtgtgggagcaccctcctcttccagttgatcaggcacgtgctatttagactgaaagaggacactctgcagccagctgatctggttctcactccattatgtcctagcctgtgatggagccataggagaatgactcaacccctccatgcctcagtttccccatctgtaaagggtcttgtcccctcaaagggttattggaaggttaaataagttagcacatggaagccgtcagcacaatgcccagcgcataatgagcaccttatgtttgctcttcttgttgctgcagcggttcccaggggctccctgatctcagggcaggttgacatggggggatctgggcaggggaggggggggccagcccaggagggaatgcctgaggtgcccaggcctagaggtcaccccaaggagcctgtaatcagctgtggtcgggcggttctgctccaccccaccgccctccctgggtatatcaggactggtccgggcccaggctctgttgggtgggagcacaggcaccgggcaccatggggaaggccgtgagtggggcccaggggtccggggtgcagtggggacaggggttgcagtggaatctgagttctccctccctccatcctgtccattcccaggagaactatgagctctactcggtggagctgggtcctggccctggcggggacatggctgccaagatgagcaagaagaagaaggcgggtggcgggggtggcaagaggaaggagaagctggagaacatgaagaaggagatggagattgtgagctctgactggggaggggcgggagctggagggtaggctgggaaccaggcagtgggcggggagggggccaggagagcccagagcaagcaccctgccccaccccaccacacagaacgaccaccagctgtcagtggcggagctggaacagaaataccagaccagtgccaccaaggtgagctggagactgggagcgtacagaaaggggaggaggagagagggagggagagggagatggaaggagggagatggagagagggagagagagggagagatgaagagaggaagatatggagaaatagagagagggagggaggcagaaaaggaaagagggagggagggagagaggaaaggatggagggaggggaggagagagggagggagatggagagagggagagagagggagagggagagaagggagaaagcattagagagaaagggtgacacacagagacggagagaggagtagctgaaaagagacagcaagacagagaaggcagagacaaataaggagagagcagcaggagagagacacatagaaaggggagcgaggagagagagacaaagggagagatgaaggagggagggagagatggggtgggggcaggaaccaagagacaaagagatgagaaggagcaggacagaccaagctggagaagggaaactgaagcagggggctttccacggggtgtgcatgtggaggaaagcccccaggaccgcctcgccctgcccctctgtcccagggcctctctgcgagcctggctgctgagctgctgctgcgggatgggcccaacgcactgcggccaccacggggcaccccagagtacgtcaagttcgcgaggcagctggccgggggcctgcagtgcctcatgtgggttgccgccgccatctgcctcatcgcctttgccatccaggctagtgagggggacctcaccaccgacgacaatgtgagccatgttgtggggacaggctcaggacatggggacctggggatggaagacactgagcctgggacttgggacaagaggggcagagaaggatggggatagacgaacacgaaaggcagtctcaagacaggggtcatggagggtgaaggacattgggatatggatggggcagacccaaggacacaggacacagggacactggggtgaatcttgggtatggggacataggtgggggcataaagagtatggcaatgtgatacgtaagagatgggatttggaggccgggcgtgtaatcccatgcctgtaatcccagcactttgggaggccgaggcgggcagatcacctgaggtcaggagttcgagaccagcctggccaacatggcaaaaccccatctctactaaaattacaaaaattagccagacatggtggcgggcacctgtaatcccagttacttgggaggctgaggcaggagaatcatttgaacccaggaggtggatgttgcagtgagccaagaccatgccactgcactccagcctgggcgacagagcgagactgcatcttaaaaaaaaaaaaaaaaaaaaaaaaaagagatgggacttggaagcagaggacatgcagtgcagacacaggacagactgaggcacggggaataggagaccctgggactcagacataggacaccagggcagggacccaagcctcaggacacagcacatagagagacacaaaacatgagacatagaagcacagagacagagaggaaatggaggtgcagggcaagggacattggacatatggcagagatgagggcaagggacatggggactcagggacatgtgacatgggacagaggctcgaaaagtcatggccatgggacacaggatgggaactcggagatacacagacatgggagacacgggacacagtgactggggagctagaacatgggggccgtggccacagaggacacagaccatgacgtacaaggtctgcagcacacgcagggacggggatgtgaggatgcagggacaagggggcccaggggacacacagagggtggcagcagattatggaaaacccaggatgtgaaactggagacacggggaatacaggccatggggacaggaggagacatgggacagtggacatggggaatgcaaggcttggggacacaggagaagggaacacgtcagaccaaggcacacagtgatttggggcacaagtcacagatatggggacatggaagattgaggattcagggccagaggatatgaaatatacacagaaacacaagacactgagaagacagagcaggcgagtgtgggacatgagggacatgggagggggctaaaggctacagggaatggtgcatggagcttcctagtaggtggggaaaagcatggggaaaaccaagaaaaccagggcaccagggagcaggtcggtggcctcaggcaggcagcttccggcccctctgaataaccccaccccttccctgtccccagctgtacctggcaatcgctctcattgctgtggttgtcgtcaccggctgctttggctactaccaggaattcaagagcaccaacatcatcgccagctttaagaaccttgtgccacaggtgggttccccagcacccagccactccagatcccagagactccaaactgctcctgtagcctccttccatcaggcccctgtccctcatctgtggcctccatctctccccatgggtcccagctctcctcatcctttacctccccacatgcagcagctcccacccccacccccgtccacctcaactttggtgcccctgccccgcagcaagccactgtcatccgcgatggagacaaattccagatcaacgctgaccaactggtggtgggcgacctggtggagatgaaaggtggggacagagtgcccgccgacatccgcatcctggcggcccagggctgcaaggtggacaactcctcgctgacaggggagtctgagccacaaacccgctcacccgagtgcacgcacgagagccctctggagacccgcaacatcgccttcttctccaccatgtgccttgagggtctgtgaagcccccgcctgcctgcccagtaactgctgcctccactggcctctctcctgctatcttctaggacagggggcttcagcctccctgtctctctcctgcatgactgccacctccccgtgactgccacctccccagggcacactgcttctctgtctcccactgtcactaccctctcccaggtcacatcctccactggcagtgactggctgtccttcagctcacacggcagtgcacaccccactgccgccccctatccctgagtcgcgccttggcccccctgcaggcaccgcgcagggcctggtggtgaacacgggcgaccgcaccatcattgggcgcatcgcatcgctggcgtcgggggtggaaaacgagaagacacccatcgctatcgagatcgagcattttgtggacatcatcgcgggcctggccattctcttcggtgccacattttttattgtggccatgtgcattggctacaccttcctgcgggccatggtcttcttcatggccatcgtggtggcctatgtgcctgaggggctgctggccactgtcacagtgagtgggggcaggcggggatgcagggagctgaggggcctgctcaaccatctgttctttcctccacatttcccccatcacctccctgcctgtctatctgtccacttagctcccatccattctcctgccttcccatcatccactcattcagcaagtccttcccgaggcaaccctggggcaagtcctgtgccacacattgagggcgcagagatgacgaggccgggtccttaactggaagaggctgatgtcctgtgcaggcagccagcatgtcaccagaccttccacagtcagcacccagctccagaccagtccccagggaggtgcggggaaggttcctcttctcattttgattgtgtgaagagaattttcagaacctcggctgggacagctcagagaggggcctcgctactgtatctgggcagactggggaaggagtcccaaacaaagcactggctgaacaaaagctggggccaagaaaacacctggtgtttgcagaagcacgttgcacacgcagccccgcggctggggtaaagccttccccgttctttgacgcggggaagaggactggaagccagggtgggtccccagcctgcggtgctcaccccttccccaggtctgcctgtccctgacagccaagcgcctggccagtaagaactgcgtggtcaagaacctggaggcggtggagacattgggctccacttcggtgatctgctcggacaagacagggactctcactcagaaccgcatgactgtgtcccatctgtggtttgacaaccacatccacacagctgacaccacggaagaccagtcaggtgtgggggagggagggcacaggcgccagggcaggatctggtggatggtggagacctgaagagggatagggaggtagggagggctttgtacgaaggcggggcggctcggctccaggtctcaaaggagactcgctaccgggtctagagggaagggtcatccgggggctgggtccctcagggttgggtggaacccaattccacccaggtctggggagggggcccgcgatatgagcctaggaggagggggctcggttctggtccgggagagccgccgtgcgggacccagcctggacgcctggtctgcagggcagacgtttgaccagtcctcggagacgtggcgggcgctgtgccgggtgctcaccctgtgcaaccgcgccgccttcaagtccggccaggatgcagtgcctgtgcccaaggtgagagccagggggcctccagggaatcccgggaggctggtgtagccggcttcgcccctgacaccggtccccgctcccagcgcatcgtgattggagacgcatcggagacggcgctgctcaagttctcggagctgacgctgggcaacgccatgggctaccgggaccgcttcccaaaagtctgcgagatacccttcaactccaccaacaagttccaggtgcgcagccggccccgcccacggcctgggcccgcccacctcgggccccgccccaggccacacccacatcagcgggccacgaggggcttcgctccttgccccttctctccgcagccaaaccccaccccatctcccgctccgcctatggccccgtccaccagaggcaaggccccgcccaccacccagccccgcccacagcttctcctcggcgggactgtccatggggagcacctcgctctccaaatccgcccccagcccaactccgcaccctaattctgttcattccctgcgtccaggactccaaatctgcacctagccccgccttaacgcttaccttctaccaaggacccctccacacaaggcctccatcttccaccttcacccttccccgcagctctcagagcccgcaccgagctctcggccccgcccctctcctcagccccgccccgttccctcgtccacagccccgccccgttcccccgtccacagcctcgcctctcccccccgcccacagctgtccatccatacgctggaggacccgcgggacccgcgacacttgctggtgatgaagggcgcccccgagcgcgtgctggagcgctgcagctccatccttatcaagggccaggagctgccgctggacgagcagtggcgcgaggccttccagaccgcctacctcagcctgggaggcctgggcgaacgcgtgctcggtgagacccctgggcaggggaggagactccaggtgcgaggaggagctagcacagaccctgcccaccactcccggcccagccctgaccgtcctcatccctggctgctggctgatttgtcgcagtccacagcctcacccttgactttccctgtaccagtcctgacccctgtctgtcctcactttctaccttgaccccagtcctcacctggacttttatccgtatcctgacctctaacctctcccaatttttgtcctgacgccttaaacttcgctgcctctaccctagaaagcagatctgtggtccaattctgggccttttacttgctgtgtgacctctggcaagaaatgtcccctctctgagcctcagtttcctcatctgtaagatgagaatgggcctcacagggtggttgtgagggtagattcagataatgtgagtgaaggggtcagcacaaggtcaggcatccataggtgtttggtgcaaggggcctggttattttacccatttcctggccctgctaagaaagggtgtgcccagggctcttccctgacttccccgtttccggtcaggcttctgccagctctacctgaatgagaaggactacccgcctggctatgccttcgacgtagaggccatgaactttccatctagcggcctctgctttgcgggacttgtatccatgattgacccaccccgggccaccgtccctgatgctgtgctcaagtgtcgcaccgcaggcatccgggtatgccactgtggggaggaacaagtggagtgaggacagaggatggcagcaggatttgggttgaagaaccccatgacaaacccacctgaaactggcttgaaccaaaatgcattggtttatgatactgaaaaattctggggaattaagcttcaggtctagccagatccaggagctcagtgtcattaggaattttcctttctccaggtctcagctctgctgttctctttgctggctttatttgcaggcactcccttcacttggggacacacacacccctgctccagcagctcaaacttaactcccacctgcttagccaccccacaaaaagagagtgcctcttttgcagtagcactggattgggtcactcatttatccctgagccagtcactggggctgggggatggaagaccttgattggccaggtctgggcttacttacccaatcttagccagggacctcactgcaactgatggtgtaggggagaggagtggttccccaaacacaaaacaagggtgggaagccaaggccaggcaggcaatgcccaagcccttcccgtgtctctacggccctgttacatcgggccttgttacctttctaagcttgttcgttagccctctttccttgttcactcctctgcagttatggtgtcctccctgctgttcctccgacagttcgggcctgtcctcacctcagggcctttgcacctgctgttctccctgccaggagcactcttctcccagctttccacgtggctgactctctcacctcttacaggtctctgctcagatatcaccttctcaataagcccttccctgggtacacttaaaatcgagtcaccgtttccttcaccaagcttaatatgtttttttccactttctaacacactatataattcgtttctttattttctgtcaccctcactagaatgtcagctcctcaaggacagggatttttgtctcttttgtctctgctatatcccaggcacgtaggaggtggtcacgcttggtcaagtaaatgaacacgtgtatcagcagatgtctcccagggaggacagggagattgggctgatctgaaggggtcagtgatccactggttccccctacaggtgatcatggtaacgggtgaccaccccatcaccgccaaggccattgcagccagtgtgggcatcatctcggaaggcagcgagacagtggaggacatcgctgcccgcctccgtgtgcccgtagaccaggttaatcgcaagtaagcccccccagacctccccggggttctccccacatctggcacagaccgaggtcccagcgaggtcctcccatctcctccccagggatgcccgtgcctgtgtgatcaatggcatgcagctgaaggacatggacccatcggaactggtcgaggccctgcgcacccaccccgagatggtgtttgcgcgcaccagcccccagcagaagctggtgatcgtggagagctgccagcggctggtgagccctgctgatgagggtgggcaggcgggcagacaggcggggctggtcttggaccggcctctcactgaccacccacccaccacctgcacccactgcctgcagggtgcgattgtggccgtcacgggggatggtgtgaatgactccccagctctgaagaaggcagacatcggagtagccatgggcatcgctggctcagatgctgccaaaaatgcagctgacatgatcctgctggatgacaactttgcctccattgtgacaggcgtggagcagggtccgagccacgccagggggagggcaggcagtgtgggcacaggagggagagggctgtgaggaggctgaggtgcccaccctaccccacaggtcgactgatcttcgacaacctgaagaagtctattgcctacacattgaccaagaacatcccagagctgacaccctacctcatctacatcaccgtcagcgtgcccctgcccctcgggtgcatcaccatcctcttcatcgaactctgcactgacattgtaagtccacagcccagggtacccatccacagggtgcccagagacacttgcctgcagatggacaggagggacagagaccaccacagacactcttgggcacagagtgacagacaagacctgtgtgtgcaatgacagccagtgcaggacacatgggtggcaggcaggtgaacagacctaaatggacatacctacagccatgcacacacaggcggacactcaggtaggcccgggccgacccatgcacacacatgactcagatacagatactcagacagagatggaaacagaacaggtatctggccaaacttgaatcacagacacgtgtccctaaacagacacggacaaataaaccccctcagatagaccccatggcagacagacagaaaagaaccacagatacagtcacgaatgcagccagaggcgcggctgtgttgacaggtatttattcggtaacatttacacagtgctttctctgggccagacacaccatcatttccttaattttgtactcataaccacactatgagatgagttttgttactatcacccgtactttactgatgagctcatcaaggcatagacaggtagagtggattgtcccaggtcactgggcaaataagtggcccggctgtgacttgagcttgagcagtcacaggtcccacagcctgtggtcgtggtcagtatgctctgctgccactctaggcacaagcagatgaaggggcacggcgacactgagagactgaagatacacagagatagggagtgacacagaaatacacaagagcagatacagtcacagagaattacactggagacagggacagagaaacagagtgaggaacagagaaagagagggagggagacagagggagaagataaaagcagatgttcttacgaagatgggcaccaggatgccaacacccaggggccagtggggcccaggctgtccaggctggtgtggctgtgccgtccctgcaggtcctgcctgctaacctcagtcctgttcctgctcacaagtgggggaagggggacccgaagtggaggggacaagggcccagccaaaccctcagtcccagttccttccactcctggccagttcccatctgtgtccctggcatatgaaaaggccgagagtgacatcatgcacctgcgtccacgcaacccaaagcgtgacagattggtcaacgagcccctggctgcctactcctacttccagattggtgggtgcccgtgggccggggagcctggaggtggggggctctgcgctgggctgctcgcctgccccaggccctgccttgggctctggctggttctggacctcagtgcctgcatttggtcctgggtctccgttgtcctccgtgtccctctctgtttgtgacagtctctctggttctgctgtgtccctgctctctctctgaccttgctctccatgaccctgtctctgagttgttgcctatttctgtctttttgggtcctggatgtgtctttttctctctgtccctgcctctgtctctctgtccctgcttctctctctgcctctgtgtctctgtcactgtttctgtgtccctggctctgtgtgtccttgaccttgtgtatctgtgtccctgtctctcttcccgtgtccctgtctgtgtgtccttgacctttgtgtatctgtgtccctgtctctccatgtccctctcttcctgtgtccctgtctctgtgtccatctctgtctccctgtgtggggttgtctctctccaggtgccattcagtcctttgctggcttcactgactacttcacggcaatggcccaggagggctggttcccactgctgtgcgtggggctgcgggcgcagtgggaggaccaccacctacaagatctgcaggacagctacggccaggagtgggtgagccctgccccgccccatcccatccctgggctccctccttcccagggcaacttgccttgtgtgcggcccacttgttcctccacgtgtgactgagttcagccagagcatcccggacccccagactccctgccagttcgggggggcaagggcctttcccaccatctccagctccaaactcctgcttctgatgatcgcaactgcagatgggtgtctctgccctgacactaatgcatcatctcagatgtggaaccaggcccctattctgctattttccctacagcatcactcccacagggtatttgcacatgtggtctattttaatgaaggtttggagcacagtgaggctagatctggccagcagatgtgtttagttcacctgtagagttacatacagacgaggatacttcccttaaacatttactatcatggttaaggtagacactgaagccagactgcctggacttatggtctggtactgcttctcacaagctgtgtaaccctgggcaggttgctttgcctctctgtgcctgttttctcacctgcaaagtggagagaatatcaaagtctacctcagtggttttcagtttgctcccagaccagcagcatcaccatctcctgggaacatgtttgcagtgcaaattctcaggctctatcccagccctctgggagcccttgctgggattctcatgcatgttcaagttccagcaccactgatttacctcctagggttacccagcggattaaatgagctaatgcacgtgcaacactcggcacctggagcagtcagtgatccccacagttagctggtattaggagttgtgttgccaggcatggtggcgcatgcttgtaattccagctacttgggaggctaaggcaggagaatctcctgaacctgggattcggaagttgcagtgagctgagattgcaccactgcactccagcctgggtgacagagcgagattccatctcaaaaaaaaaagtagctgtgttgaagaaatgggctgcatagtggctgccccctttaaatggggcatctgccctcttttcccaaaggcccgcggtgactgcctcacctatttttgccatctgcctggcccctggagtcactggactttgcaaatcccatctgaggatttcaattcccctttcccaggccctttcttttgggtgcctcccccctttcactatgaaagcagtcggcccagcctacagttttcccggccactgtcatccaagctctgctaggctgaggtttctgggccccacgttctggggtcctgcacacctggcagaccctgcctctctccttccccccacccccacactctgatgcaaggcagagagagcatttaggggttcacggccctgggaccctatgcccggtgggctgcagaggctctccgccgggactcaggctggactcaggctgtttccgtttgcccctggcctgcagacattcgggcagcgcctgtaccagcagtacacctgctacaccgtgttcttcatcagcattgaggtgtgccagatcgccgatgtcctcatccgcaagacgcgccgtctctctgccttccagcaaggcttcttcaggtgtccctggctggccctcttcctgccctccaacccctggtcccaactcccatcagatcctgactgtggtttagaacagccggcaaatgccagcgggtgccagtgccagatggtgacatgccaaaaaaacctttctaactggccaataactccccccacggccccctccacatttcactaaaggggtggtgctgagaggcccgggccactccagtgttcagtgtgtagaacacctccctgctgctgctgacatctgacctactttgacccacagtatcctgatttccatcacgtccccaattcctaatggcctgtcccattctgcccacccccaggaataagatcctggtgatcgccatcgtgttccaggtctgcatcggctgcttcctgtgctactgccccggcatgcccaacatcttcaacttcatgcccattcggtgagaggctgtgaggggcaaggacagggagggggctgtagggcacaggcctgggatggccttcaccttgccatgtgccttcaggttccagtggtggctggtccccctgccctacggcatcctcatcttcgtctatgatgagatccggaagcttggagttcgctgttgcccagggagtgagtgtggagactgggagcctgggggcaggggactgaaacgtttgagcagctgcacccacctttgatcctcaacacttggcctctaagcccttgaccctccatagcaaccagcactgacctctgagcccctgccctgcctaagtggcacccccagcactgagtctcctttctccctctctctcccaggctggtgggaccaggaactctactattagagggacgactgccttcaagcatccctgcaactgccacagcaggtgggggcagggcacgtgggaccctctggacagccaccaagatatctgagcaaccaagagtcccagccccaccagtatctgcttctgtagcccacggcaccccaaacttggagggacctgcccactcccctcccccattcccaaggttcgcacctcctggagcagcagcgcctgggcagtcctctgggctggcctcgggaaagccgccacctgtggtggcggtggggctctgacagggagtacagctgaccgcttctggagggtgtttctgttcttaggactccagtccaggctggacggctgcctgagggcccttcgttaaagacacgcttgtgtcctgggcgatggtaataaaaccagctcatgctgactgtgctgtatctggtgccaggcactgtcctcagcgtctctcattagtgcttgtgatctcccacagtcctgtacctgggggctgtttatccagggctgcacctccagtgcctagtacacagcctggcacatagtaggtcctcaataaacctgccttggggaaatgattcctattcctttgcccagggtcatggcatctaaacgcaagctgggccgtggcgataggcaccccctaccacctctgggctttctctgttctcagcacccttctccctcctggaggctcccagacacaagggggcccaagtcatttccacatcaagcatcccccaccccccagcggtgtctcctttctgagcctacctgcttactcctctgtcccggcaatggccagttcctgaacaactcctggaggtcccctcctcacacccctcacctgaaaggttaaccccatccccctacctcccatctctgccgctcctttcccagcccctctgttcacctctcttcctctttcttatgtggctttctctggctagggcctgggcttctccttccttgtgaccacagccccccagtcccccatggcttcagttgtttctgcagtgagacccacctctgtccccagcttcccccagtgttggtgacctacactggcctcttcatcaccccccatgcctgtacccatgcactgacccaatctgatagtcccactgtcccatcagtgtggtcccttctcccttggaaacgtggtgagccctcgggcttcacaagccccaaactccagttatcctggaactctttgctcctcccttacctgttagcgccccctgccggtaaataaatacacacagccactgatcaccaacacctgggcttggcttctagtcactctcctaaccccacaaagccctgccctggtccagccctggcctcgtggcctcagctttcccatttcagacaacagccatgcngagcttcctaaagccaaatctgaccctgtccttcctctgcctgagctcccttggttcccaaagcctcctgtgatctgacccctgccagcttctgtagtcttacaagtccccttgaactccgttccaaccagttatgttcccttgggaaaaacaggccccctctctgacctcaagaccattacctctgccttgccccaatcactcattctttaggtctcagctcacatgtcctctgctcaggggagcccgcactgcttccacggcaggccaggcggctcctctgggtccccataacccggggttttcccatcataaccccgatcacctgaagcctggctccccacagtccaaccgcccaggcttcaccgtcctctgccaactcaggcccagccactccagtctctctccctgaaccccatgtaagctgggattattccagttggtaattttgcatcctacacttgtctcaatatgtgtgaagagctatgtggggcatggaagtgtgggagaaagtgaccttgtcacaagtccacccagatagactgccccatctacttcctttctacatcaaagtcaaggtgatc

SEQ ID NO: 4459 - DNA, 427 bp, Homo Sapiens
cggccgccaaccatcaccttcccaggccaaggtcttaggttcccctggaacccctttggctttactcccttcctgggctgggggaaagggtggggatataagctggtacttccaaagcagaaagctggggtttggggctgacagagccgaccttgagcttgagctccatggagtacccagcccaggtcaaatggggtcaggaagccatctgtgccttctggatggctctgtctgaatgattcacttctgcctatggtgggtggaagttcatggttttactcccacatggtgaccacagtgcatggcaattttctagtcaacaggtggggttggggcctctgctacacacaagaggcttctttcttcaagtttaagacttctgatgctcacaagaccctcccatgcccttaccacgtgcagcgctcac

SEQ ID NO: 4460 - DNA, 511 bp, Homo Sapiens
  misc_feature (479)..(479): n is a, c, g, or t
  misc_feature (494)..(494): n is a, c, g, or t
  misc_feature (506)..(506): n is a, c, g, or t
tttttactggttcaagggtttaataaaatactctctttttatcaggaaacccaacatgtgtaacaaagtaggatccccctgtaaaaccaccagtaaggggcctccaaccctgaccctcaaagaaaggagtcactaattagcctgagaagcagaggccaggccaatgaaaaaccagccacgagaggtagtttgggcaaataactgtggtttggaaggaggcacaaagaaggaacagcattagcaacactgtctcttacccatctttcccctgaagacatcttagacacacaatgcacaaaggacagtgatcaatggtcacagagaaatgaagaataggagcaggcacctgaaagctacaaacctcttttcacagggacacagcttatgtgctcatttgattccacacttaagaaaatacctagtataactttcctgaaaattaaaaattaaaagatcctcgtgccgaattttggcctcgnggccaaattccctanagggagccgtantaatt

SEQ ID NO: 4461 - DNA, 2061 bp, Homo Sapiens
aggaggcgccgggaccatggtcaccctcggctgagtttccggcggcgactttgattattggcaaataaccaccataacaataccgagcccccgggcttgcaccgcacgcactgactccgcgagcccgcacacggccgcgtcgcccgccaccgggccctgagcgccagccccaaacgagccgatggaaaaatccaaaaatttccgcatcgacgccctgctggcggtggaccccccacgagccgcctctgcgcagagcgcgccgctggccttggtcacgtcgctcgccgccgccgcatctggcaccggaggtggcggcggcggcggcggggcgagcggcgggactagcggcagctgcagccccgcgtcctcggagccgccggctgcgcccgccgaccgcctgcgcgccgagagcccgtcgccgccgcgcctgctggccgcgcactgcgcgctgctgcccaagccgggcttcctgggcgcgggcggcggcggcggcggcacgggcggcgggcacggggggccccaccaccacgcgcatccgggcgcacgggccgctgccgccgccgccgccgccgccgccgccgccgccgctgggggcctggcgctggggctgcaccctgggggcgcgcagggcggcgcgggcctcccggcgcaggcggcgctctacggccacccggtctacggctactccgcggcggcggcggcggctgcgctggcgggccagcacccggcgctctcctactcgtacccgcaggtgcaaggcgcgcaccccgcgcaccccgccgaccccatcaagctgggcgccggcaccttccagctggaccagtggctgcgcgcgtccaccgcgggcatgatcctgcctaagatgcccgacttcaactcccaggcgcagtcgaacctcctggggaagtgccgccggccgcgcaccgccttcaccagccagcagctgctggagctggagcaccagttcaagctcaacaagtacctgtcgcggcccaagcgcttcgaggtggccacctcgctcatgctcaccgagacccaggtgaagatttggttccagaaccggcggatgaaatggaaacgcagcaaaaaggccaaagagcaggcggcgcaggaagcggagaaacagaagggcggcggcgggggcgcggggaagggcggcgcggaggagccgggagccgaggagctgctggggccgccagcgcccggagacaagggcagcggacgccgcctgcgggacttgagggacagtgaccccgaggaggacgaggacgaggacgacgaggaccatttcccctacagcaacggcgccagcgtccacgccgcctcctccgactgctcctcggaggacgactcgccgcccccgcggcccagccaccagcccgcgccccagtaggagccccgcggcccagcaggtgcggcgcgcacggagcgccccggccggcggcttctcccggaggccccggcgcccgcacccacccggcccggccccgagagcaggctcgaccgccgccccatggacccctcgcccaggccggggctggagggattcggccgcggcctccggtcctgggcgcttcccttttaagcaagggcgcctcacctgctcttcaagaaacagcgagagggagacccagggggctgaaacttgaactctggttcttttaaaattaattttggttggtgttgggggaggcgcgagtgcgtgtgagaagaaccgacccaccccgcgcaaggggaagcctcctgtctcccctttccccgcgtccgagaaggcggaaacccacagtgttacctgacttatgaaacttgaaaccgcctctggagccgccattctgcagagtatttggaaaaagaaaaaagggtttatgcttacgtctctggggtcggggggattatgtcacgagcgttcaaactgctggaaatctcaaaactgtactgtctttatttttgtatattgtatttatatataaaaagaaacgtctacgtatgcatgctaaattattatttagcttctcccatcgcccacgatggaatgtaaaataaattggttttgtactggat

SEQ ID NO: 4462 - DNA, 1722 bp, Homo Sapiens
ccaggagccccagttaccgggagaggctgtgtcaaaggcgccatgagcaagatcagcgaggccgtgaagcgcgcccgcgccgccttcagctcgggcaggacccgtccgctgcagttccggatccagcagctggaggcgctgcagcgcctgatccaggagcaggagcaggagctggtgggcgcgctggccgcagacctgcacaagaatgaatggaacgcctactatgaggaggtggtgtacgtcctagaggagatcgagtacatgatccagaagctccctgagtgggccgcggatgagcccgtggagaagacgccccagactcagcaggacgagctctacatccactcggagccactgggcgtggtcctcgtcattggcacctggaactaccccttcaacctcaccatccagcccatggtgggcgccatcgctgcagggaactcagtggtcctcaagccctcggagctgagtgagaacatggcgagcctgctggctaccatcatcccccagtacctggacaaggatctgtacccagtaatcaatgggggtgtccctgagaccacggagctgctcaaggagaggttcgaccatatcctgtacacgggcagcacgggggtggggaagatcatcatgacggctgctgccaagcacctgacccctgtcacgctggagctgggagggaagagtccctgctacgtggacaagaactgtgacctggacgtggcctgccgacgcatcgcctgggggaaattcatgaacagtggccagacctgcgtggcccctgactacatcctctgtgacccctcgatccagaaccaaattgtggagaagctcaagaagtcactgaaagagttctacggggaagatgctaagaaatcccgggactatggaagaatcattagtgcccggcacttccagagggtgatgggcctgattgagggccagaaggtggcttatgggggcaccggggatgccgccactcgctacatagcccccaccatcctcacggacgtggacccccagtccccggtgatgcaagaggagatcttcgggcctgtgctgcccatcgtgtgcgtgcgcagcctggaggaggccatccagttcatcaaccagcgtgagaagcccctggccctctacatgttctccagcaacgacaaggtgattaagaagatgattgcagagacatccagtggtggggtggcggccaacgatgtcatcgtccacatcaccttgcactctctgcccttcgggggcgtggggaacagcggcatgggatcctaccatggcaagaagagcttcgagactttctctcaccgccgctcttgcctggtgaggcctctgatgaatgatgaaggcctgaaggtcagataccccccgagcccggccaagatgacccagcactgaggaggggttgctccgcctggcctggccatactgtgtcccatcggagtgcggaccaccctcactggctctcctggccctgggagaatcgctcctgcagccccagcccagccccactcctctgctgacctgctgacctgtgcacaccccactcccacatgggcccaggcctcaccattccaagtctccacccctttctagaccaataaagagacgaatacaattttctaactcagcaaaaaaaaaaaaaaaaaaaaaaaaaaaaaaaaaaaaaaaaaaaaaaaaaaaaaaaaaaaaaaaaaaaaaaaaaaaaaaaaaaaa

SEQ ID NO: 4463 - DNA, 676 bp, Homo Sapiens
gtgtggaagccagcactcgtaccatattggtatctttttaaatcagctctgcctcttaatcaagaacctaaatattccctctttctaatctttgttccttctccctacaccctcatcctctttcactcttccttcataattcctctaagaaaaatatctttgcatcagcagtaatatcttttagaatagcactatcagaatttagcagtaaaccaacatacaggcttcagatttacttctgagtccaaaacaatttgtgctatccagggtagttaactctgggttaaacaagtacagggtatagattccctcttcaggtctacacaggaatttttaccatagggaaaagtggggagagctcaaacgtagttaataaggaaggtaatttgtttttcttttacctaaaagaaaagaaaattccttctgtgactacaggtctctgagaaattatctttcaaaagagatttcattgctcataagagtgttgtggcctattgataaaaacaattttgttcagtttcttgtcttgaaaaaaaaatggccttagcttttggcaatacttgaataccgtgtgtactcgcaaaaggatttctgtagcacagcattagagactcataacttttctgcaagaatacaaacttacagcttccacatcaccagagggatctctagagtc

SEQ ID NO: 4464 - DNA, 463 bp, Homo Sapiens
tttttttttttttttttaaaatggacttgaattttaatttttttaaagattatctatatatatattaataaaaagtgcaaagaatagaccttcatgtttaaattatattctaaataaaatatatatatatatgtatatatatttccattaactgcgggagacaactggcaagtaaagagcctgagagagtccagtccctctccaccactacaatggacatatatttcaaggaagcacctatgaaaaatagtagagtgttcacaacacatctggtaacacagatagcttctgggtgttcttgagagcagtttgtttgcattttcaatatgacatgaaatgaagggaaaaatcaaattcacaaaccgaaatgacattacttagaacaatctagtattctgtattcatgttttacatgccctagagcctagcattttcatgtagcaagctacactcacatgtgcgt

SEQ ID NO: 4465 - DNA, 200 bp, Homo Sapiens
ttttttttgctagttatccaacacgtgtttaatgagcaccaattgtgtaccaggccacagagctgactaagacagagcccctgtgctgagggtcacagtctgccaggagggagatccaagtcatttacacactagggcttaagtgctgaatccgcaatgcatgcgagtgcggagtgagcaggggatggcagcacagcagc

SEQ ID NO: 4466 - DNA, 552 bp, Homo Sapiens
atctcttgaagcttcacttcaacttcactacttctgtagtctcatcttgagtaaaagagaacccagccaactatgaagttccttgtctttgccttcatcttggctctcatggtttccatgattggagctgattcatctgaagagaaatttttgcgtagaattggaagattcggttatgggtatggcccttatcagccagttccagaacaaccactatacccacaaccataccaaccacaataccaacaatataccttttaatatcatcagtaactgcaggacatgattattgaggcttgattggcaaatacgacttctacatccatattctcatctttcataccatatcacactactaccactttttgaagaatcatcaaagagcaatgcaaatgaaaaacactataatttactgtatactctttgtttcaggatacttgccttttcaattgtcacttgatgatataattgcaatttaaactgttaagctgtgttcagtactgtttctgaataatagaaatcacttctctaaaagcaataaatttcaagccc

SEQ ID NO: 4467 - DNA, 791 bp, Homo Sapiens
ctctggctggacgccgccgccgccgctgccaccgcctctgatccaagccacctcccgccagagaggtgtcatgggcttccaaaagttctcccccttcctggctctcagcatcttggtcctgttgcaggcaggcagcctccatgcagcaccattcaggtctgccctggagagcagcccagcagacccggccacgctcagtgaggacgaagcgcgcctcctgctggctgcactggtgcaggactatgtgcagatgaaggccagtgagctggagcaggagcaagagagagagggctccagcctggacagccccagatctaagcggtgcggtaatctgagtacttgcatgctgggcacatacacgcaggacttcaacaagtttcacacgttcccccaaactgcaattggggttggagcacctggaaagaaaagggatatgtccagcgacttggagagagaccatcgccctcatgttagcatgccccagaatgccaactaaactcctccctttccttcctaatttcccttcttgcatccttcctataacttgatgcatgtggtttggttcctctctggtggctctttgggctggtattggtggctttccttgtggcagaggatgtctcaaacttcagatgggaggaaagagagcaggactcacaggttggaagagaatcacctgggaaaataccagaaaatgagggccgctttgagtcccccagagatgtcatcagagctcctctgtcctgcttctgaatgtgctgatcatttgaggaataaaattatttttcccc

SEQ ID NO: 4468 - DNA, 385 bp, Homo Sapiens
ttttttttttttttttttttccagcacaagcatctttggttagcaaaagggagtccacttaccccataggacaatggacggtctgtgtttttgcatcaaaacttttcacccgcagtccaggcccaggtgtcacaaccaaagccttgacctgaaagctgggacagtgatctgatttaggctacaaagcagcaggctgcatgtgggacctgaggctggtcatgatgtctttctgggcctcattgtcgccatctgcagtaaaaacccccctctggaacatggaaaagttcttcttaaagggatctttgttcacccaggtcaacatgacccaccccgcaagcctcagcctaattctgaagcatgagggttaaacaattcggggaaaatg

SEQ ID NO: 4469 - DNA, 220 bp, Homo Sapiens
  misc_feature (151)..(152): n is a, c, g, or t
  misc_feature (158)..(158): n is a, c, g, or t
  misc_feature (178)..(178): n is a, c, g, or t
  misc_feature (181)..(181): n is a, c, g, or t
  misc_feature (188)..(188): n is a, c, g, or t
  misc_feature (196)..(196): n is a, c, g, or t
  misc_feature (212)..(212): n is a, c, g, or t
  misc_feature (214)..(214): n is a, c, g, or t
cgatgctcccgcatccaacttgacttccagactctcagactgtgtggaaagatatgatcccaaaacagacatgtggactgcagtagcatccatgagcatcagcagagatgcagtgggggtctgtttacttggtgataagttatatgctgtnngggggnatgatggacaggcatacctnaanaccgtgnaggcttangatccccagacaaatnantggacc

SEQ ID NO: 4470 - DNA, 499 bp, Homo Sapiens
  misc_feature (286)..(286): n is a, c, g, or t
  misc_feature (461)..(461): n is a, c, g, or t
  misc_feature (480)..(480): n is a, c, g, or t
  misc_feature (495)..(495): n is a, c, g, or t
cccagccacagccaccagccggtccccagcctgcatcccagccttcttggctgctagtcccgggtccacctcccacaggaactgtcctggggcatagacatcctcactgctcctctccagctatcctaggccactgtgtacacaccaggggactgaccccagagtgaacgggaagaggcggcccagggcagaagctcagacagggacacctcttcggtgcactgaaaggtgtatatacgcttgtgtgcccaccccaaggcccaccttcccccaccgcccccagggntcccactcaccagggcgaccgtcaaggcccttttcctcccggagcaggaacccaaaaccctggggccctttctccaggtgcaggcagcggggcttggtgggcagtgcaagccctctgccaggggtgcagccaggggcaatcccagctggcgacacttgttctttcaacttttggncctgcaccagcaaggtaanctgcttgttcaattntgca

SEQ ID NO: 4471 - DNA, 578 bp, Homo Sapiens
  misc_feature (482)..(482): n is a, c, g, or t
ccattagatgacagtagcacttcttcctgcttccagttctgacaactaaaaaatatcccagacattgtaaaaacatcccctggggagcaatgctgcccctggatcctaccattctagttgaagaagttggagttaaaactccctttccagactcccttgcaactttgtttatagacacaaatccatcccaccaattgcttaggcactgccatgggacacttgggacagcaaatgtgagggaagggccatatccagcttctttggggcttctcctcttagcaagggagtgtgtgaaggaagttttttgtcttccggttctggggtcccttctccagcttccttgtggtggagatggggccacagcaacggaggtggttttggcttatccatctgcttagctccagttgtagcttcagtggaagggccttcctggagggtcacttctgtattattcaggaagccgttctgaaggtcaacctcanaactactcttttagctcttctaacaatttttaagtaccaaattgcctttattaaatctctcccttttaaaaacatgaagaggttcgcataccctat

SEQ ID NO: 4472 - DNA, 445 bp, Homo Sapiens
taatcatgagtcggtgtgtaacaagcccctcatccaaatcgccccagtccacaagcttcaggagtaatggtggagcttatcgtctgtccacaccaaccattttacaaacagaaaacattcaatccaaaaatatgatgccctggacaagacaacaaaaatcaatctgcagatatgaaaatcctgaaaggagataatgtagcacctgcaaggtatcaacaaagaaacagcagcacagggcttaaaaatgtcctactcatgcactggccaaaaaggctgaaccatgaaaagctgctataaaatcctgacaccagacacatttaagaggcaccctgaacttctcattgctctgttcctggggatagcttagcccaagatgaaacagaaaggctaaagcaactcatgccccacatcatctatactctgaaactgatctataggagtggtg

SEQ ID NO: 4473 - DNA, 640 bp, Homo Sapiens; identical to SEQ ID NO: 267
  misc_feature (502)..(502): n is a, c, g, or t
  misc_feature (504)..(504): n is a, c, g, or t
  misc_feature (572)..(572): n is a, c, g, or t
  misc_feature (581)..(581): n is a, c, g, or t

SEQ ID NO: 4474 - DNA, 372 bp, Homo Sapiens
tttttttttttttttttaagcataaaataaatttattaagagataataaatggacaaaatattctccaggaaagccagggatcgactttagaggctagcaccagaaacgattcccaggtcacaccactggattgctgttttggcaccactaaaatggcagtaaatccatgaaaaaggaaagtcataagctgacaaatacagcaggggaagagaccagcagtagcagtttggaggccagaaaacacataaattactactttaatagactagggaaagttgagatctatgtctctggcatgaaaacttcaaaattaggctgattaggacgtcaagaccctaaaatagttcaagaattagagataacatttactt

SEQ ID NO: 4475 - DNA, 303 bp, Homo Sapiens
  misc_feature (39)..(39): n is a, c, g, or t
  misc_feature (51)..(51): n is a, c, g, or t
  misc_feature (62)..(62): n is a, c, g, or t
  misc_feature (240)..(241): n is a, c, g, or t
  misc_feature (243)..(243): n is a, c, g, or t
  misc_feature (245)..(245): n is a, c, g, or t
  misc_feature (296)..(296): n is a, c, g, or t
  misc_feature (300)..(300): n is a, c, g, or t
acccgttaaataatttattgatgatacaaagcgactcgngcccacccgggnccgcccccgantttctgcaaaaatagattcgcccccaccccgcggtcctcacaaggcgtcccccgcgccgccgccgcacgggctgaccagcgccaagttcgagggtttgtgcttcttgagcagccgcgtgatcttctcgtcgtccgagttggggtccaggggccggttgtattcgtcgtcgtcctccgnntncnagccgcccaccttcagcttctcggcgtccgagtcctgtttcttcttggccnacgncat

SEQ ID NO: 4476 - DNA, 1216 bp, Homo Sapiens
ggcagctgcacggctcctggccccggagcatgcgcgagagccgccccggagcgccccggagccccccgccgtcccgcccgcggcgtcccgcgccccgccgccagcgcacccccggacgctatggcccacccctccggctggccccttctgtaggatggtagcacacaaccaggtggcagccgacaatgcagtctccacagcagcagagccccgacggcggccagaaccttcctcctcttcctcctcctcgcccgcggcccccgcgcgcccgcggccgtgccccgcggtcccggccccggcccccggcgacacgcacttccgcacattccgttcgcacgccgattaccggcgcatcacgcgcgccagcgcgctcctggacgcctgcggattctactgggggcccctgagcgtgcacggggcgcacgagcggctgcgcgccgagcccgtgggcaccttcctggtgcgcgacagccgccagcggaactgctttttcgcccttagcgtgaagatggcctcgggacccacgagcatccgcgtgcactttcaggccggccgctttcacctggatggcagccgcgagagcttcgactgcctcttcgagctgctggagcactacgtggcggcgccgcgccgcatgctgggggccccgctgcgccagcgccgcgtgcggccgctgcaggagctgtgccgccagcgcatcgtggccaccgtgggccgcgagaacctggctcgcatccccctcaaccccgtcctccgcgactacctgagctccttccccttccagatttgaccggcagcgcccgccgtgcacgcagcattaactgggatgccgtgttattttgttattacttgcctggaaccatgtgggtaccctccccggcctgggttggagggagcggatgggtgtaggggcgaggcgcctcccgccctcggctggagacgaggccgcagaccccttctcacctcttgagggggtcctccccctcctggtgctccctctgggtccccctggttgttgtagcagcttaactgtatctggagccaggacctgaactcgcacctcctacctcttcatgtttacatatacccagtatctttgcacaaaccaggggttgggggagggtctctggctttatttttctgctgtgcagaatcctattttatattttttaaagtcagtttaggtaataaactttattatgaaagtttttttttt

SEQ ID NO: 4477 - DNA, 369 bp, Homo Sapiens
ccacaggaatccttaaacacatactgatataaactgaaaatctgatggggaatggaatattacatatagtgtcacaatttattccacaaaataattactaattgtaaagggggaaagaaaacctttacattgggaaagcctgattatgtgttattgataatatgcactgcaaagataatttctataaaattcctgccccccaaaacataatctgaatttagtaatgaaaaataaaatccaaaacaactacgctgtgatctccaaaaacattgacaactgccaaaacttgaatgtcagccagcagctcctgttttctccgtcggatgttctccagttcttgacgctcctctgctggaggccacggaggct

SEQ ID NO: 4478 - DNA, 4892 bp, Homo Sapiens
gccagctgagcccgagcccagaccgcgcccgcgccgccatgcccctggccttctgcggcagcgagaaccactcggccgcctaccgggtggaccagggggtcctcaacaacggctgctttgtggacgtcctcaacgtggtgccgcacgtcttcctactcttcatcaccttccccatcctcttcattggatggggaagtcagagctccaaggtgcacatccaccacagcacatggcttcatttccctgggcacaacctgcggtggatcctgaccttcatgctgctcttcgtcctggtgtgtgagattgcagagggcatcctgtctgatggggtgaccgaatcccaccatctgcacctgtacatgccagccgggatggcgttcatggctgctgtcacctccgtggtctactatcacaacatcgagacttccaacttccccaagctgctaattgccctgctggtgtattggaccctggccttcatcaccaagaccatcaagtttgtcaagttcttggaccacgccatcgcgttctcgcaggtacgcttctgcctcacagggctgctggtgatcctctatgggatgctgctcctcgtggaggtcaatgtcatcagggtgaggagatacatcttcttcaagacaccgagggaggtgaagcctcccgaggacctgcaagacctgggggtacgcttcctgcagcccttcgtgaatctgctgtccaaaggcacctactggtggatgaacgccttcatcaagactgcccacaagaagcccatcgacttgcgagccatcgggaagctgcccatcgccatgagggccctcaccaactaccaacggctctgcgaggcctttgacgcccaggtgcggaaggacattcagggcactcaaggtgcccgggccatctggcaggcactcagccatgccttcgggaggcgcctggtcctcagcagcactttccgcatcttggccgacctgctgggcttcgccgggccactgtgcatctttgggatcgtggaccaccttgggaaggagaacgacgtcttccagcccaagacacaatttctcggggtttactttgtctcatcccaagagttccttgccaatgcctacgtcttagctgtgcttctgttccttgccctcctactgcaaaggacatttctgcaagcatcctactatgtggccattgaaactggaattaacttgagaggagcaatacagaccaagatttacaataaaattatgcacctgtccacctccaacctgtccatgggagaaatgactgctggacagatctgtaatctggttgccatcgacaccaatcagctcatgtggtttttcttcttgtgcccaaacctctgggctatgccagtacagatcattgtgggtgtgattctcctctactacatactcggagtcagtgccttaattggagcagctgtcatcattctactggctcctgtccagtacttcgtggccaccaagctgtctcaggcccagcggacgacactggagtattccaatgagcggctgaagcagaccaacgagatgctccgcggcatcaagctgctgaagctgtacgcctgggagaacatcttccgcacgcgggtggagacgacccgcaggaaggagatgaccagcctcagggcctttgccatctatacctccatctccattttcatgaacacggccatccccattgcagctgtcctcataactttcgtgggccatgtcagcttcttcaaagaggccgacttctcgccctccgtggcctttgcctccctctccctcttccatatcttggtcacaccgctgttcctgctgtccagtgtggtccgatctaccgtcaaagctctagtgagcgtgcaaaagctaagcgagttcctgtccagtgcagagatccgtgaggagcagtgtgccccccatgagcccacacctcagggcccagccagcaagtaccaggcggtgcccctcagggttgtgaaccgcaagcgtccagcccgggaggattgtcggggcctcaccggcccactgcagagcctggtccccagtgcagatggcgatgctgacaactgctgtgtccagatcatgggaggctacttcacgtggaccccagatggaatccccacactgtccaacatcaccattcgtatcccccgaggccagctgactatgatcgtggggcaggtgggctgcggcaagtcctcgctccttctagccgcactgggggagatgcagaaggtctcaggggctgtcttctggagcagccttcctgacagcgagataggagaggaccccagcccagagcgggagacagcgaccgacttggatatcaggaagagaggccccgtggcctatgcttcgcagaaaccatggctgctaaatgccactgtggaggagaacatcatctttgagagtcccttcaacaaacaacggtacaagatggtcattgaagcctgctctctgcagccagacatcgacatcctgccccatggagaccagacccagattggggaacggggcatcaacctgtctggtggtcaacgccagcgaatcagtgtggcccgagccctctaccagcacgccaacgttgtcttcttggatgaccccttctcagctctggatatccatctgagtgaccacttaatgcaggccggcatccttgagctgctccgggacgacaagaggacagtggtcttagtgacccacaagctacagtacctgccccatgcagactggatcattgccatgaaggatggcaccatccagagggagggtaccctcaaggacttccagaggtctgaatgccagctctttgagcactggaagaccctcatgaaccgacaggaccaagagctggagaaggagactgtcacagagagaaaagccacagagccaccccagggcctatctcgtgccatgtcctcgagggatggccttctgcaggatgaggaagaggaggaagaggaggcagctgagagcgaggaggatgacaacctgtcgtccatgctgcaccagcgtgctgagatcccatggcgagcctgcgccaagtacctgtcctccgccggcatcctgctcctgtcgttgctggtcttctcacagctgctcaagcacatggtcctggtggccatcgactactggctggccaagtggaccgacagcgccctgaccctgacccctgcagccaggaactgctccctcagccaggagtgcaccctcgaccagactgtctatgccatggtgttcacggctgtctgcagcctgggcattgtgctgtgcctcgtcacgtctgtcactgtggagtggacagggctgaaggtggccaagagactgcaccgcagcctgctaaaccggatcatcctagcccccatgaggttttttgagaccacgccccttgggagcatcctgaacagattttcatctgactgtaacaccatcgaccagcacatcccatccacgctggagtgcctgagccgctccaccctgctctgtgtctcagccctggccgtcatctcctatgtcacacctgtgttcctcgtggccctcttgcccctggccatcgtgtgctacttcatccagaagtacttccgggtggcgtccagggacctgcagcagctggatgacaccacccagcttccacttctctcacactttgccgaaaccgtagaaggactcaccaccatccgggccttcaggtatgaggcccggttccagcagaagcttctcgaatacacagactccaacaacattgcttccctcttcctcacagctgccaacagatggctggaagtccgaatggagtacatcggtgcatgtgtggtgctcatcgcagcggtgacctccatctccaactccctgcacagggagctctctgctggcctggtgggcctgggccttacctacgccctaatggtctccaactacctcaactggatggtgaggaacctggcagacatggagctccagctgggggctgtgaagcgcatccatgggctcctgaaaaccgaggcagagagctacgagggactcctggcaccatcgctgatcccaaagaactggccagaccaagggaagatccagatccagaacctgagcgtgcgctacgacagctccctgaagccggtgctgaagcacgtcaatgccctcatctcccctggacagaagatcgggatctgcggccgcaccggcagtgggaagtcctccttctctcttgccttcttccgcatggtggacacgttcgaagggcacatcatcattgatggcattgacatcgccaaactgccgctgcacaccctgcgctcacgcctctccatcatcctgcaggaccccgtcctcttcagcggcaccatccgatttaacctggaccctgagaggaagtgctcagatagcacactgtgggaggccctggaaatcgcccagctgaagctggtggtgaaggcactgccaggaggcctcgatgccatcatcacagaaggcggggagaatttcagccagggacagaggcagctgttctgcctggcccgggccttcgtgaggaagaccagcatcttcatcatggacgaggccacggcttccattgacatggccacggaaaacatcctccaaaaggtggtgatgacagccttcgcagaccgcactgtggtcaccatcgcgcatcgagtgcacaccatcctgagtgcagacctggtgatcgtcctgaagcggggtgccatccttgagttcgataagccagagaagctgctcagccggaaggacagcgtcttcgcctccttcgtccgtgcagacaagtgacctgccagagcccaagtgccatcccacattcggaccctgcccatacccctgcctgggttttctaactgtaaatcacttgtaaataaatagatttgattatttcctaaa

SEQ ID NO: 4479 - DNA, 358 bp, Homo Sapiens
gactatagggatgaaaaacataaactccatctactataaagttgctgggtcaaatcacaaagtccaacttgccaaatttggcccaactgctaccaaagttctagtttctgatagatggagagccatagagaatattgggcctgtggtaactttggaaacggtatcttcactaatgaccatgccatataaatagggtttgtagcttttaatggtagataatcccttcccagtattcttactacttggcttgctcattcctgcccatgtgtgcagaaatcctttaaatcgttcatagtagtcttcttgattttcagaagtcatttctaaaggcccaggaggtagcaaaggagtatcaact

SEQ ID NO: 4480 - DNA, 324 bp, Homo Sapiens
gcggccgcggctcccgagctcctcgggctctgggtcccggcgcccctccggccgcgagtcccacgcgccacccccgggcgccctcgacggtggatctagcggcggcgaggaggcgggtcccggccccggcgaaccccagtcccggcccccggccccgggcccagcttcggcatggatgtgaggttctaccccgcggcggccggggaccctgccagcctggacttcgcgcagtgcctggggtactacggctacagcaagtttggaaataataataactatatgaatatggctgaggcgaacaatgcgttcttcgcttgcagtgag

SEQ ID NO: 4481 - DNA, 328 bp, Homo Sapiens
gcggccgcgtcctgcgtcaggccttcgccgaggtggcgcgccacgccgacttcctggagctggcgcctgacgaggtggtggcgctgctggcggaccccgcgctgggcgtggcgcgcgaggaggccgtgtttgaagcggccatgcgctgggtgcgccacgacgcgccggcccgccgcggccagctgcgacgcctgctggagcacgtgcgcctgccgctactggcgcccgcttacttcctggagaaggggggagggcggacgaagctgctgcaggcctgcgggcgagtgccgcccgctgctgtccgaggctcgcgcctgcttcatcctgg

SEQ ID NO: 4482 - DNA, 540 bp, Homo Sapiens
  misc_feature (446)..(446): n is a, c, g, or t
ctccaaagggacggttttctagagctccgacgcctctcggtgcccctctgctccggcccttgccctttgacctcgctctcgcggcagggtgagaggtcgggtggccatcttgtggcggcggcgcgggcggctgttactgcggagacccatcccctcccccttctcgcacccctggcagtctgtcagtcggtaaaaagtcccgcagcctgtcaggtgaggccccggcctcgtgccgtcgctcttcccgccgcactgggcggcccaggccgctccctgccgggcctcactgccgccaccatgtcctccttctctgagtccgcgctggagaagaagctctcggagctgagcaactctcagcagagcgtgcagaccctgtccctttggctcatccaccaccgcaagcacgcgggacccatcgtctccgtgtggcaccgcgagctccgcanagccaaatcaaatagaaagcttacttttctgtatttagcgaatgatgtcatccaaaacagtaaaaggaaaggacctggattcactagagaattt

SEQ ID NO: 4483 - DNA, 540 bp, Homo Sapiens
actttgtcacagggtctcaaaggaaagattccatttgatgggtcacattctaaagaggggcagtgtgataggaatgagatggtcctttagacttaagttctcagcccaaggtttttccacgtggccccctcatcttttttttttttataaacggattctctcttgccaggctggattgcagtggcacgatctcggctcactgcagcctccgcctcccaggttaagcgattctcctgcctcagcttcctgactaactgggattacaggcgcccaccaccatgcccagctaattttggtatttccagtagagatggggtttcaccatgttggccatgctggtctctaactcctaacctcaagtgatctgcccacatcggcctccaaaagttctgggattatagtgtgagccactgcgcccggccatggctccttaatcttgatccaaattattgttacttccagaatgtgatgaatcaaattctcgagatgggggtccagcaatctgaattttcagtatgccagggcttttctgttgacaaa

SEQ ID NO: 4484 - DNA, 421 bp, Homo Sapiens
tgcagttttaagaggagccatgtctatgccccaggaatggtgtcagcatcacaatttatgagaagctggagatgttatttctgtatactctgatattaaaggaaaatgtaagaaaggagccaaagaattggatggaacaaaagtatttcttggaaatgggatttctgaactaagccgcaaagaaatcttcagtggataacctgaactgaaaggcatgggcataagaatgacagaaccaggatatctcagcccttcatttgacagtgtactgccccgttacttatttttacaaaatgggccatctgccttagtaagtcatgcactaaatcctcaacctggagagaagattctagacttgtgtgcagcacctggagggaaaacaacacacattgcaacacggtctctcagggtaccgagctcg

SEQ ID NO: 4485 - DNA, 605 bp, Homo Sapiens
atgtcgtggctggcgctgccctacaaggagaagcacaggaagctcaaactttgtaacaaatactgaatttccaacattccatcactaatattcctcgacgccaccactgggaaggttgtgtgcaggaacgggctgctggtgatccgagatgacccagaaggtctggagttcccctggggaccgaaacccttcagggaagtcattgcagggcccttgcttagaaacaatgggcagtctctggagagcagcagcctggaggggtctcacgtgggcgtctatttctccgcacattggtgtccgccctgccgaagcctcacccgggtcctggtggaatcctaccggaagatcaaggaggcaggccagaacttcgagatcatcttcgttagtgcagacaggtcggaggagtccttcaaacagtacttcagtgagatgccctggctcgccgtcccctacacggatgaggcccggcggtcgcgcctcaaccggctgtacggaatccaaggcatccccacgctcatcatgctggacccgcagggcgaggtgatcacgcggcaggggcgggtggaggtgctgaacgacgaggactgccgggagttcccctggca

SEQ ID NO: 4486 - DNA, 476 bp, Homo Sapiens
  misc_feature (2)..(2): n is a, c, g, or t
cngtgcagttttctggtaatttaggcttatctttaaagttctgatcactaacttcttagcagagccaggttgctgttagcaaagctagagacggtggtagaagatttggctaggccgtttgcatgatgcaccgaagccacagaagagattaatatactcttatttttaagttgctgctgctgagatgttgcagcagttggtgaagatgaggaggaggaggaggaggattcctcagccatcttcgcatcaaaccctacaaactccagggtggcttcaaaacgcagcttcttctgtatcggtacgtggctggaagcagccactaaaacccccaggcagaaggacgaggttgaaggggatgccgaatccctgggttgtaaaggaggagtgaaagaggaggaagaggtggaatcaaagtcttctctctcgttactactgttactgctgctactgctgctgctgtttaactttctcttctt

SEQ ID NO: 4487 - DNA, 401 bp, Homo Sapiens
tgtcggtgtgtttggtgtagacatctgcaggaagtgtggaagataaattggagaagtaaaaattgcagtccctttaagaagtctatgaggttctgaggactaagcagggacaatgaaaaggccaaaatgagggaggggggtcgaattcaagagaaattttgacacttgcatatgacttttaagttccttttcaatcctgacttccaatgactgcatgtgaggaaatggaagcgggcagtcaaagatgggattcccaagggatacgatttggtagataacagaatgactcacaggaggttgtgttcttagattgtttatggtgttcccaaaatagaggcaccattgagctgctcagaaaaactgttttgtaaatggggtatggatatatgaatctaaatctc

SEQ ID NO: 4488 - DNA, 422 bp, Homo Sapiens
cgagctcgttacccgtcctacatagtgttatcgtgtatgaagcatacataaatacccacatacttagagaaatatcagtgaaaatagatcttagtggtcctagcacagtaaagtgacaaaagactaaaaaaaaacctagagttacggctcctggaatccttctgacttttttgaccatagtacttgcgagaacgcgtcccttgtgaatctaggcaatgacggcaacaggagccatgcagcagtgacagaacgtctcatgggattacacaggggatgcagatcagtgaagaaatattggtgcttataaatagtcatgacaggaatggaaaaaaggacaggctgagtgactttaatattcaataaaacaagtaatctcatgtgaaaggcaagtgtttttgaagatgatggaatgctcttattct

SEQ ID NO: 4489 - DNA, 686 bp, Homo Sapiens
caggtggaatgaagagagcagtattactgtaagaaaacacaaggacagccaggagtagtggtggggtgggtggggtgggaggtgttgatttttgtgtgtttctgtgtgtgtggttttgttttggattggtaggtttcactgtggcgtggttttgctgttgttattttgcttgattctggaaaatgctgaggagatggactgagctatgaagttcaatggttcaccctttaccatgtttgcaggagatgatcgaatacagatgaccctgctgtcgtgtcttcatttgtaaaattctcctacaaatggagacattgaaggattatgtgtatggaaatttttacaaaattcctttctgtacctattctgtagatgcctgtataatcggtctggatgtacagctataaatgtgttgtgagagcaagagagagagaatgggtagagcctgctgtacctttttttcttttaaattcttcgagttggtaaatgagtaagatattggaaaccttaatgaaaagctgctgttcatgatttgtgtgtatagtgagctgactgtagtattttactattgtctgttaaaaaaagaaaaactgtaatttatatcccctttgaactttattgtgtttaattggtacacatgtctgtgtgtgtgtgtgtgtatgtgtcaagaatacaaactgtgtattcag

SEQ ID NO: 4490 - DNA, 386 bp, Homo Sapiens
gtgacgtagatcgtccgcatcgcggaaaaggtttggtgcgccaggatctcaccaagtccgaggccggcgacggagttgtgctcccgctcccccagttcgccgtcgacatgctcaagcggcgggtcaagactcgacgtatgtgttcgagtcgcgggccggcacgatcctggaccccgagacggtgcagcggcggtggccgcaagatccgcacagcactgggcttggagtgggtgaccactcacacgttccggaaagtcggtggcgacgatcctcgacgacgaaggggactgtccgcgaggcagggcagcgggccaacttccgggcaacccgccaggtttttcgatgacgcaggaatgtctacttacggtcgaaggccaatgttggtg

SEQ ID NO: 4491 - DNA, 221 bp, Homo Sapiens
ggtccggcaaggtatgctgttactggaagacaccacggccatgaaagagtgggagggagatgcccatgatcttctgcaaccgagttctggacatagcgtaaccaggagccagaagagttgggaatctggtcaaataggtcattctccccgaaggagaagattggcaccagtggtgcccctgtgtgtcagggcgagcctgacgaagccctttcggttccgcg

SEQ ID NO: 4492 - DNA, 218 bp, Homo Sapiens; identical to SEQ ID NO: 522
  misc_feature (3)..(3): n is a, c, g, or t

SEQ ID NO: 4493 - DNA, 673 bp, Homo Sapiens
atgttgcaaacttagctgccgcacactacagtgataggaactgccaacagttttttgtcaaacccactacagtggatcccacaatgggctgagacctcgtctagagtcatcaggttttccaggatgtgcagatggcctggaaacttggccaagaggtagggatcagcactctttaataagctgtatatccaccaaatgctgtgacacaaggaatgggcctcaaaatgtttcaggccagcacagctttgtctttgcaagtcatttttcagtggcagttaaatattgtggcaaagccaaggtacagactcacgtgcattaaaatatgcttatgagtaataataccataagtatttccatgtgcattaggtgtcaagaacttcacacacatcatttcattcccttatcatggcactcagtctggtgggtattactgtatctgtttcacaataggaaacccagtatctgagatgttcagtgcctttcccagttacccagttggtaagtgggaaagtcaggacatgaattttcagtgattttattaaaaaggcaggatgatacagtgatttaaaggcctaattctagacccaggttgcttagattcagtcccagctctgccatactctgttagtataatttggcccaatcctgggatctctagagtcactgcagcatc

SEQ ID NO: 4494 - DNA, 555 bp, Homo Sapiens
ttactgactgacttgagatggagttcatcttgtggccaggctggagtgcaatggtgctatctccgctcactgcaacctccacctcccgagttcatgcgattctcctgcctcagcttcccaaagtgctgagattacagacgtgagccaccgcacctggcttttttttgtattttcactagagatggggttcaccattttggccaggccatctcgaactcctgacctcaggtgatccgcccacctcggcctcccgaagtgctgggattataggcgcgtgccaccatgcctggctaattttgttgtatttttattagagacagggtttcaccatgttggccaggctggtctggaactcctgacctcaagtgatctgcctgcctcggccttccagagtgttgggattacaggcgtgagccatccgtccggctggaatgctattcttaattgacctgcatttatttatttatttatttatttggcaagccttgaggaagggatttggggaatgaacaatggtacttgatcaaataatccttgtactaggcaatcaagctt

SEQ ID NO: 4495 - DNA, 608 bp, Homo Sapiens
ttgttcacaggatctttagctttggtcagacttggagcttaatgactgtcaagttccttccaaacctgagattctgtcactggtctggggagatactagtgcatgtctagatgtcctctttaacaacctcacctgtcactgccatggggctagtgcttgtccagcctgaataacagaggcagtgaggctaagcctacaaggtttggctcttattaccacacacgctgcaaaaacagacacttcattggctcacctccaccctattacagactgagtctgtcgtccacatttgggcctgccaggtacagaatcacaagcacctcctcttctatcactgccacagctccctcagccagatcctctgctctctcttctgcaggccttagaccacctggttcctagggtacactggcagagagcaacccagtaggctgctcagtgtcttgtccggttctgtggggccagggctaccagactttctaaagctctctaaaaagaggattcatgtactgcatgggtaaggtgcttgaaggctgagaaagcctgagcaaaacaagcatgattcttctgtactccagaaacccttaggctttgggtcttagtgtcag

SEQ ID NO: 4496 - DNA, 232 bp, Homo Sapiens
cctggttaagcgcagtgcagccttcaatctgtggctgaaggtcagagagaccgcatgaagtcactgttgcaagtcccagaattcaaaggccaaataacctggagtctgatgtccagtggaagggggagtggaagcaagcatctggcatgggaagaagaaagaaagaaaaccagaagactcataggcgggataagcaaacttatcccaccttttccacccgctttgctctagt

SEQ ID NO: 4497 - DNA, 318 bp, Homo Sapiens
gtaggatgtttgacagcatcccaggcctctaccccaatcatcgtgacaaccagaaatgtctgcagacttttgccacatgttccctggggtcacactcacccctggttgaaacactgctctaattccatcttcatggcatcgtcaggagatgacgtcacttgcctttacgctgatgtagaaaaccagaggctaatggtaacaaaaccggtaccggggaacatggggttttgaaaccacatttgttctgatccttgacaagactctgcctgatggctgagggggagacgggtcagggcaaccgctggcctacagcacatg

SEQ ID NO: 4498 - DNA, 443 bp, Homo Sapiens
agttgcactcgtaaaagaaagtaccatgtataatggttaaaaatgcaggctcggatcaggtgctggagtatcaatgcaggctatgctacttattcactgtgtgactttgggaaagttacttcgtctctcaatgcctcatttttctcagctgcaaaatgagaatgataaactacttacctcacatggtgactggaggatcaaatgaaataatggagggtaagaaggtagaatagtgtctggcatatagtggggtgctcacttgtagcgctagtagttagcaatgtgataattaccagcaggtacttttcatatgtttagcaatgacttagaaaggctagtggattttaatggaataaaagcgcaatacgtagctaatagtgaaggtggggtaatatgtttaggtagctgcaccagaactaagagcatgagaaagtgggaaaggg

SEQ ID NO: 4499 - DNA, 430 bp, Homo Sapiens
tcagcatgagtcagcggcacacaccctcaagtcatgagctggaacgctcagaaacggttcactgagttttttttctcctattattttcaaatttattagttttacttaattatttttaaagtatctgagaaaatgttatagattttaagcgcgtttttattataacttcatgtcaataatttctccacagatatgtaccttcaatcaaattacagaattaactaggggaaaatgaggaagaactttaggtacagacagcgagagatcttcaaaatactattaaaagaacaaagcactctcggtgtaaaaaagggtaggaaaatagagtatctgtgttgctatataataacatatttgtgtttgttaataatatagatatttgtgtctgcctaaagagacactggaaagatcaccaagaaaacatgtggcc

SEQ ID NO: 4500 - DNA, 483 bp, Homo Sapiens
gccttgatgtactgcggcgaaggggcgaggcctgaccctgagcatcaactactttggccttttttgcagctataagcagtgaagaccaaagtctaacctgctgaaacagcaaggggcaagacagcattgacttcaacaggccttttttgtaaagcaaaaggtaagatgacaagatccggtcttgtctgagaacagctgcacagaatacacattataaatgagcactttctactatctcaacaccctggtgaatgggtgtcagagaagtttctggacctgtcagggactcccagggcttatccagagggtcaaagtgttgtgcccactcactttttcttctttagcatactgcggagtgagacatgtgggaaaatcggatcccagagattacctaagcatcaacttctcaaagacggtttgattaagggaactacttcctgaaaaacgctataatttatgagggtattgagccttgaatttttc

SEQ ID NO: 4501 - DNA, 342 bp, Homo Sapiens
gcaccctactcctacccacagtcccttataattaaatcataatgagcttttaattatttgaatggaccatgttatttcttgtatttaggcttttgtaaatgctgttccctttgcctacaactgaaacttcctctcccactccaactgcacctagctaacttctaactagccctcagatctcagcttagagactccagcaagctttctgtaacacattcgtttcctttccctgtttagggaacctcttctctgtgctgtcatggcatttggcacagtttctggtaattgtttcggttatttatctgtattcaccaccagcggtaaaagcttgggtaccgagct

SEQ ID NO: 4502 - DNA, 564 bp, Homo Sapiens
ttccaatgaaagccctgacttagatggctagctccaactatgttgagttcagagacacatgagaaggcgtgcagtgtgatgggggctatgagaagtgaccacaatgaaacaatccaacatcagtgcatggatcttcacccatccacaatacccagaaaacaagatcaataagcattcggggcatagcaccaggtacggagctaagctaggtatgcattcaacgtctgaccccagaaaaagggatattgtaaattggtcctgaatccccagggcacagaccaccactggtccatagcctgttaggaaccgggccacagagcaagacctggtctctaaaacagtcaatttaaaaataataagattttaacattttgatccaatccttgatttttccttcaaaaaacccatatgcttttgatttgggaaaaaaatgtattataaaaaataagccaacttttcaaatgatgtgaatgggttcaggattcttaaagattactaaaactaatcaagcattaagatataacaatatacatctttcataacttgggtgaattttctcctact

SEQ ID NO: 4503 - DNA, 291 bp, Homo Sapiens
aggacccggaatgtgtggtgttatgcgtcaagctgacggaggactgttgtgctgctgctactgctggaatcaagtgacgatttggggttgttcccctccttagaaaatgctgaaactctggaatcaacctctactcaataaacccagaaaatcccagaaagcttttctaaaatcactgacccccgaaaatcacccctttgaggatctacgctattccccaaggctctgcactgccattgaatagaaccctccaaaactctactcgaaactctgccataacaccacacaatt

SEQ ID NO: 4504 - DNA, 565 bp, Homo Sapiens
  misc_feature (19)..(19): n is a, c, g, or t
ccatggctatccagaaaantatttacatatgtagtcaatagccatgtgttgttgtggagtataataatagattagcctcaagaaaactataaattaacaaactaagtgacctgctcagaatgacacagcccacacatggcagagctaagactggaactccagtcatcaactcctttgcacactcacacatttcacactttaacacactgtctccttcaggcatggagatttgagaagtcccacggatcagcatcaagaacagatttcaatctctacagagcgacagtatctccaggaatctttcaagattcaccaaacaaaattcatttccattcgtcttcatattccacgaaaacacaccaaagctgccttagggagagggtgtcgccccatcagaggtgtcaaggaccatgcaaggccaggggtcacactggcctcaaacaatgtttcagacaaaaacggctcccttgggaggctcccgaggctgtcatcgatttgctaaaggtcagtacggatcatttgggaatggctttgtgtaggcatggcctaagacacattggcttct

SEQ ID NO: 4505 - DNA, 255 bp, Homo Sapiens
  misc_feature (4)..(4): n is a, c, g, or t
  misc_feature (31)..(31): n is a, c, g, or t
  misc_feature (35)..(35): n is a, c, g, or t
  misc_feature (47)..(47): n is a, c, g, or t
  misc_feature (196)..(196): n is a, c, g, or t
gatncgagagacagtcaccatcttatagcancagncccataaccacnttaccatgcaggaagcagatgaacaaatgcttgggtttgttaaactccagtatctccccgatgtgggggctggccgagccaaggcacatttttacttctcagctgcgccaccaaataacttttcctttaagacctggctctggctctgntcctccttgatcttgcattttggggtctcacgaatttcagcttggacttaaccaggctg

SEQ ID NO: 4506 - DNA, 399 bp, Homo Sapiens
ctctagcaggatccccccacatttgcaggatgatgggtacctggatttaaacaggttctatgagatgaggagtgaagaggaaaatggatgctggcttaggaataggtgaaatatgattagctcctgtttctgacccaataagtgcaggatctcttgttaactgtaatatgctcatttttatcaatgataagaggactctttgtagtttctaatgtactgcttcgagtaggaattgtataaaaactgcatcttgatagctcatgttctatcttaatttgccaatcttctttcaccagtatcttggctgttcacataagtagtcttagactttacagaatcaggagaatgagttatttagggtttaacaacttcaggtgatgggctggattttatcttgtg

SEQ ID NO: 4507 - DNA, 210 bp, Homo Sapiens
ggcggattgaccccactgtaggcggattgaacccactgccaaggcggattgaaacgcgcactgtaagcggattgaaccgctcactgtcaagcggattgaaccgtcactgtaagcggattgaaactgtcactgtcaagcggattgcaaccggtcactgtcaagcggattgcaaccgctcactgtcaagcggattgcaaccgttcactgtca

SEQ ID NO: 4508 - DNA, 381 bp, Homo Sapiens
cgtgatggccgattcctagaggtatccccccatgggagcgatgaaagacttagagcaaggggcttgccaatcacggaatcgagataggaattccctgtagtcaggcaggcatgctgctctatagggcgtcggatgatttccgcgcgtgtatcaatttggtgcgtgccgaggtttatagcaccggggaagggcactctgcgttgatggcgccgctcagtttgatgaagtttctttcatctttttctttgtaggtgttttttaggatttttcctacgggtcatcaggatttggagctcatgagattacctgcgggttctttaggctatgcggcctgtttaattccaccgcgacgttcatcatgcttcgatcaattttttgtgt

SEQ ID NO: 4509 - DNA, 799 bp, Homo Sapiens
gcgcgggacttggtccttgggaggagctggatcggatcgttactccgggaagcactgttcaggactttttgaacctggccgacaaggtcgagcagcatcttggaatggtgttccacaggtatctagagggaacccgaccacgtctcagaattctgctcaacggacagccggtgaaaccctgggatcctttcatgacggaccatccggggaaaccctacaaccctcccgtattcaagcacccgacactcaaggggattgaagccgaatgtcatgttttaccgcacaaggacatgctttctggcgaggattttgaagtgcttggtggccctgaaggctggacggcccagcaggggttttatgtttatcgcaacgagcgccttctcgttgcaggcagttggctgggtctggggaccggtaggtcttggacaaaggacgaagctcaccgattggcaagaattcgtctggatatacccaactctgccgacgccgactggaagattgatatccgcaagtccacggccagaccccctgtctatcttcgagactggctgacccgtcttgccgaagctacgcgtggacgtgcgcgccgagcctttgctcacagaggccggccaccttgcttggaaataacaggtgccgaagccggaaggtgaggcaggaccactgggggatcctagagtcgactgagatgaagctgagggtgttttaaaaaaaaggggaggaggggggggggtatttttttattttgaattaaaaataataaaaaacgaattaaataaaaatatacatttaatgacat

SEQ ID NO: 4510 - DNA, 717 bp, Homo Sapiens
  misc_feature (717)..(717): n is a, c, g, or t
cttcacgcaggcactaaacgtcgaccgacattaccttcacttgaagccgagtttctcgcgctaagccacggtatcgaggtccgaccttcaaagcttgatgcgcttatgtggtaccaaatgatgtcggcgccaataatcgtgcatggcctgctgacccacgcaggactgaaagccgcctgagtatcaagattcagggcgccactacgacggccacgcccactcctgcaaaaactccatccgggccaagccggctaacccagggatctccggttatccctagcggggaataatgcaggctcagagcctcggctactacggccatgatgccgagcagtgctccagcgtcgcgccagaccaggctggatgcgtcattgtatttggcttgggtctttccaggttctgcgactagcaatagcttcgtagcactcgatgatggcaacgaagtttcgatttcagcagacagctcttcgaataatccccctgaaccaggaaaatcgataagagcatgacttcgagagtcgtatcggcaccattcaacttcgtctggaagctttagcaggacgtgaatggggtgaattgcgcctgcagacggtgcaggtctctgctcaagttcgaaacccaaagctgaaggcgctgtagcgagcgtgcgagcggaacgccgaagtagctcggaagatcatcctgtcacggggcaaggttttcggttcacggcgcctn

SEQ ID NO: 4511 - DNA, 519 bp, Homo Sapiens
agtttggaacagaagtttaataagcaaaagaagaaagctctccccagcagagaggggacccgaaagagggttgccaactaggaggctgaatctgggggttttgtgaactgggaagaggaagaatgtgctcactggtctgtgagctgtcttggagatagcacgacttcgcttggcccgggaccttagcctgggaccaatcagaggctgaagtgaaattttggcccaagaccaatcaggggctgaagtgaaagtttggcccaggaccaatcagaggctgaagtgatgattcatagaggctcggctcacagtccaaagcatgtccagaaaacaaagtggccgccggagcctgttagtccaagctgcaccgatttgtaagcccccaccctcgtgccgaattcttggcctcgagggccaaattccctatagtgagtcgtattaaattcgaaatcatgtcatagctggttcctgggtgaaatttgtatccgcttacaatttcacacaacataccagccggaagca

SEQ ID NO: 4512 - DNA, 395 bp, Homo Sapiens
gcctttttttttttttttttttggtttcaatgcatttttttattcaattcaaaagaatttaacaagttaacttttcctaaacaaaagttttcatgtgtattctaccatttttaggagctcagtaaatataaacattgtttcaatacaaaacctttaaaaataccttgaaaatgtttaaacagttgtattttgcatgtctttgtttgtaatcactgagcccatacaaatccttgcactactaacagtcacaagcttgaacctcttaaaaaatatcctcgatcaaagctttggaatccagtaaaaattaggaaacgagtgggcttcagaataccctgagcacaaactagtgcaacaccacatgttcgaacttctgtccacaaagaggggtgacagtg

SEQ ID NO: 4513 - DNA, 414 bp, Homo Sapiens
cagctcggtacctcttctcccctgacatgggattctgacgcacgagtccagatatctgtgaatgtgccccgccaacgaagtgcttcctcctccgcgcgatacgagctcaggcgttcgaggaaacccatgatcccatcctccttgcgatacggatgcacgccttcgcgtctgaagcggtgagtgacaggaggctttttctcatcctatgaacgagcggcttttccacatacccgtgccgtccagtttgggcgcgccctggccgcgaattccgccctcgcccatgggcatgcgaaaagccggtgggtttcaccaccggcctgcacggttgataggtcttcctcacgtggtgagcgatcacatcgacaagctcgtcatctcagcccacagctcgcgctcggctgtcaggggagaaga

SEQ ID NO: 4514 - DNA, 537 bp, Homo Sapiens
attccaagatatcattgattatatatatataatgtatctccaataagatacatgagaggtgtaataaaataatcaagcgttgagtcttggccttccacgctagactcaggcctcttcagaacagaaggattaagatggaaatggaatagaattcaaatgttaaaagaatgaagggtcaagagcgttggaatgaaggtaaatgggccacctgtagaagtctgaaagtgagctttggagggaagaaaagtaaatactgctttaacaagaagtcctggggaatctgaatgaattagatcctgatcatggatccataacatgtggatgtggagaattaatggtatctagggtccgtatctaactgatattcaagaagtatagttagatggccgggtgcagtggctcacgcctgtaatcccagcattttggaaggccgatgtgggcaggtcacttgaggtcaggagttcaagaacagcctctactaaaaacacacacaaaaaaatagccacgtgtagtggcacacgcttgcaatcccagcta

SEQ ID NO: 4515 - DNA, 260 bp, Homo Sapiens
  misc_feature (219)..(219): n is a, c, g, or t
agcagcgtcttggtcttgcggcgcggtcggtacttgtagtccggatactccttcatgtgcacggcgcgaagtcgcttggcctcgtcgatgaatggtcgcttctcggcgtcggtcagcagtttccagtcggcgcccaagcgcttgctgatctcagaattgtgcatcttggggttctccagggccattttgcgccgctgcccgcgggaccataccatgaangcgttcattgggccgtttcacacggtcctgggtctgtaccc

SEQ ID NO: 4516 - DNA, 498 bp, Homo Sapiens
gctacatgatcatctacaagtctgcaaggctgaccttcccgggctcccactgctccctgcttccagaacgtgacggctgctttgcaatagactgacccccctttgtggccaggggagccatctttctgctcattccaggcctcccttactacagaggcacagagcaaaggcagcacacatcacgggggctctgtcatctgcttcctttgagtagataatcagttttcactcagaggaagatcacaggacacggaagaaccaaatgtgtatgctggctcagataccaggggccctattaagagatagcataatgggaaagataagtaggttgttttccccccacaaagtatctatttctaagctatgtttcaacagtgcgctgcagcagtttctggcttcctattcaagggaagagaaacagggttttgctcagatggatatactagatacggttatctcacttggcccctgcagatagagatggtaaattcctaatga

SEQ ID NO: 4517 - DNA, 237 bp, Homo Sapiens
ccggtcctcaagcgtgtacccaataacacaatttttggaaaacacaaaatctatctagtagatatggacatgctggaccagcctgacaaggctgcaccaccagcactgcctgtggtctcatccttgggcaagacctgctaggctaccaggacagggttgactgtagatagagacaattgagaacttcccagatgccaggactacagtctgaactgccttgggtactacgctttggca

SEQ ID NO: 4518 - DNA, 267 bp, Homo Sapiens
tggatccccgtgatcttatcgcccaacacagaaacattccaagcctgtgataaactctctttctcctaaaaccaataaaaactcttagtccataggagcaagcactcctaaccaaaaaaaaaaaaaaaattgtccagaagcccctctcaggtttattctccaaaataaacttgtctttgactgtggagccacttttcatgtttcttttctctttctttacttctaacatttggggctgaaacctgggatgggtgttggggataacat

SEQ ID NO: 4519 - DNA, 440 bp, Homo Sapiens
ctataatgtggcatgattgtagatcactcatctccacttcttataccaccttagttccctccctctcttctcttccctctttttctcattaccacctctagagagcagtgaaattcctagattgatatgtaagttgcttgtttctaaggtgacttatagcattaaagaatcttctgtgctatggaaaaatttcattccccttccatttagtgtctttgctgaaataatgttttggcatctgtatctttccctcaattcccttgagcatttatgttcttgttcacctggctgatttctaaaaatataatatgcttactcagatattttatctttatgctctgaaaaatggtgccgaattagacacaaagtgacctactatcccatctgtcaaaatcactcacacaacatcaatgaccaacaatttattggggtaccgagct

SEQ ID NO: 4520 - DNA, 652 bp, Homo Sapiens
caggatctttttcccctcaacctccgttgtcaccaccaccgtcttctccacatcttcccccatgtcatccccaaagcaacaggaacagttccaaaaacaacccaccaaaggactctatttttgagttatctccccttgtggatctcagtgtttcctccaggtgtgttcacccagagcagctctctaggatctgagacagattccagcccaggccatgtaaagactttagatcctagcctaggttacacgtgtatacccggaatggatatgtacctgactgttgtagactttgaacagtagtcaggcttccaaggtgaaaccacagaagtccaacacacatgacctcatttctcacacttggataaacaagactagagtccacttaaaagcattcacgatcactgtatcttactgcatctcacgtgggccactgtcttcactggagaacatcatcatactgggcagccagagaagttcttcaagtcatttccccgacaagcagctttggaaacacctgaaaatttgcaacaaagcagaccagactgctgagtgagtaacatgaaggagaggccagcaacccgttatcctaagccctccggtggttctggtcattctacgtgcagcagctctgcgtactgagccgtattacctg

SEQ ID NO: 4521 - DNA, 654 bp, Homo Sapiens
tcagattaccccgactagtccaaccctacaggttaatttttaatagtttttctgtagagatgggatctcactatgttgccagtgtgatcttgaactcctgagctcgagtgatcctccctcttggctcccaaaatgctgggattacaggcctgagccaccatgcccagccgtgactcactcttaaaggagctcaagtcttttgtgttggaactccaggaggttgacgaccacactcatctattcagtcagtatttgctaggtacctagcacacgcccagctctggggaggtatggggatataaaaatgaaggtgatttgattcttcccccgtgcaggttaggacctggaaaggatggtgtgtgaagtgaatgctaggtttgctggtggctgaaaggaaggaacgttgtcatctttgtcatatgttagggattgccagacccaccagttgactatattcaaataaaggaacacagaatttggagtgatcacagggcagggagatttgtctgggaagatatcttaggactcgtgaatttttgcagatctaataattatagagaaaatgagtaggtggtaggaagaccaggtactatactacagaggtgagagaatggattgatggtggactagtcgggtccgagtcgatcgaatctg

SEQ ID NO: 4522 - DNA, 424 bp, Homo Sapiens
ttgtgtccatgctggcaagtggcctaataaattgtccttttatttggtggtcctcagagtggcagttaacatcttgctattctgccttgtggacttgaggtggaaaggttcatggaattatatccttgcttttggatgtgcaaactgaggctcagagagtttaagacacatagtcactttcaccaattaaatgatgaagctgccatgtaaacgtatttcatcacactcccgagaccttcttctccagtagtgttttcaagctttttgagcatgcagacactaccatcaaaaaattatgtagagacatacttgagagttacagtttaaagaaaaacaaggtgtaattatttggttattagtagcatttacatatgcttgaaaacttctgctatatatacagtaagattaatttattctaacaatg

SEQ ID NO: 4523 - DNA, 546 bp, Homo Sapiens
cccctgtcggagtgcttgtgcaggagttccaggttgcagtgactgataatcatgtcactgcactacagcctgggtggcaaagcgagactccgtctttaaaacaaaaataaacaaataaatgatatacaagtatgtagcgcatgcattctcaacaggggtggtggtgtcccaaagaggtgaaaagtgtttcttgtggtggtttctaccaatggtgaaaaaaatcttaagacaatacaaaaacttgggaccctccaaagctcaactctacccaacaaaatcttattcctttgtactaaatctagcaagggataggaggtaactaggaacaatgtctaaaacaactcttggagaaggtgatcatgaaaacaaggttaagaaacgctgagataacactaaaatgtacaagtctctccccccacaaatcacactccattcccagagggaagggcctatccttcagccaattattcttccagcccacaggcacacatatcacatatcactattaatcatatatccaagagctctggactaagaccaccttca

SEQ ID NO: 4524 - DNA, 611 bp, Homo Sapiens
caggatctccggcgagatgacgaacaaggggatactgagcgaagaaggtttgtggaaagggagggaaataattacctgacaggaagaactctcacagagattttcttcatagtgtgtggaaacacaggtagatgcaggtgagtcataccgaaccataatagttcaaggggcatgaatcaagcctttcatttagataccataaatgactaaatgtggttatgagtgtgccctgcaaattgaaggtgtttggccaatgtgggtgacagcgatgcctgccaagtcacattcatgaggacaataggtgttttacccattataacatgtgtaactgtgatgaaaacatgaaagacactgctaaccctgagctcccacaggtaaatcatcctagcttactttccctatgactggttaggccaagtggatcgacccagtttcctttctgcattggctggaaggatgtttttttttttcccgggaactagtctaaaaagttaattgggacaggatcggtctatagtactggagggctgacggcctgggtctaagggagactttataaaaagaagtcatatgtcacctttggtaaatcctagccatcagtggcggggcat

SEQ ID NO: 4525 - DNA, 683 bp, Homo Sapiens
gatctagaggatcccgtcccactgtacgatcaggatggagtgcaatggcgcgatctcggatcactgcaacctccgcctcccgggttctagcaattctctttcctcagcctcccgagtagctgggcttacaggcgcccgccagcacatctggctaatttttgtatttttagtagagacagggtttcaccactgttggtcatggctggtctcaaactcctgcaactcagagtgacccaccgcgtctcagcctccctaaaacatgcagggattacaggcatgcagccacgtgcctggacggagttggggtttaaaggttaaattagcaaatcagctagtttcactatgagaagtcgggaagagcattcaggcaaagagagtgggcagagcagagcagggagcacccgccttttagtaacgccgggttaaagggtgcgtatgaggaagtgaaggcagtgagagcagctcgtgggagccagattgtgaagagctttgtgtgccagaccaggcagttggaattttggcctaaacggctcacagtagtagctctagacctctctttagtcacaaaggcctttacaaatctattgaaaaatgacaagccctctctccaccaaacttgttgtgcaatatgagaattctttgaccctgtggagcccatctaggactccaggttaaaagccctc

SEQ ID NO: 4526 - DNA, 251 bp, Homo Sapiens
  misc_feature (52)..(52): n is a, c, g, or t
  misc_feature (159)..(159): n is a, c, g, or t
  misc_feature (242)..(242): n is a, c, g, or t
attatgtgtcccaggtcatgtcccaggtcatggagaagcccgtgccacagtnaccctccccatactcctgggggggctgctctccatcctggatcgtaaggaggcatcatcaggctgtgttcctggaaccccaataaccctgggcccacagggccagcntgttgtagagggaggctatctgaccgccggtctggcagaggagatgggtgggcagctcccagacaccccaaaggacccggttntttttccag

SEQ ID NO: 4527 - DNA, 464 bp, Homo Sapiens
cggccgccaactttttcttttcatagagcagtttggaaacactctgtttgtaatgtctgcaagtggatatatggacggcattgaggccttcgttggaaacgggatttcttcatttcatgctagacagaagaattctcagtaacttctttgtgctgtgtgtattcaactcacagagtggaacgtccctttgcacagagcagatttgaaacactctttttgtggagtttgcaagtggagatttcaagcgatttgatgccaacagtagaaaaggaagtatcttcaaataaaaactagacagaatcattctcagaaactactttgtgatgtgtgccttcaactcaccgagtttaacctttcttttctgagagcagcttagaaacactctgcttgttatgtctgcaagttgatatttggacctctttgaggccttcgttgcaaacggggtttcttcctttaatgctaga

SEQ ID NO: 4528 - DNA, 919 bp, Homo Sapiens
cgctcgcctccctcgctccacgcgcgcccggacgcggcggccaggcttgcgcgtggttcccctcccggtgggcggattcctgggcaagatgaagtgggtgtgggcgctcttgctgttggcggcgtgggcagcggccgagcgcgactgccgagtgagcagcttccgagtcaaggagaacttcgacaaggctcgcttctctgggacctggtacgccatggccaagaaggaccccgagggcctctttctgcaggacaacatcgtcgcggagttctcggtggacgagaccggccagatgagcgccacagccaagggccgagtccgtcttttgaataactgggacgtgtgcgcagacatggtgggcaccttcacagacaccgaggaccctgccaagttcaagatgaagtactggggcgtagcctcctttctgcagaaaggaaatgatgaccactggatcgtcgacacagactacgacacgtatgccgtacagtactcctgccgcctcctgaacctcgatggcacctgtgctgacagctactccttcgtgttttcccgggaccccaacggcctgcccccagaagcgcagaagattgtaaggcagcggcaggaggagctgtgcctggccaggcagtacaggctgatcgtccacaacggttactgcgatggcagatcagaaagaaaccttttgtagcaatatcaagaatctagtttcatctgagaacttctgattagctctcagtcttcagctctatttatcttaggagtttaatttgcccttctctccccatcttccctcagttcccataaaaccttcattacacataaagatacacgtgggggtcagtgaatctgcttgcctttcctgaaagtttctggggcttaagattccagactctgattcattaaactatagtcacccgtg

SEQ ID NO: 4529 - DNA, 364 bp, Homo Sapiens; identical to SEQ ID NO: 959
  misc_feature (39)..(39): n is a, c, g, or t
  misc_feature (253)..(253): n is a, c, g, or t

SEQ ID NO: 4530 - DNA, 601 bp, Homo Sapiens
  misc_feature (601)..(601): n is a, c, g, or t
ctgctcccacctcagtgttgtcccagtcaggagccttggtccgcatgcaggctgtcccatacacggctggtatgaaggatctgctcagcgtcttccaggcctaccagctacccgctgatgactacaccagtctgatgcctgttggtgacccacctcgcactgtgttacaagcccccaaggaatgggtgtgtttgtaggagagaaagccaggaggtaagagccagctgatatcctcggcgaacatgtctctcctgagtccagaagaccagcaccctcaacctggtagcttctttctggcttgtcaaagctctcagaaggtacctagaggagcccaagccccagctccatcctccacttattctgcctgtttcccccaaagacaatggctggaccctgcatgcagggctgggggtggaatggggctaaccagctcctgatggcctgagccaggcatcttgactggcacctggagagcccttaagtctgtcctggctgtggcccatgccgacagatatcgtggggctgacaggtccacggcaggcttgctttcttttataaaatggaagctctggtaccttcattgtatgactcctgggagaan

SEQ ID NO: 4531 - DNA, 395 bp, Homo Sapiens
atatttatcacatgcacatgcctttatatagctggtctccttgggtggtttatgtgtgttttgtttatttattgaatatgttttcccttgctttaggggttttataggtcatttttcttaatagaagctgtgatcgacttagaatccaaatttgaggagtaagcagcataaccttctaccttgtaatatgtaactattctaatccagtggaatcttacggaaaacacagagaaaaccccttttatcatttgccacagaaggctgctgtctcccttctggatttgggtggggcaggtattgtttttgagccagtatttaacagagttttttaatctataaggattttttttggaatctatttccattgtgtttgtttttccaagttggggacaatc

SEQ ID NO: 4532 - DNA, 572 bp, Homo Sapiens
  misc_feature (350)..(350): n is a, c, g, or t
  misc_feature (399)..(399): n is a, c, g, or t
  misc_feature (506)..(506): n is a, c, g, or t
attgtcaagctttagggcaaggctgctacttgggaaatcaagacaataaaaaaatgaaacaaaactctaaagcaggaaaaaatcccagggagcagccagctaaaggggaagtcctgagcacaagttacggctgtgaatttttaaaggcaaaagtgaagtccctggatgtggtaacctgcgtcctgaccatctgccataacatttgctagtctgaatcacttcagggcctattcctgttgggtacctgatggtagaggatgagaaaaccgtgttttctctcctttgtctttaggggtgtggcctgttcagcaccagctctgaaaagcaggaggggaaatttaaaacaaatncagcagacctgttacctgactgggttcactaggacaggatatcactttnaaggaaacgggaatcttggtaagcttagaacattttctcattcccctgtgacagtcaattttggaggaccaaataagaaaggaagctggcagttattttggaagganggtttaagatggaggtaggaaagatggagagaaggacattcttggcttgcacagatggcagaaagt

SEQ ID NO: 4533 - DNA, 401 bp, Homo Sapiens
gcggccgccctggaagtgaacgctgcagagacggtggcctgtggtgggctggaaggtggagaagcacccactgacgccggcacgcgacacgttcttgagccagaggcgccgcaactcagcgtcctttggaaacgtgtagaagtgcagcgccttgtcccggtgcgagttgttgtagcagcctggcacgcagcacgtaaagccaggcatggctgcgccgcgcggcccggcccggcccaccggcctcctgcgctcttcgacggcccagtggctacgccgccgcccgcccctcgacgggcggcgccgcgcgaggccttgggtggtatcccaccactgccgctcggcgcagccggcccgcccggcgccccgtgcccagaatacgcttcctgccggcccgcgccgcg

SEQ ID NO: 4534 - DNA, 428 bp, Homo Sapiens
  misc_feature (400)..(400): n is a, c, g, or t
  misc_feature (414)..(414): n is a, c, g, or t
aaataaaaagtagggaagagcttctccatgggatcagatcacagctttggggagtgggatggggcctctatgctttgatctatgcatgagctggggtgagaagttcccacctgcacctgactgcaatgactgtaatggctggaattgtcacctcttctccctgataggctcttcctcacctggaggatcggggctggtgggagggcagggaaggggaggccatcagccagaatgtattttctttcagttccatttcctgaggaagaacttgcttttaaaggaggaaagggacagaatcagacctaaataaaattcctgagtatgcaatatttctctttagtgtctcttgcacctccctttctggagtttcttttcctacatcctggcttctttcattttncccaatggccccantataatcatgggtt

SEQ ID NO: 4535 - DNA, 703 bp, Homo Sapiens
aagcttgcggccgccgcatcctcagccaccgtcgcagctgcctccgccaccaccgccgcctcctcttccttggccaccccagaactgggcagcagcctcaagaagaagaagcggctctcccagtcagatgaggatgtcattaggctaataggacagcacttgaatggcttagggctcaaccagactgttgatctcctcatgcaagagtcaggatgtcgtttagaacatccttctgctaccaaattccgaaatcatgtcatggaaggagactgggataaggcagaaaatgacctgaatgaactaaagcctttagtgcattctcctcatgctattgtggtaagaggcgcacttgaaatctctcaaacgttgttgggaataattgtgaggatgaagtttttgctgctgcagcagaagtacctagaatacctggaggatggcaaggtcctggaggcacttcaagttctacgctgtgaattgacgccgctgaaatacaatacagagcgcattcatgttcttagtgggtatctgatgtgtagccatgcagaagacctacgtgcaaaagcagaatgggaggcaaagggacagctttccgatctaaactattggataacttcagacctattaccaccttcaggatgcttccccctcgggccgaatcttgggcttgagggccaaatccctattgggggcggtttaaatcgga

SEQ ID NO: 4536 - DNA, 188 bp, Homo Sapiens
  misc_feature (163)..(163): n is a, c, g, or t
gtcgtctgataaggggaagctgtgacgcagacacgcacagtaatacacagatggaggctcaaaagacacgagtttcgcgtcctgaaattccgcttccagggccaagctttcttttctgatactgtttgtccctcgcgaggcaccgttgggtcgcgcagtaggngtgactaggggcgggaagtggggcg

SEQ ID NO: 4537 - DNA, 362 bp, Homo Sapiens
gaccagctccattgctctctggatatcccgcaacttctgcattggaacactgggattctacgacagcaaagacagacacagaatatgagagagcggctgctgatgttaaacttgagcagacgcacgtgcatctgcctcagagactacaatacctaaacactaacaatcctcctccaagcccagtcaaggccatgggcttgtgtgttacacatgaaaatagaagcaaaccctctgttaaaggtaacaacagttgtctagttttattggggctctggcagtttggggaatctaaattgaagcacgctttgcttcagttcccatccatctacaaatggtccccggcattactcctctgggggaga

SEQ ID NO: 4538 - DNA, 352 bp, Homo Sapiens
attcggccagagggggtttcttgactaccatttccactgactttaggaacattttatggtttctatataaaggactgacttatcaataagccacattttccccttcctggaaatatccttgagtctgtaggatttctctcctccacccaccccccacaccaagtttcattaatatgaataactttccatgtttcttgtgttcacagaatggcctgggaatttttagttgagccaaaaagatgaatgagctgtgccattacaaaccttgttggttatgtgactgctccacagctctaaattcacactcatgtaggtggaagatagcggagaagtaagttattaaaggtgtggt

SEQ ID NO: 4539 - DNA, 468 bp, Homo Sapiens
gagtgtgcttgagaaacaaactgcacccactgaactccgcagctagcatccaaatcagcccttgagattcgatgccttggagactcaggagttttgagagcaaaatgacaacacccagaaattcagtaaatgggactttcccggcagagccaatgaaaggccctattgctatgcaatctggtccaaaaccactcttcaggaggatgtcttcactggtgggccccacgcaaagcttcttcatgagggaatctaagactttgggggctgtccagattatgaatgggctcttccacattgccctggggggtcttctgatgatcccagcagggatctatgcacccatctgtgtgactgtgtggtaccctctctggggaggcattatgtatattatttccggatccctcctggccgcgccggtgaaatactccaggaagtgtttggcccccggactattgttatgaattcttt

SEQ ID NO: 4540 - DNA, 502 bp, Homo Sapiens
gtgggagcctctgtaagatttctacctttaccacacagccctccgtgtgcatggatccttcttcagtgggtaacactttgagggcagtggctatttttttcctaaactttataatcttcctaggacctcacagaatatacctcttattcaaattatgcaattaatctgaacacatctggacaaatggactagatcagtctgaattcacggaaattctggagtctagggtaaatttttttaaatgcagttatattctttcctagggtatatatcctagataagctaactaaacattagcaagtggagccgtttcttgatttaattcaatgaatgggtaataagcgctttagtttagataaaagttacttaaaagtaaaatggatgactaaatgtaatggggtaatctagatgagatcttgaatgagaaaggacattcttagataaaaacaaagaaaatgtaagtaaagtacgaactttagcttataattatattatcagtatt

SEQ ID NO: 4541 - DNA, 482 bp, Homo Sapiens
aacttgctatatacctgttcagcagataaaactgttcgggtttataatctggtgagtcggaaatgtattggtgtctttgagggtcatacctccaaagttaactgcctcctggttactcagacctccgggaagaatgctgccctttacaccgggtccagtgaccataccatccgctgctataatgttaagagccgagagtgtgtggagcagttacagctggaagaccgggtcctctgcctccacagtagatggcgaatcctctatgcgggactggcaaatggcactgtggtcaccttcaacataaagaacaacaaacgacttgagatctttgaatgccatggccctcgggcagtcagctgtcttgctacagctcaggaaggtgcccgaaaactgctggtcgtggggtcttatgactgcacaattagtgtacgcgatgcccggaatggactgctcctcagaactctggagggccatagcaaaac

SEQ ID NO: 4542 - DNA, 328 bp, Homo Sapiens
ccaatctgaagtgggagcggcgccattttttttttttttttttctccagttttggaggagaactggaagggagtaaaaagacctgtccacagcacaaacttccactctggctgtgaaggactagccaattgctaaatgtttcatcacggaggtgctcgatcatattatataaaacactgcaacctccttttcattacatccttcatatattatggatccatcatacattttaaacaaattagatgaaaacagctagaaaaagtaaacagaagtttttgagggacagggccatgagagagcagaaacccagggagcaattttaaattaa

SEQ ID NO: 4543 - DNA, 450 bp, Homo Sapiens
  misc_feature (4)..(4): n is a, c, g, or t
  misc_feature (6)..(6): n is a, c, g, or t
  misc_feature (10)..(10): n is a, c, g, or t
  misc_feature (69)..(69): n is a, c, g, or t
  misc_feature (235)..(235): n is a, c, g, or t
  misc_feature (284)..(284): n is a, c, g, or t
  misc_feature (383)..(383): n is a, c, g, or t
  misc_feature (390)..(390): n is a, c, g, or t
  misc_feature (414)..(414): n is a, c, g, or t
ttantnggtnggcgtggggacaggagaacggggagggaagggagctggcacaggcccggagaaggcaangaccctgtgcagcggggacagaggctgacaacctgtcggagagaatgagcaacgggacccactccactggcacgggctggccgcagacgcagctagaacgtgccgctgtctcctcaggacgctgcttgcagtaagatgggctggggaggggcgcggggagggtctnttgcagcaggctggcatcaagaaggcaaaagccagagcaggacgtggtntgcggccgggtagagcaatatacactatgtacagactctgcgaatcagtccgctcggcggcaagcgtccttcgccagggtccagggcgcctttgcccgnggagganggggcaccagttagggaaagggcnggcttgtccaacaacttttttggcacttcgaggaag

SEQ ID NO: 4544 - DNA, 1496 bp, Homo Sapiens
aaattaccgtggagacacctgcaaaagcgggcccaggatgctgtgatcatcctggggggaggaggacttctcttcgcctcctacctgatggccacgggagatgagcgtttctatgctgaacacctgatgccgactctgcaggggctgctggacccggagtcagcccacagactggctgttcgcttcacctccctggggctccttccacgggccagatttcaagactctgacatgctggaagtgagagttctgggccataaattccgaaatccagtaggaattgctgcaggatttgacaagcatggggaagccgtggacggactttataagatgggctttggttttgttgagataggaagtgtgactccaaaacctcaggaaggaaaccctagacccagagtcttccgcctccctgaggaccaagctgtcattaacaggtatggatttaacagtcacgggctttcagtggtggaacacaggttacgggccagacagcagaagcaggccaagctcacagaagatggactgcctctgggggtcaacttggggaagaacaagacctcagtggacgccgcggaggactacgcagaaggggtgcgcgtactgggccccctggccgactacctggtggtgaatgtgtccagccccaacactgccgggctgcggagccttcagggaaaggccgagctgcgccgcctgctgaccaaggtgctgcaggagagggatggcttgcggagagtgcacaggccggcagtcctggtgaagatcgctcctgacctcaccagccaggataaggaggacattgccagtgtggtcaaagagttgggcatcgatgggctgattgttacgaacaccaccgtgagtcgccctgcgggcctccagggtgccctgcgctctgaaacaggagggctgagtgggaagcccctccgggatttatcaactcaaaccattcgggagatgtatgcactcacccaaggccgagttcccataattggggttggtggtgtgagcagcgggcaggacgcgctggagaagatccgggcaggggcctccctggtgcagctgtacacggccctcaccttctgggggccacccgttgtgggcaaagtcaagcgggaactggaggcccttctgaaagagcagggctttggcggagtcacagatgccattggagcagatcatcggaggtgaggacagcgtctgacgggaagcctgatctggaaccttcccaaggactcaggcaagcctttgtggctggatcatgagaggagggactccatcttgagccatgtcccccagcctggcatgcgtgcactgtaaacgccaatcggggggtcaccaggatcaaccgcaggctttcttcagtcccttggtcagaccataaactgcatttttgattctttgtggattcaaaccctaggatccatcagtcttgcaaggacattgaatattaggaggaaaaagtcatggaaaaaataaagccatttagaacctgg

SEQ ID NO: 4545 - DNA, 1875 bp, Homo Sapiens
ccgcgcatctgttacttgtagcagtgactatatttaaatcggggaggatggtgtggagggggcggggaggagaggagaatttttccaaaatctgacggaaagaaaagaaacaaatggttcagatgggacggagggtgggggagggggggagggtgagtaggaaccaggagggctgcctggggtgggggaataaattaaaaaaaggaacgagttaacaacagcaccaggaaagttacttcagtcaaaagacgcttttgaaaagaatatttctccgtacaaaatgagaaattaaacgaacgtaaagtcccccaaaccaaagtttgtgatgtgggatggttggctcggatcccgaggtgggtgggcctatgaggtggttgctaagtcgacgcaagggcggcgggggtggtctcagggatggacaaggggatggagtagagtatgtacagcccccggggctcacaggggagggggacggcggaggccaccgcgaattcgccgtccccccccatcgccccgtcacacagccgagtcaccttttccctttctacactccacactctcagtcccccaccccgcccctttccaagcgtgtcccgggccgcagcgcagaaaccgcaccatctccacccccacattctcctcgcgggaagcgcagcagtgcctccaagggttcttaaagcagagatgaataatacggcagctagtccaatgtctactgcaacttcaagtagtggaaggagtacagggaagtctataagctttgcaacagaattacagagtatgatgtattctttaggtgatgctagaagcctcttcatgagaacagcagttttggtagaagatgtggtacacactcagttaattaatctgttacagcaagctgctgaagtttctcagctgcggggagcaagggtaatcactcctgaagatcttctgtttttgatgcgcaaagataagaaaaaacttagaagactgctaaaatacatgtttatccgagactacaaatcaaagattgtcaaaggcatcgatgaggatgatcttctcgaagacaaattgagtggcagcaataatgcgaacaaaagacaaaagattgctcaggacttcctcaactctattgaccagacaggagaacttttagcaatgtttgaagatgacgaaattgatgaagttaaacaagaaagaatggagagagcagaaagacacaactcgattatggattcagctcaatatgcagaattctgtgaaagtcgacaattaagtttctccaaaaaagcttccaaatttcgagactggttggactgcagcagtatggagataaaacccaatgttgtcgcaatggaaatcttagcatatttagcgtatgaaactgtggcacagttagtggatctggctcttcttgtgaggcaagacatggtaaccaaggcaggggaccccttcagccatgccatttctgcaaccttcattcagtatcacaactctgctgagagcactgcagcctgtggtgttgaggctcacagcgatgccatccagccctgccacatcagagaggccattcgacgctacagccacaggattggcccactttccccattcacaaatgcctaccgcaggaatgggatggcttttctagcctgctgatgtgacaactgtgatgtgcctgcaacaacaggaaaggcaatgttatattaaggagtaaaccaagccaattcagcacttcctgtttacttccttgtcatatgtaccatagatggtgacagacctgctctcaaaacaagcttccttcgtttaattctgcattttctgcttaggcaaccaccctatcaatatacttgaacaatgaaacaatttggctacggaagcactgtctctgaattc

SEQ ID NO: 4546 - DNA, 639 bp, Homo Sapiens
gagggagacggtgcgcctggagctggtgcttaaggaccccaccgacgagagctgcgtggagttcagttacccggagctgctgctgtgcggagaacaacggaagaagctcattcacacagaagacccatttaatgatgaacatcaggagaggcaagaggtggaaatgttggctaagaagtttgaaatgaaatatggtgggaaaccccgtaaacaccggaaggatcggctacaagatttaattgatataggctttggctatgatgagacagatccatttattgataactcagaggcttatgatgaattagttcccgcttctctaacaacaaaatatggaggcttttatatcaacactggcactctacagtttcgccaagcttcagatactgaagaagatgatattacagacaaccaaaagcacaagccacccaaggtccccaaaataaaagaagatgatattgagatgaagaagcggaagcggaaagaggaaggggaaaaggagaagaagccaaggaaaaaagttcccaaacaactgggagttgtggctctaaattcacacaagtctgaaaataataaataaaaccttttgccgaattcttggccctgaagggccaaattgcctaatagtgagtcgtatta

SEQ ID NO: 4547 - DNA, 509 bp, Homo Sapiens
tttttcacatgtagaaaagaggctttattaagaaggctttgaagtcaaaaaataaaactcttgatacaatttttttaacccttaaatcagctcagcaaatatataatcagtaatttagctgtgtaagattaaaggtccattactttatttaaaataaaatatattttagttcttaaaatttattccataaagtacatatttccctataaattccctacatatacacaagaggtaaaaagtaaaagtaaaaaaaaaaagcaaaattaaaaaaattttaaaaatgacaacagaaaccgcagtaaaaaggggattaattatttaccggaaagttagaaatttggttggaaggccctgcgcccccgcccccctgcccccctccggccgcgcacggttggatgtacaaaagcataaatggttagccccaaaaagggagtaaaaatgtcaccctcctcctctggaacgtctgtgcggcctgagaccggccggcgagaaaagtcaaatcagaaaac

SEQ ID NO: 4548 - DNA, 676 bp, Homo Sapiens
ctacacgatctcatcacctattcttctagatcatctttaagaaatataatcactttatcttctggtaagtactcagggtcccacaggagctgatcatcattttcatatactttttcattttctttgtatctacaaatgccaactggaatttctgcttgaaacatggagcccaccataatctcctttttccagtcttctgatggaatataatcttcatcttcttcagattcttcttctacttcactatttgtatcaaaatatttacatcgacgtgggcggattatttcctgggcatcttgagaagcaacagattgtgatggatcatcattggaagactgagtttcatcctcctgacctgatgaatcctttatattctcctctttattttccccactacagccactgttgtcatcattatcagcatcttcatcatcttcaccttcttcttcctcttcttcctcttcctcatcttcttcaggtagtcgaacagtactaccataaccataaaggctgagaagttcatgaattggcatgtcgccttcccttgcaagatcttctatttcagagctgaagtttgtttctccttccatcatttcttcctcttctaatgttcgttcatcatcaaaatcatgaaccagcatgtcagctgatggatcaaattcatggcatctgatgg

SEQ ID NO: 4549 - DNA, 971 bp, Homo Sapiens
cggctgcagctcgggcggcggccgcgggggacaaagggcgggcggatcggcggggagggggcggggcgcggccaggccaagcccgggggctccgcaatgctgcagctgcccccgggcgcccccgccgccgccctcgccgcggagccgcgcggagcggacgccggcgagctaacccgagccagccggcgggcgtccccggaggcggtggcgcagggaggggcccgacgctcgcacgtggccccggcggccgccatggcggacagcggcaccgcggggggcgcggcgttggcggccccggcccccgggccgggcagtggcggcccaggaccacgcgtctactttcagagcccccccggggccgcaggagagggcccgggcggggcggacgatgagggcccagtgaggcgccaagggaaggtcaccgtcaagtatgaccgcaaggagctacggaagcgcctcaacctagaggagtggatcctggagcagctcacgcgcctctacgactgccaggaagaggagatcccagaactggagattgacgtggatgagctcctggacatggagagtgacgatgcccgggctgccagggtcaaggagctgctggttgactgttacaaacccacagaggccttcatttctggcctgctggacaagatccggggcatgcagaagctgagcacaccccagaagaagtgagggatccccgacccaggagaacggtggctcccacaggacaatcgctgccccccaacctcgtagcaacagcaataccgggggaccctgcggccaggcctggtgccatgagcagggctcctcgtgcccctggcccaggggtctcttcccctgccccctcagttttccacttttggggttttttattgttattaaactgatgggactttttgtgtttttatattgactctgcggcgcgggccctttaataaagctaggatacgcctttggtgcagcta

SEQ ID NO: 4550 - DNA, 636 bp, Homo Sapiens
cgttgcgcgactgctcaccgtgtgatccggtctggcataagcacctgtgcgagagataacccaagagaaatggaagcctcagggatataccaccagatgaactgacggcaaggtggaggttttcgcattcccatggcaggtttccttatcagcccccatctcccaccacatcagaagaggagtaaatagatctttcctgatttcaggcccagaactaggctcaagaagaaagaagtgtactctcacgactggctaagacttgctggactgacacctatggctggaagatgacttgtattgctccatgtctcctcattcctacacctattttctgctgcaggatgaggctagggttagcattctagacacccagttgagctcaggcgtagagaagaggaggatgggataagaactggggccatccccatgtcatggtgggtgagagctggggccatccccgtggtcatggagggtgagagctgggggttatccccatggtcatggagggtgagggctggtcgggggaggcatccccaagtcatggtgggtgagagctcggagcatcccatgtcatggtgggtgagatctggggtaccctgtgtctgtggggccagtcgcgcagcgggtacgagctca
